United States Patent Application Publication US 2014/0004565 A1 - sequence listing, part 3

SEQ ID NO: 2033 - DNA, 2066 bp, Cricetulus griseus
gcgcaatggaggagctcgattgcgagcccgcaataacttggattccaggcgtgaattccaaaaagaagcaaatgtgttttgactggggtcccggggagatgctcctgtgtgaaacttccttcagcaaaaaagtagacacatccgagaaggtgccgagctgcccctttatctacatcgtacggaaagatgtagatgtttactctcagattttgagaaaactcttcaatgaatcccatggaatcttcattggcctgcaaagaattgaggaggaattgaccggaaaatccaggaaagctcaaattggttcgagtgagtaagaattaccgatcagtcatacgggcctgtatggaagaaatgcaccaggttgcaattgctgctaaagatccagccagtggtcggcagttcagcagccaggtttccattttgtcagccatggagctcatttggaacctgtgtgagatcctttttattgaagtagccccagctggtcctctcctcctccatcttcttgactgggtccgactgcacgtgtgtgaggtagacagtttatcggcagatgttctgggcagtgagaacccaagcaaacatgagagcttctggaacttggtgactgtcttggtgcttcagggccggttggatgaggcacgacaaatgctgtccaaagaagctgatgccaacccctcctgtgcaagcatgtgccgcatccttggggacctgatgaggacaatgcccattctcagtcctggcaacactcagacgctgactgaactggagctgaagtggcagcactggcgtgaggaatgtgagcggcacttgcaagacagcacgttcgcagccagcccccgcctggaggctctctgcaagatcatgctgggggatgaggccaccttgttggagcacaaggagcttctgagcaactggtaccatttcctagtgactaggctgctgtattctaaccccacagtgaaacccattgacctgcacttctatgcccagtctagcctggacatgtttctggggggtgagagcagtccagagccactggacaacatcttgatggcagcctttgagtttgacattcaccaagtgatcaaggagtgcagcattgccttgagcaactggtggtttgtagctcacctcaccgaccttttggatcactgcagactcctccagtcacacaacctctattttggttctaatatgagagaattccttctgctggaatatgcctcaggactgtttgctcatcacagcctgtggcagctgggggtggattactttgactactgcccggagctgggccgagtttccttggagctgcacattgagcggattcctctcaacacagagcagaaagccctgaaggtgctgaggatttgtgagcaacggcagatgaccgaacaagttcgaagcatctgtaagatcttggccatgaaggctgtccgcaataatcgtctgggctcagccctctcttggagcatccgagccaaagatgctgcttttgccacactcgtatctgacagattcctcagggattactgtgagagaggctgcttttctgatctggatctcattgacaacctggggccagccatgatgctcagtgatcgactgacattcttggggaagtaccgggagttccacagactgtatggggagaagcgctttgccgatgccgcttctctcctgctgtccctcatgacatctcagatcgcaccccgctctttctggatgactctgctcacagacgccctgcctcttttggaacagaaacaggtgattttttcatcagaacagacatatgagctgatgcgctgcctggaagacttggcctcagggaggccagggtgtggtgagctggatgcccagagactccaggatgacgacatagagaccacgaaggtggaaatgctgagactggctcttgctcggaatcttgctcgggcaattataagagaaggctcattggaaggttcctgagataagctgaggacagttgcattatagtagctttgtatgtcgatgtaaatagattttaaaagaataaattctcttttgcaaaataa

SEQ ID NO: 2034 - DNA, 2066 bp, Cricetulus griseus
ggggcccggaggcacgccttgtaggcgcgcttccttggatacctggcggcctctggcctcaggtaaccatggagaaggaggtgcggagtaccattcttttcaatgcatacaaaaaggaggtgtttaccaccaacactggctacaaatctttgcagaaaagacttcggagtaattggaagattcagagcttaaaagatgaaatcacatctgagaagttaattggggtgaaactatggattacagctggaccaagggaaaaatttactgcagctgagtttgaagtcctgaagaagtaccttgacagtggtggggatatccttgtgatgctgggagaagggggagaatccagatttgataccaatattaactttcttctagaagaatatggaatcatggttaacaatgatgctgtggttagaaatgtatattacaagtatttccatcctaaggaagctctggtttcagatggagtgttgaacagggaaattagccgagcttcagggaaggctgtgcctggaatcattgatgaggagagcaatggaaacaattcccaggctctcacctttgtctacccttttggtgccacgttgagcgtcatgaaaccagccatagctgttctgtctacaggctctgtctgcttcccacttaacagacccattctggctttctatcactcaaagaaccaaggtgggaagctggcagtgcttggctcatgtcacatgttcagtgaccaatatttggataaagaagaaaatagtaaaattatggatgttgtgttccagtggctcacgacaggagacatccacctaaaccagattgatgctgaggacccagagatttctgactacacaatggtaccagacacagccaccctttcagaacagctccgagtgtgtcttcaggaaggcgatgagaaccctcgtgactttaccaccctctttgacctgtccatataccagctggataccacctgcctccccaaggtcatcaaggctcatgaggagctaaatgtgaaacatgaaccacttcagctcgtccaacctcagtttgagatgcctctgccagcccttcagcctgcggtcttccctcctagtttccgtgagttgccaccccctcccctggagctgtttgacttagatgaaacgttctcttctgagaaggctcgtcttgctcagatcaccaacaaatgtactgatgaagacctggaattctatgtcagaaagtgtggcgacattcttggagtaaccagtaaacttccaaaggatcagcaggatgccaaacatatccttgagcacatcttcttccaagtggtggagttcaagaaactgaaccaggaggcccactgacatggcagcccttcaggtgatagcacccatagagactgttcacaacattccttagttccgcaagtacttaccacgtgtctacagatgaaatatgatgatcccttcaagaatggaacttctgttctagctggagggtcccagcaaacagtagcagagtgtataagcaagcacttagtgggctagaggatggtaagtgctgtggtgtggaaaaaatagagctaggccaggggatccaatgggccagcattcagtagtgtgagcagagttgacccagtacacatggatgccagagtctggggtgctgtttgtgccagagccttcctggagttgtgaaaacttcctccttgggttagaatcaaccatcaagccagctaattcctactggtcccaacaaatggtgattccgaattcaagttaatgttcaaaataccaaagagttcctatttcaggctctgaactgaaataaaataaaacaaaattctgtgtttattgtctcatcctggaacatgatattgataaaagtggaatgacattccaggacttgtggggcctgtgcctcttgaagcacctttctgacagcagactctctgtggctttgcattcatcctcgctgccaaagtgtctgtactttgttttctctaagctgtgggaggtttgtgcatctttttgcacccagatggaagagatgattcatttgggattaaatctatgattgaactt

SEQ ID NO: 2035 - DNA, 2066 bp, Cricetulus griseus
atgggggcgttgcatttattgaagagtggctgcagccctgcggttcagattaaaattcgagaattatatcgacgccgatacccacggacacttgaaggactttctgatttatccacaattaaatcatcggttttcagtttggatggtagttcttcaccagtagaacctgacttggctgtggctggaatccactcgttgtcctttcttcttcaattacacctcattcaccatcatctcctgttggttctgtgctgcttcaggacaggtaagcccacatttgagatgcagcagccatctcctcccattcctcctgtccatcctgatgtgcaattaaaaacctgcccttttatgacgtccttgatgttctcatcaagcctacaagtttagttcaaagcagtattcaacggtttcaagagtaagttttttattttgctttgacacccagctaagttagagagatatgcatatcaagggatttttgccaggtggcaggagagattatacagtccaagttcagcttcgactttgcttggcagagaccagttgtcctcaagaagataactatcccaatagtttgtgtataaagtaaatgggtaaactctttcctttgcctggctatgcaccaccacctaaaaatgggattgaacagaagcgccctggacggcccttgaatattacatctttagttaggttgtcttcagctgtgccaaatcagatttctatttcttgggcatctgaaattggaaagaattactccatgtctgtatatcttgtacgacagcttacatcagccatgttattacagaggttaaaaatgaaaggtattagaaatcccgatcattccagagcactaattaaagaaaaacttactgcagatcctgatagtgaaattgctacaactagtcttcgagtgtccttaatgtgccctttaggaaaaatgaggctgacaatcccatgccgggcagtgacttgtacacatctgcagtgttttgatgctgccctttatcttcaaatgaatgagaagaagcccacctggatttgtcctgtttgtgataaaaaggctgcctatgaaagtctgatactagatgggcttttcatggaaattcttaatgactgttctgatgtagatgagatcaagttccaagaagatggttcttggtgtccaatgagacccaagaaagaagctatgaaagtaaccagccagccctgtacaaaaatagaaagttccagtgtctttagtaaaccgtgttcagtggctgtagccagtgatgcaaacaagaagaagatagatgttattgatctaacaatagagagctcttctgatgaagaggaagaccctcctgccaaaaggaaatgcatctttatgtcagaaacacaaagcagtccaaccaaaggggttctcatgtatcagccatcttctgtaagggtgcccagtgtgacttcagttgatcctgctgctattccaccttcattaacagactactcagtaccattccaccatacgccagtgtcaagcatgtcatcagatttgccaggtttggattttctttcccttattccagttgatccccagtactgtcctcctatgtttttggatagtctcacctcacccttaacagcaagcagtacgtctgtcaccaccaccagcccccatgaaagcagtactcatgttagttcatccagcagcaggagtgagacaggggtcataaccagcagtggaagtaacattcctgacatcatctcactggactaaaggcggacatatttgattctgggaatcattcgtcagaactactccttcttggatatctagtccatggaagctaacttttgcaatttaatatttattaaattgtcagatgaattctttgctgagaaatgaacacagataacttcagcaagaaccagatgacaagcaaggacttttgttatgctgtacactgagcatcagatatatttcatctacaatggtgtcttcttgagcagtggatttcagtttctacattactggatggattctacaaacaaattttgttacaataaacagcaataaaattatgtaaata

SEQ ID NO: 2036 - DNA, 2066 bp, Cricetulus griseus
cggctgcagtgcccggttggtagggggacccaccaccgttgaccatgtggaccaaagatggccgcacaatccacagtggctggagccgctttcgtgtgctgccccaagggctgaaggtgaaggaggtggaagccgaggatgcgggtgtttatgtgtgcaaggccaccaacggctttggcagcctcagcgtcaactatactctcatcattatggatgatgtcaatccaggaaaggagagccctggaccaggtggctcttctgggggccaggaggacccagccaaccagcagtgggcacggcctcgcttcacgcagccctccaagatgaggcgccgggtgattgcacggcctgtaggtagctccgtgcggctcaagtgtgtggccagtgggcacccacggccagacatcatgtggatgaaggatgaccagaccttgacacgcccagaggccagtgagcacaggaagaagaagtggacactgagtttgaagaacctgaggcctgaagacagtggcaaatacacatgccgtgtatccaaccgggcaggtgccatcaatgccacctacaaagtggatgtaatccagcggacccgctccaagcctgtgctcacagggacacaccctgtgaacacaacggtggactttgggggaaccacatccttgcagtgcaaggttcgcagtgatgtgaagcctgtgatccagtggctgaagcgggtagagtacggctctgagggccgccacaactccactattgacgtggggggccagaagtttgtggtgttgcccactggtgatgtgtggtcacggcctgatggctcctacctcaacaagctgctcatctctcgggcccggcaggatgatgctggcatgtacatctgcctgggcgcaaacaccatgggctacagttttcgtagcgccttcctcactgtgttaccagaccccaaacctccaggacctcttgtggctccttcatcttcaaccacaagcctgccatggcctgtggtgattggtatcccggctggtgctgtctttatcctgggcactgtgctgctctggctttgccaggccaagaagaagccttgtgcccctgcatctgcgcttcctgtgcctgggcatcgtcccccaggggcatcccgagaccgaggtggggacaaagatctgtcctcattagccgtgggcctgtgtgaggagcatggatccaccatggccccccagcatgtcctggcttctggctcaactgccggccccaagctgtaccccaagctgtacacagatgtgcacacacacacgcacacacacacatgcacacataccctttcgtgtggagggcaaggttcaccggccccagcatgtccactgtcagtgctaaatgcagcaaatctccaagcactgtgccctgaggtaggcatatgggggccaaggcaacaggttgggaggattgaaagcaatggaggaagagtatcctagggccctgtggtaggcactcacatatttggtcgtatagatgtgtgtactgccaggtgaacatacaccaagatagccaaacccacaaacaaacatttacaaatgcaaatgtgtgttcatgtgcacacacaaccctggaagccttcgggaggatttgttgtgtgactttgcagtgacatgtagcgatggctaggtgaaggaatctccctcaagtcttagtggtcatggccactcccccacccctgcctacctgtgcccctgcctggccttggaggctactgttgcctccatgtatgctgggtgcccaggagtctaccagcatcctggatgggttgagcagttcgaccatgcccggaggtttgagtcaccctccccttgctagagagaagggcctcaatatttatatttaagaagtaaaataatattaatgatgatgtaaggaaggctgggacacaggaactctggcctgccctggggcctaggacctgcctggtcttgtggttacattgggtatcctcactgtccatggttgcctggcctctgtaattttatatagagtttgggctgaagcctcatatatttaatttattttgttaaacaaaaaaa

SEQ ID NO: 2037 - DNA, 2065 bp, Cricetulus griseus
cccctctgagtcaccgaaggaagcttctggcacctatgtcaggcaggcggggttcttcaggttcttcaatagaccaaggcagtaaggatgcacggcgtaaaggaaagcgtgggaaaaagactaaaagactcttcaagtgaagaagttaatttgagtcagattgtgccctgtgagccaagttcagaagaaaaatcgaaagaactccccgaatggagcgagaaagtggcccacaacattctgtcaggtgcttcctgggtgagctggggtttagtcaaaggagctgaatttactggaaaagcaatccaaaaaggtgcttctaaactccgagagcgcattcaaccagaggaaaaaccggtggaagtgagtccagccgtcaccaggggcctctacatagcaaagcaggcaactggaggagcagcgaaagtcagccagttcctggttgatggcgtctgcacagtggcaaattgcgttggcaaagagcttgccccacacgtcaagaagcacggaagcaaactcgtcccagagtctcttaagagagacaaagacgggaaatccgctcctggatggtgccatggttgtggcagcgagtagtgttcaaggattttcaacttgtctggcagggattggagtgtgcagctaaatgtatcgtcaacaatgtgtctgcagaaaccgtacaaaccgtcagatataagtatgggcacaatgcaggagaagctacacacaacgtggtggactctgctatcaacgttggtctcactgcctacaatattgacaacattggcatcaaagccatggtgaagaaaactgcgaagcagacggggcacactctccttgaggactatcagatcatcgacagttctcagaaggaaagccaaaggagaagcagcaagcacagttgtgagaagaaatacagaaaagcagacagaggaagagaagaaaagggcagagaagaaagataagtaaaaaggaagttctgggagtgacctacaccaaagccttaccagatggagcagtgtgagatacccaacagaaatttttcagcaatataagctaaataaaaccatgatcttaaagcttgatctcagataacattttagaattctttctcctaagggaaagagcctggccatggacgtgccatgaagttctgtaatgtcatctcttatttgctagatctcctgcctactaggatccaaaatggccttttgatttaaaatgaagaaaatgtttctttaagtctttaggatttagagtaggcaatatttcgatataatggtttttattaattctttgagaattttgtacatgcatgaaatgtgttttgattacactctccccctaactcctcccaggcctacccccgcccctcctcacaacttcatgttcttatgttttaaataacccactgagtaatctaatttgtgctgcccatatatgctcatgggtgggggccatccactggagcatggttcatctaccagggaccatacccctaaagaaaacttactctccctcaccagaagccagtaactgtcagtagctcctcagctagggctgggggattgtagactaagaagattttgaagtatgattggtattctattaaaattgaagtaagtaattattattggctttaaagaaatcactttccacatatgctgcttctgaaatatttttataaatttacagaaagtaaaacataaacattgcatttgctgatagtgatatatttttactcagtcattggagtttatgctaaaagccagtaagtgatttaaaaggaaggaacctattcctgtcaaggtaaagaatatggaatcctttggtggatagcgtccacatcagcaaaagacaggatagacatttgaaggatttttttaaagctacaaatatgcaattaaatactcgtggttgttttattttattattgatgattttaaaggttgttattggtttttatagttacagtctattgtaatcatttctgaacctgtaattgactagcttatagatttcatttgaaattggttaatgaatgtgctttgagaataaaatggtctctgaa

SEQ ID NO: 2038 - DNA, 2065 bp, Cricetulus griseus
ataaaggaaactattttgtattaattgacccagtccttgatgatcctctaacaaattaccaaaagaggtttagaatatcgggctcacagtgagcaattcaaaagccttttttagactacccaaaagaagagactttgaaagaagtacatgaatgtttcttatgggtaccattcagccacttcagtactcatggaaaaatgtgcatttcagacaactacatctgctttgctagccaagatgggaattctatgtagtgtaatctattccattacgtttctctctcatggttcctcacacttttcattagtgtgctacctattgaaagtgcagtgaatgtggtggactgtttcttctatgatggaataaaggccattttacaactgggactggcaatacttgactataatttagacaaacttctgacctgtaaagatgatgctgaagctgtaacagcattgaacaggttctttgacaatgtcattaataaggatagcccattgccttcaaatgttcagcagggttcaaatatcaatgaaaaaagcagtcatactaaagtggattattacagatttgattaaagaatccaatgagcgtgttgtatcacaagatgtgaaaatgactcttcaggaactggatgaactttatgtcatttttaagaaagaactgtttatatcttgttattggtatttgagttgtccaggattaaagcatcatgaccccagtttgtcatatttggaacaatatcagattgactgccagcagttcagagtgttgtatcatctgttgagtccttgggctcattctgcaaacagagactcactggctttatggacattcagattgttggatgaaaattctgattgccttataaacttcaaagaattctcctctgcaattgatataatgtacaatggaagttttactgagaagcttaaactgctttttaagctgcatattcctccagcttacactgaagtgatgtctaagacttacgtcaaagggcgatgagctttcaacagaagaattactttatttcagtcagctccaggtttccaagcatgcagataagaaggaagcagaatacaggaaaaaataaccctgaaaaaggacaaaggaaaattgacattcaagcctatttaagtcaatggcaagatgagacttcttaaaaaagaagaaaacattaaagatttaccaagaatgaatcagtcacaatttattcagttttcaaagaccctgtataacttatttcatgaggaccctgaagaagagtcactatatcaagccattgctattgtcaccaaccctttgctcaggatggaagaagttggaaggaaactccacagcccaacatcatcagccaattaaaattaaaaaaaagttaattgaaaattcctgagttgggtttggccaaatactggtaagcatctttaagatttgattacactgtcttttcaaggaaatgactacttaaaagagatcatttagaatgaagtctttctgctgtaactcagaaatggtttgctgaagtatgtcccaattttcaatcttagttaatagtttatattcgaaccatcacatctgctataatgtaacaattgttatacgacaatagctctagcaaaacatatggtctgtgcttatatacaaaggcactgttatacacacttggttgaatattttgtcagttgtattttacaagaaatcctttcttaaagaatatgttgttaatttttgatattatttttgaagtcagaatagtgaagattactggatattgtattttagcctaggctaattaaagataaatacttaagggatttttgaatttcaaaaagattataaatgaaggttaacaaaaaacaaatagtaattttctgagtctgcaggagagataagataaacacattatagttttatagctgctgccttgttaagcaaataagttgttcctaatattcaaagtattttgttgtgtcaaactgaaatagtgcattatctcttttacattaaatgttataaagtgactttgtctttataagtattaaaatctattatattaaatatg

SEQ ID NO: 2039 - DNA, 2065 bp, Cricetulus griseus
aatgctggctgtcagatggtggcactcaatttccagacagtggatctagctatgcagataaacatgggtatgtatgagtacaatgggaagagcggctacaggctaaagccagagttcatgaggaggccggacaagcactttgatccatttactgaaggaatcgtagatgggatagtggccaacaccttatccgttaagattatttcaggtcagtttctttctgataagaaggttgggacttacgtggaagtggatatgtttggtttgcctgtggacacaaggaggaaggcatttaaaaccaaaacatcccaaggaaatgctgtaaatcctgtctgggaagaagaacctattgtgttcaaaaaggtagttctgccttctctggcctgtttgagggtagcagcctatgaagaaggaggtaaatttattggccaccggatcttgcctgtgcaggctattcggccagggtatcactatatctcccttcggaatgagaggaaccagcccctgatgctgccagctgtctttgtctacatagaagtcaaagattatgtgccagacacatatgcagatgtgatcgaagctttgtcaaacccaatccggtatgtcaatctgatggagcagagagctaagcagctggctgcactgacactggaggatgaggagaagtaaagaagcagtgaagacagcaatcacagttctcgccccctcccctcccctcggccccagaccctggaaagggaaccgacaggtctccctccagtgaggaagtagaaggagagaaccccggaagagagtttgatactcctctgtgatgttcatgccaggccttccagatatgcacggctgcttgagctccttcagactctaatgacaaagatcactgcccagggccatcttcatgagaagcaccccttagcctgaaatccacaccaaatcgagagtttcagaagaatctgtgtagaggtcccataccccagttccatgtttcatgtggaaatgattgccagtctagagagaagggtgcatgtatgcaggatttttctttttctttccaatagtaaattaaaagcaggcagctcccaggctccgtggaacatgtaatgaaggacaatgtattctttgaggaaaactcgagctcatgtcttcgtttgaagccctggtataaagtaatttcaaagtaatagaaatagtttgagaagtgcatagcaccatttcacactatggaacatcccactttgaccattgtttccctaactgccccgcaattccatgttttcaagttaatatgtatattaaattgtttcatcctttgctttgcaagcactggtggcttgcagtttgctaatttatttatcatagaggcatttgtatttgctgttgacatggctttattagataccatagtgactcttacaagctggtttcttttagaaaacaaaacaaaacatacatttgactgtatcattaccccagtaaagccatttcactattatatgtatgaattgtatatttggctgatctgatgtgtattaatcaggatttcagctagactgaacaggttccagtgggttattctgttgtcagattatttttttgtggttcattttactgtagaaaggaagatagaatatttatctaaatgcacatgtataaatgatacacattatctccatgtatatattacatgtatgcacccagccacataagtgcacccacacgcatacacacgcatgagtgtacatgtgtgtttattaattggcagtgacccaaatctcttccataagatttaaaaggaagttcagggatacatggacagagaagaaatgggtcaaatatatatgttacatggattgtaaattatatggaaatgctaagaatcagtttgtggagttattggtataacttgaggtagatttagaatttagaatataaatttgctaaaaaaattgtaggatcaaaattggattttaaagtgtcagattttgaggttgttttaatggcagaatatgcaaaagatcacacacacacacacacacacacacacacacacacacacacacacact

SEQ ID NO: 2040 - DNA, 2064 bp, Cricetulus griseus
cagcacttccgtgaccacacaggcaacccctgaggaaccagggacagatgaagttgagcaagttagtgagtcacatagcactgaggagagagagccaagcccagtgtctggtggtgctgaggaacagactccaggaagtgaagctgtggccgctgctgctgaggtagagttggagggcagagaagctgcacaggaagtaccagtgaaagcagagcccgaagctcctgcagcctcaccgtccaacgagcctcatcttatcctaatacccagtatcaatattaactctgaaaacacagaaaataaaggagagttgggtgatttaccaaaaactgaaagcattctgccaccagagcctgaaaatgaaaaggaaaatgacactgactcagggactgggtccactgtggagaagagcagcagtgacttgaatttgtccatctctagcttcctaagcaaaactaaagacagtgggtcaatgtcactacaagagacaagaagacagaagaaaacattgaagaaaacacgcaaatttattgttgatggtgtagaagtgagtgttacaacgtcaaagatagttacagatagtgactccaaaactgaggaattgcggtttctcagacgtcaggaacttcgagagctgagatttctccagaaagaggagcagagggcccagcagcagctcaatggcaaactgcagcagcagcgggagcagattttcaggcgctttgagcaggagatgatgagtaagaagcgacaatatgaccaggaaattgagaatcttgagaagcagcagaaacagacaattgaacgactagaacaagaacatacgaaccgcttgcgagatgaagctaaacgaatcaaaggagagcaagagaaggagctgtccaaattccagaatatgctaagaaaccgcaagaaggaggaggaacaagaatttgttcagaagcaacaacaagaattagatggctctctgaaaaagatcatccaacaacagaaggcagagttggctaatattgagagagagtgtttgaataacaagcaacagcttatgagagctcgagaagctgcgatttgggagcttgaagagcgacatttacaagaaaagcaccagctgcttaaacagcaacttaaagatcagtatttcatgcagagacatcagctacttaaacgccacgagaaggaaacagaacaaatgcagcgttataatcaacgacttattgaggaattgaaaaacagacagactcaggaacgagcgagactacccaagattcaacgaagtgaagccaagacacgaatggccatgtttaagaaaagtttgagaattaactcaacagccacaccagaccaggaccgtgaaaaaattaaacagtttgctgcacaagaagaaaagaggcagaaaaacgagagaatggctcagcatcaaaaacatgagagccaaatgcgggatctccagttgcaatgtgaagccaatgtccgagaactgcaccagcttcagaatgaaaaatgccacctgttggttgaacatgagactcagaaactgaaggagttagatgaggaacacagccaagagttaaaggagtggagagaaaaactgagaccaaggaaaaagacactggaagaggagtttgccaggaaactgcaggagcaggaagtgttttttaaaatgacgggggaatccgaatgtcttaatccatcagcacagagccgaatctccaaattctaccctattcccaccttgcattccactgggtcatagcaatagcaagcattctgtctggatgtggcttctgagtacatcattgtattctcttcatcttccacagtatgtatgactcacaaagacaatcgcctgtttcatcttctcagtggttttaaaaatgtatttcttggattttattgttaaacaaagatgaagggcaaacaaactaagacagatgctaggccatgttggcaaatagcatcttcagtaattccctaaggtgactttgtatattgaccttaaatattgtattctttagacactgttactaaaagactgccagagaaaataatgtttaaagttatttg

SEQ ID NO: 2041 - DNA, 2064 bp, Cricetulus griseus
agagctgaactcccacctccgtatacagccattgccagtccgggaaccagtggggttcccgtgatcaactgtcgcgtgtgccaatcactcatcaacttggatggtaaacttcatcagcatgtggttaaatgcacagtttgcaatgaagctacgccaatcaaaaccccccaacagggaagaaatatgttagatgtccttgtaattgtctcctcatatgtaaggacacatctcggcgaataggatgtccgagacccaactgtcgacgcataattaaccttggccccgtaatgctcatttctgaagaacaaccggctcaacctgcattgccaatccagccagaaggtacaagggtggtgtgtggacactgcggaaacacattcctgtggatggaactgaggttcaacactctggcaaaatgccctcactgcaaaaaaatctcttcagtaggtagtgcacttccccggagacgctgctgtgcgtatgtcaccattggaatgatatgtattttcattggagttggactaactgttggcacacaagatttttcaaggagatttcatgcaacctacgtgtcttgggcaattgcttatctcataggtttgatttgccttatccgagcttgttactggggtgcaataagagtcagttatcctgaacacagttttgcttaaatctacccctgaatccttgatgcaggtgagagtgtccagtagttcttgataagctcttttggacacatcacatcatttatcctagtggattccatcctgctttgtataatagtttcaagactttgtgagtctttcctgaacagatgctcactacagtacattatatgcaagttcattttgctgctaggttatcatacttggaaaataaagtgcgcctttgttcttttaaatcaaagatatttttggatttgtcatcacatgttatgtctaattatcagtcttttattatgtttaaaacagttattccattacttgctcatctgtgacgattcccaaaaagtgtttataaatgtttctacaataggttcacatttatacttacattttcaacagaattgcttgctttaaaaatctaagcaatatgcatttttgcttgaactgcttactgtaattttaacctaagattatagttaccttattcaggaaaaaaattgattgagtgtactttcaaaaacttgacattcttgtcagagaaacatttctagatattatatgcttgttttttgttgttttttttttttgttgtttgtagaaagatacaatattttggtagtaaattaaaatacctagggtgaacatatttctccacagttggatatgttggataagtgtcttttctctaagattacagaatgttttgcctttcatttttgtctttttatttagcatttacaaaaatctggtctggatctatggaatttaatgttaatctgctggatgtattcctttataaactggaggaagtatttcagaaaacatgttttataatacttcatcatctcatccaagacatatttacacggggttgcactccctttccgtagaccatggcaaatttttcttcttgagatacttgtgcagccatttctctgtgaagagaatctatggcatcctgcattagctgaaatgttagcattagattctcttaaccatttctcagctgaccaggtatgaatgactcagcttattcaagaaaatggatcagaaataaagatcttcatggtttcctaaaacttcgcttaggattcacgaaggcagctcttgcactgccgggttttttcagtttcggaggaattattcgagagttaatggtctaaactctttcaaattgtagaattagacagtgacatgacctgagtaaattagtatgtgattccaaaggacaagactaatattttaaattatttatgttcctgattaatataaaaatgtacttaccgcgaagtttggagtgaaatacatgtaaacctcaaggagaaaatgataaatgtataaatgcagtagctcaggattatatgtatctttgaaaatacactaataaagattattattc

SEQ ID NO: 2042 - DNA, 2064 bp, Cricetulus griseus
tctggtgggcctgggtgtctcacattcctataaggtacacatacaccctgaaaccagccaccggagggcagctcagaggtcagatgcctggaagcaccactacatctaggaaacaagggaaggtgctgagctactggtgcttcagtcccagccacagcatgcgtgaactggtctgccagggagtgcgtacccttatcctcaccagcggcacactggctcccctgtcctcctttgctctggagatgcagataccattcccagtctgtctggagaacccacacatcattgataggaaccagctctgggtgggggttatccccagaggccctgattgtgaccacaggttcgcctatgctgataccaaggcccagctgccctcctgggtgcgcccctacctcaaggtgtatgacaactttggccacgtcatccgagatgtatcccagttcttccgtgttgctcagaaaactatgcctgtgccagttccccaggctgtgacctcaagtgtaagtgagagagaagctgctgtcaaggaggctacattgtccagccctctcctctccacccagaaagccatgagtttggatgtgcatgtgcccagcctgaggaagaggcccacaggagtatcagcttcttcagactctgagagcagcctgtgtgtggagtatgagcagcagccagtttctgcccagccgaggtccgtggggctgctagctgccttagagtacaacgagcagaaggctggggcatctgaggagcaggcacttggctcctccaccttgtctctccggtatgagaagaggccgtctattgagcagagaggaggaagaaggaaggtcaggctggtcagctatccggatgaaccagtggctggcacacaagaaaacaaagccaagctgttcatggtatcagtgaagcaagcattgagccaagccagttttgacacctttacgcaggccctgcagcactataagggttctgatgactttgaagccctagtggcttctcttacctgcctctttgctgaggaccgcaagaagcacactctatttaaaggcttctaccagtttgtacgaccccaccacaagcagcagtttgaagacatctgcttccagctaacaggccaaggctgtggcaaccaggcaggaaggagaccccagcagttgtccaaaagtgggatgtacagtgaaaaacctggccaggctgctgtgagtgcctacctgtctgatgtccgcaaggctctgggatctacaggttgcagccagcttatgacagctctaaaggcatacaaacaggatgatgacctgggcaaggcgctggctgtggtggcagcactgaccactgcaaaatctgaacacttctccctgttacagaggtttggcatgtttgtgcgtccccaccacaagccacacttcctgcagacatgtgcagacctgatgggcctgcctaccacaagcaggggcttggagctgccaggtcccagggaggagagcacaactgtgccttcggagcttgcccatgaggacagtaaaccaggtccctcagtgtccaagaagcctgagaagacccagagtaagatctcatccttctttagacagaggccagaccagagtgtaaggtctgatgataccaccccagagccaccccagagcctacaaagtctgagtggagtaagcaataggggctacagggactgttggttatggctgggcactggaattgtgtgcgctcacttagccctcctgcagcttcatttgtgtgcccggcctgtgcaactgaagacacagtgcttttccagtgccccttctgtgatttctaccgctgccgggcctgttggcaactgcaactccaggttggggtctgaaccctctctctccctaggtggtgggctgaggggccagacctagggtatgcattcagccaggctacagtgcctagcaggtatctccacaggcctctagaatgtgtccagattgcggtgctgttaataggaagcagagcattgcacaggtcttctggccgaagccccagtgaacacaaatggagaccctgggagccctgatgtgg

SEQ ID NO: 2043 - DNA, 2063 bp, Cricetulus griseus
ccatcatgcccactgtggtggtaatggatgtgtcgctttccatgacccgacctgtgtctgtggaggggtctgaggaataccagcggaagcacctggctgcccatggcttgacgatgctatttgaacacatggctacaaactacaagcttgaatttacagcactggtggttttctcatcactttgggaactgatggtccccttcacaagagattacaacaccttacaggaagcactgagtaacatggatgattatgacaaaacctgcttggagtctgcattagttggtgtttgcaatattgtccagcaagaatggggtggagcaattccttgccaggttgttctggtgactgatggctgtcttggcattggcagagggtcacttcgacattccttagctactcagaatcaaagaagtgagagcaacagattcccactcccctttcccttcccgtctaagttatatgtcatgtgcatggcaaacttggaggagcttcagagcactgattccttagaatgccttgaacgactcatagacttaaacaacggtgaagggcaaatttttactattgatggccccttgtgtttgaaaaatgtacagtctatgtttggaaagctgatagacctggcatacacgcctttccatgctgttgtcaagtgtggccatctaacagctgacgtacaagtcttccccaggccagagccttttgttacagatgaagaaattgatcctatccccaaagtcattaacacagatttggaaatagtgggctttattgatatagctgatatttccagccctccagttttgtccaggcatttggtcttgcccatagcacttaacaaagaaggtgatgaggtgggtactggcatcactgatgacaatgaagatgaaaactcagccaatcaaattgctggcaaaatacccaacttctgtgtactgctccatggtagcctgaaagtagaaggaatggtggcaattgtacaactaggtcctgaatggcatggaatgctctactcacaagctgacagcaagaagaaatcaaacctcatgatgtctctctttgagcctggcccagaacctctcccgtggctggggaaaatggcacagttgggtcccatttcagatgctaaagaaaacccttatggggaggatgacaacaagagcccattccccctgcagcccaaaaacaaacgcagttatgcccagaatgtgactgtctggatcaaacccagtggcctgcagacagatgtacagaagatcttaagaaatgcaaggaagctccctgaaaaaacacagacattctataaggagctgaacaggttacgaaaagctgccttagcctttggtttcctggacctgcttaaaggagtggcggacatgctcgagagggagtgcaccctgctgcctgacacagcccacccagatgccgcattccagctcacccatgctgcccagcagctcaagctggccagcactgagtatgctgcctatgaccacaacatcacacccctgcatacagacttctcagggagcagcactgaacgaatgtgatgatgacctctggagctttccttctctgtttatttttgtctgaaaatggtttaaagttaaaaacttttccaaggacattcttaaactactgtgcttaggatgagaaatcagcatcttgaacttgcctaagtacaaacctgacactgagtttcaaattttttcttagaacttgttaaaatacagtggcaatgctcaggtgcttctgctgtatcttgaggtacaaatttttagacagtaactacatctgtgtaaaaccactcctgttcatgtttttaaatgaaaattaaatgatttgattctataaaaaatgatttcatttaggaacatatgttgttttgctctatcttagcccttgaatataattcagcttccaaaatgtcaagattcccaattcttgacatttcttgggttccatattaacttcctagtttctgtcggcaattaggaatttacacctttagccaggttctggccagtggttctgagggagcactgatagaagagtcaggc

SEQ ID NO: 2044 - DNA, 2063 bp, Cricetulus griseus
ccggaagtggaggttctacactgagtgctgctgggtctgagtgaccgaaggcagtagcgctcgcggagatcgccgctggcctccgatcaccatgtcggccttcgacactaaccctttcgcggacccagtggatgtaaaccccttccaggatccctctgtgacccagctgaccaccctcagggtggcctggctgaattcaatcccttctcagagacaaatgcagcaacaacggttcctgtcacacaagttcctgggccctcccagccagcagttctccagccctcagtggagccagcacagccaacgcctcaggctgttgcagctgcagcccaggcaggcctgcttcggcagcaggaagaattagacaggaaagccgctgagctggaacgcaaggagcgagagttgcagaacactgcggcaaacttacatgtgagagacaacaattggccacccctaccctcatggtgcccggtcaagccttgcttctatcaggacttctccacggagatccctgccgactaccagcggatatgcaagatgctttactatctctggatgttgcattcagtgacgctgtttctaaacctgcttgcatgcctggcctggttcacaagcaatgccgctaatggaacagcctttggcctctccatcctttggtttgtgatcttcaccccctgtgccttcctttgttggtaccgaccaatctacaaggctttcaggtctgacaattctttcagcttcttcgtgttcttctttgtatttttttgtcaaataggcatctacttcatccagatgattggcttgcctaacttgggaaccagtggttggcttgcagccctgtctacactgcgcgatgggcccttacctgtatctatcatcatgatggtagtggctggcttctttaccctttgtgctgggctctcactcttcctcctgcagcgggtacatgccttctaccgccgaacaggagccagcttccagcaggctcaggaagagttttcccagggcatcttcagcaacagaaccttccgcagtgctgcctcatctgctgcccgaggaaccttccaggggaattaatcttcctgactctccttccctcacccagcgtcttctctcacctgccctctgagctgcactttccgtgggtgccttatacagtggttatgcccagcacagacctggcagggattttgtcttgttcctgttccttcctcagtagtcagctttcccttccacataagggaagggcaggaagggacagggacacctgggctcactgtaccaggaattttccaaaggcaccctggactcctctccaccctctgcaggcttgacctgtattggggcctccacagtctcacctttcatgcttaggcttcataagcctccccagggctccactttagatgagctgtgttctgggtgggtgcacagatgctcctcaaatgatgcttcaggtggcccccagatgttcctcacaatagtcgtgaccctctatgctttctctgtcccatggtgtaatagcaccttgtgccctctgttgttttggcttctgccctcttgagggactctgcctctctgccttagccttattcctgccccatcttcagcaatactcacctcttaaaactcctagggtggctggaggatgtcagtccagaactatatcctgcaggcaggactgctgagccatctttctgagggttcctcccatacccacagtggagtctaggtccctttccacttgtgctggagactccacaggtgtcactacagtgacacttaggaggtcaccgttgaaacctggaccctgtgctgtgtcagtgctgcaggagctcaccaagatggccagcctcctgcctctgggaactggggccctcctgaggctaccctcatgctgtcatccctagagccactgaatggtaatgacagccaccaggattttgttaactttctggtattttcctccatgtacaaatgtatatgtcatgtctcaatttttgtgcttaaataaaaataagattttcagacaacaaaaaaaaaaaaaaaaaaaaaaaaaaaaa

SEQ ID NO: 2045 - DNA, 2063 bp, Cricetulus griseus
gactgggtcctcgtctttctgttcctgtccccaacgtcacctgcatctcacgcgtcctctctgtcggaaccagagggaatgacgaagcccagggtttttcccagtggtgctctgtgcatcggagcacgctcctagccggcggtgggaaactcctcgcagtcctttcgctaacctcttttcgtcggaggtgggaccggagcgtgggcggttgcgttcttctgggaccatggctgggtccgacacggcgccgttcctcagccaagccgatgacccagatgacggaccagcgtctggccacccgggattgtcagggcccctggggaatcccaagtccggggagcacgagatcccggaccgcgagggtctgcagcgcatcactggtttgtcccagggccattcgaccctcatagtggcggtgctgtgttacatcaacctcctgaactacatggaccgcttcaccgtggctggcgttcttccagacatcgagcagttcttcagcatcggagatagtagctctggcctcattcagactgtgttcatctccagctacatggtgttggcaccagtgtttggctacctgggtgacaggtacaatcgaaagtacctcatgtgcgggggcattgccttctggtccctggtgacactggggtcatccttcatccccagagagcgcttctggctgctcctcctgacccggggcctggtgggggtcggggaggccagttactccaccattgcgcccactctgatcgccgacctcttcgtggcagaccagcggagtcggatgctcagcgtcttctactttgccattcctgtgggcagtggtctaggttacattgcaggctccaaagtgaaggatgtggctggagactggcactgggctttgcgggtgacaccaggtctgggagttgtggctgttctactgctgttcctggtggtacaagagcccccaaggggagctgtggagcggcactcaggttccccacccctgagccccacctcatggtgggcagatctgaaggcgctggcacgaaatcctagtttcgtcctgtcttccctcggcttcactgccgtggcttttgtcaccggctccctggctctctgggccccagcattcctgctgcgctcccgtgttgttctaggagagaccctgccctgtctccctggagactcgtgttcttcctctgacagtctcatctttggactcatcacatgcctgactggagtcttgggtgtgggactgggtgtggagatcagccgccgccttcgccgcttcaatcctcgggctgacccactggtctgtgctgctggcctcctgggctccgcgcctttcctcttcctgtccctggcctgtgcccgaggtagcatcgtggccacctacatttttatctttattggggagaccctgttgtccatgaactgggccatcgtggctgacatcctactgtatgtggtgatcccaactcgacgctccactgctgaggccttccagatcgtgctgtcccatttgctaggtgatgctgggagcccttacctcattggtctaatttctgaccgcctccgacggagctggcctgcttccttcttgtctgagttccgggccctgcagttctcgctcatgctctgcgcttttgttggtgcactgggtggtgcggccttcctgggcactgccatgttcattgaggatgaccgccgacgggctcaactccacatgcagggtctgttgcatgagacaggaccctcagatgaccggattgtggtgcctcagcgaggccgttctacccgggtccctgtgtccagcgtgctcatctgagaagctgttgctcacccagccacaggttcaccacagctggcccctgggcccaccctgggaggtgcccaggcagaagccctcaccaggtccaggtccaaggaagaagccctgggatatgtcccagctcccaaacactacatgggcagcccagggaagagatggggttccagaagtgggggttgtcctgtctattagggcagcccaaggggtttggtgctatttgtaatggaataaaatttgtaagcagact

SEQ ID NO: 2046 - DNA, 2062 bp, Cricetulus griseus
taacctgcgagcgcaggttggcttggccgctgggcgactgtgcgtctcagcgaatggctagggacctgattggaccggcactgcctccaggcttcaaggagcacgcgacaactgaggacgaggaggccgacctgagcccggttgcagggcctgctctgcctcctaattacagaagcagcagctcagactcctcagacagtgatgaggacagcagttctttgtctgaagaaggaaatcaagagtctgaagaaaatgacactggtccaactgccagaaaacagaggcgaaaatcaagatagagatgacgatgatgatgggtttttggaccagccctcctcctggatttaagaagcaggacgactctcctccaaaggcctatgatcggtcctgcattgccacctggtttcattaagtcttcacaaaaaagtagacagaggcagagaggatccaggacaagtgtcatcattcttcaactcagaggaagcagcaagcagtgaagatgaggatattgttggaccaatgcctgcaaaaggaccagttaactatagcgtaacaacagagtttgaaaaaagggcccagagaatgaaggaaaaattaaccaaaggagatgatgattcatctaaaccaatcacaagagaatcatggatgactgagcttcctccagaaatgaaagactttggacttgggccaagaacctttaagagaagagctgatgacaaatccggagaccgatctgtctggacagacaccccagctgaccgggaaaggaaagctaaggaaatacaagaaacaaggaagtcactcagtaagaaagatgaagaaaacgtattgtcaggaagggataagagactggctgagcaagtgtcctcatacaacgaatcaagaagatcagaatccctcatggacattcatcataaaaagttaaagaataaggctgccgaagataaaaacaagcaccaagagaggataccatttgaccgtgataaagatctcaaggttaatcggtttgatgaggctcagaaaaaagccctaataaagaagtcccaagaactaaataccggtttcacatggcaaaggcaacatgttttataagtgagtgtgcttcagggaggtacactcgtgctgagtgagcagtcagaactctcagaaccctttgtctatagtaattatgtgcacaagtctaggactcctgtcttcatggtctcgcccaaactgtctgcatcttggagcttcacatgggatagtcagatccatatatgtacataacactttgtagctggtttactggagcgttaatcctgtatagctttttaaattaactcactcatccctgaaaatgggaagtctgtactcatgaccccactagtgggagtgatgtatgtgtcagtgctttgatcagtgcttcttaagctgttaaacacaagctcccaaatcgggagataaaacctaaatgccaattctatgcatttcttgcaggttttcttgttctgctaactctgtactccagttctaatgaagcatagagttttaatgggaaaacattctgattcccgatttatgtgaactttataaaaactgggcaaactgttcagattacaatataaagtatttcttaatagtgtcacatttttgtactagtgtaagtagcttattcaaggactattgcttttgaaaacctgggttattctgagtgaattgaagaggcttgttgtctgcatagaattggacagacctaccctttgactaaagtgagtgatagtttctgcacataaaactttatacaagagtattagctttggctaggcatggtggcacacaccttgaatcccagcactaaggaggcagaggcagacagagctctgtgagctcaagaccagcatggcctacagagcaagttccaggacaaccaggactatggagaaagaccctgtctcaaaactccaggggaaaaaaaaagtgtatttgtccatttcatttgtgattttttcccccaattgagagggagaaatgttttttagctatgagaaaacctaacatattttgtgaaatttgatacttttaa

SEQ ID NO: 2047 - DNA, 2062 bp, Cricetulus griseus
gtgttctgatgtcaacagactatgaatcttcagaacctctggaaagaatacaaagttctgattgttatggtgcctttaattgggttcatacatttgggctggcacaaaatcaaaagcagccctgtcttccaaatccctagggacgataccactcaaccagatagtctgggacttgcaagtcaaccaaagagccaaacctagaagaagtagcaggcttgcagttttcagaaagaagcacctttgaatctgaatttgataataaaagaagaaatgaaaaaccccagttgggttagaaagaactggcttcttgtggctggggtgactttcgtatgtgtccatcttggaacttactttatacagagagctgcaaaagagtctgtgaggtctcagtccataaccaacagaagaatattgaagaatgaagcaaaataaatacttggaatattaatgtcattaaattaatatatactggttattgtctgaaaacagtttgattttgtagctggtaatgctgaatgtgcagtcttccattcatgaattagtttttaatgttaaaacatgatagtgcaataaaaaggtcctaacagcatctgtgcagaatcatgtgtcctgcttcggtgactgtggcttatttacagccattctgtgctgtaacctgattgaaaatattcagagaataggcttgacacccacaaaggttactaagttaaataaatacctcttgggtctctgcactagttatcttaagtctgaagcctgtagttgtcgaatcccagttgacttaagtagtacacatatcttccttggcttggtccacagtgtcttaaccagcaaacctgcctgtatgctcaacaaaaaagaagcagatcacatcagtgctttgattttgaaagcttttttgcttacaattccagaaaagtgcagaagaccgagtcattttagggaagagtataattgcaaaagtcaagtgccctcaaggtggcactcttctgtgtgtctttgtccggagatttttctaatgctggagaaggaacagtggtggtctcttgccaagtgtctcttgagaatgcagttttagaacaattgcttaatctgggaaggcagctagttggtgaccaggtagatcttgtcctatgccaaaaagttatacacccatctttgaaacagttcctcagtgagcatcacattattgccatcgacagagttggagtgactctgatggaacccctgagcaaagtgacaggagcaatgcctattggttccctaaacacaataccttctactgcttacggaagtgtaaaagatttgtgctctgcaagatttggctccaaacattttttccatcttattcctaatgaagcgactgtctgcagcttgcttctctgcagcagaaacgacactgcctgggaggaactgaagctcacatgtcaaacagcaatgcatgtcttgcagttaacaatcaaggaaccatgggttttattgggtggtggctgtacagaaacacatttggctgcttatatcagacacaagattcataatcagacagaagacattgtcagagacgatggatactctcaagcagaactccagattgctaccgaagcattttgcagtgctctggagtctgttgctggctctttggaacatgatggtggtgaaatcctccttgacatgaagtatggacacttttggtcaggtccatctgcttctgcttctgttgttaactggccagatatgctgtcaagatgtaggtgtggcttgtacaacagccaggaaggactcagctggtctttcttaagaagcacatatcatccttttgcacctcaaacctgcctttcacaggcagctgtgggcgcagccagcaacctgactgtggactgtttcactgccaagcttagtggcctacaggtggctgtagagacagccaatttgattttagatctttcatatgtcattgaagataaaaactaacataagagattggcatatttatgttatgaaacaaactagttcagatgtctaagaaataaaatgctctctttttaccctaaaaaaaaaaaaa

SEQ ID NO: 2048 - DNA, 2062 bp, Cricetulus griseus
ctgaaagcagctaatgccagacatgaagaacagccaaggccttttgtgttacatgcatgcttgaaggaactcacgtgatgaagtgagattccttcaaacatgttctcgggttctggtgttttgccttcttcccttcgaaggatatccagtctctcagcttacgtatatcgcagaaatcctcacaacaaaagtcttgaagccagtagtggaattactgagtaaccctgattacattaaccagatgctccttgcccagttggagtacagagagcagatgaatgaacaccacaagcgagcctacacatatgctccttcttacgaggagaacacctgaagagtgctaacaagaatgaaattccacaattagttggtgaaatttatcagaatttctttgtggaaagcaaagaaataccagtggaaaagtcactttacaaagacatccagcagtgtcttgtaggaaacaaaggcattgaggtgttcagcagaatccaagcggatgtgtatgaggctctgcgggacaggtattacccatcattcatcgtcagtgacctgtatgagaggctgatgatgaaagaggaagaagaaaagcaggacgcacagcagacttctgacaaggatgaactgggttcaggaagtgaggctggcgaggaagccatagaaggtaccagtgggatttgtgatcaagccagctttgctgtaaacaaacttcgagagctgagtgagaaacttgaatataaaaggcaagctctaagttctattcaaaatgcaccaaaacccgataagaagattatttccaagttgaaggatgaaatactgctcatagagaaagaatgcacagatcttcagctacacatggcaagaacggattggtggtgtgagaacctgggcctgtggaaagcagccatcaccagtgcagaggtaacagaagagaatggtgagcaaatgccttgttactttgtcaaggtaaatctacaagaagttggaggggttgaaactaagaactggactgtcccaagaagactcagtgagtttcagaatttacatcggaaacttagtgagtgtgtcccttctttaaaaaagtccagttgccttctctcagcaagctgcctttcaaatctatagatcacaagtttctggaaaagtcaaagaatcagttaaataaatttttgcagaacctgctttcagatgaaagactgtgtcagagcgaagcactttatgcctttttgagcccttctcctgactacctcaaggttattgatgtacaggggaaaaaaccctccttttccttatcttcatttctggaaaaacttcctcgagacttcttctcccatcaggaggaggagatggaagaagacagtgacctgtcagattatggggatgatgtggatggaaagaaggatgccttggctgagccgtgcttcatgctgatcggggagatttttgaacttcgaggaatgtttaaatgggtgcgaagaacattaattgctctttccgggatgctttttggccaaatgggaaattggcaccatcaactaggatcagaagcgaagcacagagtcaggagactaagcagagagcacagcagaagctacttgagaacattccagatacacttcagagccttgttggacagcaaaatgcccgccatggtataataaaaatattcaaggcactgcaagaaacaagagccaataagcacctgttgtatgtattgatggagctgctgctcattgaactgtgtcccgagctaagaactcacttggatcaattcaaagctgggcaagtgtgagactgcacaaaccaaccatcagagaaatgtctgtgtaataatagacatgatattttcctcttttccacagaggacctgacaagaaccacactgatttttattttcgtacctccctctagtttctgtaaataagcaggatcagaggagcagactgatgctgtggtaggcactgttgtgtgatgcttggtgtaaagttattgtgaaaattttattgtctttatttttaccaaagatttcccatagttcgaagcatttgaagcaataaaatttaaa

SEQ ID NO: 2049 - DNA, 2061 bp, Cricetulus griseus
gagcatctccgggctgcactccctgagggaggggccaaacacttcgcagatgccgctagctgcagagggccgtggcgcttccgcaatgtccactgccgctgacaaccctgccgcagtgagctgcggtgcttcagctggcatgaacctgttcaagtgcacctcccttggtctgccaaaggcatctgctccctctgtacgccctaagcgttcggaaggccccctggaattccaggtcctgagagacagtgagaattccaactccattaccattatgggccttggcaccgcccacgttgctctcaccctgaagcctcaggatcctatggagcaaaaacgtcgcagaattgttgcagtttctgctggtgaaggatcagtccaagtacccgattaaggaatctgaaatgagggaattcattagtaaagaatatcgccacagttccccgagatcctcagacgagcagcagccacctggagtgcattttaggtttgaactgaaggagctagaccccgaggagcgcacctacatcctgctcaacaaactgggacctgtgccctatgatgggctagaagatatccccaatgggccaaagatgggcctcctgatgatgatcctgggaaaagatattcctgaaatggcaacccaagccagggaagctgatatttgggagatgctctggcgattcggggtgcagcgtgaaagaaggctctctgtgtttgggaacccgaagagacttctctcggtagagttcgtgtggcagcgttacctggactacaggcccataactgactgtggacctgtagagtatgagttttactggggcccgcgatctcacatcgaaaccaccaagatgaaaattctgaggttcatggctaggatctataacaaagatcctatggactggccagagcaatacaatgaagcgctggaagaagatgctctcaaaatattctccccattcatggcctgagtcaagattagagagcaagtcaaggaagctggtccagttatttctgctgatggattcaactaagctgcctataccaaagaaaggaattctgtattacatcggtcgagagtgcagcaaggtgttccctgacctcctgaatcgtgctgctcgcaccctaaaccatgtgtacggcaccgagctagtggtccttgatcccaggaaccactcctacaccctgttcaaccgaagagaaatggaagatactgaagaaattgtggacagtccaaacaggcccggcaacaacttcctaatgcaggttctaagcttcatctttataatgggcaaccatgcccgggagtcggcagtctgggcctttctgaggggcttgggagttcaaaatggaagaaagcacgtgattacctgcaggtatttgagccagcgctacatagacagtttgcgagttcccgacagtgatccagtgcagtatgattttgtctggggtcctagagcccgcttggaaacctccaagatgaaagccctgagatatgtggcccgaatccacaggaaggagcctcaggactggccagagcagtacagggaggccctggaagaggaggccaatagggctgacgccggggttgggggggggttacatatcgtgtttgatatttgtgttccagttccattcgtgtattttcatatttagttcttgtttggtatcttgaaaagtttcaattgttttaataatattgtccagtaatgtaaatgtgattgaccacttgtgtctctgttgtactttgctataagagttttgatagtgttgtaaaatgttttgggattctttccatcttgttgcattgtctaaaagataatatatagcatatagctatagatataggcttttccttgaaagcttgaaaaaaatcatcagtaaagtgatctagcttcagatgttaaacaaatatacaacaactgacaaagcactaaattgtggctggcttccctttctgtctgctattgtgtaaacaatactaatgtttacctgtatttgctttgctgtactaaaatgtattgaaaaataaaggtgtgataaatcaaaaaaaaaaaaaaaaaa

SEQ ID NO: 2050 - DNA, 2061 bp, Cricetulus griseus
tcccaaatgaagggcgcaatgactaccatccaatgttcttcacccatgaccgcgcttttgaagagctctttggcatctgtatccaactgctgaacaagacctggaaggagatgagggcgacagccgaggacttcaataaggttatgcaagtcgtcagagagcagatcacccgggctctgccctcgaaacccaactctttggatcagttcaagagcaagcttcgcagcctgagctactcagagattctacggttgcgccaatctgagaggatgagccaggatgatttccagtccccacctattgtggagctacgggagaaaatccagcctgagatcctggagctgatcaagcaacagcgcctgaacaggctgtgtgagggcagcagcttccgaaaaattgggaaccgtcggcggcaagagcggttttggcactgccgcttggcactgaatcacaaggtcctccattatggtgacttggatgacaaccctcaaggggaggtgacatttgaatccctgcaggagaaaattcctgttgcagatattaaggccattgtcactgggaaagactgtccccacatgaaggagaagagtgccctgaaacagaacaaggaggtgttggaattggccttctccatcctgtatgaccctgatgagacactgaatttcatcgctcctaataagtatgagtactgcatctggattgatggactcagcgccctcctggggaaggacatgtctagtgagctaaccaaaagcgacctggacacactgctcagcatggagatgaagctgcggcttctggacttggagaacatccagattcccgaggcgccaccaccagtccccaaggagcccagcagctatgacttcgtctatcactacggatgagcgggaagggactgcagctcagaagagacactggcagacttgtacagactcagtagtggtcgtggtgactactcctcaaacccaatgggacccagagcttctcttggtccccattcactaggagtcatgaagtcagggcatgctgccctcctcagcaccacagagcctggggtcgggcctggaggagtgaactcaagatgctcttgcctcctcccaccttgagtctgcgtctggaactggacttactgacagccatcccttttctctctagttttttggagaacccatgtgggttacagctgactcaggaaaggctgcccaaggggactgggaggactgggaatggtgagaggcttggagtgactatcttcaggttgctcagcaaggacaggccttgcttttgcttaataggtctctgagggctcattccggtctcaccctgtgccaagatgctgctgcctcagggctggccctaacatctctgtttctagaggtatccacctctcttgcctgtgcaggtgtcaggataggtagcaatctcttccccaagcactcggtctcatcctagccaggcagaggcctccagcctgagtcctgctctcttaggctccaggaacactgcaggaaaagtcaggcccaggccttgcagttctccccctccatttctatcttttccttgctgaggaagaatgtccttgtgccccttaggtacaggcccttctgtttgcttccctcttgcccccagactcggggcagtttaccttccctttctttccttcctggcactgtggtttctgccattagccatgatttcaagaagcggctagggccacagctgtgccatgggccttctctggtgctgcagcacttgaagcacacgcacagcctctctccttggacgcatgttaacatggtggtattgagtactggtagcctggcatggtggtactacccgacgaagagtgtactatatattttctctactataggccatacttatacagacatgtatatatatttatataagatcatcccatcctaggttagagtgtttaagggaagataaaactgagtgcaaaaatgtaatgctcttggtcatgagctaggggtgtaaccagagagcagccaggagcttcctgtcagtgactgtgttttcaataaatactctttcatg

SEQ ID NO: 2051 - DNA, 2061 bp, Cricetulus griseus
aatattggcaaccttgacaccgccttccctgagaagccagccttccttttgtcctgaactccacagtcctatcatggaggctgtgttcctggtggtcaacggggtgggcctggtgctggacttgctgaccttggtgttggatctcaacttcctgctcgtgtcttccctcctggctaccttggcctggcttttggctttcatctacaacctgccacacacggtactgactagtcttctgcacttgggtcgaggagttctgttttctttgctggccttggttgaagcattggtccgatttacctttgggggattgcaggccatgtgtacctttctttatagctgctactctggcttggagagcttaaagctactagggcacttggcctctcatggagctctgaggagccgggaactactgaacaggggcatcctgaacatagtctccaatggccatgctttgctgcgccaagcctgtgacatctgtgccatcgccatgagcctggtggcctatgtgatcaacagtctggtcaacatctgcctcattggcactcagaacctcttctccctggtgctggccctgtgggatgccgtggtgggacctctgtggaggatgactgacgtgctggctgctttccttgctcacatctccagcagtgcagtggccatggccattctcctgtggaccccctgccaactagtacttgagctgttggcctcagctgtccgcctcctggccagctttattcttttccacctcactggtttggtgttgttggcttgtgtgctggcagtgactttgactgtgttgcacccggactttacctggaggctggccgcccgagcactcagtcagctccatgcccggccatcctaccaccgacttcgagaggatgttgtacgggtatctcgtcttgcactgggtctggaggcctggcgcagactttggagccgaagcctacagctagccagctggcccaatcggggaggagcaccaggggctcctcaaggtggccccaggagggtgttctcagccaggatccagggacaagggactcttcctgaagcagaagcaggctagaggccgagagagactcaatgaggatgagcctacagctgggcaagacccatggaagctgctgaaggagcaggaggagaggaagaagtgtgttatttgtcaggaccagagcaagactgtcctgcttctgccctgccggcacctctgcctatgccaggcctgcaccgagatcctcatgcgccaccctgtctaccaccgcaactgccccctctgccgccgaggcatcctgcagaccctcaatgtctacctctgataactccctccctgcctgcccactctctgtgctccacacactgggaaagcatcaacattttgcctctgggtttggacctgcgtcttctttgccctaacatgacggcgactctgtcaagcctcaagccatatatccaggacatgcagctggaatattctggaagactccaatctgggtggggcagggtaagagtttctctgaaccctgtgccacaccacatccgtgtcatgtgaggattttggcgactcatgggccttggagtgatcttaatttttctatgttttggtttttcttattttggaatgatcttgaatctttatgctcagccagagcctctgccctggtgggtctgggagtagaatcccgtaggtgcccttctgcctgtcattgtcttttaagactccactgaccagaacctggggtcaggcgtttatccctgggcacaggagtgcagctaacctggctttgggaccatttactctcaggcaccccagttccaggaggagcctcagaaggaataactagatttctgctcattcctctcacgccccactcggcatagaacatgtcattcctcctggtctctctctctggcattggggaggtctgcacatttcactaggggtccaaacaaggggctaggcctcggggcttgcagctccgttaggtctgtccgcacagtttctatgaataaaagttctcttgacagctctaaaaaaaaaaaaaaaaaaaa

SEQ ID NO: 2052 - DNA, 2061 bp, Cricetulus griseus
gggcgcaggcggaggccccgggatggaccgtgaacctgtagggctagaggagccagttgagcagagtagcacagctgcccagctcgaggaagccaccagccaggagctggtgagagcgcccacagcatccctgagccctgaaccccaagatagcaaagacgacgtgaagaagtttgcttttgacgcttgtaatgacgtccctgcagctcctaaagagtcctcagccagtgagggcgctgatcagaaaatgagctctattaaggaagaacaggatataaaaccagtcattaaagacgagaaaggccatgccagctgtacctcgggaaggaacctgtgggtcagcgggctgtcctccagcacacgtgctgctgacctcaagagcctcttcagcaagcacgggaaggttgtcggggccaaggtggtcaccaatgcccgaagtccgtggggctcggtgctatggatttgtgaccatgtccacgtcagatgaggctaccaaatgcatcagccacctgcaacagaaccgaactgcatggaaggatgatctctgtggaagaaggccctccgggaagaagtcggcagacaggagagcttgtggacctgaaaggagaaggtgccagggccggacaggcctcaccctgtggagatcaagatggagaaaacagtgatcaagaaggaagagaagctagaaagaaaggaggaaaaaggctggaagacattaaaaaggagaaggatcaagatgagcttacaccaggaaccgccagtcggtctcgagtcgccaaatcaggaagcagaggcacggaacgtacagtcgtgatggacaagtccaagggtgagcctgtcatcagcgtgaaggctgccagccggtcaaaggacagaagctctaaaagtcaagaccgcaagtcggagggtcgggagaagagagacatcctgtcattcgacaagatcaaggagcagcgggagcgggagcgccagaggcagcgggaacgagagatcagggagacagagcggcgacgggagcgggagcagcgggaacgggagcagcggctagatgccttccaggaacggcgtgagaaggcgcgagtgcagagggaacggctgcagctcgagtgccagcggcagcggttggagcgggagcggctagaaagggagcgactggagcgggagcgcatgcgtgtggagcgtgaaaggcgcaaagagcagcagcgcattatgcgtgagcgtgaggagctgcggaggcagcaagaacagctgcgggctgagcaggagcggcgggcgctgcgcagaccctatgacctggatgcccgcaggagggaggacagctactggcctgaagggaagcgtgcagccatagaggacaggtatcgagacttcccacggctggatcaccgcttccacaacttcgaccaccgggagcatggccactaccaggaacatgtcataagcaggagagatgggtccagaccaggagtggaggaacgtgatgagcagcactacctagatgatcaccacagccatgcaggctcccttgagtaccatggttgggactcccgagacagctggcgtggctacagttctgacaagaaagtgaatgaaggccaagggctgccccctccccccagggtcagcagagaatgggaagagcacaactcacggctggaggagcagcaggttcccgcctggcacggtgctgtgaacacaaacacgacaggccacgagcacatgcggtggcgaggtgctgagcggggccttgtaggacctgggcacgtgcatgtggcagcaggcagaggtggcatggctgggcaaagcagctttgcacatggtggacattcccagggccatgtggtgcccactggtggactagaaggtggcggcgtgaccaaccaagaccaggatagcagagtcctccaccccccaccttcacccccacttcacccgccgttactgagccctgctctggaccaaaccctgctgctgcacttcaggcggaggctgtggcccaagccaccttgcacttggggcaccctgtttgtaagaaaaaaaaaaaaaaaaaaaaaaaaaaaa

SEQ ID NO: 2053 - DNA, 2060 bp, Cricetulus griseus
tgagacttaccttcacttagccatcctcatggatgaacttcaggatgttcaactcacagagatcaaaccacttctaaatgataagaatggcacacgaaacttccaggactttgactgccaggaacatgacattgaaacaccccatggtgtggtccacgtcactataagaaggcttaccaaaggaaacagaccagtaatcctgacatatcatgacattgggctcaaccataaatcctgtttcaacacgttcttcaacttcgaggacatgcaggagatcactcagcactttgctgtctgtcacgtggacgccccaggccagcaagaaggggcaccctccttcccaacagggtatcagtaccccaccatggatgagctagctgaaatgctgcctcctgttcttacacacttaagtctgaagagcatcattggtattggagttggagcaggagcctacatcctcagccgatttgcactcaatcatccagagctggtagaaggtcttgtgctcattaacattgacccgtgtgctaaaggctggatcgactgggcagcttccaaactctcaggcttgacgaccaacattgtggacataattctggctcatcactttgggcaggaggagttgcaggccaatttggacctcattcaaacctacagactgcacattgcccaagacatcaaccaagaaaacctccagctcttcttgggttcctataatggacgcagagacctggagattgaaagacccatactgggccaaaatgacaacaggttgaaaactttaaagtgttctactttactggtggtaggggacaattcacctgctgtggaggctgtggttgaatgtaattctcgccttgaccctataaatacaactttgctaaagatggcagactgtggaggactgccccaagtagttcagcctggaaagctcaccgaggccttcaagtactttttgcagggaatgggctacataccatctgccagcatgacccggctcgcccgatcacgaacccattccacctcgagtagcattggctctggagaaagtccctttagcaggtctgtgaccagcaatcagtcagatggaactcaagaatcctgtgagtcccctgatgtcctggacagacaccagaccatggaggtgtcttgctaagcagatgctcccctggaccatgcaagtccctcctccttgaaatgaccactccataatagaacatttcatcctgcccgctggcctccactttcaccccatgcatggccacagaacctttctctaatagcctggatttaccattctctccacacacccctttttgtatataccaagaaccacacccatgccattactgtaacattccaacatcttgatccgatctgatctccatatcttctcttgccagcctttccctattctccctcaaatatgtatctgatgagactctttgattcctaactccatgtgtgtgcgagcacgcgtgtctgtgtctgtgtgtgcatagttctgtgattttagacatgctttcttgtagcgcttctacaaagggatttttttgcattctcagtggcgtttttaagggaaatatgcagagcagatatctggatggcttgggccacacaattggattttggttccacttggacaatattctcagtttgtttgtttgtttgttttttcagaagagagcaggcctgagggatgtggggactgtagttactgtgtggcccattgattggctgtgatcagtagaatggtcacctgttacacagataggcaagatggcagtcacctcccctgtctaagtggattcatccaagagagctggaaaacagagaggtgtcataccagccagggagaccctctgggaggaagctgctacacagcaaggactcctcttagacatatccagatgtgagtccagccgggatcatgtggttccgaatctgaggaagaggtttttcatataccccttgcttcttctgttaagataaggaaggtgtcactctgccagagtgtgactttttacagattaaataaagctgtatatgtctcattgtta

SEQ ID NO: 2054 - DNA, 2059 bp, Cricetulus griseus
gaagaggcggcggtcggcaggagcggcggcagcggcggcaggagccaagaagcaggctccggacgctgcttaggaaccggggacccaggagtgcccgcaccctgagctctcagctccggaggcgtcatggccgagtacgggactctccttcaggacctgaccaacaacattacccttgaagatctggagcagctcaagtcagcctgcaaggaggacatccccagcgagaagagtgaggagatcactacaggcagtgcctggtttagcttcctggagagccacaacaagctggacaaagacaacctctcctacattgagcacatctttgagatatcccgccgtcctgacctactcactatggtggttgactacagaacccgtgtgctgaagatctcagaggaggatgagctggacaccaagctaacccgtatccccagtgccaagaagtacaaagacattatccggcagccctctgaggaagaaatcatcaaattggctcccccaccaaagaaggcttgagcaaaggggaggaagaggaggaaggttggatcttcatcagaccactcccttccccatcctcaatgggaggggctagggcaaccccctgccccgtacccacttactaacttggtcctaacccccttactatgcgcgtgtgtgtgcgtgttcacacgctctggctgtctgtctgtctagctcatctagttcctcctcctcgtgaggggactggagtcgggagggggggcttaatttccccactatagggggaagtggaagctatttctatgtaaatagaaatgggcacattcctccttctcccctcccctccactcttcccgcattttccttacactgaggagctaaggttaagatgaggtatgggagagatggtggagagttaaaaccaatggggaaggaaggtaagaggctactcagcctctacctggaaggggaaagaaaacccagaattcagggtttgtagatctatgctggactggctagaatccagtttcttgttattccttaggctgaagtcctaagagccaataggccctcttttatgcccttgtcatgggcctgggatgggtatgagccagaaatcttaatgagaagaccactagagcctttcctggcccccaaaatcaaaccccatggagaagccagcatttgatgtccccaacttctgctctggagagactatgctgggaccatgtactactgagcctgagatagggatgcaggtggagacaggcccaacttctactcctttattcctaaatacagactgttgaatatactgaccctgagcctaaggaggtttgggggaatgagatctataggttttaacctcaacctgcccatacctacagtattgtaggtaaccttcacaccagtctccagtttagaataccccaagcaagaaagaagttaatcatagtggtttcctttgcacctattaccaccccagttcaatccaggaagggacttggttaacctttctcatttgggtttgtggatgcctccaagccaagtcactagagtacagtgagtgaacccagcctcctacctgtcccaagatgcccttccccatcttgaccgtgctaactgtgtgtacatatatattctacatatatgtatattaaacccgcactgccatgtctgccctttttttgtggtttttagcattaacttattgtctaggccagagcaggagtgggaagggaatgccacagtgaagggagtggcagagcaaaattgttacatagtccaaacagcattgaaatcaaccacagcaaacattaaatttacatgcaagctcagagactttttagaggaagcttgaaggtaggagcttctagggtgtgggagcaaagctccacggggggagtgggggggcaggctgtcagaagagggaagaagccagactggctagcgtacccccaactcctagcccagcccagtctgcccatccccctggccactgctgcagacacctgccttaacacacacacctccaagactccagttttgccttaaaggtccttcctgagactcccta

SEQ ID NO: 2055 - DNA, 2059 bp, Cricetulus griseus
gcagacatcaggaggtgtgacacagtcatcaggaggtgtgatgcagtcaacagtctgaattttccttagaaaaagttccttggctctctgccacggacagcttagccagaaaagagagatcattgccacagcttgccaaccctgggcctgcccagatacaaggacaaataccacaagttggggtatacaacagaccttgcctgcatagactgaaatacttcttacgacctccagtacatcatcttttcttccagacattaatacctgataaagacacacgggagagcaagggtcagaaattagaacccatccctcatcgaagactaagaatggtgacaaacactattgaagaaaactttcctttggggactgtgcagtttttaatggactttgtctcaccccaacattacccacccagagaaattgtggctcacataacatccagaaaatcctgctcagtggctctgagactgtggatgtcctcaaggaggcctacatgcttctcatgaaaattcaacagctgcatccagccaatgccaagacagtggaatgggactggaaactgcttacctacgtcatggaggaagagggacaaactctgcccggacgagtcctctttctacgttacgtagtacagaccctggaagatgacttccagcagatcttgaggagacagcggcagcatctacagcaatccattgcaaacaccgttctgtcatgtgacaaacagccccacaatgtcagagatgttatcaagtggctagtcaaagcagtgactgaaaatgaattaacacagccccaagatggtactcagacttcttcaggaacaggagtcatgaaagctgccagcgaccacctgtctccccaacctaacctgaccaggaacaccaatcagctggttgtgtgtcagctgcagaggatgttgtccatcgctgtggaggttgacaggactcctacctgcagctccaataaaatagctgagatgatgtttgggtttgtgctggacattcctgagaggagtcagagggagatgttttttactaccatggaaagccaccttctgcgctgcaaggtgttagagatcatattcctccacagttgtgagacacccacccgtctccccttgtctctggcccaggccctctattttctgaacaactccacatcactgctcaagtgtcagtcagataaaagccagtggcagacatgggatgagctggtcgagcatctgcagttcctgttgtccagttaccagcatgtgctgagagagcacctacggagttcagtgattgatcgaaaagacttgatcatcaaaagaatcaagcccaagccccaacaaggagatgacatcacagtggtggatgtggagaagcagattgaggccttccgcagccgcctgacccacatactgggagaacccctggtcccccagctccaagacaaagtgcacttgttgaagctgctactcttctatgctgcggacttgaaccctgacacagagcctgcctcacagcactgaggcagccagacttgtaagcactgagtaccaagaatacctccggattgtcgccagctacttagaagctctgaagttatttatctgtaggctgtaatcactttataactcttcttcagtagatattttttttataatccttatcctagcatactcaaatgtgtcttaaacatacaaggtgtatatattttttattaaattatttatctatgcttttgaaacaggcaatacgatattgcactatatgtccaacatttccattcaagatgtgaaagaccctcggctaaaccatctcatcagtgttacatctgtcaaggtactaacgtcctgtttctggaaagactagttttttcctgaatagagcacattctatattagacttttcatattgcctatgatatgactctgtggtcagttaaattaactccactacggggcaggcagagtggacaagagagaaccaggattgagaaagtagtaaagatttttattgtcaatacaagataacacaaataaattaattttacaacaaaaaaaaaaaaa

SEQ ID NO: 2056 - DNA, 2058 bp, Cricetulus griseus
  modified_base (466)..(466): a, c, t, g, unknown or other
acggaagagtagagcacacccagactgggacaaagtgggtcgacacccaggtggtcctggccctgccttatgacacccccgtgcctgggtatatgaacaacacggtgaacactatgcgtctctggtcagctcgagcaccaaacgactttaacctccaagattttaatgttggagactacattcaggctgtgctggaccgcaacctggctgagaatatctccagagtgctctaccccaatgataacttttttgaagggaaggagctgaggctaaagcaagagtactttgtggtggctgcgaccctgcaggatgtcatccgacgtttcaaggcctccaagtttggatccaaggatggcgtgggaaccgtgttcgatgcctttccagatcaggtagccatccagctgaatgacacacaccctgcgcttgccatccctgagctgatgacctataccaaccgacacggtgntcccagaggcactggagcgctggccggtggagctggtggacgaagctactgcctcgacacttggagatcatttatgagatcaatcagaagcatttggacagaatcgtggccttgttcctaaagacattgaccgcatgaggaggatgtctctaaatccgaagaggaaggaggcaagaggatcaacatggcccacctctgcatcgtgggctgccatgcagtgaacggtgtagccaagatccactcagacatcgtgaagacccaagtattcaaggacttcagtgagctagaaccagacaagttccagaataaaaccaacgggattactccgaggcgttggctcttactctgcaatccagggctggctgacttgatagcagagaaaattggagaagactacgtgaaagacctgggccagctaacaaagctccatagctttgtgagcgacgacctcttcctccgggaaatagccaaagtgaagcaggaaaataagctgaagttctcccagttcctggaaaaggagtacaaggtgaagatcaacccatcttccatgtttgatgtccatgtaaagcggattcacgagtacaaacggcagctcctgaactgtctgcatgtcatcaccatgtacaaccgcatcaagaaagaccctaagaagttattcgtgccaaggacagtcatcattggtggcaaagctgcccccggatatcacatggccaaaatgatcataaagctgatcacctctgtggcagaagtggtgaacaatgaccccatggtcggcagcaagttgaaagtcatcttcttggaaaattacagagtatctcttgctgaaaaagtcattccagccacagatctatcggagcagatctccaccgcgggcacagaagcctctgggacgggcaacatgaagttcatgctcaacggggccctgaccatcgggactatggatggggccaacgtggagatggcagaggaagctggggaggagaacctgttcatctttggcatgagggtagatgatgtggccgctttggacaagaaagggtatgaggcaaaagaatattatgaggcccttccagaactgaagctggccattgatcaaattgacaatggcttcttttctcccactcagcctgatctcttcaaagacatcatcaacatgctgttttatcatgacagatttaaagtctttgcggactacgaagcctatgtcaagtgtcaagaaaaagtcagtcagctgtatatgaatcaaaaagcctggaacacaatggtactcaaaaacatagctgcctcagggaaattctccagtgaccggacaattaaggaatacgccaaggacatctggaacatggagccctcggatctgaagatttccctatccaaagagtctagcaggggcatcaacggggagtgacaggaaaatgtctctcagaaaggaatgacttctcattgaacttgaatatttttatagctttgctgattctgttttgttactgaataattagttaggtgtctctgagaatgggaaaggaaaacatatggctgtattagagactgaaaaataaaatgtagacttccagttgtcaaaaaaaaaaaaa

SEQ ID NO: 2057 - DNA, 2058 bp, Cricetulus griseus
  modified_base (1392)..(1392): a, c, t, g, unknown or other
gaagagctaaaggaagtaattgaacgctttaagaaagatgaacacttagagaaagccttcaaatgtttgacttcaggtgaatgggcacggcattattttctcaacaaaaacaaaatgcaggagaaattattcaaggaacatgtcttatttacttgcggatgtttgcgactgacagtggatttgaaatattgccttgtaatagatactcttcagaacaaaatggagccaagatagttgcaacaaaagagtggaaacgaaatgacaaaatagaattactggtgggttgtattgccgaactttcagaaattgaggagaacatgctacttagacatggagaaaacgacttcagtgtcatgtattccacaaggaaaaaccagtgctcaactctggctcggtcctgctgcatttataaatcatgattgcagacctaactgtaagtttgtgtcaactggtcgagacacagcatgtgtgaaggctctgagagatattgaacctggagaagaaatttcttgttactatggagatgggttttttggagaaaataatgagttctgcgaatgttacacttgtgaaagacggggaactggtgcttttaaatccagagtaggactgcctgcgcctgctcctgttatcaatagcaaatatggactcagagaaacagataaacgcttaaataggcttaaaaagttaggtgacagcagcaaaaattcagacagtcagtctgtcagctctaacactgatgcagacaccactcaggaaaaagacaatgcaatgctcactcgcagggggacagtttgccctgcacctacacaacccggcgctcattgaggacaaggacaggtctgaaggaagccactgacatcaagcttgaaccaagtcccttagatggctataaaaatggccttctggaaccttgcccagacagtgatcagcaccaaccccagaggttctggaagaactggctccagagactgcacatatggaggaagcgtcccaggagtgtcccaagagtgacccatgcccatcaagaaagaaatttcggcaagggaaacccatgaaacacttagcaaaggcagaagactgcagtctggagcatggcttccccgggaaagatgggctgccagatttgccagttccccatcctgaccagggtgagcccagtggcacgatcggggtgcctgtgagctacacagactctgctccctcacctgttggctgttccattgtcacacccgacagcttcacaacaaaagacagtttcagaactgcacaaagtaaaaagaagcgtcgggtcaccaggtacgatgcacagctgatactggagaacagctctgggatccccaaaactgacacttcgcaggcggacctgtaggcataatactgtagaaagtntacagcatcccgactcctaagtctgatttgtgcaaatttttatcgtacttttttaaatagccttcttatgtgcaattccgagtgacagcagctctccacacaggaccttcagacactaatgtggttccaccatgttgtcacttacctgtaagagcaagcgccagccctcttccatagatgactaaactgtagttagtctggagcggagcagcctcctgggaagggtttccagcatccgctcgaatcaccagcaacgacctctggctttgggtttatttgctagatgttcctctttggagttgtgttggtttcacactgtttaccggcccaggtgtcctgtccgtggccttcattatcatagagaccattggctggaagtcaggttgatttctttgaagaaaaaaaaataaaaaaaaatgcagtcttctgtatgacagctcattttcagtacattatatgtaccaggctggtggtgtgcaggatgagttttcaaagcagcttatttattgcttgtcatgtaaattaaagaccgtgtatttaacactttccaatcctttagataaaattgttctttgcaagaatgattggtgcttaatttttcaaacctttgctgtgaacagcgtggcaacagcaagcatcgtttgtctgatgaactccagctatctt

SEQ ID NO: 2058 - DNA, 2057 bp, Cricetulus griseus
cggcggtgccccgggatggctttcatggacgaagccccggccggcaaggtgctgctggacgacacggtgccgctgacagcggccgtcgaggcgagccagagcctgcagtcgcacacggaatatatcatcagggtacaaagaggaatttctgcagaaaacagctggcagattgttagaagatacagtgacttcgatttacttaacaacagcttgcagattgcagggctgagtttgcctcttcctcctaagaaactgattggaaacatggaccgtgaattcatagctgagagacagagaggcctgcagaactacctgaatgttatcatggcaaatcatgtgttgtccaattgtgagcttcttaagaagttcctagacccaaacaactattctgcaaactacactgagatcgccttacaacaagtttccatgttcttccgatcagaaccaaagtgggaggtggtagaaccactgaaagacataggttggaggataaggaagaaatatttcttgatgaaaattaaaaaccaaccaaaggaacgactggtgttgagctgggctgatcttggcccagacaaatacttgtcagataaagattttcagtgtgcaatcaagcttctgccttcctgtgtgcacccttacatatatcgggttacctttgccacggctagtgaatcctcagcattgctgattagaacctttaatgaaaaaggaacgttgaaggatctgatctacaaggcaaaaccaaaggaccccttcctaaagaagtactgcaaccctaagaaaatccagggccttgaactccagcaaataaaaacatatggacggcagatattagaggtactaaagtttctccacgacaagggattcccttatggccatcttcatgcggctaatgtgatgatggatggtaacacttgccggctgctagatcttgaaaattccttattgggtcttccttccttctaccgatcctacttcactcaattcaggaaaatcaatacattggaaagtgtagatgttcactgctttggccacttactatatgaaatgacttatggacgacctccagactccgtgcctgttgactcctttcctcctgcaccatccatggctgtagtggccgtgttggagtctacgctgtcttgtgaagcctctaaaaatggcatgcctaccgtctcccggctcttacagatgccattattcagtgatgttttattaacaacttctgaaaagccacagtttaagatccccacaaaattaaaagaggctttgagaattgccaaagaatgtatagaaaagagactcgttgaagaacagaagcagattcaccaacatcgaagactaacaagagctcagtcacaccacgggtctgaagaagaaaggaaaaggagaaagatcctagctcgaaagaaatccaaacgatctgctgttgaaaacagtgaagaacagccagtaaagcacaactccaataactcagcaggatctggggccagctcacctctcacatccccatcgtctccagttccaccctccacagcagggctgtcttctgcattacctccacctccaccaccacctccgcctccaccagcaggtccctcaacaacctcaggcacagagatgcctgtcccgctactgccccaggatatgaatggcgtgaaccgtggggccttgctcagctccatccagaatttccaaaagggaactttgaagaaagccaaaacctgtgatcacagtgctcctaagattggctgacgtttcttggtagagggagagtcagcattacaagtgaatctggcatctatggtgatcacttctgatttgatttatccaacttcagcatcttttttgatgttactcagatattagaaatctttcattctgtgatttgcttaaacctttaaataagttgcactttaaaggattattaaaaaatccattttaaaattcaaatacacacatcagtgttggttactatgcagaaagaatgtcattgtatatagtattgtaatctgtgatacatactcagctgtattttgtattaaaataaatcatgt

SEQ ID NO: 2059 - DNA, 2057 bp, Cricetulus griseus
tttgggatctgaccctttctaattctggcccctaataactcactgagaccctaaaaccatgggctgatgcctacccctttgccagagatcccggccacctccccctacggtaacggagatataatttctctcctggaattgcagattaggctcccttccccttccagcgccctcagcctccagtattccaattcgtcctcgtttgtaatgagtaggtctggggctttttagtcccaaggccctcgctttcctacttacagcctggtttctccagtgaaccctccccttcccttgtatctgcaaatccccagcctgagaaaagatggccccacagcccctaaggggcctggtcccatctctgctctggagcctgagcctgtttctgagcctcccgggacctgtctggctccagccctctcctcctccccattcttctccccgagctgaaccccatccatgtcatacctgccgagcactggtggacagcttcaacaagggcctggagagaaccaaccgggacaactttggtggtggaaacactgcctgggaggaagagaagttgtccaaatacaaagacagtgaaacccgcctggtggaggtgctggagggcgtgtgcagcaagtcagacttcgagtgccatcgcctgctggagctgagtgaggagctggtggaagcctggtggtttcacaggcagcacgaagctccagacctcttccagtggctctgttccgactccctgaagctctgctgcccctctggcacttttgggccctcctgcctgccatgtcctgggggcacagagaggccctgcggtggctacgggcagtgtgaaggggaagggactcgagggggcagcgggcactgtgactgccaagtcggctatgggggcgaggcctgtggccagtgtggccttggctactttgaggcggagcgcaacagcagccatctggtatgttcggcatgctttggtccctgtgcccgctgcacaggacctgaggaatcccactgtctgcagtgcaagaaaggttgggccctgcatcatctcaagtgtgtggacatcgatgagtgtgggacagagcaagcctcctgtggacctgaccagttctgtgtgaacacagaaggctcctatgagtgccgagattgtgcaaaggcctgcctgggctgtatgggagcagggcctggccgctgtaaaaaatgcagccgtggctaccagcaggtgggctccaagtgcctagacgtggatgagtgcgagacagtggtgtgtccaggagagaatgagcagtgtgagaacacggagggtagctaccgctgtgtctgtgctgagggctacagacaggaggagggtgtctgcatgaaggagaagatcccagagtcagcgggcatcttcgcggagatgacagaggatgagatggtggtcctgcaacagatgttctttggcgtcatcatctgtgctctggccacgcttgctgctaaaggcgacttagtgttcactgccatcttcattggagccgtggcagccatgaccgggtactggttgtcagagcgaagtgaccgtgtactggagggcttcatcaagggtagataatccctgccaccacttaggggatttcctcccacccagaatgtcccccagaggtctctcctgctggacacctggggcagtgtggtttctctttgagactggggtaaacaccattgaacctgccttaccgagcagcccaggaccccagtagccccaggggtgaaaaagaagccctgaagctgatgccatgagagccttgcctaggggactggcaggcattacagtgtgtgaatttcaaaagacagtttctccttagggaggttgcaggctttggcccctgctcactatgagaggtggcccctcaggggtgggggcccccatagcccccctgccaggtgcatgctgccagttcttgtcacgtgttcacctcccacgccccagccattgacttatttattcatctcaggaaataaaggtcggtctagaaaactggaaaaaaaaaaaaaaaaaaaaaaaaaaaaaaaaaaaaaaaaaa

SEQ ID NO: 2060 - DNA, 2056 bp, Cricetulus griseus
gggaagatgcagagctggagtcgcgtgtactgctccttggccaagagaggccatttcaatcggatatctcctggcctacaaggagtttcttcagtgcctttaagaacttatgcagatcaaccaattgatgctgatgtgacagtgattggttctggccctggaggatatgttgctgccatcaaagctgcccaattaggctttaagacagtctgcattgagaagaatgacacactaggtggaacatgtttgaatgtgggttgtattccttcaaaggctttattgaataactctcattattaccatctggctcatggaaaagattttgcatctaggggaattgaactgtcagaagttcgcttgaatttagagaagatgatggagcagaagagttctgcagtaaaagcgttaacagggggaattgcccacttattcaaacagaataaggttgttcatgtcaatggatttggaaagataactggcaaaaatcaggtcacagctacaaaagccgatggaagctctcaggttattggtacaaaaaacatccttatagctacgggttcagaggtcaccccttttcctggaatcacgattgatgaagatactatagtatcatctacaggagctttatccttaaaaaaagttccagagaagttggttgttatcggtgcaggagtaattggtgtagaattgggttctgtttggcaaagacttggtgcagatgtgacagcagttgaatttttaggtcacgtgggtggaattggaattgatatggagatatctaaaaattttcagcgcatactacaaaagcaaggctttaagtttaaactgaatacaaaagttactggtgccaccaagagatcagatgggaaaattgatgtgtctgttgaagctgcttctggtggtaaagccgaagttatcacttgtgatgtgctcttggtttgcatcggtcgacggccctttactcagaatttggggctagaagagcttggaattgaactagatcccagaggtagaattccagtcaataccagattccaaactaaaattccaaatatctatgctattggggatgtggttgctggtccaatgttggctcacaaagcagaagatgaaggcatcatctgtgttgaaggaatggctggtggtgccgtgcacattgactataattgtgtgccatcagtgatttacacacaccccgaggttgcttgggttggcaaatcagaagagcaattgaaagaagagggtattgagtacaaagttggtaaattcccatttgctgcaaacagcagagctaaaacaaatgctgacacagatggcatggtgaagattcttggacaaaaatcaacagatagagtactgggggcacatattctgggaccaggtgctggagaaatggtgaatgaagctgccctggctctggagtacggagcttcctgtgaagacatagctagagtctgccatgcacatccgaccttgtcagaggcctttagagaagcaaacctggctgcgtctttcggcaaaccaatcaacttttaatgagaagattgttttcctcaaatctggaagcttttgtcaaaacaggataatctcccagttccaagaatttgtaggataaattatgaaacctgtggaaggtatttagtaggttaaaacagaatggaataaccttgtacctatatttgttttcatgctatctgtgagattcaactttactgaattggcattcatggattttatctctaattcagtggaggtgaatctgttcacaaggaaggagctggagaattcatgtgaacagcttgaagaaaactgacaaagtgaaatttggttttcatattggaaacgagtcagtgattagaacaagattcaaatatgtacaaacaacttatgtaaataaaagtgattgtctctcattttatttaactcccaaatccctggtagtttagaggtagaatgaagattctgtctacaaaactattaaattggagactcatgattataccagggaatgaagataccaaaataaacatgtcttaaatatttaaaaaaaaaaaaa

SEQ ID NO: 2061 - DNA, 2056 bp, Cricetulus griseus
gttgcagctcggagccgttgagacgcctctgcggcagctggtggcgcaggtggccggcgtggacgtgggcagacgcggccagcgcgccccacagccccagcgtcgccgcccggcaggcgcgtcgggacaccccgaggcatcctcccccgcccgcgggcccgacagtcccagctcgtgtccgcgctcgcatctcccgatcgctgctgcgctgctcccccttctggtcttgggactcccggcgtcgcccctcaaacatgactcgcgatttcaaacctggagacctcatcttcgccaagatgaaaggttatcctcattggccagctcgagtagatgaagttcctgatggagctgtgaaaccacccacaaacaaactacccattttctttttggaacccatgagactgcttttttaggaccaaaggacatatttccttactcagaaaataaggagaagtatggtaaaccaaataaacgaaaaggtttcaatgaaggattatgggagatagataacaatccaaaagtgaaattttcaagtcaacaggcatcaactaaacaatcaaatgcatcatctgatgttgaagttgaagaaaaagaaactgtttcaaaggaagatactgatcatgaagaaaaagccagcaatgaagatgtgactaaagcagctgacataaccactccaaaagctgccaggcgaggaagaaagagaaaggctgaaaaacaagtggaaactgaagaatcgggaatggtggctgcagcaacagcttcttctaacttaaaagcaagtcctaagcgaggacgacctgcagctactgaagtcaagattccaaaaccaagaggcagacctaaagtggtaaaacaaccctgtccttcagagagtgacatggttattgatgaagacaaaagtaaaaaaaggggccagaggaaaaacaacctaaaaagcagccgaaaaaggaagaagaaagtcaaaaggaagaggataagccaagaaaagaaccagataagaaagaggggaagaaagaagttgaatctaaacggaaaaatgtagctaaaccaggggttacatcaacctctgattcagaagacgaagatgatcaagaaggaggtgaaaagaagagaaagggtggaagaaacttccagactgctcacaggaggaacttgttgaaaggccaacatgagaaagaagctgcagagcggaaacgcaagcaagaggaacaaatggaaaccgagcagcagaataaagatgaaggaaagaagccagaagttaagaaagtggagaagaagagagaaacatcaatggattctcgacttcaaaggatacatgctgaaattaaaaattccctcaaaattgataatctagatgtgaacagatgcattgaggcactggatgaacttgcttcacttcaggtaacaatgcagcaagctcagaaacacacagagatgatcacaacactgaagaaaatacggcggttcaaagttagtcaagttatcatggaaaagtccacaatgttatataacaagtttaagaacatgtttttggttggtgaaggagattcagtcatcacccaagtgctgaacaaatcccttgctgaacaaagacagcacgaggaagcaaataaaaccaaagatcaaagggaagaaagggccaaaacaaaaagctagagaaggaccaaacaggttcaaagaccttaaatggaggatctgacactcaagacagtagtcatccacaacataatggtgacagtaacgaagaaagcaaagacagccacgaggccagcagtaagaaaaagtcatctggagaagagagagaggccgaactatctctgaaggagtcaccactagataactaactaggttggcagatgtggggtgtaaagaatatgtgaagtctgttgtgaatggcttcatttgaaatacttaggctgctgaaagggttaaatttttataagcataggttttgatgtttaagtagtttggggaagaaatcctttatgtttgtgtaaaagtaaagttattataaaatgaatgttacttctaagcactcactccttttatcacaagt

SEQ ID NO: 2062 - DNA, 2056 bp, Cricetulus griseus
gctgcgggagagaattgagaaactggaaagaggcaggccaccgacgacgccacgctcctcatcgtcaaccgctactgggcccagctggatgagactgtggaagcccttctccgatgtcatgagcgccagagggagctgtcctcgggaactgaggcaccgtgggtgccaggacggggctcactcgtgagtgggatccctgcggccaacgagcaggctgggcctatcaaccgtgagatgcgccatctgattagcagtctccagaatcataatcaccagctaaaaggggatgcccagcgatataagcggaaacttcgagaagtacaggctgagattggcaaactccgggcccaggccagtggctcttcccactgcatccccagcctgagccacccagatgactctggcctcaatgccctagcccagggaaagaagatggtgggccaggccctggaggtactcctgacagcaaaaggagatagctgcagtgcctggagccacccctgctgcttcttcagtaaagaaggaggagctggtctcctctgaagatgatgccctggccctaacccctggaaaccagggcttgcccttctcgaggccgagaacctgaggccagacccaagcgagaacttcgggaacgggaagggcctgtcctggggcccctacctgtagcctcagctctctcaagggcagaaggagatgaagctgctgctggacatgtacaagtctgcacccaaggaacagcgggataaggtgcagctgatggcagctgaacggaaggccaaggctgaggtggatgagcttcggggccgcatccgagaactggaggaaagagatcgaagagaaagcaagaagattgcagatgaggatgccctgagacgaatccggcaggcagaggagcagatagaacacctgcaacgcaaattgggtgccactaagcaggaggaagaggcactgctgtcagagatggatgtgacaggccaggcttttgaagacatgcaggagcaaaatgggcggctgctgcagcagttgcgggaaaaggatgacgccaactttaaactcatgtcagagcggatcaaggccaaccagattcacaagctgctccgagaggagaaggatgagttgggcgagcaggttcttggcctcaagtctcaggtggatgcccagctgctgacagtgcagaagcttgaggaaaaggagcgggctctgcagggcagccttgggggtgtggagaaggagttgaccctgcgcagccaggccctggagcttaacaagaggaaggctgtagaagcagcccagttggctgaggacctgaaggtgcagttggagcatgtgcagactcggcttcgagagatccagccgtgcctggcagagagccgggctgcccgagagaaagagagtttcaatctcaagagggctcaggaggatatttcccggctgcggcgcaaactggagaagcaaaggaaggtggaggtttatgcagatgctgatgagatcctgcaggaggagatcaaggagtataaggcgcggttgacctgcccctgctgtaacactcgcaagaaggacgcagtgcttaccaagtgcttccacgttttctgcttcgagtgtgtgaggggccgctatgaggcccgccagaggaagtgccccaagtgcaacgcggcctttggtgcccatgattttcaccgtgtgtacatcagctgaacctgaacctcaggggactttgaacatccatataccctaggggctgtgccccagctccccactccccaggggcaatggccccagcttcctttccagactccatgaacccagccctatgtacctagatggtttggggctactggtgcatgcaggagaggtggaattaaccaagctgagtgccatcttttcctgaatgtcagatctgcagcctagggcactctcccaggtttataacatccagccttgagagctggcctaaccctgtttcttctggagagacagatccatccttacccctaaagaggaattcttccaccaggaaagggcttaccacctgcctccacaaactcagtgatga

SEQ ID NO: 2063 - DNA, 2056 bp, Cricetulus griseus
aagaaggagaggatgagcaagcatgccagaccttgggccaacagccacgcaccagggaggacctgcacaggaccgtggagtgtacctgtccttgctggcttccctccgggcccgggctcagctgcctgtggtagtcttcacgttttcccgaggccgctgtgacgagcaggcttcgggcctcacctctcttgacctcaccaccagctcggagaagagtgaggtccacctctttctgcagcgctgccttgcacgactccgcggctctgaccggcagctaccccaggtcctgcacatgtcagagctcctccgccggggcctgggtgtgcaccacagcggcatcctgcccatccttaaggagatcgtggagatgctgttcagccgagggctggtcaaggtcttatttgctactgagaccttcgccatgggggtaaacatgccagccaggacagtggtatttgactccacgagtgcttgatatgtcagatcaaaccgtcccagcttcagtcccagttccgcctcacatacaccatgatcctcaacctgctgcgggtggatgccctcagggtggaggacatgatgaagaggagcttctcggagtttccatcccgcaaggacagcaaggcccatgagcaggcgctggctgaactcaccaagcggctgggggccttggaggagcccgacgtgactggccaactggccgacctgcctgattattacagctggggggaggagctgacggagacgcggaacatgatccagtggcgcatcatggagtcagtgaatgggctgaaatccctgtccacgggaagggtggtagttgtgaagaacaaggagcatcacaatggccttgggggtgatcctgcaggtctcctcaaactccaccagcagagtgtttacaacactggtcttgtgcgacaagccggttgtgtctgagagcccacgggacaaggggccagccactccagatgtgccccagccagatgaccttgtgggcttcaagctgttcctgccggaagggccctgtgagcacactgtggccaagctacagccaggagatgtggctgccatctccaccaaagtgctccgggtgaacggggagaagatcgttgaggacttcaccaagaggcagcaaccaaagttcaggaaggaccctccccttgcagctgtgaccactgccgttcaggagctgctgcgtctggctcaggcccatccatcaggacccccaacccttgaccctgtcaacgacctgcagctcaaggatgtgtcagtggtagaaggtgggctccgggcccggaagctggaggagctgatccggggggctcagtgtgtgcacagcccccggttccctgcccagtacctgaagcttcgggagcgaatgcagatccagaaggaaatggagaggctgcgcttcctgctgtccgaccagtcactgttgctgctccccgaataccaccagcgtgtagaggtgctccggaccctgggctatgtggatgaggcgggcacagtgaagctggcggggcgagtggcctgcgccatgagcagccatgagctgctcctcactgagctcatgtttgataatgcactgagcaccctgcgacccgaggagattgcagccctgctctctggcctggtctgccagagccctggcgaccctggggatcagctcccgagcaccctcaaacagggggtagagcgcgtcaaagctgtggcgaagcggattggtgaggttcaggtggcctgtggcctgaaccagacagtggaagaatttgtgggagagctgaattttgggctggtggaggttgtgtacgagtgggctcggggtatgcccttctccgagttggcaggactctcagggacccctgaaggcttggtggtccgctgcatccagcgcctggctgagatgtgccgctcgcttcgaggcgccgcccgtttggtgggagagcctgtgctgggtgccaagatggagacagcggccaccttgctacggcgggacattgtctttgcagccagcctctacacccagtaaagggtgtgggataaaggtgtgtaacaataa

SEQ ID NO: 2064 - DNA, 2055 bp, Cricetulus griseus
tacagtccagggattggaccgactccttcaggagattttgttgattactgcttgcacaaaatacctcaggaaagaccagccgcagtggaactattacagcatgacttcattcggagggagcggccaccacgggtccttattgacctcatacagaggacaaaagatgctgtccgagaattggacaacctgcagtacagaaaaatgaagaagatcctcttccaggagactcggaacggacccttgaatgagtcacaagaagaagaagaagacaatgagcatggaagcaacctgaacagggaggtagacagcctgggtagcatccactccatccccagcgtgtcagtgagcacgggcagccgcagcagcagtgtgaacagcatacaggaggtcatggatgagagcagccccgagctcatcatgatacaggaggatgaagtcactgtcaactccagctcctccatggtgcacaagaaggatcatgtattcgtaagggatgaggcgggccacggcgatcccaggcctgagccgcggcctacccagtcagttcagagccaggccctccactatcggaaccgagagcgctttgccacgatcaaatccgcgtctttggttacacggcagatccacgagcatgagcaggagaacgagttgcgggaacagatgtcaggttataagcggatgcggcgccagcaccagaagcagctgatcgccctggagaacaagctgaaggctgagatggatgagcaccgtctcaagctccagaaggaggtggagacgcatgccaacaactcgtccatcgagctggagaagctggccaagaagcaagtggctaccattgaaaaggaggcgaaggtagcctcagcggatgagaagaagttccagcagcagatcctggcccagcagaagaaggacttgacaactttcttagagagtcagaagaagcagtacaagatttgcaaggaaaaataaaagaggaaatgaatgaggaccatagcacacccaagaaggagaagcaggagaggatatcaaagcataaagagaacctgcagcatacgcaggctgaggaggaagcccacctgctcactcaacagagactgtactacgacagaaactgccacttcttcaagcggaaaataatgatcaagcgccatgaggtggaacagcagaacattcgggaggaactgaataagaagaggacccagaaggaaatggagcacgccatgctgatcaggcacgacgagtccacccgagagctagagtacagacagctgcacacattgcagaagctccgaatggatctgatccggctacagcaccagacggagctggagaaccagctggagtacaataagaggcgggagcgggagctgcaccggaagcacgtcatggagcttcggcaacagccgaaaaacttaaaggccatggaaatgcaaattaaaaaacagtttcaggacacttgcaaagtacagaccaaacagtacaaagcactcaaaaatcaccagttggaagtcactccaaagaatgagcacaaaacaatcttaaagacactgaaagacgagcagacaagaaaactggccattttggcagagcagtatgaacagagtataaatgagatgatggcttctcaggcgttacggctagacgaggcgcaggaggcagagtgccaggccttgagactacagctccagcaggagatggagctgctcaacgcctaccagagcaaaatcaagatgcagacggaggcccagcacgagcgcgagctgcagaagctagagcagagggtgtctctgcgcagagcgcatcttgagcagaagattgaagaggagcttgccgcctgcagaaggaacgcagcgagagaatcaagattctcctggaaagacaagagcgagagacggagacttttgacatggagagcctcagaatgggatttgggaatttggtgacattagattttcctaaggaggactatagatgagattaaatttttttgccatttacaaaaaaaaaatgaaaaaagaaaacaaaaaaattcagaccctgcaaaactacattccc

SEQ ID NO: 2065 - DNA, 2055 bp, Cricetulus griseus
aagcgcagcggaggccggcggggccgagggcgccatggcggcgggcctgctgcccagcgccggggtgctgctggcgccgctgctcttggggctcacggtgctgagcgttgggcctgccccggcgcgggctctgcacaacgtcacggccgagctctttggggccgaggcgtggggcaccctggcggccttcggggacctcaactccgacaaacagacggacctcttcgtgctgcgggaaagaaatgacttaatcgtctttttggcagatcagagtgcaccctattttaaacccaaggtactggtatccttgaagagtcacagtgcattaataacaagtgtagtccctggtgattatgatggagattcacaaatggatgtcctgctcacatattttccccaaaatcataccaacaatgaattaggagctgttatcttctggggacaaaatcaaaccttaaattctaaaaacatgaccatactcaataggacttttcaagacgaaccactgattatggacttcaatggtgatctaattcctgatgtatttggtatcacaaatgaatccagccagccacagatactattaggaggaaatttatcttggcatcctgccttgagcactaaaagtaaaatgaggaatccacattcgcatgcatttattgatctgactgaagattttacagcagatttattcctcacaacattgtctgcctctaataccttccagtttgagatatgggaaaatttgggtggaaacttctctctcagtagtgtctttgaaaaacctaaaaacctagtggtggttggacagtcagcgtttgcagactttgatggagatggacacatggatcacttgctaccaggctgtgaagataaagactgtcagaaaagtgccatatacttaatgagatccggaacaggacagtgggttcctgtgcttcaggattttagcagcaagggtacactctggggctttgtgccatttttgcatgaagagcaaccaacttcaataccaatcccactcacccttcatattggagactataacatggatggctacccagatgctcttgccatattaaagaatacatctggaagcaatcagcaagcctttttactggagaatgttccatgcaataatgcgagctgtgaggaagtgcatcggatgtttaaagtctactgggacctagcaggcctaaatctaatcaaagatgccatggttgccaccttttttgatatctatgaagatggaatcttggacattatagtactcagtaaaggatacaccaagaatgatgttgccattcatacactcaaaaataactttgaagcagatgcttattttgttaaagtcattgttcttagtggtctatgttctaatgattgtcctcgtaagataacaccctttggagtgaatcagcctggaccttatattatgtacacaacagttgatgcaaatggatatctgaaaaacggctcagctggacagctcagccagtcagcacacttagctctccaattaccttacaatgtacttgggttaggccgaagtgccaatttcctggaccatctttttgttggtattccccgtccatctggagagaagtctataagaaaacaagagtggacagcaatcattccaaattcccagctgattgtcattccatatcctcacaatgtccctcgaagctggagtgccaaattgtatcttacaccaagtaacattgtcttactgactgcagtagccctcattggtgtctgcattttcatcttggcaataattgccattttacattggcaggaaaagaaagcagacgatagagaaaaacggcaggaagcacatcggtttcattttgatgctatgtgactttgcttaagtcgtacataatggaactcacttgattaatgaaataccaaatctcaactcataagtaaaaaaatatggatttgagatattataaattatgccttccttgtctaattattaggaaaatactaaaataaatatggcctggatatctcagagggttctttaaagctactttgtatgtaata

SEQ ID NO: 2066 - DNA, 2055 bp, Cricetulus griseus
  modified_base (1749)..(1749): a, c, t, g, unknown or other
caacctggacagttactctgtgcaccagcaggagaaggcgatgaggacagggaggcagagatggatgacgaagaggaggccctaggctctgacttggatctggacctgggtgatggtgagacaaatgaaggtgagcagccagatgcctccctgcccctttacgtgctcccgctctactctttgctggcccggagaagcaggcacaggtcttcagacctcctccagaggggacaaggctatgcgtcgtggccaccaatgtggccgaaacgtccctgaccatccctggcatcaagtatgtggtggactgtgggaaaagttaaaaacgctattacgaccgtgtgacaggcgtgtcctccttccgtgtcacctgggtctccccaggcatctgctgaccagcgggcaggtcgtgcaggccggacagagccaggccactgctataggctgtattcctcagctgtttttggggactttgagcaatttcctcccccagagatcactcgcagaccagtggaggacttgatcctgcaaatgaaagccctcaacatcgagaaggttatcaacttcccattccccacacctccctcagtggaggccctcgttgccgctgaggagctgctgattgcactgggggctctgcaagcacctcggaaagaagaaagaatgaaaaagctgcagatgtcacaactgagctgccccattactgcactgggacggactatgtccaccttccccgtggcaccccgctatgccaagatgctagcactgagccagcagcatggctgcctaccctataccattgccattgtggctgccatgactgttcgtgagctcctttgaggaactggacagaccagctgccagtgaagcggagcttgcagagctgaagggccgtcgagcccgtgtggcccaaatgaagaggacctgggctgggcagggggcatctctgaagcttggtgacctcatggtgctactgggtgctgtgggagcctgtgagtactccggctgctcaccccagttttgccatgctaatggactgcgatacaaggccatgctagagatccgacgcctccgtggccagctgaccaccgcagtcaatgcagtgtgccctgaggccgggcagagctgcctgagtttgtggtctaccaggaaatagtggagaccaccaaaatgtacatgaaaggtgtctccaccgtggaaatccagtggatcccatccctgctgccctcctattgccagttcgatgcgcccctggaggaaccagcccccagttactgtccagagtcaggacgggtgctgtgccaccgggccagtgtgttctaccgagtaggctggccactccctgccatccaggttgactttcctgaaggcattgaccgctacaagtactttgcacggtttctgctggagggacaggtcttctgcaagctggtttcattcaagagctgcctgctgtctagccccagcaccatgctgaagacttgggccaggctgcaacccaggacggagagcctattgaaagcccttgtggctgagaaggcagactcccgtgatgccctgctagctgcatggaagaaaaaccccagatacttgctggctgaatactgtgagtggctcccaaaggctatgcacactgacgttgagaagagctggccccccataactgactgctgaccacacacccagctacagtcagctggctcctaggctgttactaggaaccacactgtgaccctggaagcccttttttancttggctcaattcagaaccaagtttgctgctgcactgaccatgagtgccttcttgttttttttttttttttttttttggtttttggagacagggtttctctgtgtagccctggctgtcctggaactcactctgtagaccaggctagcctcaaactcagagatctgcctgcctctgcctcccaagtgctgggattaaaggtgtgtaccaccacaaaaaaaaaaaaaaaaaaaaaaaaaaaaaaaaaaaaaaaaaaaaaaaaaaaaaaaaaaaaaaaaaaaaaaaaaaaaaaaaaaaaaaaaaaaaaa

SEQ ID NO: 2067 - DNA, 2054 bp, Cricetulus griseus
gatccaagatttgtgttcctcctggaccgaggactggacatctatgtgtggcggggggcccaggctacgctgagcaacaccaccaaggccaggctctttgcagagaaaattaacaagaatgagcggaaagggaaggcagaaatcacactcgtggtgcagggccaagagcccccagagttctgggaggtactggggggggagccctctgagatcaagaagcatgtgcctgatgacttttggccaccccagcccaagctgtacaaggtgggcctgggcctgggctacttggagcttccccagatcaactacaagctgtcagtggaacataaaaaacggcccaaggtggaactaatgccaggaatgagactgctgcagagcctgctggacacacgatgtgtgtacatcctggactgctggtctgatgtattcatctggcttggccgcaagtccccaagactagtgcgtgctgctgcactcaaactaggtcaggagctgtgtgggatgctgcaccggccacgccatgcagtggtcagccgcagcctggaaggcaccgaggctcaggtgttcaaggctaagttcaaaaattgggacgatgtgttgacagtagactacactcgaaatgcagaggctgtgctgcagggccaggggctctctgggaaagtaaagcgtgacactgagaagaaagaccagatgaaggctgacctcactgcactcttcctgccacggcagccaccaatggcactggctgaggcagagcaactgatggaggaatggaatgaggacctggatggcatggaaggcttcgtattggagggcaggaagttcactcgactgccggaggaagagtttggccacttctacacacaggactgctatgtcttcctctgcaggtactgggtgcctgtggagtatgaggaggaagagaagacggaagtcaaggaggggaaggcctcggtccagggcacagaaggggaggaagcagaagctgaggcagaggagaagcagccagaggaagattttcagtgcatcgtttacttctggcagggccgggaggcctctaacatgggctggctcaccttcaccttcagtcttcagaagaagtttgagagcctattccctggcaagctggaggtagtacgtatgacacagcagcaggagaaccccaagttcctgtcccatttcaaaagaaagttcatcatccaccggggcaagaggaaggcgggccagggtactcttcagccgagcctctatcagatccgcaccaatggcagtgccctctgcacccggtgcatccagatcaacacagactccagccttctcaactctgagttctgcttcatcctcaaggtcccctttgaaagtgaggacaaccaaggcattgtgtatgcctgggtgggccgggcatcagaccctgatgaagccaagctggcagaagacatcctcaacagcatgtttgatgcttcctacagcaaacaggtcatcaatgaaggtgaggagccagagaacttcttctgggtaggcattggtgcacagaaaccctatgatgatgatgcagagtacatgaagcacacaaggctcttcaggtgttccaatgagaagggctacttcgcagtgactgagaaatgctctgacttttgccaagatgacctggcagatgatgacatcatgttgctagacaatggccaggaagtctacatgtgggttgggacccagacaagtcaagtggagatcaaactgagtctgaaggcctgccaggtatacatccagcacacacgctctaaagaacatgagcggccacgccgcctgcgcctggtccgcaaaggcaatgaacagcgggcttttacccgctgcttccatgcctggagcaccttccgccaagccccagcctaagcagttatctatgacctgagactccagtgaggaagaagaggcctcccagcacatgtttcagctacccaccactcttgcccacatcctgcaagccccaccagcgtgtccacatgtgtgcagcagacgtagtttaaaagatattaaatgcttttattttcaatatt

SEQ ID NO: 2068 - DNA, 2054 bp, Cricetulus griseus
  modified_base (1445)..(1445): a, c, t, g, unknown or other
  modified_base (1449)..(1449): a, c, t, g, unknown or other
  modified_base (1453)..(1453): a, c, t, g, unknown or other
gctctcttttctgagtgctccactcataggagctctctctgatgtgtggggcaggaagccctttctccttggcacagtcttctttacctgcttccctatcccactgatgaggatcagcccgtggtggtattttggcatgatttctgtatctggagtcttctcagttcactttttctgtaatatttgcctacgtagctgacttcactcaagaacatgaaagaagtactgcttatggatgggtctcagccacctttgcagctagtctggttagcagcccagccattggaacatacctctctgcaaattatggagacagccttgttgtgttggtagccacagtggtggctctactagacatttgcttcattttggtggcagttccagaatctctaccagagaaaattagacctgcttcctggggcgctcagatttcttggaaacaagcagacccctttgcgtcattaaagaaagttggaaaagactctacagtcttactcatctgcatcacagtgtttctctcatacctccctgaagctggacagtattcaagcttttttctctatctcaggcaggtcataggttttggatctgtgaaaattgtagcattcatagctatggtaggaattctgtccattgtggctcagacagtcttccttagcaaattgatgagttcactagggaataaaaatactgtcctccttggcttgggtttccagatgctccagcttgcctggtatggttttggatctcaggcctggatgatgtgggcagcaggaactgtggctgccatgtccagcattacattcccagcagtcagtgccctcatctctcggaatgcggagtcagatcaacaaggggttgcccaggggatcataacaggaatacgagggctctgcaatggtctagggccagcactatatggcttcatattctacatgttccatgttgaactgaacgagttgggcccagaattgaattctgatgatgatcccctacagggagctttcatcccaggcccgccgtttttatttggagcatgtatagttcttatgtcttttctggttgccttattcatccccgaataccgtaaaaacagtggagttcaaaaacataacagcagcaccagtggcagtccaagcaccccccctgaacggggcaatgatgaggacattgagccattactgcaagacagcagcatctgggagctctcctttgaagatcctggaaatcagtgcactgaactataacctagcactaaaggaggttctgcagacaccatctctgagagccatggaggaagctgcaccacctggatacttcatggtgctggaggggcaatgctagcagcatcttttgggccaagttaaataagttacttttctcatgcctctgcccttcattcttctgcctctttctgttcctttactcacattcttttctttttntttntttntttattatatatatatactttgtcctacttctgttttcctcaccatactcctgccttaactgttaatgtagaatgtgtttgttttcaactagtctgtatctcagtctttttttctgaatttagaatctcatgggaatgcacacatcaaattaaaaaaaaaacatgagggttagtgaagctcagtttcatgataagtatcttgctaattttttgagatgttttatggacaaagaaaactttgcagattttatattttactgcacagtaaatgaaccattaactagggtctatctttaacaaagcactcctttgaaagttttataggtatgaaaacatgtagatatttgtaaggattttaattttttgatggggtactgtgtaaatcttgtatttataaataatgaaggtattgacagaaaaaatatatacaacttttataaaggattgtgtactgactgaatacatttaaagaaaaatatattttgaagcctgttctgccatgaacagatgtaacatatctttttactatgctgttggtttttaggttaagcttcttaatgcataataaattttcaatgatactttcatgtcttaaaaacaa

SEQ ID NO: 2069 - DNA, 2054 bp, Cricetulus griseus
tggaaacagagcggtaatcagaaattctagccatcttccaaaagacagaatagctgaagattttgcttgggctcagtgggatatgtcagagcagagattatactacattgaactggagaagtcaaagagtgtcttgagatgcatccagttttggccagatgagagctttactttaatgtttgaaatgcccttggacatatcattgagtggcttaagatttaaatttgtcaactttggatatgattatcatcaagaccaagaaaagttatgcaaccagccttctctgtgcgtttttaccaaccacacaggcagtttgtgtgtgtgctacagcccaaagtttgactctggggaagaaatcacatattcagtgttttaccttcataaagggtacagaaagaccttcacttctgctcctgggagtgccggctcacacgtgacaaactcacacgtgacaaagggaattacttttctcaaccttggataccttgtggctgtttacttccctggccatttccttcatttacttaatattcagcacccagacttgatctgccacagtctgtttctgacaggaaacaacaaaatggctgctgtgctacctcccagtcccttacagtccctgccggggtccctcatactggactgctcttctggaaaggtctatagagcaacccttgaccagtcgtacctgctgtggttcctatggaacgccgcccacctggactgtgagaagatggctgcattgcactgtgcactctcgtgtggtcaggacccaggtttccaggaagaccagattattcagtgggtttgtgaacatgtctctggctgccattcatttgacctcattcaggaatttctaattgcttcttcctactggagtgtgtatccagagctggttgacgtggacatgctcttaccacactcctctgtgctgacttggaacgaggaaattcctggaataatgcttgtgacagaagagctcccgttgcttcttatgaaggtctacagcttgacagggtactgggcaaagctgaactccaacctcgagtacgtcaagtatacgaagcctcacttacactatcacaacagtgttgtgaggagagaatggcataacttgatctctgaagagaaaacgggaaaaagaaggtccacgatgtatgtgaggaacattcttgacaatgcaataaaggtgatttctaacatggaaataaggacattggagccaaggttaatacccctcttacaagaggaagataggcaccagaggctgctcattggcctgatggtgtctgagctaagagaccatctagtgagacacctccagggtgtagaaaagaagaaaattgaacagacgactctggactacatttcaaaactgctgaatctcatttggtgcatgctggaaaccatctggagaaaacacagtgtgcatccgtgggttctccacctcaataaccgtggcagtgcagcggattttgaagtttttcacctcatgaccagaattttggatgcttctaacaatctgtgtttccctctgcctcctggtttccactccctgcacatgattcttggggttcactgtctccctttgtacaacctgctgcactacattgataatggggtgctgttgctcactgagacagcggtcacaatgcttatgaaagatctggacaattcagagaaaaatgaaaagctaaaattcagcatcattgtgcggctgcctccgcttattggccagaaggtctgccggttttgggaccatcccatgagttccaacatcatttcacggaaccatgtggcacagctgctgaagaactacaaaaaagagcctcgaaactctatgattggcaagtcatcattcccaacagaatttctgcctctcaactacttcattgaaactctgacaggcctagagtcctcccaccaagctctgtgtgattttgaaggacaagacaatgtggacgcagaatttgtagaggaagctgctctgaaacacaccatggcgcttttgggtttataaagttgatgtgcagattcacttttttttttttttc

SEQ ID NO: 2070 - DNA, 2054 bp, Cricetulus griseus
gaggtcagcattgcctttgtcaatgagcagaagtcagagcagcacctgcagtttctctctacgcttctggactccttctcctcagacctagtatttaaagttctcctcggtgatgaacagaagaatattatcaaagccagacctctggcggtcggcaaacttgcacaagaaaaccctgcagtgcagttcttgtatcataagctggtcggctggctaaatgagagtaagaagaaggatggggccttcctggtagacatcttgtacagtgccctccgatgctgtgacagtgacttggaaaggaaacatgtcttggatgatctgaccaaggctgtggggcagatagttaccgttaagccactgagcgaggatttctgctatgttctgggatacctccttacttggaaattgatacttactttcttcaaagctgcttcatctcagcttcgtgctctgtactcaatgtaccttcggaaaacaaagagtttgaataaattactctatcatctgttcagacttatgccagaaaaccctacttatggagagacagctattgaggtgtcaaataaggacccgaaaacattcttcactgaggagcttcagctgagcattagagagacagcaactcttccgtaccattattaccacacttggcatgttcagtctaaccatatgactttaaaagacttgcctgccatggttagactgtggtggaacagcagtgagaagcgtgttttcaatattgtagacagatttacaagcaagtaatgtcagcaatgttctttcttttcaagaaatctactactcgagaagtgatggctacttacaccattgaagacatagtcattgaactcatcatacagttgccttccaactacccactgggttcaataaccgtggaaagcgggaagagaatcggggtggctgtgcagcagtggcgcaactggatgctgcagctgagcacttacctcacccaccagaatggaagtattatggaaggcttagcattatggaagaacaatgtagacaagcgttttgagggtgttgaagattgtatgatctgcttctcagttattcatggtttcaactattctcttcctaaaaaagcctgtagaacatgcaagaaaaagttccactcagcttgcttgtacaaatggtttacgtctagcaacaaatccacttgtccactctgtcgtgagaccttttttctgttagttttttttaaatgtaagttgtccctgcagtaggtcaagccagaggcaatggacttggctccatcttgaagtactgattacaccacatcaggaactggggaagttaattacttaaaaccatcagaaatgaaggatttagtactaagttaaattaacttttttttttgtttttgttttgagacaggatttcactgtgtagttccgggctggtctggaactcactatgtagaccatactagcctggatctcagagatctgcctgcctctgcctcctaaatgctggtattaaaggtatgtgctaccagtcctggtgaaatgaagttttaatagactgaagtgtgtaaataagtaaaaaattagccttggctacagtctcattgcctttaaaaactgtatccagagtatgaggtgtggaaatttggatcacagtcttccatttcatatctagtagttaggacacctaaaaggtgggttcatctctgcaaatgtctgattagaagggtacaactcatgtctaataaaattgctgcttcccaccaactggccaacatgactgttattgaaatagtatgaatttggtcagggttacagtccagagtaacaactgtgtgtggattacagatgcatcatcggcttgtctgtcttctgggttttttcagtgtagtatttattatcttacagtcttgaggttcagagacagagtgacgtatagatatcaaaattctactacctcttcttaacccttaaaacattctcttacctttgtctgcctctgacacagtaatctcaaggattgtgtaatactctgtaaaattattcttttacctttaaaagttggtttta

SEQ ID NO: 2071 - DNA, 2053 bp, Cricetulus griseus
atcatgaacgggcccttgcacccccggcccctggtggcgctgctggatggccgggactgcacagtggagatgcctatcctgaaggatgtggccacagtagccttctgtgatgcacagtccacacaggagatccatgagaaggtactgaatgaggctgtgggtgctctgatgtaccacaccatcacactgaccagagaagatctggagaagttcaaagctctcagaatcatcgtccgaattggcagcgggtttgacaacattgacatcaagtcagctggggatctaggcatcgcagtatgcaatgtgcccgcagcatctgtggaagagacggcagactccaccctgtgccacatcctgaacctataccgacgaaccacctggctgcatcaggcccttcgggaaggcactcgggtccagagtgtagagcagatccgagaggtggcttcaggagctgccaggatccgtggagagaccttgggcatcattggactaggtcgtgtgggccaggcagtggcactgcgggcaaaggcttttggcttcaacgtcctcttctatgacccatacctatctgatggcatcgagcgggccctggggctgcagcgtgtgagcacactgcaggacctgctcttccacagtgactgcgtgaccctgcactgcggcctcaatgagcacaaccaccacctcatcaatgacttcactgtcaagcagatgagacaaggagccttcctggtgaacacagcccgtggtggcttggtggacgagaaggcgctggcccaggccctgaaggaagggcggatccgtggcgcagcgctggacgtgcatgaatcagagcccttcagctttagccagggacccttaaaggatgcacccaacctcatctgcacccctcatgccgcatggtacagtgagcaggcgtccattgagatgcgagaggaggcagcccgagagatccggagagccatcacaggccggatcccagatagcttgaaaaactgtgtcaacaaggaccacctgacagctgccacccactgggccagcatggaccctgctgtggtgcaccctgagctcaatggggctgcctacagtaggtaccctccaggtgtggtgagtgtggcccccactggcatcccagctgctgtggaaggtattgttcccagcgccatgtccctatcccatggcctgccccccgtggcccacccaccccacgctccttctcctggccagactgtcaagcctgaggcggatagagaccatacaagtgaccagttgtagcctgtgaggagctctccagccttggcgcctggtggagggcgtcacatgcccttggacccaagtgtgcagaggtggcatccagtatgggccttggcgctccagagactggcccaggcgtgcactaggcggggcaagaggaagcacgtccccaagtcgattgtagttgtcccgtcctgtgggctggctcactgtcctgtgtcctttgcgttcttcgttaagcaaaagaagttagtagctaattctatcacgaatgttcttgtctgtgtacaaatttttagaacattacaaaggatttgtttgcttagctgtcaacaaaaagaaaacctgagggagcattcagcaagtcagtttgagattatttttccttttctacgttggaacgtgccccggaatgtggccgtcggcacacttctcaggacaatgaatccttcccgtttttctttttatgccacacagtgcattgtttttctacctgcttgtcttatttttagaataatttagaaaaacaacaaaggctgtttttcctaattttggcatgaacccctttgttccaaatgaagacggcatcgcgagtggctcagaggagtgtttgcagtgcccagtgtgctcaggaccattggtgtctgtcctggggggaggcaggggttggcagacctttgcctgcgtggtgccgtcctgctgatgtggtaggctagcaatattttggttaaaatcatgtttgtgactgtaaccatttgtatgaattattttaaagaaataaaaatcccagaaagagccagca

SEQ ID NO: 2072 - DNA, 2053 bp, Cricetulus griseus
atggttgtttatgccggtgtggaagagtcagcctaagcttggcagaagcagggaggatatgacggaggcagagcagattgtgtatgatcatttttctgaccccaagtttgtcgagcagttaattacttttctatctttagaggacagaaaaggaagagataagttagtcccggcgtttctgtctctttaaggggagatgtgttgcagaattatagctggcttaatcagaggttctaagcattggacatttgagaaggtggagaagctttgggaactcctcctgccctctgctgagaacagcattgtccaacatgacagtggagacgtacaatgactggggaacctgtatagccacatcctgtgaaagcagagatccccggaagcttcattggctttttgaactgctcttggagtcaccattgagtggtgaaggggggtcctttgtagatgcatgtcgactctatgtgcttcaaggtggccttgcccagcaagaatggagagtccctgagctattacacagacttctaaagtacttggaacccaaactcacccaggtttacaaaaatgtcagagaaagaatagggagtgtgctgacctacatattcatgatagatgtttctttgccaaatactgcaccaacaacatccccttgtattcccgagtttactgcccgagtcttagagaaactgaaacctctcacagatgtggatgaagaaattcagaaccatattatggaagaaaatggcattggtgaagaagatgaacgaactcagggcattaaactcttaaaaaccatattgaaatggcttatggcaagtgcaggaagatctttttctacagcagtcaaagaacagcttcagcttctgcctttattctttaagatcgccccagtggaaaatgacaatagctatgatgaactgaaaagagatgcaaaactctgtttatcactaatgtctcaggggttgctctaccctcatcaagtgcctttggtacttcaggtgctaaaccaaacagcaagaagcagttcttggcatgcaagatatacagtgctgacctacctccagaccatggtattttataatctgtttattttcctaaataatgaagatgcagttaaagacatcagatggctgatcatacgccttttggaagatgagcagttagaggttcgagaaatggctgctactaccttaagtggtctgctacagtgtaacttccttaccatggacagtggtatgcagattcattttgagcaactttgcaaaacaaaactacccaagaaaagaaagcgagaccctggttcagtgggagataccattccttctgcagagttggtcaaacgtcatgctggtgtgcttggacttggtgcatgcgttctttctagtccttatgatgttcccacctggatgccccagctccttatgaatctcagtgcacatttgaatgatcctcagcctattgagatgactgtaaagaagactttatccaatttccgaaggacacaccatgacaactggcaagaacacaagcagcagttcactgacgatcagctgcttgtcctcactgacctccttgtgtcaccatgctattatgcatagagagatgactagtcctgatttggggctcaattcatcaaaaattccagatcctcaggtatcatctgtggtgactctctgcaggtctcacaattcagcctctgttgagctgtcttcattttagtgacttcggtgtttggcctcattagtcttcgttcacaggttcccagctgccatttgatttcctaacttgtcctgaagtttcccagaatactgatcactttttctttgagacgtatgacaaagtcacaaagtctcagactagaaataacccagtatgatcatggcatcatgaccaaacagtctagaaatttgttaaaaaacaatttccttggaatggagagaatactcgtcagtaatgtaggtcctgtcgtttcgttcatctccaattattttgactccttcctcaaaggctgttggatttaatggtagtaggccatgggccatgcatctgaagt

SEQ ID NO: 2073 - DNA, 2053 bp, Cricetulus griseus
  modified_base (413)..(413): a, c, t, g, unknown or other
  modified_base (1350)..(1350): a, c, t, g, unknown or other
  modified_base (2032)..(2032): a, c, t, g, unknown or other
cactgcagcaagctcttcaagcagcccagccacctgcagacgcacctgctgacacaccagggcacacggccccacaagtgccaggtgtgccacaaggccttcacccagaccagtcacctcaaacgccacatgctgctgcactctgaggtcaagccctacagctgtcacttctgtggccgtggctttgcctaccccagcgagcttaaggcccacgaggtaaagcacgagagtggccgctgccatgtctgtgtcgagtgcggcctagacttctccactctgacccaactcaagcgccacctggcctcccaccagggccccaccctctaccagtgcctcgagtgtgacaagtccttccactaccgaagccagctacaaaaccatatgctcaagcaccagaatgtgcggccctttgngtgcacagaatgcggcatggagttcagccagatccatcacctcaagcagcactccctcacccacaagggcgtgaaggagttcaagtgtgaggtgtgtggccgagagttcaccctgcaggccaacatgaagcgccacatgctgatccacaccagtgtgcggccctaccagtgccacatctgcttcaagaccttcgtgcagaagcagacgctcaagacccacatgatcgtccactcgccggtgaagccattcaagtgcaaggtgtgcgggaagtccttcaaccgcatgtacaacctgctgggccatatgcacctgcatgcaggcagcaagccgttcaagtgcccatactgctccagcaagttcaacctcaagggaaacctgagccggcacatgaaggtcaagcatggcgtcatggacatcagcctggacagccaagccttgcagggagctgggcgcaggcctaggcatcccagtgagggaaaggtaaccaggaggccccaatccggttctccttggcctgctgctgtgggtgggtagggaaatgctagtgaggtctcttgcaggcatgggggcacagacttagtagtcttctcaaagctgcctcaggcccataggggctcttgaggaagagaatgcttgagccaggtcttgtctccattctgcaccgactctggcctttaaggacatctgcgctcctgcactggtcagcactgcccactccaaccctgcacagacccaagaacctcttcccatcccctgtcactcaacagccaggcagggcactctgccttctacctcctgggccctccccttgctccatccagacatgcatgcggcccgtgccctggccctgcctgtaggagagccggggagcccagcctccagagcccctcccagccagccggcagagccacccttacccccagccctatttgaaanaatgtccctaatgtgcccaagccaggcctcagggtgactgttcaaaactgggagtcagatggacacaatgacccaagtgtggtttcccaaggctcccggcctcccaggtgcctgtcatgaagaccctcaggtggcagtgattaggtgtcactgtacaagacatttctcctgctgagcagaaggcatcacccctgcaaactacctcttcccacaatgactttctcccctggtaccaaaaagcaccctgtacctcctcctcctcctcctctcctgccaatgcagtggccttggtcttggaaacagaagggagaagtctggcctgggtggggtctctcattgcctcccagcctgccattggcacaaccccctgaggagtaccatgctcataaagcccccgccctacgcctcgtgcctgggcaatgcagagaggaaggtacaacacagtgcacagttggagctgggggcggtcctggcaaggctccggcctcacccctcccagctttctgaaaaggggtgactcagaaaccctggccgaattccactctaacttattttgacgtgtatacaaaccaactgtttagcgattccacttgtgcagacgccctactgttgtttttatgttccttagtttaaaagagtacgtttacttagacaaataattagaggaaaagaaaaaaaaaanaaaaaaaaaaaaaaaaaaaaa

SEQ ID NO: 2074 - DNA, 2053 bp, Cricetulus griseus
gaggccctgacaaaggctgggagcttgtaggccagactgagctctggaacctggaccctcctggcgcttcacaccccttggcagatcaccctataatcttccatccaaacctgggcacagaaccggggctttgttgttgggcagagagggcgtgagacccttagaaactggctgggaacaggcactgggtgatgacagttgtgcccaggatgtcagagggagaggccaagccccctcaatgtagcaaaagtctagagataccctctcacctcctcctgcttatgggactttgaaccagaaggaaagccacccctgcagccacgagaacaattgggagcagagttccagtaggtgcccctcctgggggtaggggaacagatggcaggagaataggaggcttggcactcctgtgtccctagggcaagggagtgcgttcacagcccagctgctccttccatgggcacccaacaagcagggaaacaactgtgccagttattgttgggtttctgtcagagtcacatgtatgagcctcagttctaggccagtacccttgcaggggagtgtccagatacctcaccagcagctgctaagagccaggcctgtgttttaccacactcctcagggaatcccaggagacacctgctgttggctcaggcagcacaacaggaattcacctttccccagctctcctttgggacccctgctcaacgtggaggcttagggaacccctgcaataacctcaacacagggaggctgtgccttctgcctggcaccacccactcaccaacctgggttgcctctcctagggtccctccaaaaagttctgggtcattctaggaggttccatcttggggctggctggctagctacaaggagcaccaaccacccctccagcctggagtccccatctctctacacaccccctcactcccaccacaaagggctataggtctccctgccctgcctgagtccagtttacaaactgtggttgctccagggcctggtcccgctttcctggggtgccaccacttccttagtggacacagggcccacataacgccaggtaagtagcaaactcctcctgccaagagccgaatctcagaaggcccccatcactgccctggccctcctgtggccatcaggccctccttcccagccgctacttctcctcttgccttaggcctctccaccctgatctgcaataacaaggaagcgagatcctcagtagacatcccgcatccctcgtgcgccctctctctgttgagatcctgtgtgggaggcctctcccctgtagtatctaggatggtagtcctcagaagagactttaggtacgtagcccagccccactgttcagaggtggcagccagcctgaccctgaaacagactgactgggtctggctctgccctgcagccaccactggtactgtctctgtcagtagggttgggaccctttgccctttaggagaggtgttggttacagatgtttacctcagtttgactgttgaagaaaataataataatagcaaaaatcaataacatcgtagacatggagacttagaagacaaaaaccacagaagaaacctccccctttgcaatttttctgtgaaggtatagttcgttcatgttcgcgcacgtatgtgcgtgtctgtctcgccccagggcaggccagatcatctattgacacctgtcccagcctgtgtgtccatcacactgcccctgtcctttggtgcttcccaggggcccctttgagctggcttgtggggtgtaggggagctccctggataggaagtggggccttcagttagctagaggcctcccaccagatcctgtgagcagaggagccctacagctgtgtgatgctccctgagcccacagcacagtacagtgcaagtctgtggcagggcctgggtggaacccaagccctccggcctcattctcctgtctcgcctcccctatcccatgtgtttgtaaatattctggcatcctttggccctgaggaggtttttaaatgtgttatttacttctctaactatagacaattgcgtataaaata

SEQ ID NO: 2075 - DNA, 2053 bp, Cricetulus griseus
tggaggctgaggtatgagtggtgatggggtcgggctctgcctctggctttagctctggctctggcacggactcccggtctgggtctggtaacctagtgacccgacacgatttttcgactctccggtggggtcctgcctgcgtcccggcagctgttttggagcgcttcaaagaagggagggcgttcgagtgcgtggggtcgggtctgtgaagccaccgcctcctcccagcgatccagtccgtggccggcctcttccatgcagttgaaataagttgacaaccattagcccgggttgcaactgcaggtggcactggaaactgactggttcctggacatgcccagtagaaggaggggtcctagtcggcagcagctaagccgttcagctttaccttctatgcagactttggttggtggcggctgtggcaatggaacaggcttgagaaacaggaatggtagtgctattggccttccagtcccacctatcacagccttaatcaccccaggtcctgttcgtcattgccaaattcctgacttaccagtcgatgggagcctgttctttgaatttctgttctttatctacctgctgattgttctgttcattcagtacatcaacatctataagaccgtgtggtggtatccatacaatcatcctgcgtcttgtacttcattgaattttcatctcattgattatcacctggcagcattcatcacagtgatgcttgcgaggaggcttgtatgggccctcatttcagaggccactaaggcaggtgcagcgtctatgattcactacacagctctgatactggcccgcttggtgctacttactctgtgtggatgggtgctctgttggaccctggttaatctcttccgaagccattcagttctcaatctcctcttccttggctacccgtttggtgtttatgttcctctctgctgtttccaccaagatagtagagcacatcttcttctcacagactatgtggttcagcaccaggcagtagaggaaggtgcttcgaatgtgggcagtttggccaaatccaaagatttcctctccttattgctggagtctctaaaagaacagtttaataatgccacgcccatccccacccacagctgtcccctctctcctgatctcattcgaaatgaagtagaatgtttgaaagcagatttcaaccacagaatcaaggaagttctcttcaactccctcttcagtgcctactacgttgcatttctcccactgtgttttgtgaagagtacccagtattacgacatgcgctggtcatgtgagcacctcattatggtgtggatcaatgcttttgtcatgctcaccacgcaactgctaccatccaaatactgtgatttgttacataaatcagctgctcacctgggcaagtggcagaagttggaacatgggttctacagcaatgctccacagcacatttggtcagaaaacacaatatggcctcaaggggtgttggtgcggcacagcagatgtttatatagagccatgggaccttacaacgtggcagtgccttcagatgtatcccatgcccgcttttatttcctgtttcatcgaccgttaaggctattgaacctgcttatcctcattgagggcagtgttgtcttctaccaactctattccttgctgcggtcagagaagtggaaccacacactctccatggcactcatccttttctgcaactactatgttttatttaagctcctccgggacagaatagtcttaggcagggcatactcctaccccctcaacagttacgaactcaaggcaaattaaggtgcctctcaacatgagggagaactcagataaaaatattttcatacgatctattttttttcttgcgatttttataaatatttaagatattttatattttgtatactattatgttttgaaagttgggaagggtaagggatattaaatgtatccataaacaagtgatgttatctttcatgtgttagtgtatttgaatattatacatgagaggatgcccttcagtaaaagattgaacttaagttaaaaaaaaaaaaaaaaa

SEQ ID NO: 2076 - DNA, 2052 bp, Cricetulus griseus
tagagtccgggacagggcagctgcggagccggaggcggcgacagctgggcggcggtggccatgggcaaggactattaccagacgctgggcttggcccgcggcgcgtccgacgacgagatcaagcgagcctaccgccgccaggcgctgcgctaccaccccgacaagaacaaggagcccggcgccgaggagaagttcaaggagatcgccgaggcctacgacgtgctcagcgacccgcgcaagcgcgagattttcgaccgctacggagaagaaggcctaaagggtggtggccccagtggcggtagcagtggcggtgctaatggtacctccttcagctacacattccatggagaccctcatgccatgtttgctgagttctttggtggcagaaacccctttgataccttttttgggcagcgcaacggggaagaaggcatggacatcgatgacccattctcgggctttccaatgggtatgggtggcttcaccaatgtgaactttggacgtgcccgccctgcccaagagcctgcccgaaagaagcaagatcccccagtcacccacgatctccgggtctcccttgaagagatctacagcggctgtaccaagaaaatgaaaatctcccacaagcggctgaaccccgatggaaagagcattcgaaatgaagataagatcctgaccattgaagtgaagaggggctggaaagaagggaccaaaatcacctttcccaaggaaggggaccagacttccaacaacattccagctgacatcgtctttgttttaaaggacaagccacacaatatcttcaagagagatggttctgatgtcatctatccagccaggattagccttcgggaggctctctgtggttgcactgtaaatgtccccactctggacggcaggaccatccctgttgtattcaaagatgtcatcaggcccggcatgcggcggaaagttcctggagaaggcctccctctccccaagacacctgagaaacgtggggaccttgttatcgaatttgaagtcatcttccccgaaaggattcccctgacatccagaaccgtcctggagcaggttcttcccatatagccacctgcattctccaaggactgagccagggacttttccagagctgcagatttccggaccgttcactggttgcatactgcgggagggcccagggagggcttttgctctgccgaatgttttccacagaatatattacaatctttcaaagtcgctcactagactacagtgattttttgagtgataggcaggcggtgggaacaacagccctcctggaatggacccaccctctgcatcccagctcctgcccaagggtgtgaggcaggcctgcaactggactcgcccccattgctgtcctttagtttctggctctcatgtggcagtgaccaccatctcagttgccagaccttgtgcactagtcagtctccactgtgtgagaggttcttgttttattctgtatttgtcccatgccttgttgttcctccccagaagaatcctgtcttgtcttggccatctcaaattgagactagttcaataggactgccaggccagcatcacaagcaatacctggttacaggaccacatggccagcctctgatattgtgtgtgtgtgtgtgtgtgtgtgtgtgtgtgtgtgtgtgtgtgtgtgtgtaatagactctgaactctctcaaaaggatataatccttttgaattttgcacagccctagatataatccctttatataaaagggtctttgcttctgatgaaaggagccctgtgaaacgtctgtaaatatgttttataattccattcaaagctggtgtgcgcccagatgaaagcagtccctgtcaactactactgtctgtccagggctgtgatggagtcagccctgggagtgaaggggtctgttctttgaagctagcccggtgctctggcattcgactcattgtaagttgccactaccaacacgagaccaaagtgtgtgacttgtcattctgcagtgtgacagcattaaagactgatgcaaaacctcaaaaaaaaaaaaaaaa

SEQ ID NO: 2077 - DNA, 2052 bp, Cricetulus griseus
tttggtctttttgaagccatgtctgctattgaaatgatggatcccaagatggatgctggtatgattggaaaccaagtgaatcggaaagttctcaattttgaacaagctatcaaggatggcaccattaaaattaaagatctcaccttgcctgaattgataggaataatggatacctgtttttgctgtttgattacttggctagaaggccattccctggcacagacagtgtttacctgcctttacattcataacccagacttcatagaggatcctgccatgaaagcttttgctctgggaattttgaagatctgtgacatcgcaagggaaaaagtaaacaaagctgctgttagtcaatgacgtacggatttaaaatggcaaacagtgtgacagatcttcgagttacaggaatgctcaaagatgtggaagatgatatgcaaaggagagtaaagagtactcgaagtcgacaaggagaagagagagatccagaagttgaactagaacaccagcaatgcctggcggcattcagcagagtgaagttcacccgcgtgctgctgacagtgcttatagcctttactaagaaggagaccagtgctgttgcagaggctcagaaactaatggtccaagcagcagaccttctgtctgccatccacacttcattgcatcatggcatccaggctcagaatggcactaccaaaggagaccatccaattatgatgggttttgagccccttgttaaccagaggctacttccacccaccttccctcgctatgcaaaaataattaaaagagaagaaatggtcaactatttctcaagattaatagacagaataaaaacagtctgtgaagtcgtgaacttaccgaacttacattgtattctggactttttctgtgaatttagtgaacagtcaccatgtgttctttcaaggtctctgttgcaaaccactttcctcgtggataacaaaaaggtctttggaactcacctcatgcaggatatggtaaaagacgcacttcggtcctttgtcagtcctccggtgctctcccccaagtgttgcctctataacaatcaccaggctaaggactgtatcgactcctttgttactcactgtgttcggccattttgtagtcttgttcagatccatggccataacagggcccggcagagagacaaactgggtcacattcttgaggagtttgctaccttacaagatgaggcagagaaggttgatgccgcgcttcacactatgttgctgaaacaggagccccagagacagcacctggcctgcttaggaacctgggtcctttaccacaaccttcgcattatgatccagtatctgctcagcggctttgaactggagctgtacagcatgcatgagtactactacatctactggtacctctctgaattcctgtacgcatggctgatgtcaacgctgagccgagccgatggctctcagatggccgaggagaggataatggaggagcagcagaaaggccgtagcagcaaaaagacaaagaagagaaagaaagttcgcccattgagccgagagatcacaatgagccaggcctatcagaacatgtgtgctgggatgttcaaaacgatggtggcatttgacatggacggcaaggtgcgcaagcccaagtttgaacttgatagtgaacaggttcggtatgagcacaggtttgccccgttcaacagcgtgatgacaccgccgcctgtacactacctgcagttcaaggaaatgtctgacctcaataaatacagccctcctcctcagtctccagagctgtatgtggcagccagcaagcacttccagcaagctaaaatgatcctcgaaaacatccccaacccagaccgtgaggtcagtcggatcctcaaggtcgccaagcccaacttcgtggttatgaagcttttagcaggaggacacaagaaagagtcaaaggttcctcccgaatttgatttctctgttcacaaatactttcctgttgtgaagctggtgtgaaagagttaattaattacttgacaaaaaaaaaaaaaaaaaaaaaaaaaaaaaa

SEQ ID NO: 2078 - DNA, 2050 bp, Cricetulus griseus
tccttgctgtccgagctgtacactctcacctgaagtacctggtggacaaccatgccagtgtgtgggcatctgccagcttccaagagctgtggccttctccgaagaacctgaagctctttgaaagggctgctgaaaagggaaattttgaagctgactgtgaagttgggaatcgcctacctctacaatgaaggcttatctgtgtcagatgaggcctgtgcagaagtgaatggcctgaaggcctctcgcttcttcagtatggctgagaaattgaatatgggttctgagcccttcatctggctcttcatccgcccaccatggtcactggaagctgctgcaaggccgtggtccacgacagcctcagggcagagtgccagttacagagagctcataaagcttctatactacactgcttgggaagagtgctaaatctttttgaggacggtgcagaaggggctcagcgatacgatgagatacattctaattgactggttggtagaagttgccacaatgaaggacttcacaagcctgtgtctccacctgacggtggagtgtgtagaccggtacttgcagaggagactggtaccccgatacaagctccagcttctgggtattgcctgcatggtcatctgtactcggttcatcagcaaagagattctgaccattagagaggctgtgtggctcacagacaacacatacaagtacgaggacttggtacgaatgatgggagagatcgtctctgcactggaagggaagattcgagtccctacggtggttgattataaagaggtcctgctgacactggtccctgttgcatccagaacccaacacctgtgcagctttctctgtgagctctccctgctgcacaccagcctgtccatctacgctccagcccgcctggcctcagcagccctgctcctggccagactgatgcatggacagatacagccctggaccactcatctgtgggacatcactgggttctcttacaacgacctcacgccctgcgtcttgagccttcataaaaagtgtttccatgatgatgcacccaaggactacagacaagtgtctctgaccgctgtgaagcagcgctttgaggataagtgctatgacgagatcagccaggaagaggtgctgagctatgcagaattgtgcactgcactaggagtgaaacaggagagcccagagccctcatctttcccgagcacaggggaaatccacaccttcctcagctcaccgtctgggaggagaaacaaacggaagcgggagaacagccttcaagaggacaggggcagctttgtcaccacgcccacagcagagctgtctagccaggaggagacactgctgggcagcctgctggattggagcctggactgctgctctggctatgaaggagaccaggagagtgaaggagagaaggagggtgacgtcacagctcccagtggactccttgatgtcactgtggtctacatgaacccagaacagcactgctgccaagagtccagtgatgaggaggcctggccagaggacaagggccaccaagcggcacatccaaccccagctctcaggccccttctctgcaacaggggagatctgggcaaggacatcacgacctctggatactcttccgtcagcagcttgagtcccataagctccctggatggtggcatgaggggctctccccgatctacctcagtgctgtctgtgggcagctactcaaacacaaagccttgccaccatcaggccaagaagtcatgtttacagtgtcgccctccaaatcccccagagagcggtgttcaccagcaacgggtaaagcgccaaaacctgtcagtgcacagtgacgaggacacgaacttaggcttcctgaagctctgagtacgttagtgttggccatggtgaaatgtttactgtggtcaacagcctcacagcagtcatgccacacccgtggaacccatctctacccttctgtgtcctgctggctctgggagcatgagcctctgtgttggcattcacagtcacaggccaggagctgacagcttccttggaatactag

SEQ ID NO: 2079 - DNA, 2049 bp, Cricetulus griseus
gggatctaaggcaaaggagcatgaaaaagaagaggaaggggacggagacaccctggacagtgatgagttctgcatccttgacgcccctggcctaggcatcgcgccccgagatggggaacccattgtgacacagctgcacccaggccccatcatcgtgcaggacgatacttctcccagccactgggaacctgcccacttcccacgtgcccagcagcgtgtggtactacgggagtctccttcatctggcacctctatggggtagagactttggccttcacccactcacagagcaagagttggtttcaccaggccccacgggtctccccttcccgctcctcctggtcccaaccgaaccccacgaactcctcgggcggtaccccaaaggtgggtatcggacggcagcaccaggctctcatggagatccagctcagcaaagtgagcttccagcatgaagtatacccagaagagtcagccacaggtgggggccctggccaggagccggaagagcggccactgtcccgccaggtgctcattgttcaagagctagagatccgagaccggttggccacctccaagatcaacaaattccttcatttgcacacgaagcgagcggctgccaaggcgctcacactctaatatgcttaccataaaggcgctgcatgtcgctcccaccagcagcctgggagggccggaagggcagtctgagggcacagagacagcgagtagtccccatgaggttccaggcagtggccacagctcctctgacccacagcccatctacttcagggagttccgcttcacatctgaggtgcccatctgcctggattaccatggcaagcatgtcaccgtagaccaggtgggcactttcacaggactgctcatcggcctggcccagctcaactgctccgagctgaagctcaagcggctttgctgccggcatggtctcctgggtgtggacaaggtgctgggctatgccctcaatgagtggctgcaggacatccgcaagaatcagctgcctggcctactgggaggcgtgggccccatgcactcagttgtgcaactcttccaagggttccgggacctcctgtggctacccattgagcagtacaggaaagacgggcgcctcattcgggggctgcagcgtggggctgcctcctttgggtcgtccacagcctctgctgctctggaactgagcaaccggctggtccaggccatccaggctacagctgagacagtatatgacatcctgtccccggcgtctcccatctcccgctccctacaagacaagcgttcttcacggaaactgcgcagaggccaacaacctgctgacctccgggagggcatggccaaggcttatgatgctgtccgagagggcattctggacacagctcagaccatctgtgatgtggcatcaaggggccatgagcagaagggactgacaggtgctgtagggggtgtaatccgacagctgcccccaacagtggtaaaaccaataatcctagcaacagaggccacatccaatgtgcttgggggcatgcgaaaccagatcctgccagatgcgcataaggaccatgctctcaagtggcgcgtggaggagacccaggactgactgcaggcacctaagatctacccactgtcccaacatgctcactgtgtacagccagccacagtggtgccaccagctccctggtttcctgattgctgtgacccacagctaggccaccagacccttcaagggatggccactgtgaaggatacctgcccagtctgcctgttgccaattcgccgtgagagtggggcctcccgtcccggcgttggggcctctgccctgtctgtgcactttcgtctggggagaaaggacactgctcctcctgctacctgggccacactgctgccttgttccagaatgaggatggaggcttttggacccttgaaccccactcagccaagtgtctctccgtgtctcatggggaggtggggaaagatgccatgtgggtcggtgtattttaagatcctgagcgtgtgggtcagtgtctgcatgaagtggaa

SEQ ID NO: 2080 - DNA, 2049 bp, Cricetulus griseus
acctgctgggtcatgtacggtatcgtctacacccgtccgtgctctggcgacgccaactgcatccagccctatctggcccggcggcccaagctgcagctaagtgtttacaccaccacacggtccagccttggtgcagagaacaatgtggacctggtcttgaacgtggaagacttcgatgtggagtccaaatttgaaaggacagttaatgtttctgtaccaaagaaaacaagaaacaatgggacgctgtacgcatatattttcctacatcatgctgggattctgccctggcacgatgggaaacaggtacacctgatcagtcctctgactacctacatgatccccaaaccagaagaaattaacctgctcactggggaatctgctgcacagcagcagatagaagcagagaagaagccatctaatgccctggacgaacccgtctctcactggcgacccaggctgaccctgaatgtgatggtggacgactttgtctttgatgggtcctccctgcctgcagatgtgcatcggtacatgaagatgattcagcttgggaagacagtgcattacctccccatcctgttcatcgaccagctgagcaaccgggtgaaagacctgatggtgataaaccgctccaccactgagctgccactcactgtgtcctatgacaagatctcactggggcggctgcgcttctggatccacatgcaggacgccgtgtactccctgcagcagttcgggttttcagaaaaagatgcagatgaagtgaagggaatttttgtagacaccaacttatatctcttagcattgaccttctttgttgcagcatttcacctcctttttgatttcctggcatttaaaaatgacatcagtttctggaagaaaaagaagagcatgattggaatgtctaccaaagcagtgctctggcgttgcttcagcaccgtagtcatctttctcttcctgctggatgaacagacaagcctgctggtgctgatccctgctggtattggggctgccattgagctttggaaagtgaagaaggcattgaaaatgacagtcacctggagaggcctgaggcctgtgtttcagtttggcacccacagtgaatctgagaggaagactgagaagtacgatgcccaggccatgaagtacttgtcttacctgctctaccctctctgtgttgggggcgctgtctactcactcctgaatatcaagtataagagttggtactcctggctcatcaacagctttgtgaatggtgtctatgcatttggctttctcttcatgttgccccagctctttgtcaattacaagatgaagtcagtggcgcacctgccctggaaggcctttacctacaaggcttttaacaccttcattgatgatgtctttgccttcatcatcaccatgcccacgtcccaccggctggcctgtttcagagatgacgtggtgttcctggtctacctttaccagaggtggctttaccctgtggataagagcagggtcaatgaatttggggagtcttatgaggagcagcccaagcggaagccccacccagactgagcgtctcggcccaggccccccgggcggcactgcacagcacagttgggccatgagtattcctgggggctttaggggaattcctagacaccatgtcttctgtgttgccaaatccctctgagcatttctcagtatccctgagcaccctctcttctcgtgtctggaaggaaccgtagcacttaaccacacaccccacatgaacttgggtcttggtgaggtgccaacgggcagtcacccaagggtagctctagtgcatgagtgtcccgtggcagccagtggacactgagcatgcacgggtagggagagtgatggatttccacgtcaacttgtccaagtgctccttatgtggatttcacacacgtgcatagttgttctgtacagactctgggatcaaatggctcttttcccccttttgtttaaaatttgattgtttaaagcttaatgtatgtatgtttctattttaaaataaatttctttggctgtaaaaaaaaaaaaaaa

SEQ ID NO: 2081 - DNA, 2049 bp, Cricetulus griseus
ccatggtgggacacctgagcgagggggccattgcggccataatgcaacagggagatacatccataaagcccattcttcaagtcattaacatccgtcccattgctacagggaatagtccgccccggtatcgactgcttatgagtgatggattgaacacactctcttctttcatgttggccacacagctgaaccctcttgtggagggggagaaactggccagcaactgtgtctgccaggtcaaccaattcatcgttaacaccctgaaagatggaaggagagtagttattttgatggacttggaagttgtgaaatcagctgaagaggttggaataaagattgggaatccagtgccctataatgaaggacatgggcagcagcaacagcaacagcaacaagcaacagcaacaagcagtcccttccccaacctcagcagccacaccaccagtcagcaagccccagctgcagagtgggagcttgggaatgggttctactgtggctaaggcttatggtgcctcaaagccatttggaaaacctgctggaactggcctgctgcagcctgagggacacagtccaaagtggtacccattgccagcctaaacccttaccagtccaagtggactatttgtgcccgtgtcaccaacaaaagtcagatccgtacctggagcaattcccgaagggaagggaaacttttctctatagaacttgtagatgaaagtggtgaaatcagagcaactgctttcaatgagcaggtggacaagttctttccccttattgaagtgaacaaggtgtattatttctcaaagggcactctgaagatcgctaacaagcaattctcagctgttaaaaatgactacgagatgactttcaataatgagacttctgtacttccctgtgaagatggccatcacttacccacagttcagtttgatttcacagggatcagtgacctagagagcaagtctaaagactcacttgtagacataatcgggatctgcaagagctatgaagattcaacaaaaatcacagtgaagtctagcaacagagaagttgactaagagaaatatttatctgatggatatgtcagggaaagtggtgactgcaactctgtggggagaagacgccgacaagtttgatggttctaggcagcctgtgatggctatcaaaaactttgtatgaggctaaatcggagaacttgggccagggtgacaaggcggactatttcagcacagtggcaacggtggtgttccttcgcaaagagaactgtatgtaccaggcctgccccacccaagactgcaataagaaagtgattgaccagcagaatgggttataccgctgtgagaagtgtgaccgggaattccccaacttcaaatatcgcatgatcttgtcggtaaatgttgcagattttcaagagaatcagtgggtgacatgtttccaggagtctgcggaggctatccttgggcagaacactgcataccttggggaactgaaagagaagaacgagcaggcatttgaagaggttttccagaatgccaacttccgatcatttacattcagaatcagggtcaagctggagacctacaacgatgaatctcgaattaaggccactgtgatggacgtgaagcccgtggactacagagactatgccaaaaggctgatcatgaacatcaagaggaacaatgtgataagtaattgaccccactttgtggataatgaggtaaattgcgtaacttggggtttgcttttccagtggtggcacctttatgtcttaggttcctcctgggaggagtgagaatgggggagaacccaggtgtttagcgggtgtctccctggaatcaaaggcttttgctttgcagaggtaccacgtggtcattaatgcttggaatggcaaaggggtagaattattaatcaaaagcctatcgttaatatctgaagaccatccttccttcagggtttaatagatttaatagactgagtcagatgggtctgatattaatcaaaattgtctcttctgaggacggctgataagcattgacttgccatcccctaggg

SEQ ID NO: 2082 - DNA, 2049 bp, Cricetulus griseus
atgggggcagccatggcacccaggactcccctggttccccagtctggtctccagggctgacagttctccctccagtcccaccggacacaactgggaaatgaattatcaagaggcggcaatctacctccaggaaggccagaacaatgacaagttcttcacccaccccaaggacgccagagcactggcggcctacctcttcgcacacaaccacctcttctacctgatggagctgctcagctgctgcataagcgaaccgcccatccagcacgcctaccgcctgcttgtcagccagcagaggccgggcggcatctcctatagacagttcgaaggcctgatgcgtttctacaagccccgaatgagtgctagggagcgcttcctgactttcaaggccttgaaccagagcaacacacctctgctgggcctgaaggtacttctatgatatttacgaagttgcggctctgcagtggaaggcaaagaagaacagacagcattggtttgatgagcttccccggacagccttccttatctttaaaggcattaacatccttgtgaagtcgaaggccttccagtatttcatggacttggtggtagctgtcaatgggatgtggatcctagtggagacattcatgttgagaggagggaatctcatctctttgaagcgtgtgccctggagttaccttgtatttcttaccatctatggagtggaactgttcatgaaggtggctggcctgggccctgtggagtacctgtcctctggatggaacttgtttgatctctcagtcacagtgtctgccttcctgggactgcttgcactgacactcaacatgaagcccttctatttcattgtggtcctgcgtccccttcagctgctgaggttatttaaactgaagaaacgctaccgcaacgtgttggataccatgtttgagctgctaccacggatggccagccttggcctcaccctgctcatcttctactattccttcgccatcgtgggcatggagttcttcaatgggcgactgtaccgcaactgctgcaactccagcacggtggctgatgcctaccgatttattaaccacacagtggacaataagaccaagatagaggacggctactactatctcaataactttgacaacatcctcaacagcttcgtgaccctgtttgagctcacggttgtcaacaactggtacatcatcatggaaggtgtcacctcgcagacctcccactggagccgcctgtacttcatgaccttctatattgtgaccatggtggtaatgaccattatcgtggccttcatcttggaggcctttgtcttccgcatgaactacagccgaaagagccaggactcagaagtggacagtggcatcgtcatcgagaaggaactatccaaggaagagcttctggccattctggagctttatcgtgaggtgcgaggcgcctcctctgatgtcacccggctgcttgacaccctctcgcagatggagaaataccagcaaaattcttggtgtttctgggacggagatcaagaaccaaaagtgacctgagcttgaagatgtaccaggaggaaatccaggagtggtatgaggagcacgcccgggaacaggagatgcagcagcaacttaagggcatcgtgcctggccctgccgcccagcagccccctgtcattcgtcagcgctcccagactgttacctagccgggtctcatcaagccaactcttctatgcaataacaccacagtattatgtactacaatgtgtggaaaccatgtgtgtatgcagacacactcatatatatgcacatatttacagagacagaaaaggactagccagggccggtttgaaccgccttgctctgtcttcctgagcttcagaagcttctcctcctcccaccccagccttactccacaccatgcagacaatcattttgtatgggtcaaggagctacgtcagaaggttttatacaatgatttgttacctagaaacccactgtgcccagacttgtggtgtgtcaataaaagagcctctgctttgtaaaaaaaaaaaaaaaaaaa

SEQ ID NO: 2083 - DNA, 2049 bp, Cricetulus griseus
gggggaaggcagttccgggccggccgcgcctcgcctcgcctcagcagggcggcggctctcccggcgcagacgcagggcccgggcggcgggcgatgcccgagtgagcgcaggccgggcccctgcccctagcaggcagcttcgcgcaggccgcacgcagggcgtcctcgcggcggggcggctccgtttcgatctcgcggcggcgttataggctgaggggacccgggacacctgaatgcccccggccccggctcctccgacgcgatggggaaggtgctatccaagatcttcgggaacaaggaaatgcggatcctcatgctgggtctggacgcagccggcaagacaacgatcctgtacaagttgaagctgggccagtcggtgaccaccattcccacggtgggtttcaacgtggagacggtgacttacaaaaacgtcaagttcaacgtgtgggatgtgggcggccaggacaagatccggccgctctggcggcattactacaccgggacccagggtctgatcttcgtggtggactgcgccgaccgcgaccgcatcgacgaggcccgccaggagctgcaccgcattatcaatgaccgggagatgagggacgccataatcctcatcttcgccaacaagcaggacctgcccgatgccatgaaaccccatgagatccaggagaaactgggcctgacccggattcgggacaggaactggtatgtgcagccctcctgtgccacctccggggacggactctatgaggggctcacatggttaacctctaactacaaatcctaatgagcatcctccacccatcccccggaaggagagaaatcaaaaacccattcataggattatcgccaccatcatcaacctctttcaattgccactttctttttgaatctgaactctggagttactgttctacggtttagtggggttggggtttcctctttttcttttttctttttttttttctttttttggctttgcgttaggatgctctgatctgatatttgacacgaaaacagtgctagatgctcttgtgacttccagcaaacggggtggggtaatagcagctcttggtaaaatcctttataataatggtttgatttttttatgtcgagagaatctttttttcccccaatgtatgcttttttcctttttgccctagtttcttaccacttgctgtagatggcttattttgcattcatgcagactatgttgcgagtctgtttcatctagtaaactgaaaattattgcttaatcaaactgccgtttgtcttttatatttaaggccttccccctttccttgttagtgctaactttagcaatttcaaatgtgaccttttatatccaagaccagtatggtgaacttagcccacagtggcaaaataatgagtaataccagtgtaatgttccagttgcacatcagtgtgtgaaacaggtaatgtagggaatcccttcaggtgtcagctattaaagtgcatgagtaggagtaaactcaagttccctcaccatagctaacggaaatgtagactgccagggcaggatacaggaaaaggtgggaatggttctgttttatgagggtgtctgaaactaaagtcaagccggatatcatggtatcgttggacagtattggtccttcatgttttggccatattgtataatggagcttttaccaaagatgtatgagaaacagaaggctatacaaaaatgagctgtaagtaaaactaactaaaagcagatgagaaaaggtgctatgttgtaggctcctattggtgcagagggattttgaaatcaagacgcaactaaaacctaaagttctcagtttcacattaataaaaatatctctagaaatgaagctgattcacatatttaagaacattatagttgcttttaaaaattcccaaagctccaccgtaaatgtaattcttagtgttttaaatgattacattttaaggtacataaatatggttatacaaatatcaatgctacagtaacatcctgaaacaaaataagcacaaaggtataaatgcctaaactggaggaaacttg

SEQ ID NO: 2084 - DNA, 2049 bp, Cricetulus griseus
caagtggaagcccttaaaacatgcagcatcaaaacaagagtctatccatgcttgacgagatccttgaagacgtaaggaaagctgcggaccgtttggaggaagagatagaggagcatgccttcgatgacaataaatcagtcaaaggagtcaactttgaggcagttctgagagtggaggaagaggaggccagttccaagcagaatatcacaaagcgggaagtggaggatggcctgggcctcagcatgcttatcgactcccagaataaccagtatattctgacaaagccccgagattcaactatcccacgtgcagaccaccacttcataaaggacatcgtgaccataggaatgctatccttaccttgtggttggctgtgtacaacaataggattgcccacgatgtttgggtatataattgtggtgtgcttctggggccttcggagaaatttggggtcttcttcaccctgtttcttgttggcctggagttttctccagagaagctgaggaaggtgtggaggatatctttacaaggaccttgttatatgacactactgatgattgcctttggcttgtggtggggacacctcctgcggatcagacccactcagagcgtcttcatttccacctgtttgtccttatcaagcacacccctggtgtccaggttcctcatgggcagtgcccgggtgataaagaaggtgacattgactacagcacagtgctgctgggcatgctggtgatgcaggatgtgcagctggggctcttcattgctgtcatgccaacacttatccaggcaggagcaagcacatcttccagcattgtcatggaagtactgcggatactgtttctgattggacaaattctcttttcgctagctgctgtttttctcctctgtctgatcataaagacttatctcataggaccatatcaccgaaagctgcgtgtggaaagcaaaggcagcaaagaaatccttatccttggattatccgctttcatcttcctgatgttgacggtcacagagctgttggacgtctctatggagcttggctgcttcctggctggagcactgatctcttcccaagggcacgttgtcacagaggagatcatggcttacatcgagcctatccgtgacttcctggccattatcttcttcgcatccatagggcttcatgtgttccccacctttgtgatctacgagttgactgtgctggtattcctcaccctgtctgtggtcgtcatgaagtttgtattggcagtgttggtcttgtctctcatcctgccaaggagcagccagtacatcaagtggattgtatcagcgggcctggcacaggtcagcgagttctcctttgttctggggagtcgagcacggagagcgggcatcatctcgagagaggtgtacctcctcattctaagtgtgaccacactgagcctcttacttgccccagtgctgtggaaagcggccattacaaagtgtgtgccaagaccagagaggaggtcaagtctctgacagcaccagatgacaatggactgtgggctgggggtccttctcaggagtttggagtcctcagatggtttgttgctgcaccgtcagtcctgctggcctaccttcagagacagagcagtgtcaacaaagaggcagtgtcctcatgtttgcttgcatttttacaaattctcctgtcatgtttttccggagtaatttatttgcagtcagttgattatgtacagagttttgacactgcattttacagtcacctgagctattttgccttgatgtgcctttttttaaaaaatgaagattattaacttcctattgttaattcatcagcccatgagtttttggtaaagaagaaaaattagaaagcctttttatttattgtacaattataatttgttggtcaaatatttgttattaaacattatggttatatgagattttaattttatttttaagcttggaagcttacttttgatctttaaagacttgctgtcctcttgcctcttgtaactattttaaataaaacattttcatgttgatttttattagttttacttt

SEQ ID NO: 2085 - DNA, 2048 bp, Cricetulus griseus
gaggaagatggagtatgggagaatggctttcctatgaatgccgtactttgcttttcaaagcagttcacaatctgttggagaggtgtttaatgaacagaaactttgtacggattggcaagtggtttgtaaagccatatgagaaagatgagaaacctaataaataaaagtgaacacttgtcctgctctttcacctttttcttgcatggagacagcaatgtttgtaccagtgtggaaattaaccaacatcaacctgtataccttctcagtgaagagcatgtcacccttgctcaacagtctaatagcccgtttcaagttatcttaagtccatttgggctaaatggcactctcacaggacaggcatttaagatgtcagattcagctacaaaaaattaattggtgaatggaaacagttctaccctattaatcctaacaatgatggagcagatggaatgggtatctttgatttattagacacaggagatgatcttgatcctgatatcattagtatccttcctgcatctccaactgcatctcctgtacattctccaggttctcattacccccatggaggtgatgctggcaagggtcaaggtactgataggctactttcaacaggaatctcatgatgaagtaactaatattcttcaacaaccattggcccttggatactttgtatcaactgccaaagcgggtccattacctgactggttctggtcagcatgtcctcaagcacaatatcaatgtccccttttcttaaggcctctttgcacctccacgtgccttcagtgcaatctgacgaactgcttcacagtaaacactcccacccacttgactcaaatcagacttcagatgtcctcaggtttgttttggaacagtacaatgcactctcgtggctaacctgtgaccctgcaatccaggacagacgctcgtgtctcccaattcatttcgtggtgctgaatcagttatataactttatcatgaatatgctgtaatcttcgtttgatggagtttcgcaagggaagaacaggaagaaaagatattttgctgcaggattaagttacagttctcagtggaagtcatttgtgatggggtctaattcttattacttcaacaaatattgttttgacttggggggtggggctataaccctatttttcattgactatactgagctctttaggatgatgactgattattcaaaacgtattataacattttcgtagcaaaaattaaccttttttttccagtcacagtatttgtgaaaagtaatgagccatagtacccattcatgttaaagaatattaaagcatggagaggaaacatgaggaacaatgaatttcaacatatggctttagaacatcaagatgttcttgtattggatatagtatctagtattcaaaaatgcctgcatctcttatttattgtaagtttttaaatgtataaattgtcttatatttcttaacctcttttataaaaattttcctagaaggtttatactgccttcttgctttaaagcaattggtctaaaatatatgtaatcgtcttaattaaaaagttgctgtagggttgcttttagagtattatttttttgtaagggggtgggttggacagtaaatttgtattgtctcaatgtacagttttaacagggatagaggggaaataatgtccataccattgtgtgtggaagatttacagctaagctgtagttgcagagtacatgtacagtaatgaagttcactgtgtttataaattgaaaaggtacctggtcttacagcattttatatatcacacctttgcagattaacatgatggcaatatacatatgtgatattgctttttttttctttcctttcctttttttgcttttcttttttaacgtgacaaaatttttgaaaaagaataaggaacaaacactattgctgccgaatgccataacactgagttgtacaaattgtgattgaggaaatagaaaaagtttattaaactttttaaaaaaaaaaacaaaaaaaaacaaaacttcaaatggaataaattattcatgaagcctt

SEQ ID NO: 2086 - DNA, 2048 bp, Cricetulus griseus
caggcagcatggcggcggtggagacgcgggtgtgcgagacggagggctgcagcagcgaggccaagctccagtgccccacctgcatcaagctgggcatccagggctcgtacttctgctcgcaggaatgctttaaaggaagctgggctactcacaagttactgcataagaaagcaaaagatgaaaaggcaaaacgagaagtatgttcctggactgtagaaggtgatgtgaacactgacccgtgggcagggtaccggtacacgggtaaactgagaccacactatccactgatgcccacacggccagtgcccagttacattcagaggccagactacgctgaccaccccctaggaatgtctgaatcggaacaggctcttaaaggtacttcccaaattaaactactctcaactgaagatatagaagggatgcgacttgtgtgtaggcttgctagagaagtcttggatattgctgctgggatgattaaagcaggtgtaactactgaagaaattgatcacgctgtacacttagcatgcattgcaagaaattgctatccttctcccctgaattactataatttcccaaagtcttgttgtacctcagtgaatgaagtcatctgccatgggattccagacagacggcctttgcaagaaggtgatattgttaatgtggatatcactctttatcgaaatggttatcacggggatctaaatgagaccttttttgttggagatgtggatgaaggagctcggaaacttgttcagactacatatgaatgcctgatgcaagccattgatgcagtgaagcctggtgttcgatacagagaactgggaaacatcattcagaaacatgcccaagcaaatggattctcagttgttcgaagctattgtggacatggaatccacaaacttttccatacagctcccaatgtaccacactatgccaaaaataaggcagttggtgtgatgaagtcgggccatgtgtttacaattgagccaatgatttgtgaaggtggatggcaggatgaaacctggccagatggttggactgcagtaacaagggacgggaagcgatcggctcagtttgagcacaccctgctggtcacggacactggctgtgaaattctcacccggagactcgatagctctcggcctcatttcatgtcccagttttaattttcccgagatgcctaatgtctgaacaccatcttgtactgtgcattttattgaaagtacagacatgaagagctttttaaaagtcactccttttgttttggctgtggataagaaaagactccagcacttggtgtgtgtcctcgagagcttcttttggggtctgaaaagctgagaagaataaatgaaacattgcttacttccttcagtccctggcctcaccccctcagttcgctgtactgggttttctttcttgtcccttgagcactttgaccctaaatccacttctcattgctttatcactgccacagaccagccgccaagggccagccgctttccaggggaatgctgaagataaaaaatcttgaaaccttagcaacacagttgttccagatttttattatatattgatatatatgtggagaaatatatacattttaaattccatatacataattactgaacactatatgacctttggtctgggttgattctgctttgacaggatatctgctgtcataagtggatctataatttgttagtgattaattcctagttgggaattggcctcttctcgccctaatgctaattacttacccttgtatgtgtgtagggaagacttctgcagtgtgcactgtgataccagtgacacatactttaagacatcatcttttccagagtgcctccgaccttactgctttaagagaatgataatgttttcatgactttatattaataatttagtaaagtgattgagtctggtgtagacttctgggtgtgtatgcgtgtttaaagtttttatcaaactgtaatatttgtggatggaatgccttgtaatatgaatgttaatataatatgtaaagggagattaaagtttgaatg

SEQ ID NO: 2087 - DNA, 2048 bp, Cricetulus griseus
agcagtagccagctggatgaacaagtcagtcatgggcacagccagacactgccccagtaagtgtcccagcagacattcgcttctctgtctggatctccttctttgagatctacaatgaattgctttatgacctgttagaatcacctagccatcagcataagagacagacactgcggctgtgtgaggatcaaaacggcaatccttatgtcaaagacctcaactggattcatgttcgagatgttgaagaagcctggaaactcttgaaagtgggtcgtaagaaccagagctttgctaacacccacctgaaccagaactctagtcgaagtcacagcatcttctcaatcagaatcttgcaccttcagggagaaggggatatagtgcccaagatcagtgaactgtcactgtgtgatttggctggctcagagcgctgcaaagatcaaagaagtggtgaacggctaaaggaagcaggaaacattaacacttctctgcataccctgggtcgatgtattgctgccttgcgacaaaatcagcagaaccggtcaaagcagaacctgattcctttccgagacagcaagttgactcgtgtgttccaaggcttcttcactggtcgaggccgttcatgtatgattgtcaatgtgaatccctgtgcatccacttacgatgagactcttcatgtggccaagttctcggcccttgccagccagcttgtgcatgccccacctgtacatttgggaatcccatccctgcattcattcatcaaggaacacagtcttcaggtatcccctggcttaaagaaaggagaccacaccgactcaggccttgatgaccatcctgaaaacgaagctgacatctccatgtatggcaaggaggagctattacaagtggtggaagccatgaaaacactgattttaaaggaacgacaagaaaagctgcagttggagatgcagctccgggaggaaatttgcaatgagatggtagaacagatgcaacagcgggagcaatggtgcagtgagcatttagaccaccaaaaggaactgttggaggaactgtatgaagagaagctaaagatcctgaaggaatcattgacaagtttctaccaagaagagattcaggagcgggatgaaaaaattgaagagctagaaactctattgcaggaagccaaacagcagcagcctgtggctcaacagtcagggtctgaactgtccctacggcggtcacaaaggttggcagcttctgcctccactcagcagctgcaggaagttacagctaaactagagcaatgcaaagcagagttaaactctacaactgaagagctgcagaagtatcagcaaatgttagaaccaccaccgacagccaagcccttcaccattgatgtagataagaagttagaggagggccagaagaatataagaatgctacggacagagcttcagaaattaggacagtctctccagtcagcagaaagggcctgttgccacagcaccggggcagggaaacttcggcaagccttgaccaactgtgatgacatcttaatcaaacagaaccagaccctggctgagctacaaaataacatgatgctagtgaaactggaccttcggaaaaaggcagcctgcattgctgagcagtatcacactgtgctaaagctccaaaaccaggcttcttcttctaaaaagcggctgggaacaaaccaggaaaaccagcaaccaaatcatcaacccccaggaaagaaaccattccttcgaaacttacttccccgaacacccacctgccaaagttcgacagacagtggcccttatacacggatcttgcgctcacggcactctcctttgctcagatctccttttggcaaaaaatactaaagttgtggagatgaaaatgcatgcttgatgctctgagattggtcagctgctcagcttgtctcttaagcttcagcatatatgtatatatatcctgaactgtattcagaattattataatacctatataatctctctttttttttccccatgcacaaatatactgaataaagacatggtttatgtctttta

SEQ ID NO: 2088 - DNA, 2048 bp, Cricetulus griseus
caaggaactgtttcgcgtggtgcccgggaacgttggagtcagcatggtcctggtccccttcaagaccaccgacctgcagtgggtgatcagtgccaccactaccggcaccattactcacacctacgtccctgtgcccccgaagatcaaagtgaaacaagagaagatcctgatctaccacccagccttcatcaagtacgtctttgacagctggcttcagggccatgggcggtacccatcaaccggcatcctctccgtcatcttctccattcatgtctgtgatgaggtggacttgtatggcttcggggcagacagcaaggggaattggcaccattactgggaaaacaacccatctgcgggcgcattccggaagaccggggtacatgacgccgactttgagtacaacgtcaccaccaccctggaagccatcaacaagattcggatcttcaaggggagatgacgctgcaacctgttaaggatggacacaccgcatctcgctctcaacttgcagccccagtgtctcactggagccattttgttctggaagcttccggggctggacttggggtgttcccaggcttgccggcagtctcttgcgccctcattttggtagcatctatttgacaaagttgtccgactctcccagggtaccgagcaagtctcaggcctctccaaggtgggagtacttccccactcgctctcccctagcctggggctgtgtgattaccttccgtggtgatagggatggtcggagcgggtctaactacttccacgtgcctttgaacttgaggaaggattgcatgcattggctgacatgaagcaaggtccccaactggaaaacggggacctcgaccagcgtcccgctttgctgtatctctcacaatctcttttcaaatgcactctgcatcagtcagagtgtgccaggcgtgggacgggtgctcacttctatttcctcagactattgggttcaggaccactaacaaccagcatcctccctggagtcctgaacactgggctgagtccctagcagccaccttcctggcgtccttgggggtctcaatagggacatcctagggccacaactgaaaagcatgtaccttttctccttactcctgtctgctctcccatcctccctctgtagacttgctgttatttattgattggttaattcagctgaccctgtcccccactccccttctttgcctctttccttccctccctcccatccctccctccctctctccatccctccctccctccagtctctcccccagtctctcctccagccaagaagctaacatttccctttcccataaccctcagctgtcccctgtgtctcactggcttagcagtggactcttaactggataaaatacagtccactgtggccagaattaagtgcaccaattagtttaagataattggagctttccttggggtgtgggtgactgagaacaggaagagccttcctttcccaacaagactgggctggctgctgaccccatcttcacctctccaatctctctgctcacttagcttttaccttggctcctcctgcccagggtctgccccatggcaccagctttaaccctttctccagagcctcatcaggatctcgcttgcccttctaggttgtcgtccgtccctcctgcacccccccagacccctgcacaatcactttagccctttacccagagcctgatctggactctgctcagctcactctagtaggtggacgtcggtccctcctgcacccccagacccctgcacaatcactttagccctttgccaaggccccttcagagccaaagttctccaagcactttgcctcccaagagcttttccttccttgcttcctgtggcccagcgtcacccacttacaccttgtattctcgagctgcccccccatcttgtaatcctcccgattcgcctgaatgcatttccaatgacgttagcgggtctgccttcctcagcccctgctttgttttatttattgttgaatatttccaatgatctgaatcaaagtgaataaaaagagctattttattgtt

SEQ ID NO: 2089 - DNA, 2047 bp, Cricetulus griseus
gttcattccagcatgtcggaaggggaatcccaaacagtagtcagcagtggctcagacccaaaggtagaatcctcctcttcggctcctggcctgacttcagtgtcgcctcctgtgacctctacaacctcagctgcttcccccgaggaggaagaagaaagtgaagatgagtctgagatcttggaagagtccccctgtggacgctggcagaagaggagagaagaggtgaatcagcgtaatgtaccaggtattgacagtgcatacctggccatggatacagaggaaggtgtggaggttgtgtggaatgaggtacagttctctgaacgcaagaactacaaactgcaggaggaaaaggtccgtgcagtgtttgataatctcattcaattggaacatcttaacatcgttaagtttcacaagtattgggctgatgttaaagagaataaagcccgggtgattttcatcacagaatacatgtcatctggaagccttaagcagtttctgaagaagaccaaaaagaaccacaagactatgaatgaaaaggcttggaaacgctggtgcacacagatcctatctgccctaagctacctgcactcctgtgaccctcccatcatccatgggaacctgacctgtgacaccatcttcatccagcacaacggactcatcaagattggctctgtggctcctgacactatcaacaatcatgtgaagacttgccgggaagagcagaagaacctacacttctttgcgccagagtatggagaagttactaatgtgacaacagcagtggacatctactcctttggcatgtgtgctctggagatggcagtactggagattcagggcaatggagagtcctcatatgtgccacaggaagccatcagcagtgccatccagctattagaagactcactacagagggagtttattcaaaagtgcctgcagtctgagcctgctcgaagaccaacagccagagaactacttttccacccagcactatttgaagtgccctcactcaaacttcttgctgctcactgtattgtgggacaccaacacatgatcccggagaacgctctggaggagatcaccaaaaacatggataccagtgctgtactagctgagatccctgcagggccaggacgagagccagttcagactttgtactctcagtcaccagccctggaattagacaaattccttgaagatgtcaggaatgggatctaccctctgacagcctttgggctccctcggcctcagcagccacagcaggaggaggtgacatcacctgttgtgcccccctctgtcaagactccaactcctgagcctgctgaggtggagacacgaaaggtggtgctgatgcagtgcaacatcgaatcagtggaggagggagtcaaacaccatctaacccttctgctgaagctggaggacaaactgaaccggcacctgagctgtgacctgatgccaaatgagaacatcccggacttggcagctgagctggtgcagctgggcttcattagtgaggctgatcagagccgcctgacttctctgctcgaggagaccctcaacaagttcaattttgccaggaacagcaccctcaactcagccgctgtcaccgtctcctcatagagctcacttgagccaggcccctatctgagtgtggctgtccctggacatgctgcagtcctcctgtcccttcctccccagtcagtattacccttctcccccttattattcaggagggctttgggggctccctggttgagcatcatcctgcccctcctccccctcctcccctctgcactttgtttacttgttttgcacagacgtgggcctgggccttctcagcagccaccttctagctggggctagtagctgacctgctggctcctgccctgcctgtgtggacaggaggcccacaggctctgggggagctgagttctacaatcccgctggggaggatgggcgggagagaaaggtggtgctgcaggggtggccccgggggccattcgaatcgcctcagttgctgctgtaataaagtctactttttgctaaa

SEQ ID NO: 2090 - DNA, 2047 bp, Cricetulus griseus
  modified_base (1328)..(1328): a, c, t, g, unknown or other
ttccagagcgcgtgtcggaggatgactcttcggagaattctagttgaaagtgggagccttgaagttgtggacagcagcggagaagtcattcaccgagtcaagaagctgacgtgccgggtaataattaaagaggctactgggctacccttaagcctctcaaatttcgtcttctgtcagtatacattctgggaccagtgtgagtctactgtggctgccccggtggtggacccagatgtgccttccccgcagtccaaggacgcccagtacacagtgaccttctctcactgtaaggactatgtggtgactgtcacagaagagttcctgtggatagttatcaggaggaagacttgaactgtgtaagagagagatggtcagatgcgctcattaaacgacgggaatacctagatgaacagattaaaaaagtcagcaataaaaaagagaaaacagaagacgacatggagcgggaagccaggctggtggagcagtgggtggggctgaccgaggaaaggaacgccgtgctggtgcctgcccctggcagtgggatccccggggctcctgctgattggagccctaccaccagcagcctcaccagtggctacttctcccacagtgcctccaacgccactctgtctgacatggcagtcccttccagcgacagctcggaccagctagccatctcaacaaaggagattgagtgtagtgagcacgctggaccttcacttgcacctgacttcagaccagcttcaaataaagatcctacagaagtagaaagaggcttggggaaggataagacaatcacagtgccacctgaggaaaacagtgccttacccaaggggagtgcatcaccccagagcatccctgagaaaaattccaggatgccatgcaggactgcttcatgttcagaactggatgctggccccagcaaaaatggccaacctgccagagatttctgcccaggagaggtgactatagaacatactacaaacatattggaggaccattccttcacagagttcatgggtgtgtctgatggcaaagacttcgatggtttggcaggttgttctgttggagagccctctgataggagggatctaccaaatgaaacagaccatgaaagtgtcccagatggacccccagatgctgaccagctgcattccaagatagagaacgaacaggaagccacgaccacttggtaagagacaaccatgcatctgcaggcacagcttggcagcttcaccgaccctaccctgggacagtacctgccctatcctcagacagctgtgacccacctcgacctcagaccagcattcctacatgtccccaccgtntaaagacctccacagactcaaactttattcttgtacattttttaaccagttcttactgcagactctggagtcaatgctctgattttgtttttttttataaataatatatattatgtattgatttgtcgaaaatcacaaggtactggactttgttacaaagcgacctgatgactgctttgacacaagcagatgaaaacaaaaatattttattatctaagaatgaggttctaaactcctctttgtagaaaaggctgcaggcgctgttctttataaccaaagcactatgagactgaacgtctttgctgtccactcttgtttcgtgtgagtatataatctcactgccatctggtgccatactatccttggctacccagccacgtgctgccctcttcccggcccatctcctaagcacactgagaaacagctataacctttggtcttccacctagcccgatacctgctgacttgatattgaccgttgacaatggagcatgtgtgcagcctgctgtactttttttaagttcttagcattggtgagggagatacgggagattttattgaaaagctgctgtctgtgtgtatagtgagctgatggtagtattttactatcatctgtttaaaacaaaaaggaaaactgtaatttatattccctttcaactttgttgtatttaattggtacagattgtgtgtgttttagaatacaaactgtctaattcaga

SEQ ID NO: 2091 - DNA, 2047 bp, Cricetulus griseus
ccggcaagcagagtgctaatagcttcccgtaatttgcaaatgatgctacatttgacattaagaaatgtgaccttcatcggctagaagagggtcctccagtcaccacagtgctcaccagagaagatgggctcaagtactacaggatgatgcagactgtgcggcgaatggagctaaaggcagatcagttgtataaacagaaaattattcgtggtttctgtcacttgtgtgatggtcaggaagcctgctgcgtgggcctggaggctggcataaaccccacggaccatctcatcacagcctatcgagcgcatggcttcaccttcactcggggcctacctgtccgagcaattcttgcagagctaacaggacgaagaggaggttgtgctaaagggaaaggcggatccatgcacatgtacgccaagaacttctatggaggcaatggcatcgttggagctcaggtgcccctaggagcagggattgctctggcctgcaagtacaatggaaaagatgaggtctgtttgacactatatggtgatggcgctgctaatcagggtcaaatatttgaagcttacaatatggcagcattgtggaaattaccttgtattttcatctgtgaaaataaccgctatggcatggggacatctgtcgagagagcagctgccagtacagattactacaaaagaggagattttattcctggactgagggtagatggaatggatatcttgtgtgtccgagaggcaacaaagtttgcagctgcctattgtaggtctggtaaggggcccatcctgatggagttacagacttatcgttaccatggacatagtatgagtgaccctggagtcagttaccgcactcgagaagaaatccaagaagtaagaagtaagagcgaccctattatgcttctcaaggatagaatggtgaacagcaatctcgcaagtgttgaagaattaaaggagattgatgtggaagtgaggaaagaaatcgaggatgctgcccagtttgctacagctgatccagagccgcccttggaggaactaggctatcacatctacagcagcgatcctccctttgaagtgcgtggtgccaaccagtggatcaagtttaagtcagtcagttaatgggaaatggaaatagatgggtgttgggtgttcatcatccactgtaagaaccctttgtgctttcaacgttaaggacaggaaatacccaaacaaaaagtcttgaaaacatgtaaattaaggaagagtgagttgcatgtcaaaggtaaataatttaattttctccatttagacatttaacaaacgtgaacttgtattcccattgcaaggcacacttttagatcatggttgatgttacatacaatcctgtttatacacaaggatgacctaaattatgcatgcttgaattaagtgaacaggggtccttctgtgtaaatgcaggatttgtgtgtacatgaacagaagctttggcaataagcaggtagggtatttgcgtattctctccagcttggctcagtgtgaggactcctgcgtttgtcttctgtgctgggagactgcatgccagagtctacagaggacaccaccgctgcaaaacaggagtttccataagaaaagcaaatttgaaaacagccactcttaccgtagtctgaggcaccttaggtcttccttagtaatatcattgagaatatcagaaagtgtataatcctcttcaacaatctgaaacagtgattcagtgtatgagataagcagcttttcaacagtatcatggaaatactttgatttagaaatttaccttttctattgtatttgcatccgctccttgtagttgcaaccagtctataagctctctgtctgttcccacttcatcaggaggtactggattctctgtaccacctatgattccaattttgttttattgtatagtactgtataaccataaaactgcttcaaaagtaacaaagtggatgtaatgatgtatccaaatagaatgtaaatgagatgtgaaaaggaaatgaataaaacttttttgattcagataaaaaaaaaaaaaa

SEQ ID NO: 2092 - DNA, 2046 bp, Cricetulus griseus
gaagttttacctcagtggcagacggctcctggctgacggctggcaggaagcagggcgtcgggatgagtgcaggctcggaccccgtggttatcgtctctgcggcgcggaccgccataggctccttcaatggtgccctgtctactgtgcctgtccacgacctcgggacaactgtcatcaaagaagtcctgcagagggccaaggtggccccagaagaggtgtccgaggtcatatttggacacgttttgacggcaggttgtgggcagaatcctactcgacaggccagtgtgggtgcagggatcccctactcagttccagcatggagctgccagatgatctgtggctcaggcctcaaggccgtgtgtcttgcagcccagtccatagccataggtgactccagcattgtggtggcaggaggcatggagaacatgagcaaggcccctcacttggctcacctgagagcaggagtcaagatgggtgagatgccgctagctgacagcatactgtgtgatggtcttacagatgcgtttcacaactatcatatgggcatcacagctgagaatgtggccaaaaaatggcaagtgagtagagaagcccaggacaaggttgccgttgtgtcccagaacagggcagagcatgcccagaaagctggccactttgacaaggagattgtgccagtgttggtgtcttctaggaaaggtcctactgaagtgaaaattgatgagtttcctcgccatgggagtaacatggaagctgtgggcaagctaaaaccttactttctttctgatgggacaggaacagtcaccccagctaatgcatcaggaataaatgatggtgccgctgctgtggttcttatgaagaagacagaagccgagagtcggatgctgaaacctttagcaagaatagtttcctggtcacaagctggtgtggagccttccattatgggagcaggaccaattccagccataaagcaagctgttgcaaaagcaggctggtccctggaggatgttgacctgtttgaaatcaatgaagccttcgcagcagtgtctgctgcaatagctaaagaacttggattaaacactgagaaggtcaacatcgatggaggagccattgccttgggccatcccctgggagcatctggctgtaggattctagtgaccctgttacacagccttgagagaacgggcgggactcgtggtgtggcagccctgtgcattgggggtgggatggggatagcaatgtgtgttcagagaggatgagctgcttgacagccattgcccttaaaggattcttgttaaatgagtgaaacactaactaatgtgtgaaatcagaggaccaaaatgagtgcaggaacccaggtggatagctgttacacagctgtactttaatgtgagatacccaagacttcattgcacctgacactgctataaataaaagggaaatccagtcagtcatcaagggctccaatgtacagcgttttcataacttccatgggtctttattttctgggtataatgttctctgatcattgttttgttttgtttttgttttgttttgtttttgagacagggcctcactatgtagcctcaagattgtttggtagaccaggctttgaactcccagagatccacctgcctctgcctcctgagcactggaattaaaggtgtgtgccatcatgcctggacctcaaaatgagccattcaaagaatggtgattggggcttctgttgcaaacttcaggctcttcattttaaattggttcaaatacctctccttccttgttgtcttctggtttcccgttgatcaaatcaagaccaatcttgtaatggtgaaaatgtgactcaatgaccaagctgatgccgttgtgttccaggtattctagaccaaaaggctgtgggcattctaacaagtgtacccctgggagtagaaaagtgagcagcaggcagtttcgatgtatttatttctctctgctccttactggatagaatgttacctgcttcaaattcctaccttgacttccccaaaatgatggactgtaaccttgaactga

SEQ ID NO: 2093 - DNA, 2046 bp, Cricetulus griseus
ccggagccgcgctgtccccactcctcttgctgctgcttgtgtcctgggcgtcccggggcgaagcagctcctgaccaggatgaaatcgattgccttcccggcctggataagcagcccgatttccagcagtactccggctacctcagagcctcggataacaagcacttccattactggtttgtggagtcgcagaaagacccaaagaacagcccggtagtgctttggctcaacgggggtcctggctgcagctctctagacgggttcctgacagagcacggccccttcctgatccagccagatggaatcaccctgaagtacaacccttattcctggaacctgattgccaacatgctgtatatcgagtccccagcgggagtgggcttttcctactcggatgacaagacgtatgtgaccaatgacactgaggtggctcagaacaattatgaagcccttaaggatttcttccgcctctttccggagtacaaggacaacaaacttttcctgactggagagagttatgctggcatctacatccccaccctggctgtcctggtcatgcaggaccccagcatgaaccttcagggactggctgtgggcaacgggctctcgtcctatgaacagaacgacaactctctggtctattttgcgtactaccatggtcttctggggaacaggctttggactttgctccagacccactgctgctctcagaacaagtgtaacttctatgacaacaaagatccagaatgcgtaaacaatctcctggaagtgtctcgaattgtgagcaactctggcctcaacatatacaacctctacgccccgtgtgctggtggggtgcccggcactgatagatatgaggacactcttgtgatccatgatttcggtaacatcttcactcgactgccactcaagcggaaatatcatcagacactgctgctgcgttccggggacaaggcgcgcatggatcccccctgcaccaacactacagccccctccacctacctcaacaacccatatgtccggaaggccctccacatccctgagaagctgcctcgctgggacatgtgcaacctcgtggtgaacctacagtaccgccgtctctatcaaagtatgaactcccagtacctgaagctgctcagctcacagaaataccagatcctactgtacaacggcgatgtggacatggcctgcaatttcatgggggatgagtggtttgtggattccctcaaccagaagatggaggtgcagcgtcggccctggctagtggactacggggagagcggagagcaggtagccggcttcgtgaaggagttctcacacattaccttcctcaccatcaagggcgctggacacatggtccccactgacaaacctcgagcagccttcaccatgttctctcgtttcctgaacaaagagccttactgaggggacctatggaagtctgcagtacctgatccagcctctcccagcctctctcagtggagagagatcctaccttatgcagaaagcccctgtggggcaggccctgctctaacactgtctctgacttctcagtcctgtgcatcccagcttaggcctcagggcttcagagagacagcctaggggcagtgagcactttgttcccgagacagtgcagtggcttgacctccccaactgattaatgaatgcccatcccaggaccccaacaaagctagggcagcccaagaagacgggtggatggattgtaatcctgaatgccagctccctgggtgggacgaaggactcaggcagctgctgcagaggctggagggacagtggagtccataacgacggcaggacggttcttgtcaatcacttctcgaagccctttggcaaagtggaggtcagccccaacagtgaggaagccctgggcaggggacagggaatgtcactcattccttcagtagtttggagacagcctttccaaacaagcacaaaaagacttggcaaatctcagagtccccagctgctttgccttttttttttttttttcttttgtcttttaattttattttcctccttcctaaga

SEQ ID NO: 2094 - DNA, 2045 bp, Cricetulus griseus
cagagccgcgtggccaagccgcatcagcgcgagaagatcctaaacgagatcgagttgcaccgagacctacagcaccgccatatcgttcgcttttcgcaccatttcgaggatgctgacaacatatacattttcttggagctctgtagccgaaagtccctggcccacatctggaaggcccggcacaccctgttggagccagaggttcgctactacctgcgccagatcctttcaggcctcaagtacttgcaccagaggggtatcttgcacagagacctcaagctgggaaatttttcatcacggataacatggagctgaaggtgggggattttgggctggcatctcggttagagccccctgagcagagaaaaaagaccatctgtggcactcccaactatgtggccccagaagtgctgctgagacaaggccatgcccgaggcagacgtgtggtcgctgacctgaaggaaacataccgctgcatcaagcaggttcattacacgctgcctgccagcctctcactgccagcccgtcagctcctggctgccatccttcgggcttcaccccaagaccgcccctctattgaacagatcctgcgccatgacttctttacaaagggctacacccctgatcggctccctgtcaacagctgtgtgacagtcccagatctgacaccccccaacccggcaaggagtctgtttgccaaagttaccaagagcctgtttggcaggaaaaagaacaagaataagaaccattctgaggaacgggataatgtctcctgcttggtgagcggcctgatgcgcacatccatcggtcatccagatgtcaggcctgaggctccagcagctgcaggtctggcccctgtcagcttggtagaaacagctgctgaggacagctcaccccgtgggacactggcaagcagtggagatggatttgaagaaggtttgactgtggccacagtggtagagtctgccctctgtgcactgaggaactgtgtggccttcatgcccccagcggaacagaacccagctcctctagcacagccagagcctctggtgtgggtcagcaagtgggttgactactccaacaagtttggctttgggtatcagctgtccagccgccgtgtagccgtgctcttcaacgatggcacacacatggccctgtcagccaatagaaagattgtacactacaaccccaccagcacgaagcacttctccttctctgtgggttctgtacctcgtgctctgcagcctcagctgggcatcctgcggtatttcgcctcctacatggagcagcacctcatgaagggcggagacctgcccagtgtggaagaggtagaggtgcctgccccgcccttgttgttgcagtgggtcaagactgatcaggccctactcatgctgtttagtgatggcactgtgcaggtgaacttctatggggaccacacaaagttgatcctcagtggctgggagcctctccttgtgacttttgtggctcgaaaccgcagtgcttgtacttacctcgcttcccacctccggcagctgggctgctccccggacctgcggcagcgactgcgctacgcactgcacctgctcagggatcggaatcctgcttaggttctaacctgcagagcaggctgtgatccagaccccaagcctgtgcctgaaaggctctggcccttgcctttgtggcccctcctgtccctttggtgcctctctgggggatctgggctgaatcccccaggcaatcagggaccagctttactacagttggggatggcctgcccttcctgtctcttccccttctccctgagataagcctgagccttagctcccagttagggggcattatttatggaccacttttatttattaacagacattttatttattgggatgtgagccccaggggggcctcctcctgggataataaactgttttttcagaaaaaaaaaaaaaaaaaaaaaaaaaaaaaaaaaaaaaaaaaaaaaaaaaaaaaaaaaaaaaaaaaaaaaaaaaaaaaaaaaaaaaaaaaaaaaaaaaaaaaaaaaaaaa

SEQ ID NO: 2095 - DNA, 2045 bp, Cricetulus griseus
agtccggagcaggtggaacattatggctgacatgcaaaatcttgtagaaagattggagagggcagtgggccgcctggaggcagtgtcacacacctctgacatgcactgtggatatggagatagtccttcaaaaggagcagttccgtatgtgcaggcttttgactcgctgcttgccagtcccgtggcagagtacttgaagatgagtcaggagattgggggagacgtgcagaaacatgcggagatggtccacacaggcctgaagttggagcgagctctcctggttacagcttctcagtgccagcagccagccggtaataagctttctgatttgttggcacctatctcagagcagatccaagaagttataaccttccgggagaagaaccgaggcagcaagtttttcaatcatttgtcagctgtcagtgaaagcatccaggccctgggttgggtggctctggctgcaaaacccggcccctttgtgaaagagatgactgatgctgccatgttttacacaaaccgagtcctcaaggagtacaaagatgtggataagaagcatgtggagtgggtcaaagcttatttgagtatatggacagaactgcaggcttatatcaaggagttccacaccactagcctgtcctggagcaagacggggcctgtggcaaaagaactgagtggattgccatccggaccgtccgttggatcaggcccacctcctcccccaccaggcccacctcctcccccagtccctaccagttccggctccgacgactctgcctcccgctcagcactgtttgcacagattaatcagggggagagcatcacacatgccctgaaacatgtatctgatgacatgaagactcacaagaaccctgccctgaaagctcagagtggtccagttcggagtggccccaaaccattctctgcaccaaaaccccaaaccagcccctcccccaagccagccacaaagaaggagccacctctgttagaactggaaggcaagaagtggagagtggaaaaccaggagaatgtttccaacctagtgattgatgacactgagctgaagcaggtggcttacatatacaagtgtgtcaacacaacattgcaaatcaagggcaaaattaactccattacagtagataactgtaagaagcttgggctggtgtttgatgacgtggtgggcattgtggagataatcaatagtagggatgtcaaagttcaggtgatgggaaaagtgccaaccatttccattaacaaaacagatggctgccatgcttacctgagcaagaactccctggactgtgagattgtcagtgccaaatcttctgagatgaacgtcctcattcctacagaaggcggggattttaacgagtttccagtccctgagcagttcaagaccttgtggaatgggcagaagttggtcaccacagtgacggaaattgctggataagcgaatgccagtgggtcatgtgccctctcccttcacagcatgggatacatctgtatggagacggttcttttctagatttcctctacctttctgctcttaaactgcttctctgctctgagaagcccagctacctgccttcactgaatatacctcaggctgagattggggcgggacagcaggtcagtggatcttcggcgggaaggtgcagctgctccgcacagtgcagctgcaccacagttcgtgctcaagagctgcaggcccagactggggcactgacgctttcggctttgggggtcattctaccaacaaacagtccttggggggaaacgtcctggaaacacacagatcagaatgcatgctaatctcacagcgagcatggaggtagcggagcctgtgtgactccataaggctctaaccaacctaagttttcattgttgagaagtgaggccagggttgtactggaccaaaggctaaggcttgccactcagcattccaagcagacttgtttcctaaaagcattccttcattttgcattccaccctgggtcagcctcaaccacaaagtagtaggctttcctctctcagctgcagtaacagta

SEQ ID NO: 2096 - DNA, 2045 bp, Cricetulus griseus
gagagctgcgcctgctgaagcacatgaaacacgagaatgtcataggtctgttggacgtgtttacacccgcaaggtccctggaagaattcaacgatgtgtacctggtgacccatctcatgggggcagacctgaacaacatcgtgaagtgtcagaagcttaccgatgaccacgttcagttccttatctaccagatcctccgagggctgaagtatatacattcagctgacataattcacagggacctgaagcctagtaatctagctgtgaacgaagactgtgagctgaagattctggattttggactggctcggcacactgatgacgaaatgacaggctacgtggctaccaggtggtaccgagctcctgagatcatgcttaactggatgcactacaaccagacagtggatatttggtctgttgggctgcatcatggccgagctgttgaccggaagaacgctgtttcctggtacagaccacattaaccagcttcagcagataatgcgtctgacggggacaccccctgcttatctcattaacaggatgccaagccatgaggcaagaaactacattcaatccctggcccagatgccgaagatgaactttgcaaacgtgtttattggcgccaaccccctggctgtggacctgctggaaaagatgctggttttggactcagataagaggatcacagcagcccaagcccttgcacatgcctactttgctcagtaccatgaccctgatgatgagcctgtggctgacccttacgaccagtcctttgaaagcagggacctccttatagatgagtggaaaagcctgacctacgatgaagtcatcagctttgtgccaccgccccttgaccaagaagaaatggagtcctgaacacctggtttctgctgtgtcgaccccacttctctgtgaggggaaggccttctcatgggaactctccaaatatcattcaagtgcctcttgttgaaagattccttcatggtggaaagggatgcatgtatgcgtgtagtgtctgtctgtctgtctgttgtcaccagtttaggaaaagaggcctctcctaagaatgtccccagctctggaaatcatgctcccctcacttgtaataatcagctaaggaatcctgaaccaaagtgaggaacaaaggctcatgaggccgggactcccttcactgtctttctcaaaattgggttgttaagaacaaaaccaggcaggaccagtggcgcccgtgctcagaagggtcctcccggcagcttgacactgactggttctccgtctccgtgttgatttggggagaaatcaattttgtcttgggattttgtatgttataggaatccttagagaatgtgattccttctgatggggagacagggcaaattattttaatgttttgtattttcacctttataaagatgaaatcctcaggggtgaagaactgtttgcataattttctgaatttcaggcactttgtgctgtatgaggacccgtatatttaagccttttgtgtagtaaggaaatgaaaagccaattccagtgttggccgcgacaggtctgtattaggtcaaggtgtctgcactctcaatcagtgcagggtcatgcatgctcaggcgggaagggtaggaaagaccctggatcgtctggagcccagcaggatgcaggctggccaggcctttccacctcagtgtgcagttcaggacctcaccaccccaggaacatgtatcccggaggccatggctggttatgaaggccagtgtgtggtttccaactaaactctgctcggattacttactttattgaagttgtgtttgcacatgtgaccatgctgtggtaagaggccctgctccagggcctgaactcaagggagctgacagaagagctcccagcatccacagcgaaatgctgccatctcccagtttctctatcagaagacaagggaatgagggaactgctgttttgtttgtattcatgaacttggctgtagtcccatatgccataggatgtcagacaataccactggttaaaataaagcctatttttcaaattca

SEQ ID NO: 2097 - DNA, 2044 bp, Cricetulus griseus
tcaaggcttcggccacagcttagagatgcagtcggctcggataactccgagcgtggggcggcagctgctgcggctgggggcccgaagctcgcgacctactgtgcttctggggcagcaccggcctacctctgcccagagactttatgccagcgaggcctaggctgttcaggacaagccagataccctctcctccgatgcttccaccaaagaaaaacagccaaggcggaatctaagtcctttgctgtgggaatgttcaaaggccagctcaccaccgatcaggtgttcccatacccatctgtgctcaatgaagaacagacacaatttctcaaagagctggtgggaccagtgggcaggttctttgaggaagtgaatgatcctgccaaaaacgactccttggagcaggtggaggagaagactttgcagggcctcaaggaactgggggcatttggtctgcaagtacccagtgagctgggtggtttgggcctctgcaatacccagtatgctcgcttggcagagatcgtgggcatgcatgaccttggtgttagcgttaccctgggagctcatcagagcatcggtttcaaaggcatcttgctctatggcacaaaggcccagaaagaaaaatacctccccaaagtggcatctgggcaggctgtggcggctttctgcctaacagagccctcgagtgggtcagatgcagcctccatcagaacctcagctgtacccagcccctgtggaaaatattatactctcaatggaacgaagatttggatcagtaatggaggcatcgcagatattttcactgtctttgccaagacaccaattaaagatgcagccacaggggccgtgaaagacaagatcacagcttttgtggtggaaaggggcttcggaggtgttacccatgggctccctgaaaagaagatgggtatcaaagcatctaacacagcagaagtgtactttgatggagtaaaggtaccatcagagaatgttctaggagaggtgggaagcggcttcaaggttgccgtgaatatcctcaacaatggaagatttgggatggctgcaaccctagcaggcaccatgaaagccatcattgcaaaggcggttgaccatgctactaaccgcacccagtttggggacaaaatttacaactttgggatgatccaggaaaagttggctcggatggcaattctgcagtatgtgactgagtccatggcttacatgctgagtgccaacatggaccggggattcacagacttccagatagaggccgccatcagcaaaatctttggctcggaggcagcctggagagtaacagatgagtgtatccaaatattggggggcatgggtttcatgaaggaacctggggtagagcgtgtgctccgagatactcgaatcttccggatctttgaagggacaaatgacattcttcgattgtttgtggctctgcagggctgtatggacaaaggaaaggaactcactgggcttggcaatgccctaaagaatcctcttgggaatgttggcctcctgataggagaagcaggcaaacagctgaggcggcggacaggacttgggagtggtttgagtctctccggggttgtccacccagagttaagtcacagtggtgaactgacagtgcaggctctggagcaatttgccactgtagtggaggccaagctgatgaaacacaagaaagggatcgtcaatgaacagttcctgctgcaccggctggcagatggagccattgacctctatgccatggtggtggttctctccagagcttcaagatccctgagtgagggccaccccgaagcacagcatgagaaaatgctctgtgacagctggtgtattgaggctgcagcacggatccgagaaaacatggctaacctgcaatccaaccctcagcagcagcagctcttccgtaacttcaaaagcatctccaaggccatggtggatagtggtggcgtggtgaccagcaacccccttcgaatctgaatacacccagtcaggctctagcatctaagttatgtgccttcccttatgccaaaac

SEQ ID NO: 2098 - DNA, 2044 bp, Cricetulus griseus
cccaaaccccatcttgaaacatctccttcagcactgccgcctggtggagcgcattctgacctcctgggaggagaacgaccatgtgcagtctggagggggcccgaggaaaggctatatgggccacctgacccgggtggccaatgctgtggtgcagaacacagagcaggggcccaatgccgagcagctggggcagctcctgaaggagctgccggaggatcagcagcggcggtgggaagcgttcgtgtcaggacccctggccgagaccaacaagaagaacacagtggatctggtgaacactcaccacctgcactcctccagtgacgacgaggacgaccgcctcaaggagttcaacttccccgaggaggctgtattgcagcaggccttcatggacttccagatgcagcgcatgacctcagccttcattgaccactttggctttaacgacgaggaatttggggagcaggaggaaagtgtgaatgcaccctttgacaagactgccaacatcaccttctccttaaacgctgacgacgacaatcccaatgccaacctgcttgagatatgctacaaggaccggatccagcagttcgacgatgaggaagaggaggaggagggccaaggctcagcagagtctgatggagaatatggtgcctggcagggcagccagccagcgagggcttcccatgcgggccagccccctggtgtccggagtggaggaagcacagacagcgaggacgacgaggatgaggaggaggaagaggaagaggatgagggggctgcccaggcggcctgtggaagggccagccctccctccttccccagcctaggccctcagcctcctgccccaagttggacagccacctttgaaccagtgcctacggatgccccaacaggaccctcagtttccaagaagacagacatgtcctctacccagatccagaccagctctccagcccaccgtgccccacagctcaggtctcaggaccccatacccccctcagcacctcaggaagtcacagacagcagcaaagtagcagagcccttggccccctgccaggccttggttagtgttgcggatgtccaggccactctgcatgggatgtgctctgaccccagctccttggacagtgcaaccagagacccctctacctctgtcccagcctttgaggcccagaagtccccccagacagtggagggggaaaagaacccagaacctttggggcttccccaaagccagagtgcccaggcccttgagacgcccaatggctctaccccaggagggcccatttcatcgggttcccagtagctgcctggtggcagtgatggccaaatcctctgtcctccccatggaaccccccagtggggcaggatgggtcctttggtggccctcttgcccatttccccatatcctgcattctctcctctggactccaaaggaggctggtgccagggagatgccctcacccaccccatttgcactgagaagagaaactatggagctttgtctcctagaataaagatagagagtcacatagagaggagagagagagagagagagagagagatatattagtatattatatattatatatatatatatatatatatatatatatatatatatatatatatatatatatatatatatacatatatatatatatattgagggaggagtaagaaaggaagccaggacaatagctgggtcagcagctctgaagcacagcctcccgggagtcgtctgtccagcggggaccggcgctgggctttgaggctgctgacccaggctctggtgcagatgctcacacccggcctttcactcaggaccaccttggggtgtaacagagggccctggcaacatccctagagggccagaaccggggattctgggtgcccagtaccctgagggtcccagcactgctgccaagtggccttgtcccagctccttcccccaggctggcgtgagtgtgcaagtatgtgtgcagggtttgtgtttcatactgcaaatataaataaaggaagacagctgaaaaaaaaaaaaaaaaaa

SEQ ID NO: 2099 - DNA, 2044 bp, Cricetulus griseus
  modified_base (245)..(245): a, c, t, g, unknown or other
gaattggccgctgcgcctcctcccgaggcatgctgggagcctggaggactagcgaggaggagttgagagaacggagcggacgccatggcggccgacatcgagcaggtttttaggctttcgtggtcagtaattccgggaaatacaacaggagctttccagcggaaggagtgaaggccagctgaatggtgaaacaatgcacctattgaaggagccaggcaggtgacaccgctgcctagcagtgaagntaaagcagtgtctcctcccaacaaagaaacagtccctgatgtggggtatcctgccggcattgatgagattaatgaagccgacttagtgagaccattacttcctaaggacatggaacgtctcacaagcctcagagctggcatggaaggacctttacttgcaggtgaagttgagcgcgacaaattggctgccagtcccgttgtaattagtataccagaaagagcatcagagtcttcatcagaggaaaaggatgattatgaaatctttgtcaaagttaaggacacacatgaaaaaagcaagaaaaataaaaaccgtgacaaaggtgaaaaagagaagaaaagggactcttcattaaggtctcggagtaagcgttccaagtcttctgaacataagtcacgtaagcgtaccagtgagtctcgttctagagcaaggaagaggtcatcaaagtccaagtcacatcgttctcaaacacgttcaaggtcacgttcaagacgcaggaggaggagtagcaggtcaagatctaagtctagagggagacggtctgtatcaaaagagaagcgcaaaagatctccaaagcacaggtccaagtccagggaacggaagaggaaaagatcaagctcccgggacaaccggaaaacagctcgagctcggagtcgaactccaagtcgtcggagtaggagtcacacgcctagtcgacggagaaggtctagatctgttggtagaaggaggagtttcagcatttcccccagcagaaggagccgcacccccagcagaaggagccgcacccccagcagaaggagccgcacccccagcagaagaagccgcacccccagcagaaggagtcgcacccccagccgcaggagaagatcaaggtctgtggtacgaagacgaagcttcagtatatcaccagtcagattaaggcggtcaagaacacctttgagaagaaggtttagtaggtctcccattcgtcgtaaaagatccaggtcttctgaaagaggcagatcacccaaacgtctaacagatttggataaggctcaattacttgaaatagccaaagctaatgcagctgccatgtgtgctaaggctggtgttcctttaccaccaaacctaaagcctgcacctccacctacaatagaagagaaagttgctaaaaagtctggaggagccaccatagaagaactaactgagttttagaagccaaactgactgaggagtggaacggttcgtttgaatggaggaggtgttgagtgagcaacacgcagaagctcgcctacagcttggtttccattcacgacgtgttcatggccgccaagagtgtactgcatatgcgcaaagacacagacaatcttcagaaatgatctttgccaccggagcttggaaattaatgagaatagctggccattgcctgaaaggaacttctttcgcatcaacatttcgggttttggctgtttggtaccagccattggcgataatggccggccattatcagttcttcctgcggttcgggttttggcagtaacatattttaaatatacttatttttgttttaaaaaaattgatcttttgaaattaaggcttttcggggaagctttgttttactttaatatttttgtgtgtgtgtggtggggaagacgctagaaatattgctgctaggatccaagaaataacacacttgtttcatatactgaaacttgttattggctagccttatgccagcctgccactgtcaacatattctgttcccattggttacatgcttgatacactcttgttgttttggcttaattgagtcttttaattc

SEQ ID NO: 2100 - DNA, 2044 bp, Cricetulus griseus
  modified_base (789)..(789): a, c, t, g, unknown or other
tgtctcagcaagggcaccttctcagacgtgacgtttaccttggatgatggagccatcagtgcccacaagccactgctgatctgtagctgcgagtggatggccgccatgttccgggggctcctttgtggaaagcgccaacagtgaggtgcatctcccagtataaacaagatgtccatgcaggcggtgttggaatacctctacaccaagcagttgtcgcccaacttggacctggaccccttggagttaattgccttggcaaacagattttgcctgccgcacttggttgcactcgtagagcagcacgctgtccaggagctcaccaaggctgctatgagtggagtgggcatcgatggtgaagtgctgtcttacctggaattggcacagtttcacaatgccaaccagctagccgcctggtgtttacatcacatctgcaccaactacaacattgagaggcaccgctggccccccgtgtggtacctgaaggaggaagaccactaccagcgtgtgaagagggagcgagagaaagaggacctggcgctgaagaagcactattccaggagaaagtggtgtttctggcactcgtccccggctgtcgcctgaagaggagaggggggacagtcatctgctcggccacctccacaccattgacagctctactgtaaaaaccagtctcctcagccatgggcacagttagggtctggggcactggcttttccacttgtgtgcattttatctccaggtcgaagcacaagctctccatccatccacgagcctggacataagaggaanctggctgactcgctggaagtgtttaatctttgtgctgatgaacaacattgttataattacctatttacaaagatttttttttctatttaagtgctagtaattacatggttatctgtgccagataaactatggtgagggcaaatatcctactgtttaagttgtctagattcaagaggataaccctcataatcactagaagggcttattaaatcccagtactatcaggggcaaaacaggctggcggacctgattactgtagacaagagtttgagtgctactattggatgactgtgtcagggttggtgttttctaaactcttcctagggaaaattcaggtcaccactaaagtaggccaaggcagaccacctgctcctacagcagtcccacggagcccatgaaagcccagagctggaggctgggtcctgcattctccagcagtgaaaggagccgaatcccaagagcctaggaaatggtgctattgtgtgggagttctgaccctatgccctttgggaagtttagttttagagcagaatgtgagagcaggggagctctcaagacacacacacacacgcacacaccattagagcatcaaaagcgccacacctgccacgggatcgttgtgtgctggacactggggctcatcctgttgggaggtcaccttactgatgctaagggctatactgactttgctttgttttccaaatgccatatgcatttgaaaatctgtgtagaccacaggcgggcatttgtttctggcatggccacataccagatacccaagcttagaaagacccagaaatgcaatgcacggccctcatggcagagagggagtagcagaagaggagtggggggctgataaagccttccttcctccttcactttggtaatagggcaaatgactaatggaaggagagggtagatagagtgagagggtatatgtcaggactcggggagaaatggcatatagccacctgaaaatcctagacgttgtgttttcagtgagtagtcctagttgaattataacaaccaaagctccatctgattgtactcttgccaaaacataacggacacatacatgaacatggggcataagcaataatatccactcatgatcttcacagctgctggaaccaagtggctggttcatttggttgacacggaatagcctttaaccatggcggtttgtttcatgtttcattgtttttttatttcaacaaaaagccaaataaaaattagtttagctataataaaaaaa

SEQ ID NO: 2101 - DNA, 2043 bp, Cricetulus griseus
gacagaagaaacaactggaaataaccatctgccctttacatcggtggggtccatgaaagttctaagaggcatttgggttgcgtatgagaagtgtggcttctctggtcatcagtatttgctagaagaaggagaatacagggactggaaagactggggaggctacagtggagaacttcagtctttacgccctatattaagtgatttttcaaacgctcacatgataatgtacagtgaaaaaaactttggctccaaaggctccagtattgatgtcttaggaattgttgctaatttaaaggagactggatatggaatgaagacacaatccatcaatgtgctaagtggcgtatgggtagcctatgaaaaccctgacttcacaggagagcagtacatcctggacaaaggcttgtacaccagctttgaggattggggaggcaaaaattgtaagatctcttctgttcaacccatatgcttggatactttcactggtccaaggaaacgaaatcagattcacttgttttcagaaccacaattccaaaggccaaaagtccaaaggttttagatgagacaataaccaaattgatgattcgttttgactaagtcttgcagagttctggaggcagctgggttgcttatgatggagtaaaacttctctggcaatcagtatgtgctggaagaaggccactatccttgtctctcagcaatgggatgtctgcctggagcgaccctgaagtctcttcgctttatagatgtggaattttctgagccgacaattattcttttcgaaagagaaaacttcaaagggaagaagatcgaactgaatgctgagacagtcaatctccgatccatgggcttcaacactcagatccgctctgtccaggtcattggtggcatatgggttacttacgaatatggcaactacagaggccgacagttcctactgtctcccgcagaagtgccaaattggtatgagttcagtggctgtcgccaaataggttctctccggccctttgctcagaaacgaatttatttcagacttcgaaacaaagcaacaggactgtttatgtcaaccaatgggaacttagaggatctgaagcttcttaggatccaggtcatggaagacgttggtgctgacgatcagatctgggtctaccaagaaggatgcatcaaatgcaggatagcagaagattgctgcctgacgatcgtgggtagcctcgtaacgtctggctctaaactaggactagcccttgatcaaaatgtcgacagtcagttctggtgcagtatgatcaaaatcacatcattctcaacacagtgaacacagagaagctaacccaagtgtgggaagccatggtcctctgaaccctgaccaagaattgcaggagttttccaggggatttctgaccacctgactggagaaaaataaaactacagagctgatggaggagccaagtggaaagtggactgaaggccataacagtgaaatgatctttacaaagatgtttgagtttggagccactagtctgttcttcttgtttcttaccttgtattttctcagtaacttcttaaacaggctgccctggtagcagctcttggatgtagatgttttaaagatgaagaccacatcgtaacttatttccagtgacaagaggagacaagacctctgagtgtggacatatagattcccgtagaggaaaggataaaagcccaagtttgttcatcaaaagacttttagcattagaggatgctttgccagacttctgatccactgccttaacggtttccaaggaccatctactgctggatggcagagtgggaaagtcctatacactttccaaggagtttagcaaatataaacaaaacactattttcagttgatgttcaaaatgatgttcaaaatttgcaaattttcatgttggtgtctgcttacaagcagaacttgggttattttaattctcctgtgggctgccctcgagtgtcacagtttaatgccctccttacagctgctattgggacagtattatggcctaatttattaacccttacttt

SEQ ID NO: 2102 - DNA, 2043 bp, Cricetulus griseus
tgctttgatacaccggccgtcaagtgcacctactcagccgttgtcaaggccccgttaggggtacaggtgctgatgagcgcgacacgaagcgtgtatgtggaggaagacggcgtctaccacttccacatggatcaccctgtacccgcctacctcgtcgcccttgtggctggagacctcaagccagcagacattgggcccaggagccgtgtgtgggctgagccatgcctcctacccacagccaccagcaagctatcgggtgttgtggaacagtggctgagtgccgcagagcgattatatgggccatacatgtggggcagatatgacatcgttttcctgccaccctccttccccatcgtggccatggagaatccgtgcctcaccttcatcatctcctccatcccttgagagtgatgagttcctggtgattgatgtcatccacgaggtggcccacagctggttcggcaatgctgtcaccaatgccacttgggaggagatgtggctgagtgagggcctggccacctatgcacagcgccgcatcaccacagagacctatggggcagccttcacctgcctagagacagccttccgcctggatgccctgcataggcagatgcgacttcttggggaggatagtccagttagcaagttgcaagtcaagctagaaccaggagtgaatcccagccacctgatgaacctgttcacctatgagaagggctactgcttcgtgtactacctgtcccagctctgtggggatccccagcgctttgatgactttctccgagcctatgtggagaaatacaaattcaccagcgtggtggcccaggacctgctggactcctttttgagcttcttccccgaactgaaggagcagagcgtggactgccgggcagggctggagttcgagcgctggctcaatgccacaggcccaccactggctgagccagacctgtctcaggggtccagcctaacccggcctgtagagaccctcttccagctgtggactgcagagcccctggagcaagcagcagcttcagccagtgccattgacatctccaagtggaggaccttccagacagcactgtttctggaccggctgctagatggatccccgttgccccaggatgtggtgatgagcctgtccaaatgctactcgtccctgctggactccatgaatgctgagatccgcatccgctggctgcagatcgtcgtccgcaatgactactatcccgatctccacagagtccgccgcttcctggagagccagatgtcacgcatgtacaccatcccgctgtatgaggacctctgcaccggtgccctcaagtccttcgcgctagaggtcttctaccagacacagggccggctgcatcccaacctgcgcagaaccatccagcagatcctgtcccaggggctaggccccagtgttgaacccactgcagagaccagcacagagctgggcagtgcggaggcagacacgaacccagactcgccagccctgctgctcggggatgaggcccccagtagcaccatctctctcagggacgtcaatgtgtctgcctagccttggtgactgaccctcgacctcccagacaccacgattgtgccttttgtggtcctggctgccatgactgcgccttggctctggccacgagctctgcccaggaccataagcccctcccattgtctccaggtcaggggcatggggaaaaggatcttgtgtccattgaggcccatggaccagggcccaccctgtccctgctctcttacactgcaggccccagggctggctcatacccaccatgcctcctgccccaacactgacagccatgcctcaccctggaagccagcatctgctgaacactgttctgaggacagtgaccccagcagtcccacagcagcaaccacaatgtgccttacacatgccagaggcccaggatgcatggtcctgggattgtgcttttctgctgggccctgtgtgtggcccctgggctagacttgctggagggacagagggcagaggaacaaggacacaggcattccatcagt

SEQ ID NO: 2103 - DNA, 2043 bp, Cricetulus griseus
ctggaaaaggacagaaaccaatgcttacttccaaaactgaatctggggagagaccggcaggggactctgacttttcttttaaagccagagccagggaagtcttcagagcttaccgaagctgtggaaaccaaggagactgaagagggtgatacagagccagaagagggctcaccgcttgaagaagataatgaaaaggtgtttgacccttcctccagtgagaaccgagaggagacacttagggagtctgtgaatgatgagaaggatgactcttataaggacagttctggaaacaccagtgcagagagcagccacttctttgcttatctggtgactgcagctgttcttgttgctgtcctctatattgcttaccacaacaaacggaagattattgcttttgccctagaaggaaaaagatccaaagtcactcggaggccaaaggccagtgactaccagcgtttgaacctaaagctttgattattttttttgtctgcaagaaccttgtcctccctgctgatttgtttacgaatcaagagaaatgaaaagactgaccccctctggggtttggtggcaagtctgggctggccgagacggggttgcttcaggtttgcacctgcactttggtgacattgaactctgctgatgttttctttacgtttgtgtcctctttatgctggtgtgttccagcatcctttcttctttggagtgtgaggaggagcatgtggaaacattactgtgaccaaaggaagaccccaccctaggcaggccacacaatggaccaccctgcggtagcatcttatctttgcaactctagtagggaagctgtagagatgtgctttgtagacaggaggtagaaaatggtgagtgggatgttgatgggcagagagatttgaacacatattctacagaggccttaactgcaaaccagaatagcaagtttaaagagtgttaaagtctgagctgtctgacagtctacatgtttttctgaaagtgtgcactttttggttgtactagcataaaagggaacttggagtttctgaaagtaaagtcactgttccatgggaagcctgtatgcgtgcccatacctctcctgttgtagttgctgttgcttccattgccttgcctcctcttcctgacatttactgactcaccttgatctgttctcctcctgtttctcaaggttactgagttaatcagaatctcctaattcaacagctcattctcacatcttgttcttaacacttaataatagtggatgctgagttccatgcatgttgacattctgggtgtctctcccagattttcctttgtcttatagggttcaaatttcttgttggaggtgtaactgaaactggagctcacacagctaatcctggctcctggctctatgaccttaaacttgttgacttctgctcttgaagggcaggaaggttgattttcaggaatcaagattggcagccagtggagagacacatgaaatatcaccagagtctacaaagcctcacccctttggattgctgacaaaggtttcttgtgctgacagagtacagtggaatgtttcccttgaaaagttgcactgtaaggagatggctcctaccaaagaaaagtcattttcaggattattttttaaggtagaatacttgaagcatatttttctagagtgtgtagatggtgatggcccagctgagacatccacaccaggggctgggctggcatgtagaaagcacaggaagccacaagtagcacttctgtagactattctgcgcttgctctcctcagcttttggctgaaggttcgtttcttaaggggaacctgcttgtcatacatgttaatagtttgttttcctgctatggattatagaagccacttctggaccaaacaactaactaaatgtgcaaacatgttttaccctggaaacagagctgtgtgcccttctaagtatttttcaatatattttattgagcttctgtaaatggcatctcagtgtagtttcatgtcattattgaacagaaaccaaaataaacttcagatatcaaagcattgaaa

SEQ ID NO: 2104 - DNA, 2042 bp, Cricetulus griseus
  modified_base (251)..(251): a, c, t, g, unknown or other
  modified_base (298)..(298): a, c, t, g, unknown or other
caggccggctctttggtcttctctactggtgggttggcaccacctggtaccgcctgacgactgctgcctccctcctggatgtcttcgtcttaaccaggtccaggcacttctcactgaacctgaagactttcctgtggttcctcctgttcctgctgctcctgactgttcttacctatggtgctttggtatttttaccccttcgggctgcatacattgcagcccaccttggcctcctggtgggcagcaaaggngagcaagaggcagccggaggtgtgggaatccagagatgcttccccanactttcaggctgagcagcggattctttcccgggtatactccctggagcggcgcctggaagctcttgctgctgagttttcctccaactggcagaaggaagccatacggctggaacgcctggagctgcggcgagggggctcaagactcagaagacctcttcaggaagattgtccaagcctctcaggagtctgaggctcatgtccagcagctgaagacagagtggcaaaggatgacacaggaggccttccaggagagctcagtgaaggagctgggacagctggaagcccagctggccagcctgcggcaagagctggctgccctgactctgagacagaattcagtggcagatgaagtggggctgctgccacagaaaatccaggctgccagggctgatgtggaatcccagttccctgactgggtcagtcgttccttctccgagataagggtgccagtagtggactcctacagagagatgagttgcatgctcagctgcaggagctggagagcaagatccttgccagcatggctgagatgcagggcaaagtcagccaaggggaagctgcagcctctctgggacagacactgcagaaagaaggaagtggttggggtgacggaggagcaagtgcaccagatcgtcaagcaggccctgcagcgctacagtgaggatcgtattggaatggtagactacgccctggaatcaggaggagccagtgttatcagtacccggtgttctgagacttatgagacaaaaacggccctcctcagcctcttcggcatccccttgtggtaccactcgcagtcaccccgagtcattctccagccagatgtgcacccaggcaactgctgggccttccagggacctcagggttttgctgtggtccgtctttctgctcgaatccgccccacagctgtcaccttagagcatgtgcccaaggccttgtcacccaacagcactatctccagtgctcccaaggactttgccatctttggctttgatgaagacctgcagcaggaagggacacttcttggcacatttgcctatgaccaggatggggagcccatccagaccttctatttccagacctcaaagatggccacataccaagttgtggagcttcggatcctgaccaactggggccaccctgagtacacgtgcatctaccgtttccgggtgcacggagagcctgcccactagccctttgagaccttgtgcctgctgctagccacctgggaggctcacccttcccagcatctatccctgctctgagagtaggtgcatagcaccccaccactgcccacacatgcttaatagcgttgacttccaggagcagaaacgaagaggcagcgtgtgtaggattccctgcacagccaagcaggctgctgtgctcttccagcatggcaggtaccatggcccacaggtcccctggggtttcttgtatcctggaggataccagctcctgtgtgcctctgaggactgctgtctgtgccaacctagaaggtccccagtgctggggatcattgcttttcctcctgatgtggggtgagggtctactttgtacttcatccctgctgtaccctgcctgtgcctggagcaagcttaccattccccaagggaggacctaggctgtttttggggccattccatcagggtagcctagaagagaggggagatgactttgcaggttctcctggaccagtgccaaggccctgatgtattatatatagaattctcagtcttgtttttt

SEQ ID NO: 2105 - DNA, 2042 bp, Cricetulus griseus
  modified_base (22)..(22): a, c, t, g, unknown or other
  modified_base (152)..(152): a, c, t, g, unknown or other
  modified_base (1452)..(1452): a, c, t, g, unknown or other
acagatgatggtgaaactcatnaagggcaggatgaatcagaatagctttgactggctctacctcacctctagtgtctccggggaatgggagtgaaattgctcctggatcagtcacacagccaaagaaaattcgaggaattggatttggaganattttttaaagaaggaatctgtgaaacttaggacaagaacatccagtagtgaaacagaagagaagaagacagaaaagcccttaatcctgcagtcactgggatccagaacccagaatgtggaggtgacgaaaccagacactgacggcaagattaaagctaaggaatattgtagaacattatttgcctatgaaggaaccaatgaagatgaacttacttttaaagaaggggagataatccacttgataagtaaggagactggagaagcaggctggtggaagggtgaactcaatggcaaagaaggagtgtttccagataattttgctgttcagataagtgaactagataaagactttccaaaaccaaagaaaccacctcctcctgtaaagggtccagctccaaagcctgacctgttagctgcagaaaagaaagtttttcctctaaagtctgaagaaaaagatgaaaaagtctctgctggaacagaaaccttgtaaaccagctgcacctcaagtcccacccaaaaagcccactccacctaccaaagccaataatttattgcgatctcctggaacagtgtacccaaagcgaccagacaaaccagttcctcctccacctccaacagaccaaaattaatggaagaaatttctacaatttcttcgaagattagaaactgagccagtatcaaaaccaaagctaagatcctgaacaattgccagttaggccaaaatcagtagactttgatgcccttttagtcagaaactctaaagaaacagatactgtaaattttgatgacatagcttcggacattctccaactcaaagcccagagaaaaccatgaagttaccaaaagaaagatgatagtggcaacctaaagttgttggagcttaaaaaggacacgagctactcgtcaaagccatctctttcaacaccttcaagtgcttctaaagtaaatacatctgctttcctaactccattagaactcaaagctaaagcagaatcagatgatgtgaaaaaaagtcccctggatgaacttagagctcagatgaatgaattactgggtatggtagatgcattgagaagggatcatgggaaagaactggaaaagctacgcaaagaattagaagaagagaaggtcatgcgaagtaatctggaggtggaaatcgcaaagctgaagaaagcttttctgtcttcttgaggtggtgtggacccagtgttcttaatgatgaacttaactgacttgttaagacaacaaatgtggtgttgtggtgaagaaatgagaggacatgaactatggtatctattnaaaagttggggggggtgacaaattttttatatattttgttttgccaatatgaaaaaaagaggccttatttcttactgtgctgggatagcaaacatttctgttgtttgcttgaaaatactactgaatctgtaataaaaaggaatagaaagttacacacacacacacacacacacacacacacacacacattttaacttcttacccagggttacactgttgtgcctgtttgtctgcagtgctgtttgtatattgggttataaaatagggattcctagttaccaggttcctcacctaccacataattaattattaatgaaataattgagaaaataggagctttgttctctaattcatgtggcctaaggaatacgaaaaatgtcatgctagttcttatatgtgcctagacactgcagcacatgtgggatatgtaagcaccagccttattgctgtttcttatgctcattctgcagtcttaaatataactcatttcattatcttatatttagctcattgtatccttccttaatttcactaatggttatcttaggaaaacaagcctctaaacccagatgttttcaaaattgcagaat

SEQ ID NO: 2106 - DNA, 2042 bp, Cricetulus griseus
cttgggaggaactggccataactgaatcccatctctagagttttttgtaggcacaccgagagccatgaacagcttcaataaggaagagtttgactgccatatcctcgatgaaggctttactgccaaggacattctggaccaaaaaattaatgaagtgtattcctctgatgacaaggatgctttttatgtggcggaccttggagacgttctgaagaaacacctaagatggctaaaagctctcccccgggtcactcccttttatgcagtcaaaagtaatgacagcagagctgtagtgaacaccctagctgccattggaacaggttttgactgtgcaagcaagactgagatacagttggtacagggccttggagtgcctcccgagaggatcatctatgcaaatccatgtaagcaagtgtctcagatcaagtatgccgccagcaatggagtccagatgatgacttttgacagtgaagttgagttaatgaaggtcgccagagcacatccaaaggccaagttggttttgcggatcgccactgacgattctaaagcagtgtgtcgactcagtgtaaagtttggtgccacactcagaaccagcaggcttctcttggaacgggcaaaagagctaaatattgatgtcattggtgtcagcttccacgtggggagtggatgtactgaccctgagaccttcgtccaggccttgtcggatgcccgctgtgtctttgacatgggaacagaagttggtttcagcatgtatctgcttgatattggtggtggctttcctggatctgaggatacgaagcttaaatttgaagagatcaccagtgttatcaacccagctctggacaagtacttcccgccagactctggagtgagagttatagccgagccaggcagatactacgttgcctcagctttcacactggcagtcaatatcatagccaagaaaatcgtatcgaaggggctctgacgatgaagatgagtccagtgagcaaaccttcatgtattatgtgaatgatggagtgtatgggtcatttaactgcattctttacgatcatgcacatgtgaagcccctgctgccgaagagacccaagccagatgagaagtattactcatccagcatctggggaccaacatgcgatggccttgaccggattgtggagcgctgtaatctgcctgaaatgcatgtgggtgattggatgctctttgagaacatgggtgcatacactgttgctgctgcatctactttcaacgggttccagaggccttctatctactatgtgatgtcgaggccaatgtggcagcttatgaagcagatccagaaccatggcttcccaccagaagtggaagagcaggatgttggcactctgcccatctcttgtgcccaggagagcgggatggaccgtcatccagcagcctgtgcttctgctagtatcaatgtgtagatgccattcttgtagctcttaccttcaagtttagcttgaattaagggatttggggggaccatttaacttactgttagttttgaaatgactttgtaagagtagggcttggcacagatgaagtatggaaggctaggagatgggtcacacttacctgtgttcctatggaaactttgaatatttgttttatatggatttttatcacttttcagacatactaacgtgtgcccctcagccactgagcaagcatttgtagcttgtacatttggcagaatgggccaaaagctaatgttgtgacccattttgaaaataaactatcttgaaataattgggcatcagggaatgtttgcaatgtcccttaaagaagggacacacttcctgcacaggctgctgtagtcatgttggtgaggaacgtcatctgcctagcgacctgatatcctggccacaccccagggaaggcatctaaggcttttgaaccttgcctgcagaagccttgaatgttcctcaacccttgacttcgcctgcatcaccacctagtaacagttggaagtatcatacagcacttggcaatcaacttcctgtaataaatctcaacagcagcaa

SEQ ID NO: 2107 - DNA, 2042 bp, Cricetulus griseus
gcgccggcgccggacggtcaccatggctgttactggctcccttgctgtccccaacctgttcctcaggtcacctccccaccttgctgcctatgtcccgagggagtgcacaggttccagtggatcagaaacctggtcccagaatttggagtctccagctctcacgtcagggtgctctcctctcctgcagagttcttcgagctcttgaaggggcagataaaaatggccaagaggcgagtcgtgatggcatccctttacctggggacaggacctttggagcaggaactggtggattgtctggaaagttctctggagaagtcactacagtcgaagtttccttccgacctcaaggtctctatcctcctggacttcacccggggctcaagaggtaggaagaactctcgcaccatgctgctcccgctgctgcagaggttcccagagcacgtgcgtgtctccctcttccacacgccaaacctgcgagggctcctccgtctcctcatcccagagcgcttcaacgagaccatcgggctgcagcacatcaaggtgtacctctttgacaacaacgtcgtcttgagtggtgcaaacttgagtgactcctacttcaccaaccgccaggaccgctacgtgttcttacaagactgtgctgagattgcagacttcttcacagagctggtggatgcagtgggggatgtgtccctgcagttgcagggggatgacacggtggacgttgtggatggcatggtgcacccttacaaaggtgaccgggctgcatactgcagagcggctaataagcgggtcatggacgtgatccactcagccaggacccggcaacagttgctgcatgcgcagaccttccacagtgactctctgctgagtcaggaagaggctgcagctgctggagaccggagaccagcacctgacacctggatttaccccctcatccagatgaagccctttgagatacagatagatgagatagtcaccgagaccctgctgacggaagctgagcgaggagctaaggtcttcctcaccactggctacttcaacttgacccaggcctacatggacctggtgctaggcactcgagccgagtatcagatcctcctcgcctcccctgaggtcaatggcttctttggagcgaagggagtggccggcgccatccctgctgcctatgtgcacattgagcggcagttctacggtgaagtgtgtggcctggggcagcaggatcgggtccagcttcaggaatactggcgcacgggatggacctttcatgccaaaggcctctggctgtacctggcagggagcagcctgccctgcctcacgctgattggctctcctaattttgggtacaggtcagttcaccgggacctggaagcccagattgccatcgtgacggagagccgagccctgcagcagcagctccatcaggagcaagagcagctctacttgcgatccagcgtggtgacctctgcgacctttgagcagccaggtcggcaggtgaagctgtgggtgaagatggtaaccccactgatcaagaacttcttctgaggacaggaatggccttgatgaagatgacaggcatggctggtgtgagatccttcagccgtgcttctgcaatgactccggtctgggtgtcccagcgagctcctgtggggacaatgtaactgacggtctgggtgacctacgggaggctgaggcgatgttgggcgtgctgaccatgaataagggagccaccagcagggaggaaggcctggcctccaacctccccaggcttttcagagatgggccagtgaagggggagccccgaagtgttcaggccaggtgccaggggccgaaaatgccaaacatggggtatgaaccaaggactcagaggtgaccgcatgtcgtaatggctctgaggccgcgtctcttcagaggcccatctcagccttctgaatgtcagcggcagaaaactgacggaggctgaagattccagcattgccccttccgatcgttcccgtgtaatgaatatctaccctgtgtacatagggaataagttatatata

SEQ ID NO: 2108 - DNA, 2042 bp, Cricetulus griseus
ggatggttcggtggcagtcgtcggtgttccagctggtgggagttggcttcacggtgctgggcgctgggcccctagtttatgtagctgggaagttgggctgcggggtcgtccctgtcctcctgcttccggtgttcctgggtttccttctgcggcgcggggcctcgccacggactcgccggccctgtggggccgcggcttgagtggtgccttctgcgagtcctaagtacattttaaaaccttcaagatggttctagcagatcttggaagaaaaataacatcagcattacgctcattgagcaatgccaccattatcaatgaagaggtattaaatgctatgctaaaagaagtatgtacagcattattggaagcagatgttaatattaaactagtgaagcaactaagagaaaatgttaagtctgcaattgatcttgaagagatggcatctggtctgaacaaaagaaaaatgatccaacatgctgtatttaaagaacttgtaaagcttgtagaccctggagttaaagcatggacaccaactaaaggaaagcagaatgtgatcatgtttgttggattgcaagggagtggtaaaacgacaacatgttcaaagttagcatattattaccagagaaaaggttggaagacctgcttgatatgtgcagatacattcagagcaggtgcttttgaccagctgaaacagaatgccacaaaagcaagaattccattctatggaagctatacagaaatggatcctgtcatcattgcttctgaaggagtggataaattcaaaaatgaaaattttgaaattattattgttgatacaagtggtcggcacaaacaagaagattctttgtttgaagaaatgcttcaagtttctaatgctatacaaccggataacattgtttacgtgatggatgcatccattggacaggcttgcgaggcgcaggcgaaggcttttaaagataaagtagatgtagcttcagtaatagtgacaaaacttgatggtcatgcaaaaggaggtggtgctctcagtgcagttgctgccacaaaaagtccaattattttcattggtacaggggaacatatagatgactttgaacctttcaaaacgcagcctttcatcagcaaacttcttggtatgggtgacattgaaggactgatagataaagtcaacgagttgaagttggatgataatgaggcacttatagagaagctgaagcatggtcagtttacattgcgagacatgtatgaacagtttcagaatatcatgaaaatgggcccattcagtcagatcttggggatgattccaggttttggaacagattttatgagcaaaggaaatgaacaggagtcaatggcaagactaaagaaactgatgacaattatggatagtatgaatgatcaagaactggacagtacggatggtgccaaggtttttagtaagcaaccaggcagaatccagagagtggctcgagggtcaggtgtctcaacgagagatgtccaagaacttctgacgcagtataccaagtttgcacagatggtaaaaaagatgggcggtatcaaaggacttttcaaaggtggtgatatgtctaagaatgtgagtcagtcacagatggcaaagttgaatcaacagatggccaaaatgatggatccacgagttcttcatcacatgggtggcatggcgggacttcagtcaatgatgaggcagtttcagcaaggtgctgctggcaatatgaaaggcatgatgggtttcaacaacatgtaaagaagatgccttcatataaactgccgtggttgattatgtcatctgcgggaggagtggctggtttttttcccaaaagtcatcatatttctgctttaaatcttctgttagtttcactgtcataacacttcttaagttaaacaaatcatgatgtaaaattttagtacataaaggtttttaattgtctcaaaagccaagcattacatttataaacagtcccgatcagtaaaattacatgatattgaagaaaagtgctgcaaaataaacttcaagtgataaagttaaa

SEQ ID NO: 2109 - DNA, 2041 bp, Cricetulus griseus
ggggaatgcttgctggacaagcctcagaaccccatcaagctcccatctgatctgcctggtaccatgtacgatgccaaccgccagtgccagtttacatttggagaggaatccaagcactgccccgagcagccagcacatgtactactctttggtgcactggtacctctggtggcttactcgtgtgccaaacgaaacacttcccttgggcagacggcaccagctgtggagaaggggaaatggtgtgtcagcggcaagtgtgtgaacaagacggacatgaagcatttcctctactcctgttcatggaagctggggggcatggggaccctggggagagtgttcaagaacctgtggtggaggagttcagtatacaatgagagaatgtgacaacccggtgccaaaaaatggagggaaatactgtgaaggcaaaagagtacgctacaggtcctgtaacattgaggactgtcccgacaataatggaaaaactttcagagaggagcaatgtgaagcacacaatgagctttcaaaagctccctttgggaatgagcccactgtggaatggacacccaagtatgctggcgtctcaccaaaggacaggtgcaagctacatctgtcaagccaaaggcagtttgtggaggaaatggctccacatgcaagaagatatccaggatcagtcactagtacaagacccggttatcatgacattgtcacaattcctgctggagccaccaacattgaagtgaaacaccgaaatcaaagggggtccagaaacaatggcagctttctagccatcaagagctgcagatgggacctatatcctgaatggaaacttcactctgtccacactagagcaagacctcacctacagaggtactgtcttaagatacagtggactcctcagcggcgttggaaagaatccgaagcttcagcccatcaatgtcccatgatgggggagtgttagcaaacgagagctgtgatcctctgaagaagccaaagcattacattgacttttgcacactggcagagtgcagttaaacagttgtgagaagcaggtagcatgggagggctgatacactgagatcaagagtgctggagggaacccatgaatcaaaccagtaaccagtgaggcctgccaaggagcgtggggggtgggagttacatagcaaagggagagatcaggacacgatcctgccagttaaaatttgacgaggtagttaatgaggactgttagcatctgagagaccatatgtagcacaatgacgccccagagcgttactagtatttctcttgttaacatctattggagatcgcttgtcttacattgtaagctgctgcggggtagcaggtccactcctggcagctggtctaacagtcgtatcctggtgaatgtctgttcagctcttctactgagagagaatatggctgtttccatatgtatatgtatatagtaaaatacattactatgaattatatgtactttataagtattggtttgtttgttccttctaagaaggactatagattataataaatgcttataataacatatttatttttatacatttatttctaatgataaacctttaagttatatcgcttttgtaaaagtgcatataaaatagagtatttatacaatatatgttaactagaaataataaaagaacacttttgaatgtgtatgtctattttctgaggtgggattaattcctgggcaagaaatctgaggagacacaaatattggattttgagacaggttttatgattttggtgaatgaactgtatttcctgtttgtagaattattaataaaaaagaagttgatgtgtctttagtggtaagattgttgctaatgtggttggcaaatactgtaaagagtcagatagtaagcatttatggcattgtaggctatatttcctgtcatgaccatgtgacagtgaatgcttgtgtaggaatgagaacagccataaacgatatgtaaatgattaaccatggctgtgttttaataaaactttatttaacaaaaaaaaaaaaaaaaaaaaaaaaaaa

SEQ ID NO: 2110 - DNA, 2041 bp, Cricetulus griseus
ctaagaaaccaaggaaacaagaaagacaaccaaagaaggtagacagctgtcactagccaaaccagaagcagggcctattccgaagcctggaggacgcactgaaagctctggatgtggcagctctgaagaaggaactggacaagagccagagtgtgttcactgggaaccctctgtatggctgaaggacctggccagctatctcaactacaagctccagactccacggattgagcccactctgagccagtatccacatgattatccctacagcctcgtgagccaagagctgcgtgggatcatccaagggctcctgaccaaagctgcagggtctgtggagctctttttcgatcactgtctgttcaccatgctgcaagagttggataagacaccaggggagtcactacatgggtaccgcatctgtattcaggccattctacaagacaggcccaagattgtcacctcaaaagcaaagtgcctgaccatcatgtgggccctgggacaagcaggttttgccaacctcaccgagggactgaaagtgtggctggggatcatgctgcctgtgctgggcatcaagtctttgtctccctttgccatcgcatacctggaccggctgctcctgatgcatcctaacctcaccaaaggctttggcatgattggtcccaaggacttcttcccacttctagactttgcctatatgcccaacaactccctaacccccagcctgcaggaacagctgtgccagctcttcccccgactgaaggtgctggcgtttggggccaagccagaatccaccctgcacacctacttcccttcgttcctgtccagagccacccctagctgtcctgctgagatgaagagagagcttctaggcagcctgacccagtgcctgactgtggaccccctcagcaccagcgtctggagacagctataccccaagcacctgtcacagtccagcctgctgttggaacacttgctcaagtcctgggagcggattcccaagaaggcacggaagtctttgcaagaaaccattcagtccttcaagcttgccaaccaggagcttctaaagaagggcagtggtggcaatgagcatgttgtcacctgtgatgcagcctgcaagggcttgttgcaacaggcacggggtcctcggccaccctgggcccggctactcctgttacttctggtctttgcagtaggattcctttgccatgactttcggtcacatggctccttccaggcctccctcactggctggttgcttcgatcatctggtttcttgcctgttggccagcacctgtgtgccaagctctactcttgcagcattcaaagctacagctggctgcaggagacattgccagcctatggctcccacctgcttgctgtgatacagcccagtttgcagctggcctggacgcacactgatgccaccgttagcttcctttctgcccactgtgcctcttaccttgcctattttggtgacagccttgctggcttcttgcagagggtccagctccctgaggccctgcaccagctcttgcactccttgaaggatctgctgctgcttttctaccacagtgtgctactgccattgtggcacctgctgcttgcagccctagcccgagcccaggagcactgccaccaggcctgcagaggagaagtgacctgggactgcattaagacacagtttggtgaagctgcccgatggacctggctctgcctacaggacgtcacagtagctttcttggactgggcactcgccatgatatcccagcaatagatcctgcctgcctggccactggtttctatgatgggctcagcacttaagcccctcagccccctccaaaaaagggaggtggccatctttccccattcctggtaataacttaagccacagcagaaaaagggaaaggacttcagaagggccagcaccacagtggatgacagcagcatcacttccaccagcagcctgtgtagccatcagtggacatgcaggccatgtggaaatgtctgttacctcagaacacccagaacaagcaagccttcc

SEQ ID NO: 2111 - DNA, 2040 bp, Cricetulus griseus
atggagcagtgtccgttcaccacagtggcttcgaagtaaatggtggaccatcaaaaggcaaattgcaaaccacaaggatgtctcgtttcccgcttccacagactcccctgctgcttctgttgactcagaaacaataacactaaacagtggaacactacagacatttgagattcttccatctttccatttacagcccactggtactccaggtacctaccttcttcagacaagctcaagtcaaggccttcccctcactctgaccacaagtcccacagtgaccctggcagctgctgctcctgcttctcctgaacagatcattgttcatgctctatccccagagcatctgttgaacacaagtgacaatgtcacagtgcagtgtcacacgccaagagtaattattcaaactgtggctacagaagacatcgcttcttcagtatcccaagcagaactgacagttggtagtgatcttcactcgtctgattttcctgagcctccagatgcgctagaagcagacactttcccagatgaaattcctcagcctaagatgactatacaaccatcatttaatactcatgtttctaaattcagtgaccagaatagtacagaactgatgaatagtgttatggtcagaacagaggaagaaattgccgatactgatcttaagcaggaagaaccacctgctgacttagccagtgcttatgttactgaggatttagagtctcccaccatagtacaccaagttcatcaaacaattgatgatgaaacaatacttattgttccttcaccacatggctttatccaggcttccgatgttatagacactgaatccgtcttacctttgacaacactaacagatcccatattccagcatcatcaggaagaatcaaatataattggatcatctttaggcagtcctgtttctgaagactcaaaggatgttgaggaacttggtaaactgtcactagattgtcagaagcaggtactacaagtaaagaagccacactgtggattgcattatctccaaaggagccaccccaagagttctggtttgccattcctctggcttgtttgtagctactgtgcttaagccatgcacattgttgctgctgttactttttacctccttttaagtatatcatctgaggtccaatttatgacaacgtgttatggagtacagaaagttttaattgccgagacctgttaagttttatgtcaagagggaagagttgcattcactgcagctacttaagtcaccaaagcttaacagctctggttttgtgcaaagcagtaatactcatctctgcagttagacactgtactctgtccagactcaagttggcctggttatagttcagtggttaccccattgctggcagtgggagctgactggggaggggtaaagagaaaagcattaaggagtcaagaaaattcactacagttctttgttattaattgttaaagggaatatggatggagaaacaaaacacaccacaccaaaacagttatcaccagccagtagtttacagttagcactttgaagtcattcagtgaggggaggggatattgcctgtgtctggtaaccatgactttttattacatgttttactatatcaattgcccagaaaattattgaggggtattagaatatgctgttcacttggtgcattacctgttgggggtgcagtatagcttctccctcaggcactttaaaaaaacaaaatttgcttctatatcaaaagaaaacaaatcaagagtcattcctaagggtaaagccaaaataaacctatagggctttaatgatatgatccttatagaaaagtccaaatagcggggagtgggggaaggaaagttgtataaattattttatttattattgtaattaggtcttcacaatcaaaagttgtctttcaccatctttgttttattaatgtgaaactgtagtaataagcaaaagttggttgcctagggaacaataattgtatattcagtttaacagaaataaaagagtatttgtcttaaaatgaacaaaaaaaaaaaaaa

SEQ ID NO: 2112 - DNA, 2040 bp, Cricetulus griseus
ctggtgtgggaggcggtgacggggcactgccgcaggcagaaagactgtgcagctaatacaggctttggaccagttggagtcaaatctgcaagtttgtccagtttctcgccgacaccccgaaagttcctccatcaaatgatcaggaccatcaatatcaaggaggaagtcctgatcaccatgcagatcgtgggggacctttccttcgcctggcagttgattgacagcttcacctccatcatgcaggaaagcataagggtcaacccgtccatggtcaccaaactcagggccacgttcctcaagcttgcctctgccctggaccttcccctgctgcggattaatcaagcgaatagccctgacctcctcagtgtgtctcagtattattcgggagaactggtgtcctatgtgagaaaggttctgcagatcatcccagagagcatgttcacgtctctcctgaagatcataaagcttcagacccatgacatcatggaagtgcccacccgcctggacaaggacaagctgcgggactacgctcagctcggcccccgctacgaggttgccaagctcacccacgccatctccatctttaccgagggcatcttgatgatgaaaacgaccctggtgggcatcattaaggtggatcccaagcagctgctggaagatggaataaggaaagagctggttaagcgagttgctttcgccctccacagaggcctgatattcaaccctcgggccaagccaagcgagttgatgcccaagctgaaagagctgggagccaccatggatgggttccaccggtcctttgagtacatccaggactacgtcagcatctatgggctgaagatttggcaggaggaagtctcgcggattataaattacaacgtggagcaagaatgtaataacttcttaagaacaaagattcaggactggcagagcatgtaccagtccactcacattcccattcctaagttcgcgcctgtggatgagtccattacgtttattggtcgactctgcagagaaatcctgcggatcacagaccccaaaatgacgtgttacatagaccagctgaacacgtggtatgacatgaaaactcaccaagaagtgaccagcagccgactcttctcagaaatccagaacaccttggggacctttggtctgaatggattggacaggcttctatgcttcatgattgtgaaggagttgcagaatttcctcagtatgtttcagaaaattatcctgagagatagaaccgttcaagatactttaaaaacactcatgaatgctgtcagccccctaaaaagcattgttgcaaattcaagtaaagcttatctttccgccatcaccaagacacagaagatttggaccgcttacctggatgccataatgaaggttgggcagatgcagatcctgagacagcagatcgccaatgagctcaactcttcctgtcgatttgattccaggcacctggcagcagctctggacaatctcaataaggctctcctggccgacattgaagcccactatcgggacccttcactcccctaccccaaagaagacaacacactcttatatgaaatcacagcctatctggaggccgctggcattcacaacccactgaataagatatacatcacaaccaagcgcttaccctatttcccggtcgtcaactttctcttcttgatcgctcagttgccaaaacttcagtataacaaaaatctaggcatggtctgccggaaacctgccgaccctgtggactggccgccactcgtcctgggactgctcactctgctgaagcagttccattcgcggtacacacagcagttcctggccctgattggccagtttattcgctccacaatggagcagtgcacaagccagaagatgcctgagatgccggccgatgctgtgggcgcccttctgttcctggaggattatgttcggtacacaaagctcccccgcaaggtggctgaggcccatgtgcctaacttcatttttgatgagttccgaacagtcctgtgacttccttctgcttccgtgacagga

SEQ ID NO: 2113 - DNA, 2039 bp, Cricetulus griseus
cttacttgtttgcccatgtcgctgacttcgtgcctagtgaggagagtaacttagttggcactttgaaaatctcaggctatgttcgtgggaggactctgaatgtaaatagtttgctgcatgttgttggacatggtgatttccaaatgagtcagatagatgcacctgtggaccctttccctttaactcctagagtcattaaatctcagaagaaacaaagcatggcaatggagatttgtgcagcagatactacagctgacatggaagaagaccttaaggttctgatgaaggcagaccctgaccaacaggagtctttacaaacagaagctggtctagatccaatggaaggggagcaaaacctggcccactgaggaggaactgaatgaggcaaatgacttattgaagcaacgttctagggtaggtaaagaaggtaccctaaaggaacatccaattaccaagctgaatggattttggatgaaggtgatgaaagtgacgaggaaaggtagatgaatatgatgatgctgctagaactcgatttcagaaatatagaggcctcaagagcttcaggacatctccttgggaccccaaagaaaaccttactcgagattatgctcggatcttccagtttctagaattttattaatactagaaaaagaatctttaaagagattgaggaaaaagaagctgaaggagccgaggttggctggtatgtcacacttcatgtcgcagacgtccctgtctcggtggttgagtatttcaggcaaggagcacccttgattgcattttctttactaccttatgaacagaagatgtcagtattgaacatggtagtgagtcggaaccctggcaacacagaacctgtaaaagccaaagaagaattgatcttccactgtggattcaggcgcttccgatcctcgcccttattctctcagcacacagcagctgataaacacaaatttcagagattcctaactgctgatgcggctttggtggtgactgtgtttgcaccaatcacttttcctcctgcatctgtgctacttttcaagcagagaagcaatgggatgcacagcctcattgctacaggccatctgttgtcagtggatccagacaggatggtcatcaagagagttgttctcagtggtcatcctttcaaaattttcactaagatggcagtagtgcgttacatgtttttcaacagagaggatgtgatgtggtttaagcctgtggaactgagaaccaagtggggacgcagaggacacatcaaggagcctgtaggtactcatggccacatgaagtgcagttttgatgggaagctaaaatctcaggatacagtattaatgaatctctataagcgagttttccccaaatggacttatgatccatatgtaccagaaccagtaccgtgggtgaaaagtgagatctcctcaacagtgtctgaagtggacatggaataacggattcagtggggtcctgtctctactgcacattaggattttgaaaacaatttgaaaagggaagatgaaaaacaattttcatctagagacaatcttctcatgaatttaaacagaaatagtctggtaagaagctggcctttcagcctgcttcacccagtttagggaggttaagtctacattcccaccactgagtacaatacagatgttctttacttctggagagactgtttggaaatgctgagatagcactgcagccaatccaacaccagcagtaggctcaatgagcagtttcattctctcccacaccagctgggttgcatactgttggtacagaaaggagtaaggattaataaaacaagtgttaccttgatttcgtcttctgtgacagtgaaaacatcatccacaaggtcccttataataggccaggtatttgagccaatgcttgatttgacaccatctgctatggtttctggagggtgaagattgggagtcagttctcctttcattttagactggtagcagtcatctgcattcaggggttctgcagcgtataccttcacactaggtttcagggcctgtgaagaggaa

SEQ ID NO: 2114 - DNA, 2037 bp, Cricetulus griseus
tggacatcgtaagtcactgaatcttgttgactcctctcagacactcctaaagaagactcctgaatatgactaccattggcccagagatgaccatggtgaaatggactgcgagaagctagttggaaaactgaaagactgctcaaacctacaggaccaagcagacattctttacattctttatgtaataaagggtcccagctgggataccaatctgtttggacagcacggagtcactgttcacagtcttctcagtgagctctatggaaaggctggcctgaaccaagaatggagtttgatccgctacatttcaggcctgctcaggaagaaagtggaggtcctggctgaggcctgtgcagatctgctgtcccaccagaagcagcttacagtgggcctgccccctgagccccgggagaagaccatctccacgcctcttcccccagaggagctcacaaaactcatctacgaggccagtggacaggacatcagcattgctgttctcacacaggagatcgtggtttacctggccatgtatgtccgggcccagcctagcctctttgcagagatgctcagactccggattggattgatcatccaggtgatggctacagagttggcacggagcctgaactgctcaggagaagaagcttcggagagtctgatgaacctcagccccttcgacatgaagaacctcctgcatcatattctgagtgggaaggagtttggtgtggagagaagcgtgcgcccaattcactcttctacatccagccctgccatcctccatccatgaggtgggtcatactggagtcaacaaaactgagaggagtggtatcaccagactgaggagtgagatgaaacagaagtttgtcattccttcaagtctgcgaggtccagcaccccatcgtccccaacaggcacatcatctacagactctggaggacaccacatgggctggggggagcagcagggacagtggctgcgcaggagaaggctggatggggccatcaacagggtccctgtaggattctaccagagagtgtggaagatccttcagaagtgccatggtctgtccattgatggttatgtccttccatcctcaacaacccaagagatgaccgcatgtgagatcaagtttgctgtccatgtggagtcagtgctcaaccgtgtgtcccagcccgagtatcgacagctgctggtggaagccatcatggtactgacactgctctcggatacagagatggacagaatcgggggcatcatccatgtagaccagattgtacagctggccaatcagctgtttttacaggaccaggtgtcatttggagccacagacatcctggaaaaagaccaagccacaggaatttgtcatttcttttatgacagtgctcctagtggggcttatggtacaatgacctacctaacaaaagcagtggcttctcatttgcaggaatttctgcccagttcaggctgccagatgcaataaggcctaacccataaacatggtcaccctctgaatctgtcacttgtcccgtagcctcattgggaattttcatctgcctttcccccccatcagaaggcttcacggggagatgacagcactctagctggaagcaatgtgtgtttaagccacagataaaactgatgaatccccctctcccctgagaagcaccctgggatcattttctaggttcatttcactggaacatttgtcacagcatctggtctcatggactccgaaaaggaactggaaattggtctcttctgagtgcagagtgaactgagaagccagcttaaattggctctcaccaagagttacagaaataggttcgatgagctagtgacacatcttgaaggtggaaagattcttccagcaacaatagctagacaagcagaccttgacaaaggaacatctttacagaatgcagtctgtctgggaaccaaactgtttaccaaatataataattctgttttttttaattttgcctaacctctcactctgttcagggcctgtaattcctcattgcccaaatgaactaaatt

SEQ ID NO: 2115 - DNA, 2037 bp, Cricetulus griseus
ttctgcttcggccatgtcgccggctccaggtacagccctggcctctgcctcggtctccctgttggacctcaccgcggaagcgccactcgttcggggcctgagcctggtgagccaagcacccgcggaggctctgcccggggcgtcgcgtactccctgcccagaagagaatacaagttcaggaagaaaagtatccccatgttctctggacatttcagagaaactattttgttcagcctgtgaccagatcttcgagaaccaccaagaacagagagaacattataagcttgattggcatcgctttaaacctaaaacagcgtctcaagaacaagcctctcctgtctgcttcagagaagtggtgttacacacaaaaccttttcaccgttataccgttcgggccgaagagaggcacagccccaggggcgttcaggatgcccagggtagggcatcacgttctgctggagccaacttgaggcgttacaaatgaagccatgctgtataaggatgttcgagacttgctgacagggccaacctgggctaaagcactgggtgaggcagaaacaatactgctacgtgccccaccctctgggccggtcccttgtttttttggaggtcagggggcacccttgcaaagggatgatttccgactttgggatatacccctcaccacccgaagacccacttttggagagcttcagcgtgtgctccataagctgatgaccttgcaggtgtatgatgaagaccctcgagaaatgatcagatttcattcacttgagacacaatggaagccagagagagaggagaggaaaaagactactgataaagaaaaaacaaaggtccccagtgatgaaaataaggcacttttgcaggatgaagaattactcaagcaaggttcagagtctcaggaagaaggtggctcccaagtagagttggagctagtagaattgacactggggaccctggatcttcgtgaatttgaggtattgcccaagcggaggaggaggaaaaagaagaaggagagaagtcaagaccagcagtgtgggacacacgtgactcttcttcagcaatctcaagaagatgagccattctcgaagccagaccaagtggttacaaccccattggacagtttggttgatgagtccaaagcccctggccagccagagctctgggatatgcttctatatgcttgccgagctggggacattgaggtgctaaagctccagctagctactgggcctgtagaccctggcgttatgtccctactcaatgcccctttgggctctggtggctttactctcctgcatgcagcagctgcagctggaagaggcttaggtagttcgtctgctgttggaggcaggtgctgaccccactgtgcaggactctagggctcggccaccttatactgtagcagctgacaaatcaacgcgaaatgaattccgaaggttcatggagaagaatcttgatgcctatgattacaacaaggctcgggtgccagggccactgactcaagaaatggagatccggcaggctacaaggaagaaggagcagaaggcagctcgacggcaacgggagcagcagcagcagaagcagagggagcaggaagagcaggaacaagaagaacaacggcgatttgctgccctcagtgaccgagagaagagagctctggctgcagagcgccgattcgctgcccagttgggagcccctaggcctccagtccctgactctgcagctgtcaatgctgggcgctgttggagttgtggagtgtccctccaaggcctcgttccctttcactacctcgacttctctttctgctccactcgttgcctccgagaccatcgcagtcaggcagggaggcccttcttccctgatttcttatagccacctgggtccaactctgggcccccgagaggatacattcagacctagagtttttcctcctcctcctgaagcttgagattatgtgtgaaaaaggggggtgaagggacactcaggaacaagggcaaagacagggccacaaaggtgtgtggagccagtactgtc

SEQ ID NO: 2116 - DNA, 2037 bp, Cricetulus griseus
tgcagagagagctgtagagcagtgtcagagagagcagctggagctgcgtctgcgcacgcgcctggagcaggaactcaaagccctccgtgcacagcagagacaggcaggggatgaacagatcctggctctggaggctgacatgaccaagtgggagcagaagtatttggaggaacgggccatgaggcaatttgccatggatgccgccgctaccgcagccgcacagcgcgactctactctcatcagacactcccctcagccctcacccagcagcagcttcaacgagggcctgctggcaggcaaccacaggcaccaggagatggagagcaggttgaaggtgctccatgcccagatcctagagaaggatgcagtgatcaaggtccttcagcagcgatccaggaaagaccctggcaaggctacccagggcaccctgcggcctgccaaatctgtgccatccatctttgcggctgcagtggggattcagggctggcaaggactctcatccagcgatcggcaaaatgatgcacctggccggctgacagtggaccgtgtaccggcagaggagcccccggccacagctcctctccctacccacaccaagcacgggagcagagatggaagcactcagactgatggccctgcagacagcacctctgcctgcttagcctcagaacccgagagcctcctggggtggtagcagccaaaggacagcctctctggactctgtggctactaccagagtccaggacctgtcagacatggtggaaatactgatctgaaggaaagaggtggtgccttggggaccctgacgcctggcttccccctggcattccagcggtcgtcaaatgctgcgcctcactttctccaaccattgatagtgtggtgcatgaagctcagagaggaaccctagaggggacctagaaaagtctgcagccccagaagactgcttcttggcccatattcctcccatgctcatgaggagggaagagccagatttcccctgctgcccaaggtctgttgctggaggagaaaggagactgagccccctctgtcctgccgggactattgggagtgtgagtcttttgggaaccaccagcatgcctctcacttggagaaggttagaggccatttgagaggcctgcggaacagtgtgttttgtatataattctccttccttgggaacagaagactaagcatgctggttcagagtctccttccagggctgtgctgcctgcccccgctgccacggttcttgaaacatctgatgggtccaccagatgttcttccgcctccagtacttggctatggaatttgatactggttgccctttctccattttaaacccctgtgttcagtgcccatgggactcttgtcaccagcctttctgaatggctccacagctcctgtccctgggacatcctgtccgtttggttataaactgagccagatgcaatgagccgccacatgtggacatctttcatgcccagcaccaggttctctttgaagaaactggagaggttgttctcataagtgtgttagttcccaccggcagggactgggagaggaagctatgctgttgaaaaatggatcagtgagcttaaaaagacaaaagtcctcactgtggtgccccgtcacaaaaacggcacccacgaggctggctcctcaatttctggtgccccagccctgaagcagggccaactacttggaattgggtgaagtatccccaactggcagcctaccagcagcagtgactttgactttggtcttaaagtaacccccattcagctcaaaaagcgattggtgggtttcagagcttttgtgttttctccttgaatctttggttgttttgtttgtttttctttcactgtttcaagttctgtttgttgttttattcccatggttctctgagtttcctttttaaacatttgcatttgctgggcaattgcatatttttttaattcccctacccctgtgtaaagctaaaaaatacatctggttcatgtgcattgtttacaaagataaaagtaaaaaaaaaaaaag

SEQ ID NO: 2117 - DNA, 2037 bp, Cricetulus griseus
gcattcagttacttccggatacctcgcttctattgggaggaccggctgctgaagatgaagatggctgggctgaacgccatccagatgtacgtgccctggaactttcatgaaccccagccaggacaatatgagttttctggggaccgtgacgtggaatatttcattcacctggctcacaagctggggctcctggtgatcctgaggccaggaccctacatctgtgcagagtgggacatgggagggttacctgcttggctgctagagaaagaatctattgttcttcgatcttctgacccagactaccttgcagctgtggataaatggctgacagtccttctgcccaagatgaagcctctgctctaccagaatggagggccgattataactgtgcaggttgagaatgagtacggctcctactttgcctgtgattatgactacctgcgtttcctggcacaccgcttccgttaccatctgggcaatgacgtccttctcttcaccaccgatggggcgaatgaaaacttccttcggtgtggcaccctgcagggcctctatgccacagtggattttggagcagtcaagaatatcacacaggctttcctaatccagaggaaattcgaacccaaaggacctttgatcaattctgagttctatactggctggctagaccactggggtgaaccccattacacagtgaagactgaaatagtggctgcctctctctatgacctgcttgcccgtggggccagtgtgaacttgtacatgtttataggtgggaccaattttgcctattggaatggtgccaacattccctatgcagcacagcccaccagctatgactacgacgccccgctgagtgaggcaggggacctgactgagaagtattttgctcttcgaaatgtcatccagaagtttaaagatgtcccaaaaggtcctatccctccatcaactcccaagttcgcctatggaaaagttgctctgagaaagttcaagacagtggcagaagctctggacgtcctgtgtcccaatggccccgtgagaagccgctacccgctgacattcatccaagttaaacagtattttgggtatgtgctgtaccgaacaacacttcctcaagaatgcaatggctcgatgcccatcttctcctcacccttcaatggtgtccgtgaccgggcttatgtggctgtggacggggtcccccaaggaatccttgagcgaaaccgtgtgatatccctggacatacaggggaaagctggagccgttctggacattctggtggagaacatgggacgtgtgaactatggcagaggcataaatgattttaagggtttgatttctaacatgactcttaacttcagtattctcaccaattggacaatctttccactggacactgaggctgcagtacgcacccatcttggggcctgggaggcccgtgatgagggccaccacgatggacgcttgacctttggctcttcgaactttacgctccccacgttttatgtgggcaacttctccattccctcgggcatcccagatctgccgcaggataccttcattcagtttcctggatggaccaagggtcaggtgtggatcaacggctttaaccttggccgatactggcctgcacggggcccacaggtgaccttgtttgtgcccaggcacattctgacgacgtcagccccaaacaacatcacggtgctggagctggaacgctcaccctgcagtgatgggacctcagagctgtgtaccgtggagtttgtcgacaggccgattattggcaggtccctggccatcagcggcccttttccagatcggtctggccaagactggtggctgaaccccctgtgatgactgagcctctaggatcacaggcctgcactggccaaatgggtcatccgtgtctcgatacagtggaaggtggatttatcaggtgtgtgtatcctaccggtgtccctacagcagtagagacattgcctggcctcccactcctgtggccaccaggaaggctgaagggagtggacatcacaggaacacaca

SEQ ID NO: 2118 - DNA, 2037 bp, Cricetulus griseus
cggccctcgcgcacctctcacagctggagcgctttgctcgcagcactgtctataaagttgttgttgctgcttccgccaccggtggaggaagatggcgtcgggcggtggtggctgtagcgcttcggagcgactccctccgcccttccctggcatggatccggagtccgaaggggctgccggggggtcagaacccgaggctggggacagcgacaccgagggggaggatattttcactggcgctgcggcagctagtcagccccagtctccaaagaaaaccacatccctttttcctatcaaaaatggttccaaagaaaatgggatccatgaggaaccagaccaagagccacaggatctctttgcagatgccacagtagagctatccctggacagcacacataataaccagaagatgatgccagccaaaactcttagttctcatgctccatcagaagccacaaattctgctaagacacagccaacctatgaggagctagaggaagaagaacaggaggaccagtttgacctgacagttggtattactgatcctgaaaagattggggatggtatgaatgcctatgtagcctacaaagtcacaacacagacgagcttaccgatgttcagaagtaagcagtttgcagtgaaaagaagattcagtgactttctgggtctttatgagaagctttcagagaaacactctcagaatggcttcattgtccctcctccacctgagaagagcctaataggaatgacaaaagtgaaagttgggaaggaagattcttcttctgcagaatttcttgaaaagaggagagctgctttggaaaggtaccttcaaagaattgtgaatcatcctaccatgttacaagacccagatgtcagggagtttttggaaaaagaagagctgccacgtgccgtgggtacgcaggctttgagtggtgctggtctccttaagatgttcaacaaagctacagacgcagtcagcaagatgaccatcaagatgaatgaatcggacatttggttcgaggagaagctccaggaggtggagtgtgaggagcagcgcctacggaagctgcatgctgtggtagagactctagtcaaccacaggaaagagctagctctgaacacagctcagtttgccaagagtctagccatgcttgggagctctgaggacaacacggccctatcacgagcactctcccagctagctgaggtggaagaaaagatcgagcagctccaccaggaacaggccaacaatgacttcttcctccttgctgaactcctgagtgactacattcgcctcctagccattgtccgagctgccttcgaccagcgcatgaagacatggcagcgctggcaggatgcacaagccacgctgcagaagaagcgggagtctgaggctcgcctgctgtgggccaacaagcctgacaaactgcagcaagctaaggatgagattacagagtgggagtctcgggtgactcagtatgaaagggactttgaaaggatttcaacagttgtccgaaaagaagtgattcgatttgagaaagagaaatccaaggacttcaaaaaccacgtgatcaagtacctggagacactcctacattcccagcagcagctggcaaaatactgggaagccttccttcctgaggcgaaggccatctcctgagggaccaaggattccagagcccacctgcgtgacgctgcctttttatacactgccctcctcctcgatggacccatctgatggaccctgcctcggctggactcggcccttccactctgccccacaaactgttcccagtcactctaaccaatattccatttagcttccacatatattttcttacctaagagaatagtttcctgctttaagcaaaagacctacaataggtggtggaattataggttaggggtggagtgttgatataaatatataaatacaaatgtatatttttcaggctgtggtttaggaactgggaataacgttttctgttactcctgatggtgccatgaaagattgtgtaataaaatatttgaaaatca

SEQ ID NO: 2119 - DNA, 2036 bp, Cricetulus griseus
tggactctcagaaactcaaattacatctcatggctttgatggtaccaaagagggggttattgaagcaggagcgtcccaaggtccctcagcgccacctttgccatctgttctgtctcccagcagggttgcagctagtcaactggctcaacaaggaggtgatctaactgttcctgcaggtggccagagaacacacacaaaaggtggaccagttattctagcagatgaaattaaaaatcctgcaatggaaaagttagagcttgttagaaaatggagtctcaacacatacaagtgtacccggcaaattataatctgagaaactaggccgaggctcaagaactgtggaccttgaacttgaagctcagattgatatattaagagataataaagaaaaaataatagaaaacagcactgatttggaagaactgaatcttggaccacgtgatgcaaacactctgccaaaaattgagcattcacagcatctgttccaaatacataaggaaaaatatgataaaatgcgcagtgatgtatctgtcaaattgaaatttcttgaagaaaataaggttaaagtgctgcgcaatcagctggtccttttccacagtgctgttgctgcctacttcgctgggaatcagaagcagcttgaactgacacttaagcagttccatgtcaagttgaaaaccccaggagtggatgccccgtcttggcttgaagaacagtaaattcacctggaaaagaaagtggctcttgcacagatagcttttatttttcccttttcgtaccctaacaattgagctgttaaaatttgatgagaaggtgggtgatttttatgtaaaacataattctataaattctaaaacataaataattttctttttgagaaatcctttttgtattgtgtaggttaaaggctatttctataaattgaaatatttaatatagatttgcactgataagataaaaattcaaggcttctggtcctagaaatgaggaccgggtataattttccaagggaggtttacatgatttgtatcaatgtcagatattttatatatgaatatatccaacatctttaagaagttcatgtccgtgtattatcttaaagaaaaaaaagctattttccagagtaagttatatggcatcctgcagcatccacagaaggggtacctcgaatgaatgaatgattggctcataggttgtggtagataccttttaaaaattaatctgtaccactgtaattttgtttagacatttttaaagacctggtaatcacactgtcataatttctataacatgtttaaacttatgaatttgacagttgtgttagaaattttgatttacaatgaaacctgcctaagagaggtagataggtattattttttgttttgttttgttttgtttttacatgtggtcataggaaattcttagtaggtttatagagtagaaatttgtagattagaaagccagtttgggggtaaattccattttggtagaagagaattttccagactatgttcgttgacttccatgtgtgactgtaccagttaagccttaaatcacagatacgtgccttctcagatgcagtgattcttgtccaaccattgtacagaatccatgaagaaacccctccggataacgttggatcttgtttaaatgtaaagttcctttgacttttgtcacacatataaatgagtatttgggagagcctaccacttttacctgttcatttctattttgtttgaaatgaagtacttaaaattactgttgtatgtaaattttaatagactgtacaatgtgttatatatgtccaaatgccttttagctggcttttttacctaatatgcctgttttgagtgcttaatacaatgtaatgtgattataagtcatgaacctattttaaatcattccctcctgtatatttgtactctgagagagccttattttattcttcaagcagaatagctacttgtgatggttatttacattccccagagtgtgcctctggtgtgaattttgttattcttattaaagtctctgctgca

SEQ ID NO: 2120 - DNA, 2035 bp, Cricetulus griseus
ccagatccaagatggcggccagcaggaggctgatgaaggagcttgaagagatccgcaaatgtggaatgaaaaacttccgtaacatccaggttgatgaagctaatttattgacttggcaagggcttattgttcctgacaaccctccatatgacaagggggccttcagaattgaaatcaacttcccagcagagtatccattcaaaccacccaagatcacatttaaaacaaagatctaccaccctaacattgatgagaaggggcaggtctgtctgccggtaattagtgctgaaaactggaagccagccaccaagactgaccaagtgatccagtccctcatagcactggtgaacgacccccagcctgagcacccactccgagccgatctagctgaagaatactctaaggaccgtaaaaaattctgtaagaatgctgaagagtttacaaagaaatatggggaaaagcgacctgtggactaaaatctgccatgagtgattccaggaagtttgagcagagcccccgagcagtgcaaataccccgcaaagcaggactctgtggaaaattgacacgtgccaccacctggcgtccgcttgtggcagttactaactttctacagttttcttaatcaaaagtggtctaggtaacctgtaaagaaggattaaaaaattcacatgttctagttctgcttgctttgttttaaaaatcactgctttagtctactccaaaagaacggcatttcttctcttgcccagattcactcagagttacagttagcccagaaggcttaaaaaaaagttgttgtggttcctttctccttttccccccctgtcctttcacttcccacttgcacagactaaggccccagcttcccacagagctgtgctgggactttgtagagaaccctgcaataccaggtttgtggtgaccttggagggagggtctgccagtagagaacgccgtgcattgtgtgattgaatctctccagtcagcagctctcctgcagctgtctcagagcagctgccggtgcagcccaggaacaggatggccttccctccctctggactcagccttcccagagtcaagccccacttgaagctcactcagtaatatcctttcaatgtgttttatattgttttcattgcctttttttttttgtagaaataaaatttgaccttagaatttatcatcaaatgaactttgtcaagatttgaatgttaatgtcttttcaaggcaagtgactgtccttgaagcagtagtgacaccccaaggaagctgttggcctgacagcctatgttcgtcaactcacttatgctcctagggggtctagatcctgtggagaagattgcctcaagaaatcttgctttctgctttaaccttagttctttaacttcagggctacctagggctcacagacttggaaaacagctctgggttttgcctataaagaagtgatacaggtcctctcgggcagtgtaacactatttagttttccaagtgtttggctcctgtggtgcataaatgaactatgctttagttctaggtatgcatggggcaggtttctgacttcatgtgcccaggatggccagagcactgggcctgtgtttctatgtctgtctcttcattggcagaaaagtgacaatggattttatttcatttacattcagatttgtaataaaatgccaaattctgtcagaagttgtccaaacaaaccaccatttgttcttgttgcttttctgaatctagagatagtccaactgtctcattgcttagcactacctgcctgttacccttcactgctctctgctcactatgggagggtactctcatgccagcacccctctcagggacactcagcccagtattgacaaccatggcctgctctgccacccacccctgacacaagttggctcaggaattcacatccccttggttccttgaagtgcccaggtcttgtcctgctctttccacgatggcagagaataggctttctaagatgctgtgaccccattctgtccttaaataaaaatgttctcagaca

SEQ ID NO: 2121 - DNA, 2035 bp, Cricetulus griseus
tcctgagatgaagggcaaagtgcttagtcggctaaaggatcttgttggaaacttcaggaaaatcctagagaagtacttggcagtcattccagactatgttccgccttttgcaaatgttgacatggatacattagatatgatacctaagagcagttctgctgtttcaactaaaaacagaaacaaagggaagatgggaggaaggaaacaaaaagctgacatcagcaaagcatcctccactgaaacacttctaacagaagatacttcagaatgtgacacggtgacatctggtagaagccccgtagagaaggagtctgcagggaaggaaggaaagacatttgtgtcgctacagaattaccatgcttttttccgagagctggacattgaggtcttctctattctacattctggacttgtgaccaagttcatcttagacactgaaatgcacactgaggctacagaagttgtattcttgctggaagatctttctcagaagttagaaaatgtactgactccatctttgccaaaagactctgttcctcaagataagaaccgaatattggattcgtcacatcttcatcagagatctgtccaggacattgttcattgtgttgttcaactgctaaccccaatgtgtaaccatctggagaacattcacaactacttccagagcttaggagctgaacatctcagtgtggatgacaagccaagagtgaaagctcaggagcagcacaccatgtcttcctgctaccagaagctgttgcaaatcttttacacactctttgcttggaaaggatttactcaccattcaaaccttcatctcctgcactcagccctggaggtcctcacaagccggctaaagcagacggaacaagaacagcccttggaggcaaaatttccaccactgcattcccaatttccagtgtggtctttatcttcacttctcatgacccttctggagaaatctgctgcacctacccagaagaaagaaaaacttgccaccctggccaaacaactgctctgtcgtgcatggcctcacgggggaaaaagagaagaacaccaattttaatgaccacctgcatgacttgctttgcatctacctggagcacacagacaatgttttgaaggccatagaggagattgctggcgttggtgtcccagagttggtcaatgctccaaaagatgcctcttcctctacgttccctatgttgaccaggcacacctttgtcattttcttccgtgtgatgatggctgaactcgagaagacagtgaaaagtcttcaggctggcacagcaacagactcacagcaggttcatgaagagaagctgctgtattggaacatggctgttcgagacttcagtatcctcatcaatctgatgaaagtatttgactagttaccctgttctgcatgtgtgtttaaagtatggacgtcactttgtggaagcatttctgaaacagtgtatgccactcctcgacttctgctttagaaaacatacgggaagatgttctgtagtttgcgattcaccaggacacaagacttaccaaacatgtgcctttactcaaaaagtcactggagctgttagtttgcagagtcaaagccatgcttgtcctcaacaattgtagagaggctttctggttgggtactctgaaaaaccgagacttacagggtgaagaaattgtttcccagcatctgtcttccccagagagcacttcagaagacagtgagagtggcatgacatcccacgtctccagggacagagcaacacaggatggggaagatgaagcaagtgatggacaaaaggaccaagataatgatgaaagtgatgacagctctgattagatcccgggacacaactgccccttcctcatcgctggcagcttcttacccttttctctttggggtttgaagtttgatctctgcctttccaaccatagcatcctgtttttccttaagcagtttttatttaattaaccagtggatttcacagattgtccagcatccaggtctctggctcaagattccagtgtgtagcatcca

SEQ ID NO: 2122 - DNA, 2035 bp, Cricetulus griseus
ggaccattggtccagagtggatggaaccctttggcttcctggtccagattttccccacagctacgggagactgctccctatagcttggccccagcgactcttaggaagaggagactccatgggccttacaaatgtcccaccagctgtttcacatggatcctcacagctggtggaacaataacaaaaaaaccccaccaccacagggctgagatgctgccaggatgtgggtgggccatctgttgaggggactgtctgccaaggaagaggagggtctatatagaggagacctggaggggccaggggtctccgttacctgcttcacagggtgagtgaaaagcccaggcatgttctgttagtggacacagaaatcagtggcagagctcgagacgttctgtgcccaccaggccttaccaggcccacagctggacaaaaatgagttagaccagctattagtgaggggccaggaccctgactgaaatcttccaaaatttttgctttggggctaatcctacaggctactacattttcttggttcctaacaggaccttagttaacagcttgtcagaaggtcttgtcctgtgtaaaggacatttcatcctgtccaagactggaataccgagctccgaactcaggttggaaatatcaagctgttacaatggtcacctcacatttggaaatgaaaaaccagtggcatttgcagagcagtggaattcagaaaaacatcaccaccagccctttcctttgccagttaaagaaacaggcccaggagattaagtgacttggccaaagccacacagcaaatagtgtcggagccaggactaactactcctgtgggttagacattcctgtctagacttaaagcaaaatggcaaatgagctttgtgaggggttaggttggcatgacatcagcagtgcctgagcagtaggtatttttaggagtatgacaagggtggggatgggtgcttagacttgggttgtggagcggctgagagggccttggagggctcgggactgctgtgtgctgcgtggggttatgtgtctacctggctcgcactcagtacccatggccacctccccattttctgtgccttatctcactgtttcagctgagtccaagttgtttactctgttcctctccagaggggttctctgtcctagttggacagttcactttggggacataagcctttgccccacaagctgtggggagggccaaaatcaagctgctggagccagtggttagtccagtcctgctgccagaggaaccccgtatgtacccccaatcctactagcctgtttccaggagcctggagtggggaatagttcttggatgcagcttagtaaagggctggacctgacccttttggacaggaggaggatctggctgtattgggttgtccagcccttggggagcagcattccctactcacttccctttgtggcaccagatgatagctccttgcagagcaaggaccaagttggcagaccactcagagtcaaaaacccatatccccaccccttcctatgtgggtctgtggctgggagtaggctggcagaacaaggatatcacaagctaaggaagtaaggactgcttggctacccagcaccttcccagcccttaagcacaaaaaagatgaggcagaggactgttggggctgaacgttcctttggttgctcacaactcaggtatgcatgtcatttggcagctggacagcagagccctacttcaccaccaatcgcaggcatttggacctgtggccacatggtggcttctggctgtcctcagcgcccacctctttgcataggttccctccattatcaactacagctgaaacaggcatcctccacattgtgcacactggttctgcctttgtccttgcaagttgatactcagcattagcatgaaacttgtggtgtgagagggttgacagaattctaacacaaacatcctattaaattgtacttgagatagaaaaaattcctgttgttattttgaacaaaattatttttaattaaaatacacatccatgagcaa

SEQ ID NO: 2123 - DNA, 2035 bp, Cricetulus griseus
caatgatccctggggcccatccagctccctcatgtcagagattgctgacctcacctacaatgtggtggccttctcagagatcatgagcatgatctggaagcggctcaacgaccacggcaagaactggagacacgtctacaaggccatgacattgatggagtacctcatcaagactggctctgagcgcgtgtcacagcagtgcaaagagaacatgtacgctgtgcagacactgaaggacttccagtacgtggaccgagatggcaaggaccagggcgtgaacgtgcgggagaaggccaaacagctggtggctttgcttcgcgatgaggaccggcttcgggaggagcgcgcccacgcgctcaagaccaaggagaagctggcacagactgccacggcctcctcagcagctgtgggctctggaccgccccctgaggccgagcaggcctggccacagagcagtggggaggaggagttgcagctccagctggccttagccatgagcaaggaggaggctgaccagcccccgtcctgccttcccgatgacgacgtccagctccagctggcccttagtttgagccgagaggagcacgataaggaagaacggatccgccgtggggatgacctgaggctgcagatggctatagaggagagcaagagggagaccgggagcaaggaggagtcctctctcatggatcttgccgacgtcttcacagccccagcccctgcacaggcctcagacccctgggggggcccggcacctgtggctactgccatccctccggctgcttctgcctcagacccttgggggggacctgctgtccctccagctgctgacccttggggtggtccagcccccacaccagcctctggggatccctggaggcctgcagcccctacagggccctctgccgacccttggggtgggaccccggctcctgcagctggagagggacccacacctgacccatggggatcctctgatggtggggcccccgccagtggacccccatcttctgacccctgggcccctgccccggccttctcagatccttggggaggttcacctgccaagcccagcagcaacggcactgcagcagtcgggggctttgacacagagcctgatgagttctcagactttgaccggctccgagccactctgccgacctctgggagcagcacgggggaactggagttgcttgcaggagaggtccccgcccgcagcccaggtgcattcgacatgagtggggttggggactctctggctgaggctgtggggagtcccccacctgctgcgaccccaactcctaccccccccacacggaagactccggagtcattcctaggccccaatgcagcccttgtggacctggactcgctggtgagccggccaggccccacaccgccaggagccaaggcttccaacccattcctgccaagcggagctccggccaccggcccctccgtcaccaatcctttccagccagcaccccctgcaacgctcactctgaaccagctccgtctcagtcctgtgcccccagttcctggagcgccacctacctacatctctcctcttggtggaggccctggcctgccccccatgatgcccccgggacccccagcccccaacactaatcccttcctcctgtaatccagggtaggagggaggcctggttcagctggcttcccccatttctgttccctgggagatcagtgttgtgagtgcatgtgaaacgggcgggccctccccccagtgccctccccctcctcgggcccactcacactacaccctcttcccaagttcccaacccacctcctcctgagaaaaactgggcatgggggatggggaggggagccggccagaggaggactttttctgtggcattagacggggagggacagctggggtcccccacccattccacttccctccaaactcctgacacccccgatcagtgttggagcctcctcgttcccttggcgcccttggtgaacccttggtgatgattttggcaacttcgggaataaatggcaattctca

SEQ ID NO: 2124 - DNA, 2034 bp, Cricetulus griseus
ggggccgcgactggcgccagctcgagcccgcagggcgctcgggggcgcgcacgtcgctccccgccctcccgccaccgcccgccctcgttcgctcgcgctccccgcccgccgcccgccgcccgcggtcctccgtcggttctctgctgagtccgccgtcttccgcggagctgccggtcctcgtctccgagcttgcggactcgcggacaggcgtcctcggcgcgaagaggccggacttggagtggtcgccttgagccttgcatctgaggcattccaagtactttgtacaaccactgttggagaagctgtgtgtttttcagcacctttgtaagggatggctgccatcaggaagaaactggtaattgttggtgatggagcttgtggtaagacatgcttgctcatagtcttcagcaaggaccaattcccagaggtttatgtgcccacagtgtttgaaaactatgtggcagatatcgaagtggatgggaaacaggtagagttggctttgtgggacacagctggacaggaagattatgatcgcttgaggcctctctcctatccagacactgatgttatactgatgtgtttctccattgacagccctgatagtttagaaaacatcccagaaaaatggactccagaagtcaagcatttctgtcccaatgtgcccatcatcctggttgggaacaagaaggatcttcggaatgatgagcacacaagacgggagttagccaaaatgaagcaggagccggtaaaacctgaagaaggcagagatatggcaaacaggattggcgcttttgggtacatggagtgttcagcaaagaccaaagatggagtgagagaggtttttgaaatggccacgagagctgctctgcaagccagacgtgggaagaaaaaatctgggtgcctcattttgtgaagccttgtgcaagcacagccctcatgcggttaattttgaagtgctgtttattaatcttagtgtatgattactggccttttcatttatctataatttacctaagattacaaatcagaagtcatcttgctaccagtatttagaagccaaccatgattattaatgatgtccaacctgtctgaccagccagggtctttctgacactgctctaacagctctctctgcactccacctgacaccaggcgctaagtcaaagaatttcttaacttcttgcttctttctagaaagagaaacagttggtaacttttgtgaattaggctgtaactactttataactaacatgtcctgcctctcatctgtcagctgcagggaactctggtgagtcactaaggcagagctttactccttaacagattacattggcagagctctggggaaggcatccagggttttgagaacttgctcagccagaaaggccgaagtccacgcagctgtggcagatttgcagttctgtggtctcatgttagttaccttatagttactgtgtaattagtgccacttaatgtatgttaccaaaaataaatatatctaccccagactagatgtagtattttttgtataattggatttcctaatactgatatttgtcattcccacagaacgtgtattgttttttgtttttcttttctttctttcttttttttttttttttttttttttttaagaaagtgtatttggaaataaagtcagatggaaaattcatttttaaaattcccattttgtcactttctctgataaaatatggccatatctcccctattcagccctatatatcaccccagtacccctttccagactgaactaagtaaatagaaatttggtttcacgcctgaggcagttacacctttgaggtggcatagcctttctcacctggactgcagggtctggctctaagtcacagtgctcctttatccacactgtatccaagttgcctcccaggggagccaccagttcttaagggtggcaagggaggttttcttttctcttctctccagctgactaaacttttttctgtaccagttaattttccaactaatagaataaaggcagttttctaaacttcc

SEQ ID NO: 2125 - DNA, 2034 bp, Cricetulus griseus
gtcccttcctgtgcctctggtcttcgtcctcgcccgaccgcgcaatggaaggttaccacaagccggatcagcagaagctgcaggccctgaaggacacagccaatcgcctgcgcatcagctccatccaggccaccaccgccgctggctccggccaccccacatcatgctgcagcgctgctgagatcatggctgtcttgtttttccataccatgcgctacaaggccctggatccccgaaaccctcacaatgatcgctttgtgctctccaagggccatgcagctcccatcctgtatgcagtctgggctgaagctggcttcctacccgagacagagctgctgaacctgaggaagatcagctctgacctggatgggcaccctgtcccaaaacaagccttcaccgatgtggccactggctccctgggccagggcctgggagctgcttgtgggatggcctacacaggcaaatacttcgacaaagccagctatcgtgtctattgcatgctgggagatggagaagtgtctgagggctctgtctgggaggccatggcctttgccggaatttacaagctagacaacctcgttgccatttttgacgtcaaccgtctgggccagagtgacccagcccctctgcagcaccagctggacgtctaccagaaacgctgtgaggcctttggttggcacgccatcatcgtggatggacacagcgtggaggaactgtgcaaggcctttggccaggctaagcaccaaccaacagccatcatcgccaagaccttcaagggccgtgggatcacagggatcgaagacaaggagtcttggcatgggaagcccctccccaaaaacatggctgatcagattattcaggagatttacagccagatccagagcaaaaagaagatcctggccacaccccctcaggaggatgccccttcagtggacattgccaatatccgcatgcctaccccacccagctacaaagtgggggacaagatagccacccgaaaggcctatggacaggcccttgccaagctgggccacgccagtgaccgaatcattgccctggacggggacaccaaaaattccaccttctcggatatcttcaaaaaggagcatccggaccgtttcattgagtgctacattgccgagcaaaacatggtgagcattgctgtaggctgcgccacacgcaacaggacagtgcccttctgcagcacttttgcagccttctttacacgggccttcgaccagattcgcatggcagccatctctgagagcaacatcaacctctgtggctcccactgtggtgtgtccattggggaagatgggccctctcagatggccctggaagatctggccatgtttcggtcaattcccatgtcaactgtcttttacccaagtgacggagtggcgacagagaaggcagtggaattagcagccaatacgaagggcatctgtttcatccggaccagccgcccagaaaatgccatcatctacagcaacaatgaggatttccaggttggccaagccaaggtagttctgaagagcaaagatgaccaagtgacggtgattggagctggtgtaaccctgcatgaggccttggctgctgcagagctgctgaagaaagagaagatcagcatccgtgtgttggaccccttcaccatcaagcccctggacaggaagctcattcttgagtgtgcccgtgcaaccaaaggccggatcctcacagtggaggatcactactatgaaggtggcataggtgaggcagtgtctgctgcagtagtgggagaacctggagtcactgtcacccgcctggctgttagccaagtaccaagaagtggaaagccagctgagctgttgaagatgtttggtattgacaaggatgccattgtgcaagctgtgaagggccttgtcaccaagggctaggggggagccctagaagggctgctgggtgggggaactccacattcctgagaggttctggcaaggtgctcaaagatgtactgagaggagacataaatatatgttttgagaaaaaaattaa

SEQ ID NO: 2126 - DNA, 2034 bp, Cricetulus griseus
gaacattttagtggataaaccaaatgatcaatcttccagatggtcttcagagagcaactatcctccccagtacttgattctgaagcttgaaaggcctgctatagttcagaatattacatttggaaaatatgagaaaacccatgtctgcaatttgaagaaaattcaaaagtctttggaggaatgaatgaagaaaatatgacagagctgttgtctagtggcttgaagaatgattataacaaagagacatttaccttgaaacatactttgatgcttgcgaagagttgattgaaaaggactgtaaatgatggcttgttcaatcagtatatcagtcagcaggagtataagccgaggtggagtcagatcatcctaagagcaccaaaggtggatggagaagataaccgaccaggaatgagagggggccgatcagatggttattgatgttcagacagagactgtttatttgtttggtggctgggatggaacacaagatcttgctgacttctgggcatacagtgtgaaggagaaccagtggacatgtatctctagagacactgagaaagagaatggtcctagtgccagatcgtgtcataaaatgtgcattgacattcaacggaggcaaatctacacattgggccgttacttggattcctctgtgaggaacagcaaatctctgaaaagtgacttctaccgttatgacattgacaccaatacctggatgttactgagtgaagacactgctgctgatggtggaccaaaactggtgtttgatcatcagatgtgtatggattcagaaaaacatatgatctacaccttcggtggtagaattttgacatgtaatggcagtgtagatgacagcagagccagtgaaccacaattcagtggcttgtttgcattcaactgccagtgtcaaacctggaagcttcttcgagaagactcctgtaatgctggccctgaggacatccagtctcgaattggacactgcatgctgttccactcaaaaaatcgttgcttatatgtgtttggtggccagagatctaagacctatttgaatgatttctttagttacgatgtggactctgatcatgtagacataatttcagacggcaccaagaaagactctggaatggtgccaatgacaggattcacacagagagcaactattgatccagaattaaatgaaatacatgtcttatctggactcagcaaagacaaagagaagagggaagagaacgttagaaattcattctggatttatgacattgtgaggaatagctggtcttgtgtctataagaatgatcaagctgcaaaagataatctgagcaaaagtcttcaggaggaagagccatgtccaaggtttgctcatcagctcgtttatgatgaattacacaaggttcattatttatttggtggaaatccaggaaaatcttgctctccaaagatgagactagatgacttctggtcactgaagttgtgtagaccttcaaaagattacttactgaggcattgcaagtacctcataagaaaacacaggtttgaagagaaggcccaaatggatcctcttagtgctctgaagtatttacagaatgatctttatataactgtggatcattcagacccagaagagacaaaagagtttcaactcctggcctcagctctgttcaaatctggatcagatttcacagctctaggcttttcagatgtggatcacacctatgcgcaaagaactcagctctttgacaccttagtaaacttctttcctgacagcatgactcctccgaaaggcaatctggtagacctcatcacactgtaaactggggagttgagttgagttgctgggctcagaagtggagacaggagtcggagttccgtgtttgcgtgggcagaggtgacgtcgcagtgactgaggactgcatcagagttttgaaggatccttattatcacaagttttaaccctctccttcgtacctgacctcaatccccttttcctcatattcctgcattaggtgaataaagtgaaattgatatacttcccat

SEQ ID NO: 2127 - DNA, 2033 bp, Cricetulus griseus
aggacagtaaacttcgatttgaaacgtatcacttgctatggacaacggatgaaatccgaaacagagcaattacaggaagaattaaataaaaatctatttgatagcctaattgactttctgcaaaagtcccattctgatttccagaaaaattcaggaaactggggctgtcaaatgaaactcagagaaattccaactgctgctcttattcttggtgtgaatgtcacagatcatgatttaatattcagaagtctaacagagacccttcagaataatgtcacaccatatatagtctcattgcaagctaaggattgtccagatgtgaaacattttttacaaaaattgacctcacagttgatggactgctgtgtggatggaaaatccaaagaggtgaaaagtgttaagacccctaaaaagacaaattattcaatggattcactttccagttggtatatgactgtcgcacaggcgacaggcccaaaaatgacaataaaaaagaggactacttctagccaatggcaatttccgcctgttgtgattatcttaaagaatatggagagcttcagcacaaaagtactccaagacttcataattatcagcagtcagcatcggcatgaatttccactgatcctcatttttggaatcgccacatctcctgttattatccatcgactgcttccacatgcagtgtcatctcttctgtgtatagaacttttccagtctttgtcatgcaaagagcacctggcagtaattcttgatcagctgcttcttacagctcagtttccttttaaaataagtaagaaggcattacaggttctgaccaacatcttcttataccatgatttctcaattcaaaacttcatcaaaggacttaagctttctctattagaacatttttatttgcaacccctaagtgttctgtgctgtgatctcccagaagccaagaaaagaataaaatttttgtcagttaatcaatgtgaaaacatccggcggcttccatcatttaggaggtacgtggaaaagcaagcttcaggaaagcaagttgcactgttgaccaatgatacagttttaaaggaagaaactcaattattactggaagacttgcatgtttatcatatgaattacttccttgttttgagatgtcttcataattttacctcttgtcttcccaagtacccactgggtcgacagatcagggagctgtattgcacatgtttagaaaataatgtatgggattctgaggaatatgcatcagccttgcagctgctgaggatgctggcaaaggatgaactgatgagcatacttcagaaatgttttgaagttttacattcctctactacaaagcagcttggcagcacaacccagaaagtaaaggattttctgacccagtttcagaaccttgatgcagatagcaaagaggaagaggatgcttgtggatcacagtcaaaggggctgcagaaaacagacctctatcaccttcagaagtccttattggaaatgaaggagttaaggagaacaactaagaagcaaaccaagtttgaaatgctcagagaaaatgttgtgaacttcatggacaacctggtgagaagttaccttctgcctcctgagagccagcctttgcatgaggtagtatacttcagtgctgcccacacacttcgtgagcacttaaatgctgcaccacgaatcgccctccacacggcactcaacaatccttattattatctaaagaatgaagcactgaaaagtgaggaaggctgtattccaaatattgctcctgacatctgtatagcatataaactgcacctggagtgtagccggctaattaaccttgtcgactggtcagaggcttttgcaacagttgtgacagctgctgaaaaggatgcaaattctacaatctcagaagaaatgaatgaaattatccatgctcgatttattagagctgtttctgaacttgagcttttaggctttataaaacctacgaaacagaagactgaccatgtagcaaggctgacatggggaggctgctgaaaagcaag

SEQ ID NO: 2128 - DNA, 2033 bp, Cricetulus griseus
caggtgattcttggagctgcccgagcagtcggagaagcagaaagatgctgtggtgagactgatccacctccggctgaagctccaggagctgaaggatcccaatgaggaggaacccaatatccgggttctcctagaacaccgcttctataaggagaagagcaagagtgtcaagcaaacctgtgataagtgcaacacgatcatctggggcctcattcagacctggtacacctgcacaggatgttattaccgctgtcacagcaagtgcctgaacctcatctccaaaccatgtgtcagctccaaggttagtcaccaggctgagtatgagctgaacatctgccccgagactggtttggacagccaggactaccgctgtgccgagtgccgtgctcccatctctctgcgaggtgtgcctagtgaggcccggcagtgtgactacactggccagtactactgcagccactgccattggaatgacctggctgttatccctgcacgagtggtgcacaactgggactttgagccacgcaaggtgtcccgctgcagcatgcgatacctggcactgatggtgtctcggccagtgctccggctccgggagattaaccctctgctgtttaactacgtggaagagctggtggagatccggaaactgcgccaggatatcctgctcatgaagccatacttcatcacatgcaaggaggccatggaagcgcgactgctgctgcagctccaggaccggcagcattttgtggagaacgatgagatgtactctatccaggacctcttggaggtgcacatgggccgtctcagctgctcgctcactgagatccacacactctttgccaagcacatcaagctggactgtgagcggtgtcaagccaaggggtttgtgtgtgaactctgcaaagaaggtgatgtgctgttcccttttgacagccatacatctgtgtgcactgactgttcagctgtcttccacagggactgctattacgacaactcaaccacgtgccccaagtgtgcccggctcaacttgaggaagcagtcactattccaggaacctggtctggatgtggatgcctagaatgctggaggagacgccaggcaccatatctcccccccggctgtcaccctactggcattgccagccaggtgttcattctactctggagaccccctgagtgtatcctctgggcctcttcatgttttttgggccagaagcaagtaaatgactagcagctaccaggactctcattccccgggtgcttgctgagacttggagttctatacccggctgtttattgggtgtgctgctaacaggggtcagaatgctgcttctgccccattgtaggactccttagacaggggagcttgggtatgacttcccaggaaagtgggccagtgagaccagaggaggcctcctgactgagttttatctctgctgtaataatttaggttctacttagaggctcccatccctcttagcaccttgactccttgtggattcaggttttctctgactggggctgttcccaacagtgtcacatgggctgtctcagcatcctgagagtcatcctcctcctcgtctgtcagtcctgtatgtttccctgccctttcatacaatagggagggaaagggtctgtggagcttttcttggcacatacacctgctcctgccatagcctagtcactttatcctggtgctctgagctgggcagctaggccatcaaggtggctttactcttgctattttttgtttcagttttcccatctggaaaatggggaaagtggagttgacctacctcagggtggaacaataaggagtcctttgagtgtgatgtaggtcagcagtaggttcctgcctggcttcctctttggtgttaaagagggtcttaaaaccaaatgccattttcctacacccccaaatctttgtgtttcttaccattgtattacatttctgtcctgtggctattggcccttcctgagcctcctgtgtaatcagcatcatgtgttcccagatataaatcatagtgtactaaa

SEQ ID NO: 2129 - DNA, 2033 bp, Cricetulus griseus
aaaaagaaagaaatcatcaactccagcttcacgagtggagtccaaccaacaagccacctggcaagtcaggcatggatgctgctttagacgacttgatagacactttaggggaacctgaagaaactaacaaagatgagccacaatacactggaccaatagttttggacccaatggattctacctacattgaggcattgggtataagagaagggactattcctccagagtacaggaaatttctggctaataaggaagggatcacaggacctcctccagactcttctaaacccatggggcctgatgatgctatagatgccttgtcatctgacttcacctgtagttctccgactgggaagcaaactgagaaagagaaatcaacaggggacgttttcaaagctcagtctgctggagtgaccagaagtgccattcctccccaggagaagaaaagaaaggtggaagaggatgtcatgagtgatcaagccctgcaggctctgtcagattcactgggcacccggcagccagaccctgagatccaccttagccaagctgaacaagtcaaagaggcaaaagcaaaagaagaaaggcaggagaagtgtggtgaagatgatgacacagttccttctcagttcaggttaaagccagctatggataaagatggaaaaccactattgccagagcctgaagaaaagtctaagtgcctgagtgaagcagagctggttggacaactctcagaagattttggccgatctgcatatcaagacaaaccatctctaccagctgagaaaatagaaaaatctaaggacacatccccagctcctgtggctgaggctgtgcctcgggcctccatgtgcagtatacagtcagtaccacccaaaccagcatcattgggcatggtgccagatgatgctgtagaaactttggctggaagtctgggggaaagggaagtaaatccagaagacgaaaaacctgtggtggataaactcaaggagaaatctaaagaagaagaccgtgaaaaacttggtgaaaaagaagaaacaattcctcctgattatagactagaagaggtcaaggataaggatggaaaaccactcctgccgaaagagcttaaggaacaacttcctccattgagtgatgacttccttcttgatgcattgtctcaggacttttccagtcctgaaaacataccctctcttgaatttgaagatgccaaactttctgctgccatctctgaagtagtttccaagacgcctgctcccaacacgaacgcagcagccccaccacctgacactgagcacagagacaaagacctcaatgatgctttggatgaactctctgacagtcttggggaaagacagcctgacccagatgaaaacaaaccagtagatgacaaagtaaaggaaaaagttaaagcagaacatagtgaaaaactgggagaaagagaagacaccatcccacctgactataggcatcttctggacgatgacgggcagggtaaaccagagaagccacctacaaagaaatcaaagaagcctgatcatgaccaggaccccattgatgccctctcacaagatttggacagctgcccctcaactacagagaactcacagcatacaggaaaggagaagagcaagaagatgggttcaaattccaaagcacccaagaatggagtgaaaacaaaggattcctccaagaagtcagaggaagcgtccaatccaaaggctgacaaaaatgaaagctaagttacacatttgggtatctgaatagaaattcttcagctgatgggtggtgacttttgaagaacaacggctttggtgacaatttttctgggtggtttctagacaatgctatttgttatgtcttttgacatcttaaacattggtttgttgtcttttccaaaaacaaaatgaatttgtctggttcgcctgtgttactgtattgagtatggataaagttcaaagatctttaattgcctttaagtgggagaagaaagctttatatttgtaagagatatatttgatagtttcttaaaacac

SEQ ID NO: 2130 - DNA, 2033 bp, Cricetulus griseus
gtacgaggagatagcccagtgcctagtgtctgtaccgcccaccaggcagagcctgaggaagctgaagcagaggttccccagtcaatcgcaggccactctgctgagcatcttctcccaggagtaccagaaacatattaaaagaacacatgccaaacatcacactccagaagcgattgaaagttattaccagaggtacctgaatggcgtggggaaaaatggagcagcccctgtgctcctggagctggccaatgaggtggactatgcaccctcattaatggctcggattatcctggagagatttctacaggggcgtgaacagactccaccctccaagtctgttataaataatatgctacgggacccttctcagattccagatggagttctagccaaccaggtctatcagtgcatcgtgaacgactgctgttatggaccgctagtggactgcatcaagcatgctattggctatgagcatgaagtcctgctgagagacttgcttctgaagaaaaacctgtccttcctagatgaagatcagcctccgtgcaaagggctatgacaaaacaccagacttcattttacaggtgccagttgctgtggaagggcacataattcactggattgaaagcaaagcctcatttggtgatgaatgtagccaccacgcctacctgcatggccagttctggagctactggaataggtttggaccaggcttggtcatctattggtatggatttatccaggaactggactgcaaccgggaaaggggcatcctgctcaaagcctgtttccccacggacatcgtcaccttatgccatagcacagcctgaccctgaagatcctgaagagaagccggaagcaatgttacttttctgaagtataaacttctggcaacatctgccctgaacttcagctgaaccctggctgctgcagtcgcagccctacctctctagacaaacatatcaggagtttctgctttccttcatccctagctgatgtgaatagccaagaactccggacacaacccactcattatcagcatctctgtctctgacacagttagtttatagatagtcataatcttgcttccttccgaaggctttctccttgtacactgaacagaaggagaaatgtggggactgaagggtgggatttttcaattctcctccctgttatcgaatctctctctctctctctctctctctctctctctctctctctctctctctctctctctctctctctctctctgtatgggtaaactttggtactaagtgttgcattaacatcagggaataacctagcacaaacatagaaaagctggagacgggaagtctgtaagtatgtgttccttctcacctggggctcaggatgactggacagggacttttacctgtccagcattatggcctcctgacttgtgtggcatccagccaagctgcagaaatcccccttgatgagaatttcctcttttcataaaggttatttgaacaccaaacatttcacatttgatctcaccttaaatatgaattctttgtgtctggcaaccatgatgctttggtttgggactaaggcagaagaccaatgttcagcctccctgtttatagtggccctttagacatgaatgctggcctctacaatgttggccactatttttatgagatttttttttaagtgcattcatacatactgctttgtgtctacattttataccaaataatcttataacaaccctcaaataagttagacattataaatcgtcagctttgaacatattaagtgtaccaggaaaatcctagaatgatttttaaataagcaaaataaaagagattttgtatttattcactttaatttattcacttttatatcctgaagaccagacttcagtcagaagcaaaacatcaataaaataattataaacctatcttttgggaaattaaaaagtaatctgcaatccccccccaaaaaagtacttagtaaaaactatgtgccccagtgcttgtaaatgtcatttttaaaatgttaaatagatgttt

SEQ ID NO: 2131 - DNA, 2032 bp, Cricetulus griseus
ccaaggaggaaggagaggatggagcggatgctgcagagtctttgtatgaggctgccctcggaggtggtgctagccactgtaccccaactacgaccgcatcaccaccacattcatgtgcgcatttcccacctgcctctggtggaggagttgcgttcactgaggcagctgcacctgaaccagctgatccgtaccagcggcgtggtgactagctgcactggagtcctgcctcagctcagcatggtcaagtataactgtagcaagtgcaactttgtactggggcctttctgccagtctcaaaatcaggaggtgaagcctggctcctgccctgagtgccagtcaactgggccctttgagatcaacatggaggagaccatctatcagaactaccagcgtatccgaatccaggagagtcccggcaaggtggcagctggccggctgccccgctccaaggatgctattctccttgctgatctggtggacagctgcaagccaggagacgagatagagctgactggcatttaccacaataactacgatggctcacttaacactgccaatgggtttccagtctttgccactgtcatcttggccaaccatgttgccaagaaggacaacaaagtggccgtcggtgagctaaccgatgaggatgtgaagatgatcaccagcctttccaaggaccagcagattggagagaagatctttgccagcattgcgccctccatctatgggcatgaagacatcaagagaggcctggctctggccctgtttggaggggaacccaagaacccaggtggaaagcacaaggttcggggtgacattaatgtgctcctgtgtggggaccctggcacagcaaagtctcagttcctcaaatacattgagaaagtgtctagccgtgccatcttcaccactggccagggtgcatcagccgtgggtctcacagcatatgttcagcggcaccctgtcagcagagagtggaccttagaggctggagccctggttctggccgaccggggagtgtgtctcattgatgagtttgacaagatgaatgaccaggacaggaccagcatccacgaggccatggaacagcaaagcatttccatctccaaggctggcatcgttacctcactgcaagcccgctgcactgtcatcgctgctgccaaccccatagggggccgctatgacccttcactgactttctcagagaatgtagacctcacagagcccatcatttcccgctttgatatcctgtgtgtggtgagggacactgtcgacccagttcaggatgagatgctggcccgttttgtggttggcagccatgtcagacaccaccccagtaacaagaaggacgaggggctgaccaatggcagcatcttggagccagccatgcccaacacatacggcgtggaacccctgcctcaggaggtcctgaagaagtatatcatctacgccaaggagagagtccacccaaagcttaaccagatggaccaagacaaagtggctaggatgtacagtgacctaaggaaggaatctatggcaacgggcagtatccctatcacagtgcgccacattgagtccatgatccgcatggcagaggcccacgcacgcatgcaccttcgggactacgtgatggaagatgacgtcaacatggccattcgggtgatgctggagagtttcattgacacacagaaattcagtgtcatgcgtagcatgcgcaagacttttgcccggtacctctccttccggcgagataacaatgagctcctgctcttcatactgaagcagctggtggctgagcaggtgacatatcaacgcaaccgctttggggcccagcaggacaccattgaaattcctgagaaggacttagtagacaaggccaggcaaatcaatatccacaacctctccgccttctacgacagcgaactcttcagaatcaacaagttcagccgtgacctgaaacgcaagatgatcctacagcagttctgaggccagcaccagaccccctgtgtctggacacggctcagccaccactctg

SEQ ID NO: 2132 - DNA, 2032 bp, Cricetulus griseus
tctcgcctaggtctgggatcccgtgtgtaaatgcacatgtgtggactaaaagcaagttcttaggcatgtcaataggtgtgacaatggttggagaagggcatccttagtctgttggagcatggagaagagtacacgttttccctgccgtgtgcatatgcgcgatccattctcactgttccttgggtggaactaggtggcaaagtcggcgtcaactgtgcaaagacaggctactcagccagcatcacttttcacactaagccattttatggccggcaaactgcaccgagtcacagctgaagtgaagcacaatgtcaccaacactgtggtgtgcagggtacagggggaatggaacagcattctggagttcacctacagcaacggggagacgaagtacgtggacctgaccaaacttgccgtgacaaagaaaagagtgcggcctctggagaagcaggatccatttgaatccagacgattatggaaaaatgtaacagattctctgagggaatctgaaattgacaaggccacagagcacaaacgtaccttggaggaacgccagagaaccgaagaaagacatcggactaaaacaggcaccccctggaaaaccaaatattttattaaagagggagatggctgggtttatcacaaacccctttggaaagtaatcccgtcacaaccagcagagtgacacatgctttctaagattggaccaaatgaggttctcctctgtgtaccccaagcccctctcagacggagtccttgcactgagtgacctgcctcctaattgtacagcatgaagctgctcgagcccctggtttgtacgggggcaacagatgacagcggtgagaactcagtgactgtggttcctttgtattgaaaacttaagtctcttgcagtagttttttgctttctgtccatttctgaagtattcactgatcttctaaaccaaccaagagggagacgaaggtgacctataagtggattcagccatcgtgcctgaagtcagtgttgacacatcaccaaggcctcttttcctccggaggctgtgcctgcacccaaggaagcccaccacctgctctgctggaactctcttttaaaagtgtatttataattagaattgtaaccatggaggaatttttttcttctgagcattttaatatacttgaaaacagcattgacttgaaaaatttcagaacatttttcaatacctagttttattaaatattacacttaagagacaattttttaaaatgtgttcatgtcagtatgagattttggcctttctcaagaactaaggcattaaaacaatagcaaatattaaaaaaatacaactgttactttttccttacctattttcatttgtaggttcatattcagtattatgtgctatcctgagtaagtttgctttatctgacctctgtttactcaaaagttaaaactaaacttgttcatgtctgtcagtaattcaattatgtctgtgactgagtgcacataaagtatggttttattttcaaggaaatttaaatgctgaagaaagggtgtgaaataaaaagcaggaatttgcattcaggtacaaattggttttttaataggtattttattggggttgaagagttgctggcaatgaacagaatagtgctaattatggttttcatttatttgagtatttcctgagcacccgctggtggtgctgacccttgttactgcaagctaccttcactgttccagagtggtgccttaccctgctcctgcccgtggtcttccagtcggcgtgcaacatgcacctgtcactcagcagccgtgccagtcggctgcgctgtgctctgagaaactcttttcttagaagggttaaaaggatgaaaacatcaacaatgatttttcagcacattgtaaattaaaagaattggtttgtgtacaaccattttcctgattcccttttcatttttgctgtgaagtgcactgaaaaaaaaatctcaaaatgagctatagttcatgtgttgggaaaattgaaaaataataaaaatagagaacagca

SEQ ID NO: 2133 - DNA, 2032 bp, Cricetulus griseus
gatcatgccgccagagacgcccctcgcggccgggaaacggtaacccgggacggttggctctcgttaccccgcttctctccgccccgccgaccccagggagaagcgccagcccgccgccgtctgcggctgcgacgcgaagagcgaagtcggcgccgcctgggacgggggagtggaagttcccgccccgggcagcggccaggcggctccgcagctgattatggaagattcccacaagagtaatactccagagactgtgcctcagcctggctcaacagttcaggggactcatatttctcagatagctcatcaggtgtcatctttatcagaaagtgaggagtctcaggactcatctgacagcataggctcctcacagaaagctcacgggatcctggcccggcgtcccaatcttacagaaaaattttgaaagacctctcttctgaagatatacggggcagaaaaggagacgtagaaaatcctggcatttctgctgtcacttctatgtctgttccaacccccatctatcagaccagcagcggacagtacattgccattgcccccaacggagccttacagttggccagtccaggcacagatggcgtccagggactgcagacattaaccatgacaaattcaggcaatacccaacagggtacaatcctccagtatgcacagacttctgacggacagcaaatcctcgtcccgagcaaccaggtggttgtgcagactgcatcaggagatatgcagacctatcagatccgtaccacaccgtctgccacttcactgccacaaactgtggtgatgacttctcctgtgactcttacatctcagacaacaaagacagatgacccccaactgaaaagggaaatacggctgatgaaaaacagagaagctgcccgagagtgccgcaggaagaagaaagagtacgtgaaatgcctggagaaccgcgtggccgttctggaaaatcaaaataaaactctaatagaagagctaaaaactctgaaggatctttattctcataaaagtgtttgattctttaaagaaaaagtatttttatggacttgcttaaaaattaggtggtattttttttttgtggagttttataaattcaaaggtcaaagaagctactttgtattagatttttacaatgcaaaggtgacagagggtaagtgggaatgaccatatcgaagctgctgacgcaactggaagctccgaaggggaaaagtgctcaaggaagcgcgcgtgtgtgtgtgtgtgtgtgtgtgtgtgtgtgtgtgtgtgtgtgtgtgtgtgtgtgtatgcgcacgcgcctgccaataaattctaaattacaaatgtaaaagaaagcataatacattgctaaatatgtaaattatgtggtctgattgttccttgtcatgttgtcaggtgtgttaaatgagttgtaacagttggttttgttggacttttatcagaatggaaagagaattgtcctgaagatttgacagttttttgattctctaaccctgtatgcagttaagagcattgcttgtgctttaacagaatgaagtgtttacagaagcccttaagataatttaaataacctgaagatgcataccaaagcttcccagaggattgataatcatcttcctgtaggtttgtcaggttctaaagtagttactgagacaattttacattgagactattttgtaatgtagccaatggtacctttataggagaagcgactgccgatatatttttatagtgaatctttataaattctaatgttgagtttttaatgattattttaaatgtttatatagtttgtttagtaaaaaaaaatttgtatctcaaactatcatttttatattatgagaaaagttttcaattggctgatatttgaattgtactttttctatgaagtttatctaaagttaaagctgtggtcagtacaccagtattctaatctgtattctaatctggtatacactttgaactgtactgcaaaactgttgtgtgcctatatagtatgtttcatattgtctatgaaattaaa

SEQ ID NO: 2134 - DNA, 2032 bp, Cricetulus griseus
  modified_base (580)..(580): a, c, t, g, unknown or other
cagtgttgcctctggtgcctaattgtacaagagagagagagcagagagaaggtcaaagaggccaagcgatggaagtagtgggttgatggcaaaaaagcaaaagacgaaccccaaagcgaacgagtgctggaaccaagagtgaaaagaatgggacaacaggacaaagcagtgacagtgaagatctccctgccatggacagttcaagcaaatgcacgccagtcaaacatctgagcctgtccaagccgcagaagctggctcgctccccctgcaaggacctcacctcacatcaaagatggagagaaagagaagcacagagaaaagcacccgaattcatcccctaggacatataagtggagcttgcaactcaatgaattagataatatgaacagtacagagaaaatctcttttctccaagaaaaactacaggaaatcagaaaatactatatgtctttgaagtctgaagttgcaaccattgacaggaggaggaaaagattgaaaagaaagatagagaagtgtctcacgcaggagcgtctatgtcatctgcttcatcagacactggaatgagcccctcttcatcgtntcccccccaaaatgtacttgctgtagagtgcaggtgatgaacgttttctccacctccagcagtttgctgccatggacataaattcccaaaccctgaaatacaaccacagaaagcactcagctggctaagtatctcctgtatatttttccaggattgtgtctatatcctcctctcttcttttttattgttgcaaaagtaagcttattaataattgaaggttaggtgacctgccatactttttttttttgtgtgtgtgtgtgtattattattattgttgattttttattaatttcattttttgtggaagcacttgctatgtagaactgccaaagtatatgttcagcagtgtgcccaggtttaaaagtgtaaatgggacaaaataaattgtgaaaggaagcgtagttgactgaaaactgcagttgtaataagtcttccactttttataggacttttgagcacacaattatgcaaatattttaatgtttattaatgtttacagtggaattgtgaataagttttcagtggactaccttatcccttgacaaaaatattttgtcttttttctatgtaatttcagagtttttattttgttacaaaaatacaaaaatgaaatatataacaacaatgaagttatttaacaagatttctaaagctgaaaattttgtgtaaaataaggtattatcttgcaacttgttaaatatatttattcagacattggatggttgtattttatgtatttttaaaatattaataaaattgaaataaagaaaattctaggttaattcactctttggatggcaatagttgtcagctgtccctttggcaggaggctgcacatgcagcctggtgtgctgaagggagtcggtctcagcccttgcaacagaacagcagaagtgggcgtctggattactcagtatgtctttgtgtagagactttggcagtcctagtatttaaactgtttggaggatcaaatttttggttgcccttaagatgctttgtcacagttttatgtttgctatactgccgaataaatttatatctcccaaagttgagatgcaacaatcacgtaaagccactatgtatgccttgtctgtgaattgtttcacaggctgatacatttgtaaataattcttccaaaatcatgtatttaaagcagtttttgcatatacattatgtaaaaaaggtgatttttttaaaacaatttttaaattcatgtttgtacattaaaaggggttgttttgaagcctccttttgtgtttcgtatgctgtaacgtgatagcccgggtgtcccaggctatgatggcagacagaggcacaacacacccgtgatggatggcagagcattactgaaatcattgtttctccacttcatttttcccacattgtgaacttgttattcagtatttcttccattttctcagagaattaaaacaaaaaagtaacttcttgtaa

SEQ ID NO: 2135 - DNA, 2032 bp, Cricetulus griseus
gggaagaggccgagagagcggcggcgccagcagagctgggcggtgcgtgcagcgcccgcggaggaggagcccggagcccgaggcaggtctagccatggagctgcgctcggagctgccaagcgtgcccggcgcggcgacagcagcagcgacagcgacgggacctcccgtggcatcagtggcgtcggtggccgcagcggcggctgccgcagcatcgttaccagtgagcgtggccgggggcttgctgcgggcgccgcccctgctgttgaggcagcggagaagtacccgcggacccccaaatgcgcgcgctgccgcaaccacggagtggtgtcaagcgctactgccgctggaaggactgcctgtgtgccaagtgcacgctcatcgccgaacgccagcgcgtcatggcggcacaggtggctttgcgcaggcagcaggctcaggaggagaacgaggcgcgcgagttgcaactgctgtatggcactgccgagggcctggcgctggccgccgccaacggcatcatcccaccgcggcccgcctatgaagtctttggctctgtgtgcgccaccgacggcgggggcccggagctggagcgcccgcggggagtgccgggggcgcaggggcgcaggggcgagaggggcgcagaggccaagttgcagaagtttgatctgtttcccaagacgctgcttcaggccggccgccccgacacgtccgcagccgcagcctgggaagccattgtcgcccgatggcgcggactcgggtcccgggacctcgtccccagaggtgcgacccggctcaggctcggagaacggagatggcgaatccttttcggggtcgcctctggcccgggcctcctaaggaggcaggtggcagctgtcctggtagcgcgggccctggcggcggcggcgtctcgccgctgcagcccaacgccagccacttcggcgccgacgcgggcgcctaccccctgggcgcaccgctcggcctgagcccgctgcgcctggcctactcggcggcggcggcccacagccgcggcctggccttcatggcgccctactccaccgccggcctggtgcccacgctcggcttccgcccgcccatggactacgcctttagcgacctcatgcgggaccgctcggccgccgccgccgccgcggtgcacaaggagcccggctacgggagcggcctgtacgggcccatggtcaatgggcaccccccgagaagcagtaggacacggggccctgcagcccccccaaacactgacccagcctgctccccagccaccggcccctcctctccctgccccgcaccctctgctcagagttggctttgggggatttgttttgaagggtgggtgggagcatctcagctaacagcgcaggtgtcctcagaggggcctggtggtctgggtgctcgtccagccttgggccacctcccccaagcctgctcgccttgttgtcaaaattccggggatctctaagaatcccgagggcggctgcggccgtgcccgcccctgctgctccctctgctccgctcgccttgccagcccgcgctcaggtggacggcaggacaaatcagcctcttgtgtgtcctccagttcccattcccctttcttttatatatgtataaatctatatataatctatacatatatatatacaagccagtgtataatgttataaaatggaattctaagttattaattgtaatctgtaggtgacctcggtattaacgtgaaaaacattcaaaagtcaaaacaaaaaaaaggacaaaatgggaaaatcggactattcgcgcattgtacgtatcgggttttatagacgagatctactgtacgctggggaggaaccctgcccacccctcgcctccggcctgcggctgttctttggagcagtccaggccgcgctgaagcacgaatagagcatcgggtgacagagccagaagctccgggactcgccagcgagcgacgctgcggagaactgctcactttgtgctttcctttgcataggtatgagctagaaataaatgttattttctaaat

SEQ ID NO: 2136 - DNA, 2031 bp, Cricetulus griseus
cctccgggccacacatcccaataagaaacctttcaccagccatcgcctggtggaaccagtttcagatacacatcttcgagggattacctgcctggaccatgagaatgagaaagtgaacatgtactgtgtatctgatgaccaattgatctgtgccttatgcaaactggtgggtcgtcaccgagaccatcaggtcgcttccctgaatgatcgatttgagaaactaaaggcacattctcgaaggatgaaagctctctgaagaaaagccataccccagagagatttagtggcactgggtgttatggggcagcaggaatatattcattgacagtggctgccactactgggaggtagtcatgggttcttcaacatggtatgcaattggtatcgcctacaaatcagctccaaagaatgagtggattggcaagaatgcctcttcctgggtcttctcccgatgcaacagtaacttcgtggtgagacataacaacaaggaaatgcttgtggatgtgcccccacagctgaagcgtctaggtgtcctcttggattatgacaacaacatgctgtctttctatgacccagctaactcgctccatctccacacttttgatgtgaccttcattcttccagtttgtccaacattcacaatctggaacaaatccctcatgatcatgtctggcttgcctgccccagattttattgattaccctgagcagcaggaatgcaactgcaggcctaaagaatccccctatgtgtctgggatgaaagctgccattaatggacaagagagcatgtaattcactggtagcataatttcattgatattatttaatagaggagatttatttgaattattaaaaattgtcatagaatatttcaaagaaatatagttttgttactctcaaatacatagttactagacttacgctaaaaaatagagttgcataatggaggttcctcagaattcgccttacttgatcagtaagaatagtgttacaggttcaacaactatatgagtccaaatgtacttgtattttcagatgaagctctcctgaaatgctgttttcatcaataggatcaatactcattcttgtgtgattttgtttacattattcattcacttagcatcccccttcatgacaaaatgctttccaaggaacaacatggtggcaaatcactcagagggatatgatgggttccagatatttgcttcagtaaacttaaggactttcataaaatactggcaatggcagggaccagaggctaccactagctaaagccagttgcacaaatggaacatgacctacatttaccatcatcaagaaatgtgattcaataaatgtggttgttgttgctttactcgatctaactattcagaacttttttctcctagaaaattattttctgtctgcaatttatgcttgtttccactttttatattgtcttgttgaagaaagcacaaaataaagctaagcttgttttgagaatacgaaagaaaatttaatgccacattgatgttcttgctacttgtaagagtaactgcatctggctgtgttttattatgtaattccattgtgtgtctttggatgcagtgaagttcatattgcaacaaaatcacttatatatgctttctagctcaaagcattctaggtgaattgtttacatatttgtatatgactacctggatggatcaatttatggatggacttttaaataagctcagttgctgaaatcccttctttcaaggaatggagaatgtgaggcaggtagacatgaaccactcccacaattatttgtagctccttaagccaattccagcctgagagtcattgggctgtatttggctgcgcattacaagttggccagatttattgccatcaggttaggcaaaactgccttttatgatgtggtctgccagcttcagaaatatgctgtgttattgttattggctagaatatttattagactattgttggactattttttatcaaatgctttaccccaggcttgtttgtactgggagctctggactaatag

SEQ ID NO: 2137 - DNA, 2030 bp, Cricetulus griseus
tgaagaacacaccaagaggcacagagccaaggctaagagccggaggtcttccagtgaccgtgccagcagccaggacagagcaaagaggaggagggacagggacagggacagggagcggaggcggggcccctggggtcatggcaggtgctggaggaagtccaggtcccgctcagggagtcctggcagttcttcctgtgagcgccatgagagtaggagacgaaagaggcgacattcagggtccaggtctcgaggcagcagcctggagagggaccggagacacaaacatcgggagaggagccgagagaggatggacaagaaggagagtatgactcggtcccgagagagaagaaggtggcggtctcggtcacccagcttggagcataggtcacggaggccacgttcccgtgagaagcggccccattccccagagaagaaggaggctgtgagggaggtttccccagcccctgctcgacaggaggaagtaagtgtcctgccagaggtggttgtggctgacctgaaccctccagatgtccctcctgtcctggcagaaccagttgagtgtgtgcctgaggacctagactatggtgattctgtggaggcaggccacgtctttgaagatttttcaaatgaagccatcttcattcagctcgatgacatgagctcaccaccttcccctgagagtacagactcctcccctgagcgagacttcccatcaaatcccacagtgcccccagccagccttccacaggacactactctacctactatccagagggaggcgttactggttcatagtgaagatatctcaaagcctgcaacccaggcattgacccgttcagatcagtgcctgcttaggcaagacactgtagagaccgctgctgcaactcttagcaccccgagtgtggtccccatgggaaaggacagtcctttgctaagtgggagaggatgtgaaacagtccagcccaaggatgctgtggcccaggccccactgctacggtccagaaccctggtgaaaagagtcacctggaacctgcaggaagcagaggacaacaccccaacccccgacagagttccaaggacaccacttcagaggccacaaaggccccaggaaggagactgggatgcagaggacagggccctcataggagttcagcaggcaccattctccgacctgccccctcccatccacgtgctccaggagactgggttacctgatgcagatccctctcagccccctggtgcttccagggcagaagggctgccagctgttgggactctacactcagcagggggtattcttgcccaggtttacagccccaacatgccaccacccctggctcagccctcaagcatcctgccctatgcactggtcagccagccctcagtccagttgatcctgcaggggaccctccccctagcaggctgtggtgcagcacagagcctggccccagtgtctaatatgccagccacaacctcagagctagctattcctaccaccaccaacaactcagaggaaagaactgctactcccaagtcagctgctgagaagaccaaaaaggaggagtacatgaagaagctgcacatgcaggagcgggctgtggaggaggtgaagctggccattaagcccttctaccaaaagagagaagtgaccaaggaggagtacaaggatatcctgcgcaaagctgtgcagaagatctgccacagcaagagtggtgaaatcaaccccgtgaaggtggccaacctggtgaaggcctatgtggacaaataccggcatatgcgcaggcacaaaaagactgaagctggggaggaaccacccactcagggtgctgaggcctgaggctggccactgtgaggagtggctccagtaggaaagaaatggggctaccagcgctcgtgcctctgagcttcccatgacacctgtctgcacctgtcttgcttacaattgaaaactggtacttttttatatgtatattatagatacactgtttccattgtgttctaatttatcaaaaatggcttatctttagaaa

SEQ ID NO: 2138 - DNA, 2030 bp, Cricetulus griseus
tctgatcaaagcagggggcaacagcagcacttccattttcacacatccatcctcctcaggaggccaccagggtcctcaccgcaacctgcacctttgcgcctttgagattgggctttatgcccttggcctgcacaactttgtttctcctaactggctctctcgtacatattcttcccatgtatcctggattacaggacaggcaatggaaattggcagtgcagccctgactatactggtggaatgctgggatgggcacctcgaccccccctgaggttgcatcactggctgatagagcatcacgggcacgagactccaacatggtgagggcagcggcagagctggctctaagctgcctgcctcatgcccatgcactgaaccccaatgaaattcaacgagccttggtgcaatgaaaaaaaaacagaacaggataacctgatgttggagaaggcctgcatggcagtggaagaagcagccaagggtgggggtgtataccctgaagtgctgtttgaggttgctcatcagtggttctggctctatgaacagacagcaggcggctcatccacggcccgtgaaggggctaccagctgtagtggcagtgggatgagggctgctggggaggctgggcggggaatgcctgagggcaggggtgcccctggggctgaacctgttacagtggctgcagcagcagttacagcagcagccacagtggttccagtcatctcagtgggatccagtttatatccaggtccaggactggggcacggtcattcccctggcctgcacccctacactgctctacagccccacctgccctgcagcccccagtacctcacccacccagctcacccctcgcccaccctatgcctcatatgccccggcctgccgtcttccctgtgcccagctctgcatacccacagggtgtgcatcctgcattcctgggggctcaatacccctactcagtgactcctccctcactcgctgccacagctgtatcttttcctgtcccttccatggctcccatcacagtccatccctaccacacagagccagggctcccactgccaaccagtgtggccttgagcagtgtccatccagcacccacatttccagccattcagggtgcctcactgcctgctctgaccacgcagcccagccctctggtaagcggaggttttccaccaccggaggaggaaacacacagtcagccagtcaatccacacagcctgcaccacctgcatgctgcttatcgtgttgggatgctggcacttgagatgctcggtcgccgggcacacaacgatcaccctaacaacttctcccgctcccccccctacactgatgatgtcaaatggttgctggggctggcagcaaagctgggagtgaactacgtgcaccagttctgtgtgggggcagccaagggggtgctgagcccgtttgtgctgcaggagatcgtcatggagacgctgcagcggctgaaccccattcatgcccacaaccatcttcgagccccggccttccaccaactggtgcagcgctgtcagcaggcatacatgcagtacatccatcaccgcttaatccacctcacccccgccgactacgacgactttgtgaatgccatccgcagtgcccgcagcgccttctgcctgacacccatgggcatgatgcagttcaacgacatcctacagaacctcaagcgcagcaaacagaccaaggagttgtggcagcgggtctctctagagataaccaccttctccccctgagtctggcccctataggaacctatgtagggacacaggcctgtggctatgggggcccctcacacagagggaatgactcttggctggacagatcatccccactcaattccctggtagcccagactggcagctgctcttgggctgtagcttggggccaagatgtctcagaccttagaagcctagggctgggggagacagctttgtctgggagagggcattgggtggcctctggtatttatttggcatttataaatatataaactccttttttactct

SEQ ID NO: 2139 - DNA, 2030 bp, Cricetulus griseus
acttcaaggaccgtgcccacatccagtccctcttcagcttcatcacaggcactaaactggacagctcaggcgtggccttcgcagtagtgggggcctgccaggccctgggtctccgagatgtccatctggccctgtctgaggatcatgcttgggtggtgtttgggcccaaatggggaacagacagctgaggtcacctggcatggcaaaggcaatgaagatcgcagggccaaacagtcaatgctggtgtggctgaacggagctggctgtacctaaaggatcatacatgcgttgtgatcgcaagatggaggtggcgttcatggtgtgtgccatcaaccttccattgatcttcacactgattccttggagctgctgcagttgcagcagaagctgctttggctgctgtatgacctgggacatctggaaaggtaccccatggcactagggaacttggcggatctggaggagctggagcccactcctggtcggccagacccactcacgctctatcacaagggaattgcctcagccaagacctactatcaggacgagcacatctacccatacatgtacctggctggctaccactgtcgcaaccgtaatgtgcgcgaagccctgcaggcctgggccgacactgccactgttattcaagactacaactactgccgggaggatgaggagatctacaaggaattctttgaagtggccaatgatgtcatccccaatctgctgaaggaagcagccagcctgctagaagcaggcgaggagcgtcccggggagcaagcccagggcacccagagccaaggttctgccctccaggacccagagtgctttgcccatctgctgcgattttatgatggtatctgcaaatgggaggagggcagccccacaccagtactacatgtaggctgggccactttccttgtgcagtccctaggccgcttcgagggacaggtgcggcagaaggtgcacataattagtcgtgaagcagaggcagcagagactgaagaaccatggggggatgaagcccgagaaggccggcgtcgaggtcctcgacgggagtccaaacccgaggaaccacccccacccaagaagcctgcattggacaagggcccgggctctgggcaaaatgcagggtcaggaccaccccggaaaacaccagggattgtcccaggtactacccgtggcccagaagtcagcagtgctgctcaggctccagcacctgcagcatcgccacccccggagggcccagtgctcactttccaaagtgagaagatgaaagggatgaaggagctactggtggccaccaagatcaactcaagtgccatcaagctacaactcactgcgcagtcgcaagtgcagatgaagaaacagaaagtgtccacacccagcgactacacactttctttccttaagcggcagcgcaagggcctctgaacggttggggattccctgaccaggacctaggccctgccctcactcccagcaggcttcaccctagttccccaattcaagcccagactctgcccacagtcctagggggcccagggctgttctgcagtgactgggaaccttcagttagctcctttaggctgtgactcagttcttagaatttaggtttcatctcccaccagccagccaattggaacctcattgtaggtcccattcagtccctaggggtagatttccgcacttttgagttccagcctttgggaatccagcctcctaccccaaagaacttccatattgctgcctgaatttggaaatcttcgcttcctcgcctccctaaccccagagtccaggacacgaagcttcaactcttgtctgtgaatactgagcctcgcccccttcctgaccaaactggcccctgaacagagtaggacctcttccaaccctctgggaacctccctgaggtcccgggaggaaatatgcacggggtggggagggccagtctcttcctgttttgtacatagattttattttttagttcaaggaagatgaatacattttagttaaaaaaaaaaaaaaaaaaa

SEQ ID NO: 2140 - DNA, 2029 bp, Cricetulus griseus
ggaaagtgaaagtttgcctcggtgctctccgtgttgctgcggctttctgcatcccgggacagcggcgtggccctcggtcggggtgcaagctctccaaccagcagcgatcgagggagcgagcgaactagagcggcaaacacgccggaccgggacccagctgcccgtatgaccgcgcggggcgccgcggggcgctgcccttcatcgacatggctgggcccccggctgctgctggtctgtctcctggtgagcaggagcattgccaaggaggtgtcggaacactgtagccatatgattgggaatggacacctgcagatcctgcagcagctgatcgacagtcaaatggaaacctcatgccagatggagtttgaatttgtagaccaggaacagctggatgatcctgcttaaactctcaattaactgagagagggatagaagatgcccccacactgtcacttatttattgtgggccctggaggctccctgcactcaaggaaggccagcgagctagctcaggaccctttctctcaggagctgtaccctcctctcatagccagaacctggcaagggacctacctgcctgtatggcccatgggagaccagggcacacaagaaggaacagaagagcctgtgcccagaaaacccaactggtgccaaggaacccaacatggacaggcagggacctgtttcccaagaggaaagcctgagatttacagggcgggacagcatctgcccgatttcccgtaaaggcataaaggcacacagcccaaaagacgggaagaggaggcctttggctgcttgtgttgacagcttaaaggggtctacaccctcaatttgcctaagtgtcctcagctgatagccaggaaggaggggagactagccctgcctcaggacctgtctgacctggctcatgatgccaagaggaggaccaagctctagcctcgtctcctcctgcccacacgcccctgccagagttcttttgcccagcagaggcaccctcaatgaaggaagccattgcactgtgaatactgaacctgcctgctgaacagtctttccatccaccccatgagcgaccatccgtccgaactgttctcccaccccccacagcctctcctcagcttcctgaactgagctggcctcatctgtcgactgagggagctcctaagccccgaccttcccctgccttggcctttgattgtccagggtagagctgtgggagaactgcttgggctaccagccagagctggtctctaggctgtgttccttgcccaggtttctgcatcttgcactttgacattcccaggagggaggtgactagtggaaggaagaaaggaaggggaggcagaggcagaaaggccacaggcagagctctcagtgaaaatgggtcttgaaaatacgtgtgtacccttaaggttgaagttgatgtctatactctaacccatcagtcagcctccttcccttgctgcctccagcctggagctgaacaggttgccctgtcacgagctcctgggactgagctacatgctccagccccaccctcttctggccttttttctacatctgacccaggtaggcagtgacaccctcccagtctcacccactccaccctgccatctctagccaagctaggcagatctagagaagggatggagaaatgggttatctacttccagctctgttgtgtttccctctgtttcctgggccaggccttgtctgtggctctgagacctgggcacaggtgacagggctctcacttgcctcttggtctctttatgctgctgtgtccccctttcctgccctccctggctaccgggtccgtaatctttcagacaagtgggaggagggtggtctgtaggccccataggaaccccttctttcctctgagaaagcctggagggaacattgactcacaaactgtgagactgcatttttttatacttggaagtgaattattttatataaggtcatttaaatatctatttaaaaaataggaagctgcttttatatttaataataaaagaagtgcacaagc

SEQ ID NO: 2141 - DNA, 2029 bp, Cricetulus griseus
gtcatgaagtctgcaaacacggaagagctcaggaaccctgacttccagaaaaccaggctgggtaaagtcacaggaaatcacttggaatgtatttgtatgtgtggaggccttcggtccgaaggactgttaaatgtgccaatgcctgagcaagaggcaggaatggcggaagggaagctggtcagaggccgtgaccagttccccactcagggaaatactctgtccccagtgaacctaacagaatgaccagatagccaccggcctctatgcatatccaaataacgaaaaacacactgaagtccatcatgaagaaaagtgatgggaataaagactcaaacggtgccaaaaagaaccttcagttcattggcatcaatggcgggtatgagacaacttcaagtgatgattccagctcagatggaagctcttcttccgagtcagatgacgagtgtgataccattgagtatcctcccgaggaagaggaggaggaggaagaggaggacgacgacactcagggaatggcggaagggcaccctgcagttaatattgaaggtttcaagtctgccagggtggaagatgaaatgcaggttccagaatgtgaacctgagaaggtggaaatcagagagaggtatgaattaagtggcatgagtggttccgcgtgtccagtcagaagtccgctgtgccagccatggtgggtgactatatcaccgcattcgaggctgtctccccggaccgtggctccgttacatcatcaacatggccgacggcaacgggaacacggcccttcactacagcgtgtctcactctaacttccagattgtcaagctgcttctggatgcagacgtgtgtaacgtagatcaccagaacaaggcggggtacacgcctatcatgctggcagcacttgcagccgtggaggcagagaaggacatgcaggttgtagaagaactttttggctgtggagacgtgaacgccaaggccagtcaggcaggacagacagccctcatgctggccgtcagccatgggcgaatagacatggtgaagggcctactggcctgtggggctgatgtcaatatccaggacgacgagggctccactgccctgatgtgtgccagtgaacatgggcacgtagagattgtcaagttgttgctggcccagccaggctgcaatagccagctggaggacaatgatggcagcagcgctctctccatagccctggaagctgggcacaaggacattgctcttcttctatacgcccacgtcaactttgcaaaagcccagtctccgggcacccctaggcttggaagaaagacatctcctggtcctactcaccgaggttcctttgactgactatgtaaacatagccctccatgtgtgtgccaccatgaagctgctaattattcctgtttgggcgacagatactgaatgtatatggaccatgctgagccgaacagcaaacagaagaagtgtaaaggaataagctgaaggctgacacttttgcagggaaaacagagctggtgggacatggccacttactaaagtggaaccattgggaagtctttccagtattccattccgagatgactttgatcatcagcgacttgtcccccaggctgataatgcctggcttgaaaatagaagatgggctctcaaaccatacaaacttacagcaagaaatattttcagctggtttatctaggtggatgtattatatggctttttatataaaaagacttctgtatgaaattgacacagcattttcaacttttatattccacaatagtcataaagaaacgtttaatgttacatttttaacagctgcccaactgtgtctgtatctggtgataaaggctgaattaggtagaggaatgggttccaaatttgcctctagggaaacatagtgtagctagctctctgtgtatttctatcacgtcacattcactttggtcctgtgtatgtatttaaatgtttgaagtgccttagactcttgccatattttcaaaataaaatttcattaagctcttaaaaaaaaaaaaaa

SEQ ID NO: 2142 - DNA, 2028 bp, Cricetulus griseus
agtcagcgacagaaagactatgagctggaaaaacagaaaaacttgaaaaggagagacaagagcaactccagaaggaacaggagaaggcctttttcgctcagttacaactggatgaagagacaggagaattcctcccaattcagccagcccagcacatccagacagatgccagtggatctgccagctattcccaggttccctggatatttccagcaacgttgaaagcccagtcttcagcagtccggatcaggctcagtcactggacagctgtctggagacagccatgactgatctaaacagcatacagcaggacatggagcaagtttggcaggagcttctttccattcccgaattacagtgtcttaatactgaaaacaagccgctggttgagactgccactgttcccagcccagaagccaatctgacagaaattgacagcaattaccatttttactcatccgtcccctcactggataaagaagtcgacagttgcagtccacattttcttcatggttttgaagattctttcggcagcatcctctccacggaagacgccagccagctcacctccttagattcaaattccacattaaacacagattttggtgatgagttctattctgctttcatagcagagcccagtggcagtagcagcatggcttcctctgctgccgtaagtcagtcactctctgaacttctgggcgggcctattgatggctgtgatctgtcactttgtaaagctttcaaccagaagcaccccgaaagcacagcagaattcaatgactctgactctggcatctcactgaacactagtcccagccgagcatccccagagcactctgcggagtcttccatttacggagacccaccgcctgggttcagtgactctgaaatggaagagctagatagtgcccctggaagtgtcaaacagaatggtcctaaggcacagccaacacattcttctggggatacagtgcaacctctgtcaccagctctagggcacagtcctcctgcacatgatgcccagtgtgaaaatacaacaaaaaaagaaatgcctgtgagtcctggtcatcaaaaagtcccattcacaaaagacaaacattcaagccgcttggaggctcatctcacaagagatgagcttagggcaaaagctctccatatcccattccctgttgaaaaaatcattaacctccctgttgatgacttcaatgaaatgatgtccaaggagcaattcaatgaagctcagcttgcattaatcagagatatacgcaggagaggcaagaacaaagtcgctgctcagaactgtaggaaaaggaaactggagaacatagtagaactggagcaagacttaggccacttaaaagatgaaagagaaaaactactcagagaaaagggagaaaacgacagaaacctccatctactgaagaggcagctcagcaccttgtaccttgaagtcttcagcatgttacgtgatgaggatggaaacccttactctcctagtgagtactccctgcagcagaccagagacggcaatgtattcctggttcccaaaagcaagaagccagacaccaagaaaaactaggttcggaaagatggagccttttgttttgagctagtgtttgttttgtactgctaagacttcctactgtgatgtgaaatgcagaaacacactttatagtaactatgcagaactatagccaaagttagtgtagaaataatatgaaactacagagcattcatgtctcaatgttgaatcagtttcattttaactctgaagttaatttcttagggcatcatttgggctagtttctgtgtaagtgtaaatactacaaaacttatttatactgttcttatttgttacattcatagatttttatgacatctggctaaaagcaaattattgcaaaactaaccaaaccactatacttttttatatactgtatgaacaaaaatgacatttttatattaaattgtttggctctgacaaaaattaaaggagctgacactaataaaggaatatcgtgactt

SEQ ID NO: 2143 - DNA, 2027 bp, Cricetulus griseus
  modified_base (1980)..(1980): a, c, t, g, unknown or other
cgcgggcgggcgggcggactatggcggccaacatgtaccgggtcggagattatgtttactttgagaattcctccagcaacccatatctaattcgaagaatagaagaactcaacaagactgcaagtggcaacgtggaagcaaaagtcgtatgcttctatagacgacgtgatatctccaacacacttataatgcttgccgataagcatgctaaagagacggaggaagaaacggagatgacggttgaggctgacttgactgagaagcagaagcatcagttgaaacatagggagctctttctatcccgccagtatgaatcccttcctgcaacacatatcagggggaagtgcagcgttgccctgctgaatgagacggagtcggtgctgtcctaccttgacaaagaggatgccttcttctactcattggtgtatgacccttcagtgaagacattattagccgacaaaggtgaaatcagagtgggcccaaagtatcaggctgacattccagacatgctaccggaaggagactcagatgagagggaacaatcaaaattggaagttaaagtttgggatcccaatagtccacttacagatcgacagattgaccagtttttagttgtagcccgtgctgttgggacgtttgcccgtgccctggattgcagcagctccgtgagacaacccagtttacatatgagtgcagccgcagcctcccgagacatcaccttgttccatgccatggatacgctgtacaggcatggctatgacctgagcagtgccataagtgtcctggtgccacttggagggccagtcctgtgcagagatgagatggaggagtggtcggcctctgaagccagcttatttgaagaagcactggaaaaatatggcaaagacttcaatgacatccgtcaggactttctcccatggaagtccttgactagcatcattgaatattattacatgtggaaaactactgacagatacgtgcagcagaaacgtctaaaagcagcagaagccgagagcaaactgaaacaagtgtacatcccaacttacaaaccaaatcccaaccaaatatccaccagcaatggcaagtctggcactgtgaacggagctgtggggaccacgttccagccccagaacaccctcctagggcgagcctgtgaaagctgctatgccacacagtctcaccagtggtattcctggggcccacctaatatgcagtgtagactgtgtgcgacctgttggctgtattggaaaaagtatggaggtctcaaaatgcccacacagtcagaagaacagaagtctcccagtccttctgcagaggacccacgtgtgagaagccacctgtcccggcaggccatgcagggcatgccggtccggaacactgggagtcccaagtccgcagtgaagacccgccaagctttcttcctccatactacgtatttcacgaaaattgctcgtcaggtctgcaaaaacaccctgaggctgcggcaggcagcgagacggccgtttgttgctattaattatgctgccattagggcagaatatgcagacagacatgccgaacttgctggaagcccactgaaaagcaaaagcactaggaaacctttgtcgtgtatcattgggtatttagagatccatccagcaaagaaacctaatgtaattcgatctccaccgagcctgcaaactccaaccaccaagaggatgttgaccgctccgaaccacacctctctgagcatcctggggaaaagaaactacagccatcacaatggcctggatgggccggaacgatggctaagcaggtaaaggtactgccaccaagcctgtgacctgagtttgacccctgggaccctcatggtgaaaggaaagaaccgactcctgcaagtgccctctgacctccacacgcgcactgtggtacgcacatgtctacacacacacacacacacacacacacacacacacacacacacacacacacacacacacnacacaaattaataaaatgtaatgaaaattttaataaaatatttaaaa

SEQ ID NO: 2144 - DNA, 2027 bp, Cricetulus griseus
atcagctatggagacagacagatgatcacagctcttctaaggaaactcaagcagcaatccagggagagtgttggagaaaaacgacctcggttattaaaagccctgaaagagttaggtgacttttacctagaacttcactgggattttcaaagctgggtgcctttgctttcccgaattctgccttctgatgcctgtaaaatatacaagcaaggtatcaacatcaggcttgacacaactctcatagactttactgacatgaagtgccaacgaggggatctaagcttcatcttcaatggagatgctgcaccctctgagttcttttgtagtgttagacaatgagacaaaaagtgtatcagcggatacatcatgaggagtcagaaatggaaacagaagaagaagttgatattttaatgagcagtgatatttattctgcaactttatcaaccaaatcgatttctttcacacgtgcccaaaactggatggctttttcggggaagataaaacagaaagagtaggaaactttttggcagacttttatctggtgaatggacttgttctagaatcaaggaaaagaagagaacacctcagcgaggaggacattcttcggaataaggccatcatggagagcctgagcaaaggtgggagcctggcggagcagaacttcgagccggttagaagacagtcccttacccctcctcctcagaacactattacgtgggaagaatacatttctgctgaaaatggaaaggcaccacacctgggcagagaactggtgtgcaaagagagcaagaagacatttaaagccactgtagccatgagccaggaatttcccctgggaattgagtcattattgaatgttctagaagtaatagcacccttcaagcactttaacaagcttagagaatttgttcaaatgaagcttcctccaggctttcctgtaaaattagatatccctgtgtttcccacgatcacagccactgtgacttttcaggagttcagatgtgatgaatttgatgggtccatctttgccatccctgaggactacaaggaagacccaagtcgttttcctgacctttaactgatccagaagagcaagaggctacaagtggcagggtcagagcttctgtaagcagagggtcgacagacacatcagtgatgtgatgagaaatggacctctaataaaacgtccgaagcttcctgatgtgccattcatctttttaaagtcacttcctgtctgtaatagtttgacacccagtgaccctgagaccttcctatgtaaagcagctgtgagtgctgtgatttgtttttaaagatttttacacttcctcttggaatatatatgcatataaatatatctatagctatatctaaaacactcctggaccattaacgtaaattcagtgtcttaagagatatgaatccccttgaaacgcattgcctctatacagggtggcatgtataaatgttcctttaaactttgttttcatcattatgtagagttctttaatttgaaatgtccaatgaactagaaggaaatgagttttctgaggtgaacagagcaatggtaaccatcagttgcatttacagcctgctgcaatgcattccgagggagtgctccctgcagggaatgcggtgcccccccccccccccagcacctgggaacagttgcattttacagctgcagggcattctgagggagtgctccctgcagggaatgcggtgccccccagcacttcctgcagctcatcgtggtgctctttgttttacctgaacccttttcagtggaaactgtttgttttttttgtttttgttttcctaaacttgagtataaaggttcttgttctgttgataggtacggtaacatgcctacatctagccctctctcaagtatcagcactttaaaacaaattccaaatttttaaacttgcttcctagtaagtgcacataagacagattatttttaatgggatatggatgcattggtgtcaatttaaaaaataacacatattttggacaaaaaaaaaaaa

SEQ ID NO: 2145 - DNA, 2027 bp, Cricetulus griseus
actgagtacctcaaaaagactcagtaagactggagtcctgatgggattatgcagtttattaagttgtgtactgtcagctatggaaagtcaagctggtcctgaagcacaacaggtactttgttgagagttccaccctgatgtcatccagcatcttcttcaagaccctgtgatccgcgaatgtcgcttgaggaatgctgagggggaggccacagaactcatcacagagactttcacaagcaaatctgctatttctaagacagcagaaggtagtggtggtccttctacctcccaggtggtagatccacaggccaaatctgacatccccaaagacctgtttgaattttatgagcaaatggacaaggatgaggaagaggaagaagagacccagacagtctcctttgaagttaagacaggaaatgattgaggagctccagaagcgctgcatctacttagagtaccctttgttggcagaatatgacttccggaatgattctctcaaccctgatatcaacattgacctgaagcccacagctgtgctcagaccctatcaagagaagagcctgcggaagatgtttgggaatggacgagcacgctctggagtcatcgttcttccttgtggtgctgggaagtccctggttggtgtgactgctgcatgtactgtcagaaagcgctgcctggtcctgggcaactctgctgtgtctgtggagcagtggaaagcccagtttaagatgtggtcgaccattgatgacagccagatttgccgcttcacctcggatgccaaggacaagcccattggctgttccattgccattagcacttattctatgctgggccacaccaccaaaaggtcctgggaggctgagagagtgatggaatggctcaaaacccaggagtggggcctcatgatccttgatgaggtgcacaccattccagccaagatgttccgacgggtgctgaccattgtgcaggcccactgtaagctgggtttgactgcaacccttgttcgggaagatgacaaaattgttgacttaaatttcctgattgggcccaagctttatgaagccaactggatggagctgcagaacaatgggtacattgccaaagtccagtgtgccgaggtttggtgcccgatgtctcctgagttctaccgggagtatgtggcaatcaaaacaaagaaaagaatcctgctgtacaccatgaatcccaacaaattcagagcctgccaatttctgattaagttccacgaacggcggaatgacaagattattgtctttgctgacaacgtatttgccttgaaagaatatgccattcggttgaacaaaccttatatctacgggcccacatcccagggagagaggatgcagattctccagaacttcaagcacaaccccaaaatcaacaccatcttcatctccaaggtcggtgacacatcctttgatctgccagaagcaaatgtcctcattcagatctcctcccatggtggttccagacggcaggaagcccagagactggggcgggtactccgagccaaaaaagggatggtcgcagaggaatacaatgcctttttctactcactggtgtctcaggacacacaagaaatggcttattctaccaaacgacagagatttttagtagatcaaggttacagctttaaggtgatcacaaaactagctggcatggaggaagaagagctggcattctccaccaaagaggagcagcagcagctcctgcaaaaggtcctggcagccactgatttggatgcagaggaagaggtggtggctggagagtttggctctagatctggccaggcatcccggcgctttggcaccatgagctctatgtctggagcagatgacactgtgtatatggagtaccactcctcccgaaacaaagcttccaccaagcacgtgcacccacttttcaaacgctttaggaagtgacacctgccctgttcctcagttgaagactggctgcctgaatcagggttgaagtggatcatttctgtgtataaaacttacaccacttaa

SEQ ID NO: 2146 - DNA, 2027 bp, Cricetulus griseus
cacgcgcgaggccggctagggctgaatcgctgctgtcctcccgccctctcccaggtgaccccgaggtagcatttcccgggagcagcagccctttctgaggggatgggcgcagccaggccagatggacgagaagaccaagaaagcagaggagatggccctgagcctcgcccgggcagtggccggcggagatgaacaggctgctatgaagtatgccacctggctggcagagcagagggtgcccctcagggtgcaagtaaaacctgaggtcttcccaacacaggacatcagactgtgtgtgagcgtggaggatgcctacctgcacactgtcaccatttggctcacagtgcgtcctgatatgacagtggcctctctcaaggacatggtgtttctagattatggctttccacccagcctgcagcagtgggtggttggacagaggctggcacgagaccaggagaccctgcattcgcatggtgttcgacagaacggagacagcgcctacctctacctgctgtctgcctgcaacacctcactcaacccgcaggagctgcagcggcagcggcagcttcggatgttggaagatttgggcttcaaggaccttaccctgcagccacggggccccctggagcccatccttcccaagcccagggcccaccaggagccggggcagccagacgcagcaccagagtcgccaccggtgggctggcagtgccctggctgtactttcatcaacaaacccacacggcctggctgtgagatgtgctgtcgtgcaaggccagagacctaccagatacctgcctcataccagcccgatgaggaagagcgagcacgcctggctggagaggagcaggcgctgcgccagtaccagcagcggaaacagcagcagcaggaggggaactacctgcagcacgtgcagctggagcagaggagcctggtgctgaataccgagcccgctgagtgccctgtgtgctactcagtgctggcgcccggcgaggccgtggtgctgcgtgagtgtctgcacaccttctgcagggagtgcctgcagggcaccatccgaaacagccaggaggcagaggtatcctgccccttcattgacagcacctactcgtgccctggcaagctgctggagagggagatccgagcgctcctgtcccctgaggactaccagcgcttcctggacctgggtgtgtcgatcgcagagaaccgcagcaccttgagctaccactgcaagacccccgactgcaggggctggtgcttctttgaggatgatgtcaacgagttcacctgtcctgtgtgctcccgggtcaactgtctgctctgcaaggccatccatgagcgcatgaattgcagggagtatcaggacgacttggcccttcgggctcagaatgacgtggctgcccggcagacaacggagatgctgagggtgatgctgcagcagggtgaggccatgcactgcccacagtgccggattgtggtccagaagaaggatggctgtgactggatccgctgcaccgtctgccacactgagatctgctgggtcaccaagggtccacgctggggccctgggggcccaggggacaccagtgggggctgccgctgccgggtcaatgggattccttgccatcctagctgtcagaactgccactgagttggaagatggtggccctcaatattgaccaagacccacatgtgtagcagctaaacagcaggactaggccaggggttttaactctggtttggccactgtacctttaagcttggccagggaaagggccctgagctgtgctgccagcttggtgtcttacaggagccccagctgagccagtgtcatgttgctccacggggttactgactagcccttatggccctgagctagataccctacccttactagccaccagcctcaattaaacacagccctgacctaaggcctggctggctggtgttctgagccgccctgagtgactgttcccctcagcatgctctctgaggacccagatccctcaccctttgccttgctggctttc

SEQ ID NO: 2147 - DNA, 2026 bp, Cricetulus griseus
  modified_base (561)..(561): a, c, t, g, unknown or other
  modified_base (1906)..(1906): a, c, t, g, unknown or other
cctctacaccctataaccaccatggcagccgagattcaggccctccgccttctacagtgagtgaagctgaatttgaagagataatgaagcgtaacagagcaatttccagcagtgccatttccaaagcagtgtctggagccagtgcaggggattacagtgatgccattgagacactactcacagccattgcagttatcaaacagtctcgagtcgccaatgatgagcgttgccgggtcctcatctcctctcttaaggactgtcttcatggcatagaggccaagtcatacggtgtgggtgccagtggaagctcttccaggaaaagacatcggtccagggagaggtcaccaagcaggtcccgagagagcagcaggaggcaccgagacttgcttcataatgaagaccggcatgatgattatttccaagagaggaaccgggagcatgagagacaccgggataggagaacgggaccggcaccactgagaaaggaacttcctccaggcaataccctctgccctacaggattgaagatggcttggcagccctcccaatcccacacctccngtttgcccgaggggaagaacctaaagacttgatggggtaggggatgggggcagacagaaagacagcaacatgtccagcccctagtctccatagagaacggtgctttgtctgaggaaacctgagtttctgattcccccggagcagtcaatggtgagaaccctgctaacataccacttctttgttcaactcctttaccttcctggcccctttgaggagggaccatgagaacagaaactaccttgtgacaagctgctgttctgggttttctcttctcacatattgacagtttatttccctggccttctagagggctgaatccttttggctccttgctatctgactcctagtggacttgcccctcggaagcaaaacccagaaggttgctttctcctggaaacctagccaagccagttaccaccatttgctgcttcaggctcagttgtctgttgcaataaccagctcttaggtattccctttccctgaggctttccatttaacatggaatccttcccccaagaaggcttcttccttgttttagaggaagaaggtactgcctttggaacatagggatgtcatgggacctcaataatgaggacccctagtttgttaagtaccaggagtgtggggaagaaagcaatttgagcaggatgtggcctactcgcatgggctcttctttttcaggtttgatgtaagcttgggcttgcaatccccacggtacatactttgacttattgtgggataactcagcactagtaggcaggtaaagtcacagatgtggttgttttttttttgttttggtttttgtttttttaaattcctttactataatactccccttacttggcctggaggtgcttcctgcctttgacaaagagcagagaagaaatggagcctgacttaagtgaactcagctcagagttctaaggaccagcacagtggtagctgttttctgcacagaccaatggaattgcttttctcagcatccaaattgtgataggttgctcctgcaggaggcagcttcagtcctggaataccatagggtgatgttccttctgcatgcatctgcagggtctgtgacatataatgtggaaagacatggcatgtgagatgagacttggtttgtgaggcatagggtcactggagaaccatcagactcaagaggggagagactgaattggatcctttcttcccagaacacttctgatagaccccttcagtcactgagggagtagcccccagggttggagaaacacataaccttgggacagagagagaattgtttttctccccattttgtttttactcaatgacagaatttttagttttattcctcatagcaaaaggngaaaaaaaaaatccccagccctcaaaggtcaaggcccccatccccctgttgtcggtgatttgtttgtctttctgataggttgaaaattgtgtaataaacttgatgacgatgtcaatcttt

SEQ ID NO: 2148 - DNA, 2026 bp, Cricetulus griseus
tccccaaggggcctctttaccgtgtggccggcactgctgtctctatctcttgcaacgtgagtgcctatgagggcccttcccagcaagactttgagtggttcatgttactagtaccagaggccccagctacttcactgggcatcatcagcaccaaggatagccagttcacctatgctgtgtttgggcctcgtgtggcttctggtgacctgcaggtgcagcgcctgaggggagactccgtgttgctcaagattgctcgccttcaagcccaggactctggcttttatgaatgctacaccccctccacagatactcagtatctgggcaactacagtgccaaagtggagctgagagttcttccagatgagctgcaggtatctgctgcccctccagggccccgaggccgtcaggctgcaacctccccctcacgcctgacagtgcacgagggccaggagctggcgctgggctgcctggctcagaccaaaacacagaaacacacacacctgtccgtatcctttgggagagccattcctgaggcgccagtggggcgggccactctacaggaagtcgtgggactgcgctcagacatggccgtggaggctggagctccctacgctgagaggctggccgcgggggagctgcggctgagcaaggaagggactgaccggtaccgcatggtggttgggggtgcccaggctgcagactcgggcacctaccactgcactgctgctgaatggattcaggatcctgacggttcctgggtccagatcgcagagaagagggcagtcctggcccatgtggatgtgcagacattgtccagccagctagcagtgacagtgggacctggtgagcatcggattggcccaggggaacccttggaactgctatgcaatgtgtcaggggcactgcccccagcaggccggcatgctgcgtactcggtgggctgggagatggctcctgcaggggctcctgggcctggccgcctggtggcccagctggacacagaaggtgtaggcagcctgggccctggctacgagggccgccacattgccatggagaaagtggcatccagaacctaccggctacgattggaggctgccaggcctggtgatgcaggcacctatcgctgcctcgccaaagcctatgttcgagggtctgggacccggcttcgtgaagctgccagcgctcgttcccggcccctccctgtgcatgtgagggaagaaggtgtggtgctggaggccgtggcatggctcgcagggggtactgtgtaccggggagagactgcctccctgctatgcaacatctctgtgcgtggtggtcccccggggcttcgactagccgccagctggtgggtggagagaccagaggagggcgagttaagttctggccctgctcagcttgtgggtggagtgggtcaggatggtgtggcagagctgggagtccggcctggagggggtcctgtcagtgtggagctggtgggacccaagagccatcgtctaagactacacagtttggggcctgaggatgaaggcatataccactgcgccccaagcgcctgggtgcagcatgcggactatagctggtaccaggcgggcagtgcgcgctccggacctgtcacagtctacccttacacacatgccctggataccctattcgtgcccctgttggtgggtacaggagttgctctagtcactggcgccagcgtccttgctacgatcacctgctgctttatgaagaggctgcggaagcggtgatctgtagcaccccagtttctgcaggtgtcaactgtcttccagccagcgccgctcctcctccggttgcctagataccctcccctcctccgcccagccctcctttaatttatttgtcctgtccctgcctagagtggaagctgcggctccccagttcctcacacctttcctcgggttctctgtccttggtctcacactcatgctgtaggaaggccagttcctgtcctcaaactagtttttaataaaataggtgtttgtaaaaaaaaaaaaaaaaaaaa

SEQ ID NO: 2149 - DNA, 2025 bp, Cricetulus griseus
  modified_base (139)..(139): a, c, t, g, unknown or other
ttggcaacacgagagccctcatggtctctgttcaaagttctgggaactctgtctttgggtgaatttaacccgcattataggactacccagggccctttctgatactgggtacagacgtggggaagatgtcaggaaaacnggaagccgcttctgggtttctgcacaaagtccccgatgcgaacgcatctggcagctcaggcaagactcactgcccttcgtgtctggggcttttcaaagcccccaggctcttgccttgcttgcacacggtgtgcaccacatgtctggaaaagctggaaccgttctcagtagtggacatccgagggggtgactcagacacaagctctgagaggtcaatattccaggaacccaagtcacgaagcttgcagccacagattggcatcctctgtccggtatgtgatgctcaggtggacctgcccttgggtggagtgaaggctttaacgatagaccacctggctatgaatgatgtgatgctgcagagtctgcgtggggaaggccagggcctggtgtgtgacctgtgcagcgacagagaagtagagaagaggtgtcagacctgcaaagccaatctctgccacttctgctgccaggctcataggcggcagaagaagacgatgtatcatagcatggtggacctgaaagacctgaaaggctacagtcgggttggaaagcccatcctgtgtcctactcaccctgcagaggagctgaggctattctgtgaactctgtgaccagccggtgtgtcgggactgtgtagttggagaacaccgagagcacccctatgacttcaccagcaacgtcatccacaagcatggagattccgtgagggagctcctcagaggcacccagccccacgtggaggccctggaagaagccctggcacagatcaaaaccatgaacagtggcctccaggagcgagtggaggcagtggcggctgatgtccgaacattctctgagggctacatcaaagccattgaggagcatcgggacaagctgctacagcagctggataccatacgggtccagaaggaaaattctttgcagctgcagaaagcacagctggaacagctgctggcagatatgcggactggagtggagttcactgagcacctgctgaccagcggctcggacttagaaatcctcatcaccaagggagtggtggtagaacggctccagaagctgaacaaagttgaatacagctcccgtcccggagtgaacgataagatctgcttctctcctagggagaaggcaggccagtgccgaggctatgaagtgtacgggaccattaacaccaaagaagttgatccagctaaatgtgtccttcagggagaagatctccagagagcacgagagaaacagacaacctcatttaccctgctttgtaaggatgcctcaggagagagcttgggcaggggaggcgaggacgtccaggtggcagttgtccccaaagataagaaagacagcccaatcagaacagtagtccaggacaacaaggatggatcataccatgtttccttcacccccaaggaagctggagtctacattgtgtgggtctgcatcagagagcagcacgtgcagggctcaccgttcactgtgaccgtgagaagaaagcatcgctcacatccaggggtgtttcattgctgtaccttctgctccagcggaggccagaaaactgcacgctgtgcctgcggtggcaccatgccaggtgggtaccttggctgtggccatggacacaaaggacacccaggtcgtccacactggtcttgctgtgggaagtttattgagaaatctgactgcacttacacaggtgggcagagtgcaccgaggagtctgcttaggaccgtggctctctgatggcttccttggtacaagttcagccaggtaaacatgaagccagcatgacttatgatgtgcagaggacctaagagcttgagtagttagttccaaagaaactgacggaattaaagacaaagtgctttctctaacttcagagttcaagtgctttttgtgt

SEQ ID NO: 2150 - DNA, 2025 bp, Cricetulus griseus
cgagcgcgcgctcgtcttcaccagccggccggtgcgagtggccgagaccatcttcatcaaggtcacgcggtcgggcggtgctcgagccggcgcgctgtccttcggggtcaccacgtgcgaccctggcacgctgcggccggccgacctgcccttcagccccgaggccctagtggaccgcaaggagttctgggcggtgtgccgcgtgcctgggcctctgcatagcggcgacatcctgggcctggtggtcaacgccgacggagagctgcacctgagtcacaacggcgcgccggccggcatgcagctttgcgtggacgcctcgcagcccctctggatgctcttcagcctgcatggcgccatcacgcaggtccgcatcctcggctccaccatcatggctgaacggggtggcccatctctctcctgctcacctgcctccactccgacctcgcccagtgccctgggcagccgcctctctgacccccctacccagcacctgcagttctgggcctctgggtgctctactggtgggacggcccccaatcacctgtgagatgagtgcaccatttgctatgacacgcagtggacacagtcatctatacgtgtggacacatgtgtctgtgctattcctgtggcctgcgcctccaagaaggccctgcacgcctgctgccccatctgccggcggccccatcaaggacatcatcaagacctaccgcagctcctagcccactgcagagccccgcccgaacccccacttctgcagatttcggcccagcaccaactaagggcgaagccaacagggtcccttctcttccacggtttgaaaactcttcctaccttttccattaaacatgggaaaaccaaacatgtagccttccctgggcagcgtgggaggaggccagtggactcttccctccttgggcagctgcacactgcatgccctgtctcctcctcctccttacccagagtgggggaacagacaggctgcacaagatcccaggtcctaggtcctcgaccttcgtgccgacccaccactgttcaggacctctccctcgccataacttgcaccaatcatctcactggtgccgctgcctaaggtgcccattcagtataggctgaggtgggcctttctgttgtcagggtcccaaagagcaggtccacagccacccctaaggcctgtcctccctcatctcagtgccagccttggcctgggctgatcctgccatttgtgcccaggagggacaggggccctcagtagggtgggggtttcctgggctatggacagcccttttcctcattttaatttatttgtttgtgggttaattccaacctgggggctcctaaaattctactgttgggaggttgctaggtaaggggcagtagagtagccactcagaatctcccccaggcactgacacaggctcatgggcagtcctgctaaccccgaggtggaactccaggctggaggcctcccaagaggtggacgggcctctcttggatgggaaaccactgatgtccacctgtgcccttcctccctgggtgggagctaagttagtgtgattggttcaaggtcatctgtactcgttcgggaagattgtggacatgtgggccagggaccagaatggagaccctccctgattagaaggaggatgggtcctgaaggcaggcccctggtcctgctaagggagtgtccctcactcttgggctactgcctctgcagccctccctgcctgttctgggttactgtggagtcttagcctaggtcctcccagcccctcagccattggccctcagacggctggttttataccctcagagatggcttctgccttgacagacaggggctaggactctgtcctggccactggccagtcctgccaccctggccagaggtcaccctccaaacctcagcttcccctgtgtaaagtggtttgggggtggaacactctgagtgtgattcctgggggttcttttgggatgtctcttaggaggacgtactgggaaggcattgagaatggtgccagggtgggc

SEQ ID NO: 2151 - DNA, 2025 bp, Cricetulus griseus
  modified_base (1068)..(1068): a, c, t, g, unknown or other
tgttcaagatgtagtatgcctggaggctgccccccatgccacccggacgactctacatctgctgcagggtccttgagagacatcttgggtcaagtttaccagccactagctgtccgggaattacttatcctccagggaggacctccccagacctgtacagatgtaaagacacagcttaggtgtcacaccccagcttggctccggcgtctgtgtgggcagctgctctccgaaaggttgatgagacccaacggtgttcaggcagtagtccggggcattttggaaggagcaggtgcgggtgctgctggtgggagtgatgctgaggccacagcagctgactggaagaaatgtgacttgattgcaaagattctggcctcttgtccccagcagtctctttccccagagagctactacaaagacatctgcccacagattctggacttattccattttcaagataaattgacagcacggcagtttcaaagagtggccactaccaccttcataactatgtcgagtgaacgcccagaactggcctcaaagtatttgcttcagcccatgctagctcctttgcatcgatgcttgaccacagcagagattccagagagtgatatggtgccaggaactattttggtgactgaggaagaacttagtcgctgtgttgaagatgtgtttaaagcctgctggaattagagcagtaccaggctctacttatagaagaccaagaacggaagctgctggtcctgcaattgctggctgttctgtgtgagagaatgtctgagcaaatatttacacacatcactcaggtagtggactttgtagcagcaacactgcagagagcatgtgcaagcctggctcatgaggcccagagcactgtggaatcccaaacactgagcatgtccatggggttggtggctgtcatgctaggaggagctgttcagttgaagtcatgtgattttgcagtcctgaagcagctgttacctttgttggagaaagtctctaatacatatcctgaccctgtcatccaagaactcgcagttgatctccgaattgccatctctactcatgganccttttccactgaggctgtcagcacccagaacaagccaggagtctacagagcctagcactgcaacaagccagccacctagaaatgtaaccacacaacagttccaggaagttctcctatcagcatatgatccccaggttccaacccgagctgctgccctacgcactctttcccgatgggtagagcagagagaggcaagagcccttgaggaacaaaagaagcttctccagatattcttggagaacttggagcatgaagacacttttgtatatttatctgcaattcaggggggttgcccttctctcagatgtgtaccctgaggaaatcttggttgacctgttggccaaatacgatagtggcaaagataagcacactccggagaccagaatgaaagttggagaggtcctgattcgaattgtcagagcattaggggacatggtctcaaaataccgggaaccattgatccatacattcctgcggggagtgaaagatccagatgctacacacagggccagcagcttagccaacctgggagagctgtgccagcgcctggacttcctgctgggccccgtggttcatgaggtgacagcctgcctggttgctgtggctaagacagacagtgatgttcaagtgcgcagagctgcgatccatgtggttgtgctactgcttcggggactcagccagaaagcaacggaggtgctgagcgatgtcctcaaggatctctatcacctgctgaagcatgtggtgcgtttggaacctgatgatgtggccaagctccatgcacagctggccctggaagagctggatgagatcatgaggaatttcctgttccctccccagaagctggagaagaagattgtggtcctgctatagacctggttcataggacatggaagaaggcagggagggaccaagaagccaaagctgtggccatacacctcccagcaggtggctccacc

SEQ ID NO: 2152 - DNA, 2025 bp, Cricetulus griseus
aaggaagtcacgtataccagagggctacgattttaagatctgggccaactgcaaaggtctggctggaggctcagggccgcaggaccaggctttggctgttttctcgactttagggccccagccggtgctttggccgtcagagccaagttggaaggagattctgaggaggcttcgccttgggcctggaggaagctgacccttctcgccgtggccgggctgcaagatctacgggtggccttgggctcgaaagcctgtcaaatacgggaaagggcctgaggatttgctagttgaggggaaagctttggggaacgaggctgtctggagaatgacattctcctctccacagcagtccgaggttatgcgactcgatgatcccgcggaaacgctacggatctaagaacacagatcagggtgtctacctgggtctctcaaagacacaggttctgtcccctgcaactgctgtcagtagcagcagcgacatcactcctttgcccaccccggtggccctggtcccttcccctcccgacaccatgtcctgccgggatcggacccaggagttcctgtctgcctgtaagtcgctgcagagccgtcagaatggaatccaaacaaataaaccagctctacgggctgccagacaacgcagtgaatttacccttatggccaagcgcattggaaaagatctcagcaatacatttgccaagctggagaagctaacaatcttggcaaagcgcaagtccctctttgatgataaagcagtagaaattgaggagctaacatacatcatcaaacaggacatcaatagcctcaacaaacaaattgctcaacttcaagattttgtgagggccaagggcagccagagtggccggcatctgcagacacattccaacaccattgtagtttcattgcagtcaaaactggcttccatgtccaatgacttcaaatcagttttagaagtgaggactgagaacctgaaacaacagaggaaccgtcgggaacagttctcccggacaccagtgtcggccctgccccttgcccccaaccaccttgggggaggacccatagttttgggagcagagtcccgagcctccagggatgtggccatcgacatgatggattctagaacaagccagcagcttcagctcattgacgagcaggattcctacatccagagccgggcagataccatgcagaacatcgagtctacaatcgttgagctgggctccatttttcagcagttggcacacatggtgaaagaacaggaggaaactattcagaggattgatgagaatgtgcttggagcccagctggatgttgaggccgcccattcagagatcctcaagtacttccagtcagtcacctccaatcggtggctcatggtcaaaatcttcctcatcctcattgtcttcttcatcatctttgtggtcttccttgcctgaaccctccttcaatctgaggcactccacagagggtttgggacccttctgggagggcaagtggccatggctgccattgagcctgtatagggtggttgggagaaaggccatttccttggaactgctaagaatggccagtgtcccgattccccacccttgtctctggccactctgtcctaccctcaggcccttgaaacactggttctggatttggactctgctgtgaaagtagctgggagcagaagcctgcttaggggccagtggaggaggttgtctccagtaggagatttttataaaaccttaccagcctcccccaaaggtaactttggcagcaaggggagataatgcccctctttgcctccttgagagtgaggcaaggaaacaaaactatcccagggaccaactttaccatcgggttagaacttgactgccttcctctcttcaccatgtgaggtgaggaggctctgagcccttcagttgcctgcacaaacctgactttggctactggtgactcaatctgccaaatgtgctgcaaacctgtttcctcccaattacagcaagactgtcagcctcaaaaaaaaaaaaaaaaaaa

SEQ ID NO: 2153 - DNA, 2025 bp, Cricetulus griseus
caaccgctcctgtcccccagtggtatccacctcaataacatgggacctccgcatccgcagccatctccctgctcgaaatcccacggaaacaccatccagccgtcaccgcaaaagttgaggagcccctcaagaccctgccggagaagaagaaattccggcaccggcccgagccgctcttcatcccgccaccgccttcttcctatactcccaaccccacctcttactcgggggccaccctgtaccagagccagctgcgctccccacgcatcctcggggaccacctgctcctggacccggcccacgagctgcccccctacacaccgccacccatgctgagcccggtgcgccagggctcagggctcttcagcaatgtcctcatctccggtcacggcccaggagtgcacccccagctgcccctcactcccctcacgcccacgccacgagtgctgctgtgccgctccagcagcatcgatggcagcaatgtgacagtcaccccaggacctggagagcagactgtggatgttgaaccacgcatcaacattggcttgagattccaagcagagatcccagaactgcaagatgtctccgccctggctcaggatacacacaaggccacactggtgtggaagccgtggcctgagctggaaaaccaggccctccagcaacaagtggagaaccttctgaacctgtgctgttcgagtgcgctgccaggcggaggggaccaattctgaatttgctttgcactctctctttgaggccaaaggtgatgtgatggctaccctggaaatgctgctgctgcggaagccagtcaggttaaaatgtcatcctttagcaaattaccactatgccggttctgacaagtggacatctctagaaagaaaactgtttaataaagcgttggccacttatagcaaggactttatttttgtacagaagatggtgaagtccaagaccgtggctcagtgcgtggagtactactacacttggaagaaaataatgcggttagggaggagacaccggacacgcctggcggaaatcattgatgactgcatgacgagtgaagaggaagaagaggcagaggaggaagaggaggacccagaggaagataggaaatccataaaagaagaggagagtgaagtgcccaagtcaccagagccaccacctgtccctgccctggctcccactgaagggccacccatgcaggccgttggccaaccatcaggctctttcatctgtgaaatgcccaactgtggggctgtgttcagctcccgacaggcactgaatggccatgcccgcatccatggcggcaccaaccaagtgaccaagacccgaggtgctgtcccctctgggaagcagaagccaggtggcactcagagcgggtactgctcagtaaagagttcaccatctcacagcaccaccagtggagagacagaccccaccactatcttcccctgcaaggaatgtggcaaggtcttcttcaagatcaaaagccggaatgcacacatgaaaacccaccggcagcaagaggagcagcagaggcagaaggctcagaaggcagctttcgcagcagagatggcagccaccatcgagaggactactgggccggtgggggcacctgagctgctgcccctggaccagctgagtctgatgaagccagtcaaggacgtggacatcctggatgacgatgtggttcagcagttaggggccatggatgaggccgaggtggtgggcacgggatcttctcttggatgaccaagattcggttttgcttcagggtgatacagaactctaagcccccgttcatcacctagagacacagaagccacggcctccaccttcgttggtcaggaaacctggacttcctgctcctttgaaacccttttaaactacctgtttaaaaagtggtccttttcttcaggttaagggaggggaaaaaatccagttctttctcttttaccttcttttaaattgtttttgttggggttgggggaaataaaaaaaattggcaacaacaaaaaaaaaaaa

SEQ ID NO: 2154 - DNA, 2025 bp, Cricetulus griseus
gctgctggtggcgtccgaggctccaggcttggcgagaagggcttgcggcggcgtgtcgggccgttggtatcgtggctgccgaggccacccgctcctggtcatgagaggagaaagagtcctgaagcaaagacatctaagagagaaaatatttaagggccatgcaagccagctgtaaccaactgcatgatcctccaggcacttcaagtgatggtgatgcctcaggctcccagtgtgttcacccatcaagagtgacagaaggttttcatcctggagatgtacatatccaaataaactctggacctaaagaccatcctgaaaatccgagctctagaaatacaaggtcaggtgtctgtagctgtgcccacgggtgtgcacacagtcatttccggagtcactcctacagtgaagcaaggccacctgatgactttgccacagagtctggagatcatggaaatggctccttctcagaattccgctatctcttcaagtggttgcagaaaagtcttccttatattttgattctgggtattaaacttgttatgcagcatataacaggaatttctcttggaattgggctgctaacaacttttatgtatgcaaacaaaagcattgtaaatcaggtttttctaagagaacggtcatcaaagattcagtgtgcttggttattggtgttcctagcaggttcttctgttcttttatattacacctttcattctcaatcactttattacagcttaattttcttaaatcctacactggatcagttgagcttttgggaagttctttggattgttggaattacagactttattctgaaattcttcttcatgggtttaaaatgcctagttttactggtgccttctttcatcatgccttttaaatcaaagggttattggtatatgcttttagaagaattgtgtcagtattaccgaatttttgtccccataccagtttggtttcggtaccttataagctatggggagtttggtaatgtaactagatggagtcttgggatattgctggctttactctacctcatactaaaacttttggacttttttggacatttgagaactttcagaaaagttttgcgagtattttttacacgaccgagttatggagtgtctgccagcaagagacagtgttcagatgctgatggtatttgttcaatatgtcaagctgaatttcagaagccagttcttctcatttgtcagcatatattctgtgaagaatgcattaccttgtggtttaaccgagagaaaacatgtccactgtgcagaactgtgatttcagatcatataaacaaatggaaagatggagccacttcatcacaccttcagatgtactaagttgtacaaactattaaggccacaaaacactaattttattgaaaaaaggtattaattgatttccagtagaaaaaaatgtttcaaaatggtcttagggtatcacacgacatgtttgtagttaagtttctcaaagatttaagtgcaggagcccagtatttttaaagtatatattaaacttaataagtatgcaacatttattccacttatttgacagataattgcagtgttaaactggaaatgggttttcttgtcagtaaaaccaaaacagcaattagaaactagaactagccattttaaaggggtacagttcctgacatggttttcagaataaagattttgcataatattttaagatatatagtatctgaaacaattttcatcagacttttataattcccattctaaaaatgtttaaatttttcacaaaattgtatttttaaatgaaagttctaaatgctatattttacctataacaattacattttttaagtgaagatttattgaggattatatattttaatactgtattatgctctatgactagtaatcagtgagaataaatgatttagattcattcactttgtggacctcataatgtcctttgccatcagctgtactgttcacagtcttgtatagtaccatgtaataacttgaaacaactaattaaaatgatttg

SEQ ID NO: 2155 - DNA, 2025 bp, Cricetulus griseus
aggcgcggtggggaagatggcgtaccagagcctcccggctggagtacctgcagatcccgccggtcagccgcgcctacactaccgcctgcgtcctcaccaccgcggccgtgcagttggaattgatcacaccttttcagttatacttcaatcctgaactaatttttaaacactttcaaatatggagactaatcaccaatttcttattttttggtccagttggattcaattttttgtttaacatgatttttctatatcgttactgtcgaatgctagaagaaggctctttccgaggtcggacagcagactttgtatttatgttcctttttggtggatttttaatgactctttttgggttgtttgtgagcttagtttttttaggccaggcctttacaataatgctggtgtacgtgtggagccgaaggaacccctatgtccgcatgaacttctttggtcttctaaacttccaggccccctttctgccctgggtgctcatggggttttccttgttattggggaactcaattattgtggaccttctgggtattgcagttgggcacatatattttttcttggaagatatatttcccaatcagcctggtggaataagaattctgaaaacaccttctattttgaggactatttttgatacaccagatgaggatcccaattacaacccactacctgaagagcggccaggaggctttgcctggggtgagggccagcgccttggagggtaacacagctgtgccagttatgaggcccatctgagaaggactcagtgaaatgcccattgggattcttttatcccttattgcaaaagtgtggacacttttgacagcgtgacagattttaactccagaagcactttacggaatggtacactgactaacacagaagacatttccaacagtttgccaggggttcctcactatgctggtactaaaagtataacctcttggagccaaaaaatggagaaacagataccctgctgcctctaaaagtacatgggtacttgagctctgtggcgtaaggcagggtgttcctactcttctttgatagacaaggccgtggtgtaaatggaagtttcagagaggacaaaataaactgaattccaatctaaaagacacacctaaagcacagggttttggtttggtttttattagacttacaatatatgttcatttaaagatgaatggacatgccaattgcatctccctcggagattacatttttattatactttggttgtgtttttttctactatgaatttttacttgtttcttccacttctttttctgtcatccttctgtgtcctcctgtcttttatatttcttttgtacttgtgtgaggtaaaacatccacatcctggatcttgaaacagaaccataacactgtctctagggtcgtctgggaattagggaacactggagctattggcatgttgtgtaacatgcttcctagaattgccatgccttctgccactgttttattttgtggctgtggtttcctttgacaggtgagttctatctgtgttagccaatgtcccgcccttcgctcctcttcaggatgactaagctacttattattttgagttttcttcaaagctcttgaactttgcttctatggctgagcgactctgtgcagaagtctgcagtcagttcctggcctttatcaaatgcatatctctgtcttcctctgaagcttgctcccactttacctagcagagacctcaatttaagtctcttcagtctttcaagacccaacattcaaatcttaatactgaagtctagttcattatcttctttaaatccttatgaagcttcaaacctgtactaaaattcttataccaaaccatatattgtcttgtactgttcctagatgctacgtgtatgttagttttgtttccttcatgagaatgtaagctccttaagggcagggactatgtcttaatttttgtatccaccacagtgcctagcactgtgcttggcacatgggtgctgaataaatactttgttcactgatcag

SEQ ID NO: 2156 - DNA, 2025 bp, Cricetulus griseus
gcaaactggtagggtcaggtctgttcggcatagaggtgtcactcaagtctttttagaacaagacagagcacgcagaggtactgtttatatgccactgtccaactcaagacttgtgtcaagaataacagtagaggaaggagaatccagcaggtcctcagctgccacacagcgccatccagcaatcacactagacctgcaagtcaggaggattcgtcctggagaaactagagatagggatagcattgcaaatagaacccgatctagggcaggattggcagaaagtacagtggaaagcaacagtgggggctttcacagaactatttctcatttagagaggtcaggtgttcgaacctatgtgagtaccataacagttcctcttcggaggatttctgagaacgaggtggttgagccatcgtctgtggctcttcggtcaattttaaggcagattatgactgggtttggagagctgagttctctaatggaggtggagcctgagtcagagaatcaaagaagtggtcagcgtttaccagagctgtacctagaactgaataacatggatgtggctaacaacagcactcagcagggtggaggttcctcacaagccaggcaggcccaagatgtcagtgctgaaatgctagatgtaagtgagcccgcctcgccacaggtcagaaatggtggcaataggaatagaaggcagttacgaagggcagacagtgtagttgaggctgggacattacccatactgcgccttgctcatttcttcttactgaatgaaggcgatgatgatccaattcgtggcttaaccaaagagcagattgacaatctttctactaggagctatgaacaaaacggggttgacagtgagttaggtaaagtgtgcagtgtgtgtatcagcgactatgtggctgggaacaagctccggcagctgccttgtctacatgaatttcacattcactgtatcgatcgctggttgtcggagaactgcacctgtcctgtctgccggcagcctgttttagagtttggggctgcaaacaatgggtgatatgacgggatctggtcagtactgtatgttattggagccacatagtcaacacttcttgagttacttgtgatgaggtaaccaagaaaaacctgtcaaattatagtttgcactatttttttgtgtgctttttttaaaaaacttgttacaaagaggttgtttatataaaatttaaaatgcagatgttaaattatccaaaagtaaagaatagttaatattgctagaaccaaataaccttcaaaatgtttttattttggtaattttgtcatgctaagcacttttgtatgttaggaatcttgattctttctcttaatactgcagtaggttttgctggggttttccagtttcagctcagtgctatgtttggacactactgtctgagtctttgtagactgtttggctgaatgtctgctagatatacttaagttacttgaaataatttaacacgtagcacactgtatgtgtgtatgcagatatgtaactgtggtgaacatatccacatgaaaaactacaagtttgaaacttacttaagctttggggcttagattgcatatgacacagggttaacattgacaagatcatctttaagaggaagtgaattaagatccaggttaaaatagagattgtttactgaagcgtgtctgacaatctgacttactagagaacgagcgatatataataacgaacctagtatttctttgttcgtaaatggaatgtggaaaattttatgacatagtttaagttcatcctttttgtgacttttttagaagtacaaacacttctcggggttaggttgggtttacagcatgcttgacttctcaaatttagttttaaaatttaaaatattttaaaatctattaagtagtgaaatgcatagaaaatatgttaatttggatgccaaaaagctccaaatgaaacaaaagcctttaaagaaccgtagagtttatataaatacaaagtatgcattaaaagtctatttctaccag

SEQ ID NO: 2157 - DNA, 2025 bp, Cricetulus griseus
ggcagctctgttcgggaagggcttctctttcatggaaccagtgctgcataaaacctgactttggcccacgggctgggggaactttctcaccctcgaaggccagagcctgtctgtaggcaccagccgagctgtgctggtcaatggaactcagtgccagctgaaacaggtcagtgaggaacagattttatgtgtcacacctcctggagctggcacagccagggtccccattcatctgcagatcggaggtgctgaggtgcctggctcctggacctttcactacaaggaagaccccattgtgttagacatcagccccaactgtggctacagtggctcccacgtcacgatccatggccagcatctgacttcagtgtggcacctggcactattattccgtgatgaacaaagtacagtgcagagcaggcagtgtgcagggcagtttctggaacaacagcgtcagtgccgcctgcctgaatatgtggtccgaacctcgaggggtgggcaacgagggaatctgagtgcgtggggggatggagcagctggcttcacactgccttggtttggcttggcgctgtggcagactgcgtgagtgtgaacgtgaccgtgggtggtgagatctgccaacacgagctccggggggatgtggtggtctgccccctgcccccctccctgcaacttggcaaggatggtgtcccattgcaggtctgtgtagatggtgggtgtcacaacctgggccaagtggttctgtcagggccaggcagggcctcacagagtaccctccttatggctctgctggccttgatcctgctcgtggctgtgctggccattgctctagtcttcaactcccggagacggaaaaagcagctaggcttccggacctctgagccacgaagaattttcagatagtcgggatgggacaactgtcccactgcttcggacagagtctattcggctcaaggatctggacaggacgctcctggctgaggtcaaggatgtactgattccccatgaacgagtggtcatccatagtgaccaagtcattggcaaaggccactttggcgttgtctaccatggagaatatacagatgaggcacagaatcagatccactgtgccattaagtcactgagtcgcatcacagaggtacaggaagtggaagctttcctacgggaggggctgctcatgcgtggcctacaccatcccaacattctggctctcatcggtattgtgctgcccccagagggccttcctcgggtgcttctgccctatatgcgccacggagacctgcttcatttcatccgctcccctcagaggaaccccactgtgaaggacctcatcagctttggcctgcaggtagcctgtgggatggagtacctggcagagcagaagtttgtgcaccgggacctggctgccaggaactgcatgctggacgagtcattcacagtcaaggtggctgactttggtctggcccgagacgtcctagacaaggaatactatagtgtccgacagcatcgccatgcccgcctgcctgtcaagtggatggccctggagagccttcagacctacagattcaccaccaaatctgacgtgtggtcatttggtgtgttgctgtgggagctgctaacacggggtgctccaccatacccccatatcaacccttttgacctcacttgcttcctggctcagggccgtcgcctgccgcagcctgagtattgtcccgattcactgtaccaggtgatgctgcaatgctgggaggctgacccagcagcgcgacccaccttcagagtcctagtgatggaggtagagcaggtagtgagctctctgctcggggaccactacgtgcagctgtccccaggttatgtgaacctaggcctcagcaccttggatgatgtaaatgtgcttccggagcagccacagtcctcgcctcagcatcacaggagcacatcaaggccccggcctctatcagagccacctctgcccacttgacctaagccctcagtaggccatggggactatatctgctaagtggc

SEQ ID NO: 2158 - DNA, 2025 bp, Cricetulus griseus
cggagattggcagtctcactgagctccatcctccggttctttgtcaagtcccttgccagcaaaacaccggactggctgggttacatgcgcttcctcatcattcccctaggttctcatccagtggccaaatacttgggctcagtggatagtagatacagtagcaccttccttgattctgcctggagagacctgttcagtcgctcagagcccccagtgtcagagccactggatgtggtgagtcgtgtgatgcaatatgtcaatggagcagccacaacgcaccagctgcctgtggccgaagccatgttgacctgcaggcataagttccctgatgaagactcctatcagaagtttattccctttattggtgttgtgaaagtgggccttgttgaagactcaccctccactgcaggcgatggagatgattcacctgtggtcagccttactgtgcccctccacatcaccaccctcaagctcaggtctgagccgagatgctacagctacccctccctccatccccatccatgagcagcgccctcgccattgtggggagcccaaatagcccatatggggatgtgattggccttcaggtggactactggctgggccaccctggggatcgaaggagagaaggtgacaagagggatgccagctcaaagaatacccttaagagtgtcttccgctcagttcaggtttctcgcctgcctcatgcaggggaagcccagctttctggcaccatggcaatgactgttgtcaccaaagagaagaacaagaaagtgcccactatcttcctgagcaagaagccccgggagaaggaggtggattctaagagccaggtcattgagggcatcagccgcctcatctgctctgcaaagcagcaacagaccatgctgagagtgtccatcgatggagttgagtggagtgacatcaagttcttccagctggctgcccagtggcccactcatgtcaagcactttccggtgggactcttcagtggcagcaagactacctgagaccctgcctcccaaccactccctcctggcactgcctcacccacctgcaggcagggaaaggccagcaagccccagcccagcctccctgtcccagcactggggcctgcctctacatgcccagtcctggaggacactgccactggggatgcagccctccccctctcactgcccagctcatctctggactacccacctccctactgttctaggcccagagctgggtagttctgccttctggtgcccataatccctataattgaataatctggaccttccttcacctcactcaccccctgcagcactggttctctttctggaaacgaaaaacctggagttctggtacacagtgagacagcccagcactttaccagagcctggccaccaggctctcaatttccaaggctcttctcttggttgctacacaccctgccttcctccctttgcctcccgtcctcccacctataatagctctgtggcttcatgaggtaggaggcagcaaagcctgcccccagcatacacattatctgtgactcttacccagccatatgtctcccttttcctgtgtcagcttgcctccccttccctactctgtcttcccacttcctctgtggcagggtaacagaaagaagcccatctccaccaggtcttcttccagcagccttgtttccctctcagccatggatgggtcccagacctacctcagcctcctcaatgtcttcaggagaggttgagaaggggcagagctggcccagcctccatgccctctggcatctctggaacttgtctgtttccctctcactgcttctaagcagtgtggcacgaaactgcacttggaacatatttttctcattctccacaccccagactcttcaagtccttcttcactgcccagcccaactgtccagagtgtcatctgggcctgagaataagtggggtgggaagattggggccatgttggatttttttcattcaataaactggtgatttcttaaaaaaaaaaaaaaaaaaaaaaaaa

SEQ ID NO: 2159 - DNA, 2024 bp, Cricetulus griseus
gggcttctgggaaacatggcggtcggctgggaccgtagcactagcatgactatatgaagggagaggaaggtttctctgaagatgaggcgactgaatcggaaaaaaaccttaagtttggtgaaagagttagacgcctttcccaaggttcctgacagctatgtggagacatcagccagtgggggaacagtttctttaatagcatttaccactatggctttattaacaataatggaattctcagtgtatcaagatacctggatgaagtatgaatatgaagtagacaaggatttttctagcaagttgagaattaacattgacatcaccgtcgccatgaagtgccagtatgttggagcagatgttctggatttagcagagaccatggttgcatctgcagatggtctatcttatgaaccagcagtatttgacctttcaccccatcagagagagtggcagaggatgctgcagctgattcagagtaggctgcaagaagagcattcccttcaagatgtgatcttcaaaagtgcttttaaaagttcgtcaacggcactgccaccaagggaagatgatttgttactgactccagatgcgtgcagaatccacggtcatctatatgtcaataaagtagcagggaattttcacataactgtgggcaaggcaatcccacatcctcgggggcatgcacatttggcagcacttgtgaaccatgattcttacaacttttctcacagaatagatcatttatcttttggagagcttgttccaggaattattaatcctttggatgggactgaaaagattgctgtagatcacaaccagatgttccaatatttcattacagttgtgccaacaaagctacacacatacaagatttcagccgacacccatcagttctctgtgacagagagggaacgcatcattaaccatgctgcaggcagccatggagtctctggaatatttatgaaatatgatctcagttctctcatggtgacagtcactgaggaacacatgcctttctggcagttttttgtaagactctgtggaattattggaggaatcttttcaacaacaggcatgttacatggaattggaaaatttatagtggaaataatttgctgtcggttcagacttggatcctacaagcccgtccattctatcccctttgaagatggccacacagacaaccacttacctcttttagaaaataatacacattagtacctcctgggtggagaaaaactttttgcctgaaacaaaaatttttctaataataaaatgtgcaatatattcaaagaaaagaaaatatgagaacctggaaacacactcacttaaaaaaaaaaaaaacagccaaggaaaaatacaaactgaagtcgtcctgtatatgttgtgtctgttacaaatgtcctagaagaaattatgcagctaacaggaaaggcagcccagctggagtgccagggtgaagacagcacctctgatgctctcccagcaaaggaacatctcggagagcagagcctagaggatagaagggtaaaccctttttaaagaaagggcattgataaatagcaaatgtgtgtcgtctttttgtttttaaaaagtaatgtcagaataaaatagtataaaacaatatggaaaactagtctagactttaaaaaactgtaatccgctcacatggttaataaaggaagcagggactggccctgtgttacagccataccaatgaatgtgaagccatatcaacaaggccatgctgtccagggctggattctgatggaggtgactgctggccacttgagactgaacgttgcttttctatgtctactgctagaaaattcagtgaggtttcagggaagaaaatactgatgtagaattactttcggtattataatgtctttaaaagagatttttaaattatttttaattgcttccatgttttctaagtgccacgttaaaattttattgagatgtatcttttccattaaaagtgactctgggaatttgtttaaactttgattttcagatagtcagga

SEQ ID NO: 2160 - DNA, 2024 bp, Cricetulus griseus
tgcacagctggcagagcagacctgcccccacgacgtggagatgacacctgtgcagcgccgcatcgagcctcgatctgctgatgactccctttctggtgttgtacgctgcctctactttgctgacacattccttcgagatgcaacccaccatgggcccaccatgtgggcagggacgaactcaggctccgtatttgcctatgcgctggaggttccagcagccacagcaggtggcgaaaagcggtctgagcaggcagtggaggctgtactggggcaaagaggtacagctgatgcaccgggcacctgtggtggccattgctgtgttggatggtcgtggccgtccactgcctgagccctagctgtgctcattgcatctgaggaacagttcaaagtattcacactacccaaggtgagtgctaagaccaaattcaagctgacagcccatgaaggctgtcgtgtgcggaaggtagccctggctacatttgccagcgtgatatctgaggactatgctgagacctgccttgcctgcctcaccaacttgggcgatgtcccatgttttttctgtgcctggcctgaggcctcaggtgcactactcctgtatccggaaggaagacatcagtggcatcgcttcctgtgtcttcacacgccatggccagggcttttacctgatttctccatcggaatttgagcgcttctccctgagtgctcgcaatatcacagagcccctctgctctctagatatcagctgcccccgaaatgccacccaacccagccataggcctcaagagtcacccaagctgagccaggccaatgggaccagaaacatcaccctggccccagagagctgtgaaggaagccctaactctatccacagcaagcgagctgacatcacagagctacccgaggccacactctcacctgtgtccattgactcagctactagtggggataccacgttggacaccacaggggatgtcacagtggaatatgtaaaggatttcctggggtgaggccagctgctctttcccaagcctccatccccagggcagctaggggtcttcccaccccagcccttctgactactgcccctccccagctctcctgaggactctgagaagaaccttcggaacctggaagcagatgaagcccgggcctacacccttctgattaaatgaggtgctgtgaggcagccaggccttaccacgcagcagctgccatcccttgctccagctgggaccctggcaggcctctataatggtgtcattcctggaagcctagctgccttcccttagctgtcagaagcttaggggacccacagttatgaaaggggctgtcctgtcaagactcaaggtcttgaacatttagagggccacctctgagtctgggtgtaggaattgaggctcatcctgttcagtgagcccatttcacaggacagtcactgagggtggtaggtcctgcctgttgagccagcacatggagcttatgtgcctaccatatcctgctatggacccaacctagctggaacctggagctatctggaccttggtagctagtgcctctgcaacctacattgggcatagatactactcctatcctgttacttggttccctcctagatccccagcaagcccttcctcaggctgtcattaaagggcctgcctgcccgccctgcacagattggtatggcctgggtttgctctccctagccatcaccatctgactgatgctgggccctaaagacacccccagcttgaaggtcagctggagggagtgtgccaggatcctctgtcttgcactccatactgtcctttatttctcctcaagcagagtatttttctaatgcctggactacgctggccagtaatttctaaagcagttttggtacttgcttctggcctgtgtgtatgtgaggatgggcttccctgtagactccaccttgggctttctgtctttttttaaaaattagttttaatattaaaagtactgatttttaatattgaaaataaaagcatttaatatcttttaaa

SEQ ID NO: 2161 - DNA, 2024 bp, Cricetulus griseus
ttttttgttccaagtggaacaacggcaaatctcatttgaggaataaaccttgtgcagtcgtacagtacaaatcatggaaaggtggtggaattattgcagtgagttatgaagctcgtgcgtttggggtcactagaacatgtgggcagacgatgctaagaagttatgtccagatcttctactggcccaagttcgtgaatcccgtgggaaagctaacctcaccaagtaccgggaagctagtgttgaagtcatggagataatgtctcactttgctgtgattgaacgtgccagcattgatgaggcttatatagatctgaccagtgctgtgcaagacagacttgaaaagttacaaggccagcctatctcagcagacttgttacccaccacgtacattgaagggctgccccgaggccctacagtagaagaaccgccagactctggtctcacatgggtcagtcccacagctcttcagccagatgccaattcgtaaaatccgcagtcttgggggaaagctcggggcctctgtcattgaaatccttggggtagagtacatgggtgaactgacccagttcactgaatctcagctacagagtcatttcggagagaagaatggatcatggctgtatgccatgtgccgagggattgaacatgatccagttaaacccaggcagttacctaaaagtattggctgtagtaagaacttcccagggaaaacggctctggctactcgggatcaggtacaatggtggctcttgcagttagccctggaacttgaggagagactaaccaaagaccgaaatgataatgacagggtggccactcagttggctgtcagtattcgtgtacaaggagacaaacgtcttagcagtctgcgccgttgctgtgccctcactcaatatgatgctcataagatgagccaggatgcatttgctgccatcaggaattgtaatacttctggaatccaaactgagtggtcccctcccctcacaatgctcttcctttgtgctaccaaattctctgcctctgccccttcatcttgcacagacatcaccgtcttcttgagtaatgactcaagttgtcagccaaaggtgccaactgctggctctgaaactaagacccagggaactggtgcagctttgcccacctctaaaaaggcagccacctctctggagtctttttttcaaaaagctgctgaaaagcagagactgaaagagacttcccttgtacctctcaacacgttcacagacaagtcaccacccaagccctcgctaccattccaaaccagccggaccacaggaattgagcccttctttaagcagaagaggctgctgtcacagcagacacagcttagtaattcttcagctgcttcccttccacagaaggattctggagtgacagcaagctgttttccaactgagtgtgcagatggtggcccgccttatgaaagcgttttggagtcagtaccctctggagggatttctacagaaatggacatggctgggaacagtccagacatgcttgagtcttcaatttacaactctgaggtggtggcccaaagggcaactgaggaccaagtgctctgtgagaagtgtgactccttagtcccagtatgggacatgccagaacacacagactatcattttgcattggagttgcagaagtcttttttgcagccttgtacttcaaaaccccaagctgttcctgccatgtctcctcaaggcaaaagaaatcccaagagtcctttggcttccagtaataaacgccttaggattcatggcatgcagacactggaatcattttttaagccgttgacacattaatgctgccctcaggcttgcaggagagctttactagtaacttgagagataaaatcatgttgatttctcaagagaaatctatgaaatttttaatacaaaattaggttaaatttctctcttccatgggattctaaagctgttgctgatcaaaatgtttttattcttcagggagacactgtcataaaaggtgaaaggaaccttggcaaactc

SEQ ID NO: 2162 - DNA, 2023 bp, Cricetulus griseus
  modified_base (405)..(405): a, c, t, g, unknown or other
  modified_base (953)..(953): a, c, t, g, unknown or other
gttagtttttgtggcctcactcagcttcctccagacctacaaggagccccctgggctctgaaaggttgattgctgcccactggccatggagacgaagctgcccccagcgagcacccccacaagcccctcctccccagggctgtctccagtgccaccaccagacaaggtggacggcttctcccgccggtccctccgcagggctcggccccgacgctcacacagttcttctcagtttcgctaccagagcaaccagcaagagctcactccactgcccctgctcaaagatgtgccagcttctgagttgcatgagttgctgagccggaagctggcccaatgcggggtgatgtttgacttcttggactgtgtggctgacctcaaggggaggaggtgaagcgtgcagccctnaatgaactggtggaatgtggtggggagcgacccgggggtgtcctcatcgagcctgtctacccagatatcatccgaaatatctttcggaccctgccacccagtgagaaccctgaatttgaccctgaagaggatgagcccaacctcgagccttcgtggccacatctacagctggtgtatgagtttttccttcgtttcttggagagtccagacttccagccctctgtggccaagagatatgtggatcaaaagtttgtcctgatgctcctggagctatttgacagcgaggaccctcgggaacgtgagtacctcaagaccatcttgcatcgggtgtacggcaagttcctgggtcgtccggccctatatccgaaaacaagtgcaaccacatcttcctccggttcatctatgagctggaacacttcaacggtgtggctgagctgctggagatcttaggaagcatcatcaatggctttgcgctccccctgaagactgagcacaagcagttcctggttcgagtcctgatccccttgcactctgttaagtcgctgtcngtttttctatgcccagctggcatactgtgtggtgcagttcctggagaaggatgccaccttgacagagcatgttatccgggggctcctcaaatactggcctaaaacctgcacccagaaggaggtgatgttcctgggtgagatggaagagattctggatgtcatcgagccttcccagtttgtgaagatccaggagcccctcttcaagcaggtggctcgctgtgtctccagcccccatttccaggttgcagagcgggctctgtatttctggaataatgagtacatcctgagcctcattgaggacaactgccacactgtgctgcctgcggtatttgggaccctctaccaagtatccaaggagcactggaatcaaaccatcgtatcgctgatctacaatgtgctcaagactttcatggagatgaatgggaagctgttcgatgagcttacagcttcctacaagctggagaagcagcaggagcagcagaaggcccaggaacgtcaagagctatggagaggtttggaagagctgcagctacgccggctacaggggacccaaggggacaaggaagcccccgtccctcagcctacaccccaggtggctgccagtgggggtcagagctagacaaagaaggggagaagctaaacccagagctatcagcccctccatcccttctgcccaggggcccagtgaggcccacgactccccgtggccttgtcagagtggttctagactccctgccagccccatgggaacagctttcatggggggagacaagaacgcaagatggtagtcttggcagcagaactctcaggcctttgtggcaagattctggcaagactagaccagggcaagtatgccactgggaagctgccatcagggatcctcccctgccctaatacagttgggctctcatccctgctcctggcctggggcatggaccctcggcacctgacctggcctgcctcagcctggtcagggccttcctcatccccaccatgggggcacagtctatttattctgcccagctcaccctcaacaagacactgtccagggacactctcctctcctctcc

SEQ ID NO: 2163 - DNA, 2022 bp, Cricetulus griseus
tcagattcctgacattttgattcccctgaaggcaaatcggtactctggcactctagtgcccatgttctgggtgcagcagctgagcaacaaatgggtgctgttctctgccgaggtccaagtacggaatctggcttttaccatgatttcttcctgggaaaagagcggacagtccgaagctcagagttgccccttttagagcggatttgccaggagatcatagctgctgcacaaccattccggaggctagaagtttctcgggatcagcttcgccagctcttcaaggataaccactttaagcttcatgtgatcgaggagaaagtgactggcccaacagcaacagtgtatgggtgtggcatgtcagttgatctttgccggggaccccatcttcggcacaccggacagattggagcactgaagctgctgacgaactcctcagccttgtggaggtcctcagcagctccagagacactgcagagagtgtcgggcatttctttccccaacacagagttactgagggactgggaagcacagagggaggaagcagagctcagagaccacaggcgcatcgggaaggaacaggagctcttcttcttccatgaactgagccctgggagctgctttttcctgccacgaggaacaagagtctataatgccctggtgactttcatcagggctgagtacgcccaacgtggtttctcagaggtgaaaactcccacgctgttttctacaaaactctgggaacagtcagggcactgggagcattatagggcagacatgttttccctgaagcccccaggcactaatggtcctgacatctctcagagtggccaccctgccaggtgtcccaaagacgcacttgctctcaagcccatgaattgtcctgcacactgcctgatgttcgcccaccggcccagatcctggcgggaactgcctgtgcggctggctgattttggagtcctgcatcgtgctgaggcctctggcagtctgggaggattaacacgcctatggcgcttccaacaggacgatgctcacatcttctgtgcaccaaatcagctggaagcagagatccgaggctgccttgattttctccgatctgtttatgctgttcttggtttttccttccacttggctttatctacccggccatctggtttcctaggggagcctcacctgtgggaccaggctgagcaggtcctacaacaagccttggaggagtttggagaaccctgggaccttaaccctggagatggcgctttctatggacctaagattgatgtgcacctccatgatgccctgggtcggccccatcaatgtggaacaatccagcttgacttccaactgccgctgagatttaacctacagtacaaggggcagatgggggccctggagcatccggtccttatccaccgagcagtgcttggttctgtggagaggatgttgggagtgctggcggaaagctgtgggggaaagtggcccctgtggctgtccccattccaggtggtagtcatccctgtggggacagagcaagaggaatatgccaggcaggtacaacaatgtctacaggctgcagggctcgtcagtgacctcgatgctgactctggactgaccctcagcaggagaatccgccgggcccagcttgcccactacaattttcagtttgtggttggccagagagagcagagtaagagaactgtgaacatacggactcgagagaaccggcagctcggggagcgaggcttggccgagtctgtgcagaggctgctggagttacagaacgccagggtccccaatgccgaagaaatgttctgagtttgttcactggtgaggcatagactcatgagagctgcctatcccttaccataggagttcctagcccaactggcagcccagaatgtcccagactcctcagatagctttcctgaaaatgcacttggtttgaggggctgtgcactggaaggaatgctgtactgtttacataggaggagaataaaaaataaacttgaagaccaaaaaaaaaaaaaa

SEQ ID NO: 2164 - DNA, 2022 bp, Cricetulus griseus
ccagacagtcatctctatcagaaaaaaacctagccagagccttcccctgtaacaaggaagaaaggcttatgagaaagcagacaaagcaaaggtcaaggagcacaacactcggattctggtgcttccgaggctagtctctcacctccttcctccccaccaagccggccccgtaatgaactgaacgtgtttaatcgtcttactgtttctcagggaaacacgtcagttcagcaggacaagattctaccgatgatctcctcttcactggatcaaaagatcgtacttgtaaagtttggaatctcgtgactggacaggaaattatgtccctattcgaacattaacatcttcaggtcaagttactcttggagaagcttgttctgcaagcagcagccggacagtagctattccttctggagagagccagatcaatcagattgcactaaatccaaccggcactttcctctatgcggcctctggaaatgccgtcagaatgtgggatcttaaaaggtttcagtctacaggaaagctaaccggacacctgggtcctgttatgtgccttacggtagaccagatttccaacggacaagatctaatcatcactggctctaaggaccattacatcaaaatgtttgatgtgactgaaggggctcttggaactgtaagccccacccacaactttgagcctcctcattatgatggtatagaagcactgaccattcaaggggataacctattcagtgggtccagagacaatggaatcaagaaatgggacttagctcagaaaggtcttcttcagcaagtcccaaatgcacacaaggactgggtctgtgccctgggcctggtgccaggccacccagttttgctcagcggctgcagaggcggcattttgaaactctggaatgtggatacttttgtgccagttggagagatgagaggtcatgacagtcccatcaatgccatatgtgtgaattccacccatgttttcactgcagctgatgatcggactgtgagaatctggaaagcccacaatttgcaagatggtcaaatctctgacacaggcgatctgggggaagatattgccagtaattaaccatgaatggagataagcataaactgacactgtgatgatactctgcattctttattgaagatgatgtcctgcacttattattaatggaaccaactggaaatatatctgaatctatctgctagataaaaatgtattctaataaaactgtactgtcttgtatgtgtaatattaatatctaccaacacatatgcttcttacaattgatgtattgcttgtatcacactttgaccatggctgaatttttgtgcctagttataaaagatactttcaaattattatcagcaatttttgtcagtctctaaggggttacaaatttcaaagctctttcaatataatggaaagaaactgttattgatgatttctcataattgaccttagtctgctaagaaagataacagtttgtgctaaaatgttcacgtttacctatattgaccaaagctttcagttgttctacattctgtgctcaggattgcaatgccacagagctgttgcgtttctagtgctgggcgttctagttctgtgacggtgagctgttgatttcctaacagaaagatattttgatctattttcctatggaattgtttctattattatcttttagtttctttttgtttaatagcaatagctcctttttcttcctctgatttttttatatgctgctaaatatattttaaatatactgtgtttgcacacattggtagtgtgtttgcacacattggtagatttatcatttgtggtgggaaacaatgtaaataggtagattgtaaagagagactatctggcattatgactgtatgaatttctaaatgctgtttgattgggttttgttaaaggatgtataatttatctgtctgctcagaatattaatttgtaaattctgcaagtttaattttatgtaacggtataacttttgaaattattgtcttgtgtttttt

SEQ ID NO: 2165 - DNA, 2022 bp, Cricetulus griseus
  modified_base (2006)..(2006): a, c, t, g, unknown or other
  modified_base (2014)..(2014): a, c, t, g, unknown or other
gaagttaaaagagaataataagcgaatgccttttacctatcacaactaaatctaaacgaagccttccccaccccccgtcgtgggatgaactgtgaccaagagaaggaaatcattgaggtccattctgcgtcagagcatacaggaagatgagtatgtccagaggtgtaactctaattctgcagtgaaggtcaccagccaagggcagccctcgccagtggaaccccgaggacccttttatttctgcaggttgttgcttgatgacctgggaatgaattcctgggacagaaggaagaattttcatttgttgaagaaaaaattcaaaaattgttgagagagctaaagaatctggactcacgtcagtgccgtgagacacacaagatagcagtgttttacattgctgaaggaagccttatctgtgccacgtgcatcaatgccagcagagcggtgaagtgcctcatcccactctatcagagcttctacgaagagcgagctctgtatctggaagcaataattcaaaaccaccgggaagtcatgacatttgaggatttcgcagctcaagtcttttctccctctcccagctactctctcagtggaacggattaaaatacatagcggtctcaggtctcattatgatccttgggcaaggggtcttgatctccagcctgaatatggaccccaagaaaaccctccatgtggaagacacaggcaagactcccctgctatccccaggaccctcaaatctagactccaggaaactgccctgtgctagcacgtttgcagcaagccttcccattgctggccaagttcagaagtgatctagtttgtgtggaactttcagacaaggctgtgtctgtatctctgtctgcatatgtctctctctctctctctgtgtgtgtgtgtgtgtgtgtgtgtgtgtgtgtgtgtgtgtgtgtgtgtgtgtgtgtgtgtgtgtgtgtggccaattaatggtcttacccaccccattccccgggtgacagcagcagttttatgtatgtttatgttttacttttttagtccatgggccttggattggtaatagctctggttagagacttagacttggggagcagggactctgataaccatgtttggttggatttagcagttcttgttatttggggtggaaaattaaaatgatcaagttcagtgtttcttttttttcagttggaaaagcaaatattgtgtttttataataaatgtctcttagcaaaattgctaagggtcactcatctggtagagaccctccagagagtgactcatcacatcagtattagtaagtcagccatctgtaataaaagtggcgctaattaccccaaagtgtgatatgactctctgggctcctgcagggtctggccagtgcccttacttctcagcatgctgatttctggatttccataaagagggaaactgatgtttatattcttcttgattagacttttatgctttaaaaagaagaaaagaaatttagcctggtgagtgtactttacagtgtcttcagcagccaagttttcagctcttgagagccctggggaatggactctgactttgtaattggctggttaataggatccttagccttataaaggagaccacacagctccagtgagccatgcaaatcctgtcttcccaactgtcctcaggtgtcaattccttcttgccactaacctgtaatggaggtttgatggaccctctaaaccttccagtgtgtcttatgtgcagctgtgttaccccacacctactgaagggggtgtcacatctaagggaaactccttgtatttgcacccaatttctatgtatatgacacacactgtaagcaaacattttcttagtttcaggtctaccatgtgtagtatgtgtaaatagggggaaattgatagagatgataaattaagttatagcatgttgtttgattgttttgtggtctcttgttatttaacttcccagtgctgcatatctaggttgttctgaggtctaataaaaaaaanaaaaaaanaaaaaaaa

SEQ ID NO: 2166 - DNA, 2022 bp, Cricetulus griseus
actgccaagaactgctgctgctgccaccaccaacccccatggcctacattccagatgggggtgcccccgccacaggggccatccccttggcctctcagtgctgtgtgtgcaaagtggaactgtcagtgagtggccagaacctgctggaccgagacgtcacctccaagtctgaccctttctgtgtcctctttacagaggacaatggcaggtggatggagtatgacagaacagaaacagctatcaacaacctcaacccagccttctccaagaagttcgtgctggactaccacttcgaagaggtgcagaaactcaagttcgccctatttgatcaggacaagtccagtgcacagctggatgaacatgacttcctgggtcagttctcctgcagccttggcacgattgtctccagcaagaagatcactaggcctctgctgctgatgaatgacaagcctgcagggaagggcttgatcacgatcgcagcccaggagctgtcagacaaccgtgtcatcacactgagcctggcgggcaggaagctggataagaaggacctctttgggaaatcagacccgtttcttgagttttataagccaggggatgatggcaaatggatgctagtccatagaactgaggtgatcaagtacactctggaccctgtgtggaagccattcactgtgccattggtgtccttgtgtgatggggacctggagaagcccgttcaggttatgtgctacgactacgacagtaatggaggccatgacttcattggcgagttccagacctctgtgttgcagatgagtgaggctcgggatggtgtcccgctggagatggagtgcatcaaccccaagaagcaaaggaagaagaagagctacaagaactcgggcatcattatcctgagatcatgcaagatacaccgaaactactcattcctggactacatcctgggaggctgccagctcatgttcaccgttggaatagacttcacagcctccaacgggaatcccatggacccttcttctctacactatatcaatcccatgggcaccaacgaatacttgtcagccatttgggcagtgggacagatcattcaggactatgacagtgataagatgtttcctgctctggggttcggggcccagttaccgccagactggaaggtgtcccatgagtttgccatcaacttcaaccccaccaaccctttctgctcaggtgtggatggcatcgcccaggcatactcagcctgcctgccccacatccgcttctatggtcccacaaacttctcccccatcgttaaccatgtggcccggtttgcagcccaggccacacagcagcagacggcaacgcaatacttcatcctcctcatcatcactgacggggtcatcagtgacatggaggagacacggcacgccgtagtgcaggcctctaaactgcccatgtccattatcattgtgggtgtgggcaatgctgactttgcagccatggagtttctggatggggacaaccggagactacgctcacacacaggcgaggaggcagcccgcgacattgtgcagtttgtgcccttccgagagttccgaaatgcagcaaaagaaactctggccaaagcggtgttggcggagctgcctcagcaagtagtgcagtatttcaaacataaaaacctccccccaccaactcagagcctgcctgagcccatgcccagcagcagcatgccagctgagcccccagccaccccaggaacatgcacgttcaccccgcttcaccctgctgcctcgtgggtggccttttttaccagtccacatttttatttttacaaccggacctccacccccaacttcccccagcccagctgggcttcctttgtcagagtcaactgatgatgcttccaggacaaaccggcttcctctccccaccctcctgccactctaagtattgaatgtactttgtataattttagtggaattattgttattaaagagaataaaatttttacaatcaatgttgaaaaaaaaaaaaaaaaaaaaaaaa

SEQ ID NO: 2167 - DNA, 2021 bp, Cricetulus griseus
  modified_base (2010)..(2010): a, c, t, g, unknown or other
agggaccgggccgagcggagccgctgcgccagtgctgccccgccagcccgggcgcctagcggatcggagctgcgcgcggatctacctcgccccgccccgctccacccgcgagggtggcccgaggcagccgggatgacacttctccccaggaaccctgctatctgctgagaaacatgaccagtaaatcccgctgtaagttcctggccatgctggctctggtctttgtcgtcgtcatggtgtggtattccatctcccgagaagataggtactttgaacttttttattttcccatctcagagaagaaagagccatgcttccagggtgaggcagagaggcaggcctctaagattttcggcaaccattctagggaacagcccatcttcctccagcttaaggattatttctgggtaaagacaccatctacctatgagttgccctttgggaccaaagggagtgaagaccttcttctccgggtgttggccatcactagctattctatacctgagagcatacagagcctccagtgtcgtcgttgtgttgtggtggggaatgggcaccggttgcggaacagttcactgggaagtatcatcaacaagtacgatgtggtcatcagattgaacaacgctcctgtggctggttatgagggagatgtgggctccaagaccaccatacgtctcttctaccctgagtcggcccacttcgaccccaaaatagaaaacaacccagacacgctcttggtcctggtagctttcaaggcaatggacttccactggattgaaaccatcttgagtgataagaagcgggtacgaaaaggtttctggaaacagcctcccctgatctgggatgtcaaccccaaacagattcggattctcaaccccttctttatggagattgcagcagaaaagctcctgagcctgcccatacagcagtcacgaaagatcaagcagaagccaaccacaggtctgctagccatcaccttggccctacacctctgtgacttagtgcacatcgctggcttcgggtacccagaggcctacaacaagaagcagaccatccactactatgaacagatcacgcttaagtctatggcggggtcagggcacaatgtctcccaagaggccctagccatcaagcggatgctagagatgggagctgtgaagaacctcacgtacttctgacttggatgagaattgtaacacgccagttccctacttagccatctgagtggcccctgtctatggcgttgggatgcctggtgccagtacaacccacttgaacttaccctcattggggagggtgttctgggagtggccaggactcaggagaggctatgcccctggctactctggtggagtccaaatccagataggtggacacactgaggctacaggagcctggccaaggtagggggacttgctgctatggcatcccctctctgccagcgcaaagagatttcatttgtttgggggttctttgtttggttttggtttttttgttttgtttttgtttggttttggttttttgttttgttttgagacagggtctgactgtgtagccctgacttatctggaactcactatgtagaccaggctggccttgagctcacagagatccacgcctctgcctcccaagtgttgggattaaaggtgtgtacaacatgcctggccccagcaacaagagattatttaacactctatttaattaagagatagaaaaatacagtgggctggtcccctggcattcacaaaagggacacaataccgtgttctgcccactttttaataaaattaaattggcctgtgaaggccccgaactagagctggcctcccaggaggatggagacatcaagagtgggagggtgtcctccagagagaggttgctacttcccagcaggcatgggaagggcattgacaagggggctccatctagaaggggcctcacctgcaaaagaggttataaaagatcattaaaatattttttcccaaaaaataggaaaaaaaaaaaaaaaanaaaaaaaaaaa

SEQ ID NO: 2168 - DNA, 2021 bp, Cricetulus griseus
gaaccgacgagctcacctgcgcctgtgtttagtaacgcttgaaagttctgatcccgctgggcccagactgcaccaggcacacaacactcggtttgctcaacaaagccaaagcacacatcaagaaacttgaagaagccgaaaggaaaagccagcaccagcttgagaacttggaacgagaacagagatttctaaagcggcgtctggagcagctgcaaggtcctcaggagatggagcggatacggatggacagcattgggtcaactatctcttcagaccgctctgattcagagcgagaggagattgaagtggatgtggaaagcacagagttctcccatggagacgtggacactatcagcaccaccagcatcagtgacatcgatgaccacagcagcctgcagagtattgggagtgacgaaggttactccagtgccagtgtcaaacttcccttcacttcctagagcccagcatgaccacagtgcagggcgaaacacccactgggccaattcagtaccgtctcttcaatggggttcatgatgcagtctccttcaaaactaaacaaaactatacttgaacaaaagggtcagaagacctgtatttaagcaaatacttaacaaaaagtggggtagagcctccccagtagaacaaatactcatacagtggcaagagtacagtttctcgcagcagctgaaaacttgtgggaattaatcttgagttgacttagttgacttaaagaggacaatggagattcctttctccttttctagtttgctcatgctatgttgagtagacattttaagggtggggttataaacccttcctgagcttcttggccgtagaaacaaaatcagacttagagtaaggaaaagacaggataatcaggcattaatcttggatagctaaagagctattaaaactcagcctcagtttatcatgaagcctgtggatgatcaattcttttaaaaaatgaatttttaaaaagctcatttcgtgctctacagaaggagagattcccatgaagcctttcgaaagaggtcatcacgcagctcagctttctgttggattccatgctaagccagctaaccttacctgcattgttagcaccagggcacctgaccgcccgctcacttgcagcccttcggcaacataggggcagcccatgcatgtcagcctgtatcacagaaggaaaagcgccaggtgcctgtgtctgcgccgatctgaagagctgtgcatgcagtatagcaggccaaggtctgagccacagcagcatttttatttgagattttgataactgtttatatgtgttgaaaaccaaaatgacatctttttaaagcttgtccataagtaaacatagatgtcttttatagtggaaaaaacacgtggggaaaaaaatcatctattttgatgcagcgtttgataaatgataaaacacccgacacctcactctttatactgcacagaatgaatgaggaggtctgggctggggagacgaaggtcaatgctgtttttgttttcttttaggatcattcccttttaccagcttttaaccgtctgatacccatagcaggcaaactctcctagttaacatagttaagttcagcacttgtctcgtttaatgtcaaggtttgcattttctacgggcagtctccttcctcacaaacccactgtgcaggtgctattgttgctcttagaaatattttcagaaatgttatcttctaagtgaaatttctagcctgcactttgatgtcatgtgttccccttgtctttcaaactctgaggtttccctctgggcctctgctttgccctgggaagcctttctggagacctcccccagctgtttggactttgtattctttaaataatttaactacccttaattacttttaaaaaaaaaagctttatgattttcataacttattgctgattttaatgggttgttaatttcagtcctgtagttttattttatgtttagatagggctgggcaaggaaaaagaaaataaaaacaaccatatttagcagcgca

SEQ ID NO: 2169 - DNA, 2021 bp, Cricetulus griseus
tacaggaacctgggcaaatctggccttcgggtctcctgcctggggcttggaacatgggtgaccttcgggggccagatcaccgatgagatggcagagcacctcatgaccctggcatatgacaatggcatcaacctgttcgataccgcagaggtctacgctgctggcaaggctgaggtggtgttggggagcgtcattaagaagaagggatggagacggtccagcctggtcatcaccaccaagatcttctggggtggaaaagcagagacggagagaggcctttcccggaagcacattattgaaggactgaaggcttccctggagcggctgcagctggactacgtggatgtggtcttcgccaaccgcccagaccccaacacgcccatggaagagaccgtgcgggccatgacccacgtcatcaaccaggggatggccatgtactggggcacgtcacgctggagctccatggagatcatggaggcctactcggtggctcggcagttcaacctgatcccacccatctgtgagcaggctgaataccacatgttccagagagagaaggtggaggtccagctgccagagctgttccacaagataggagtgggcgccatgacctggtcccctctggcctgtggcattgtctcaggaaagtatgacagtggcatcccgccctactccagagcctccctgaagggctaccagtggctgaaggacaagatcctaagtgaggagggccggcgccagcaggccaagctgaaggaactgcaggccatcgccgagcgcctaggctgcaccctcccccagctggccatagcctggtgcctgaggaacgagggcgtcagctctgtgcttctgggtgcttccagtgcagagcaacttatggagaacattggcgcaatacaggtccttccaaaattgtcgtcttccatcatccacgagatcgatagcattctgggcaataaaccctacagcaaaaaggactatagatcctaagtcccccccccacccgctcgacccgctcggacagtttccggtcccctcctcgtctctgttcgctcgcttctgctgtttcaaagccaaatgcagaatgtggtttgtatccaagggaaaacactatgcccagacattaccaggaaatgatctccaaagtcaccgccagatgccacctgctgctgcttcttcactggatgctgtctgatgggtgccaggagatggcatcgattagggaagacactcagaggctcccacccaagcctaccacctctgcttatctttcaaaaaggaacatttgcccccagccatggcccttgatggagatcccagaagtcatggccgagtggaaatataatcctcagagaaggcagggcttctgccagatcctggtggttagggcagggtctccctctttcctggacatcaggcactttgttcaaggctggcctggggtcacgctctttccaggccttgaccttccccctcatgcgcagtgggccttggctgggattatactgacctagctggctcttggcctccacccttacccttgctggcaggggcagggatcccatctggctttcccagcgtcttccaccctgagacctcagaagcagccctgtgggtggggatggaagcctttatgctctggcacctccatgcccagctagaggagccctgctttcaggacagggccctgcaatggcccagcaggaagtagccagccctgtccacacagctggcctaggccctgcttgctatgtggaccaggcatgcaggggcacccacagcgggagctgctactacccatggccagacctcagagcaaagcccctgctgggtgtgtgcaagagacatgaagacaggctgcagggttttttaatgagcgaggctccttgctaattgcatcccaccaggccgaccgcaagcgcctccagcttccggacagactcagacggaggcgcagcccgtatttatggaatgacaaataaaacccgagcccttcggtctccaaaaaaaaaaaaaaaaaa

SEQ ID NO: 2170 - DNA, 2020 bp, Cricetulus griseus
tgtcctacccgcagggctacttgtaccagccgtccgcctcgctggcgctctactcgtgccccgcatatagcaccagcgtcatttcggggccccgcacggatgagctcggtcgctcgtcttcgggctccgcattctcgccctacgctggctccactgccttcaccgctccgtctccgggctacaactcgcacctccagtacggcgctgaccccgcggctgcagccgccgccgccttctcgtacgtgggctctccctacgaccacactcccggtatggcaggttccttggggtatcacccttacgcggcgcctctgggctcctacccttacggggaccccgcgtaccggaagaacgccactcgggacgccacagccacgctcaaggcctggctcaacgagcaccgcaagaacccgtaccccaccaagggcgagaagatcatgctggccatcatcaccaagatgaccctcacccaggtgtccacctggttcgccaacgctcgacggcgcctcaagaaagagaacaagatgacatggacgccacggaaccgcagcgaggacgaggaggaggaggagaacatcgatctggagaagaatgacgaggacgagccacagaaacccgaggacaagggcgacctcgagggccccgaagcaggaggagcagaacagaaggcgactgcgggctgcgaacggctgcaggggccacccagtcccgccggcaaagagaccgaaggcagcctcagcgactcggattttaaggagtcgcccactgaggtccgccacgaagagctgcccaggcccccgcgcgcaggcgggccgtccccaaatgggcccgcaaacgcgcgtctggcggaggatgcgggtcctcactaccccgcggtcgcgccagcacctggcccgcacccatcggctggagagataccccccggctctggcgggccctcagtcatccactcgccaccgccacctcctccgccgcctccggccgtgctcgccaagcccaaactgtggtctctggcagagatagccacttcctcggacaaggtcaaggacgggagcgagggagcgagggctctccgtgcccaccgtgcccagggcccgtgggcgggcaaacccttggtggcagccgcgcgtctccggccccagcccctgcacgctcgccctcggcgcagtgtccctttcctggcgggaccgtgctgtcccggcctctctactacaccgcgcccttctatcctggctacacgaactatggctccttcggacaccttcacggccacccagggccagggccaggacccacagcgggtcctggctctcatttcaatggattaaaccagacggtgttgaatcgagcagacgttttggctaaagacccgaaaatgttgcggagccagtctcagctagacctgtgcaaagacactccctatgaattgaagaaaggtatgtccgacatttaactcgggtgcggtactcccggactttgctaatttattaaaaccatggccttggcagttatttttccatcaccaagagagagaaagaagaaaaaaaaaaaactaaccctcttattcagaagtttatagtttatggaggtggatgacataaaaatgtatacatctccacactcgaaaaaatggttttagccaactgaaaagaaaaaaaacttaaagatttgtattaaatcttattctgtatatttaatgtagcattttgtatttaaattgataattcagtatctttgaagtaaattatgagatcaagacacctgtacaggcatttaatgttttttgtaatataaatatatacatttgtgttcccccaaactgtttcatagtttaaaaatacaagtttaatttaattttttacacctattgatttttctgggtatgagctaaagtattattacagaaaggaaacaggttatactcttagatttaaaaagtaaaagaaactgcagtggtctttgtaaaatgcaaaatatttaattaaaggagattttaacataaaaaaaaaaaaaaaaaaaa

SEQ ID NO: 2171 - DNA, 2020 bp, Cricetulus griseus
gatgaacagatggaaatcctctgtcctgcacgaaggggaagggaacataaggagcgtgaaatggagaggccatctgattgcttgggccaataatatgggtgtgaagatttttgacatcacctcaaagcaaagaatcaccaatgttccccgagatgatataagtcttcggcctgatatgtatccctgcagcctctgctggaaggatactgtgacactcattattggctggggaacttccatcaagatatgttcagtgaaggaacgtcacgccagtgagatgagagatctgccaaatcgatatgttgaaatagtgtcacagatctcatctgatgctctgacagtcagaggctttcaggagaatgaatgtagggattatcatttagaatactctgaaggggaatcacttttctacattgtgagtccaagagacgttgtcgtagccaaggaacgagaccaggatgatcatatcgactggctccttgagaagaagaaatatgaagaagctctgatggcagctgaaattgccaaaggaacattaaaagacataagatttggatattgggttggcatatataaaccacctggtggcaagaggagaatatgacatggctgcacgaaaatgccagaaaattacttgggaaaatagcagccctctggaataatgaagtttaacaaatttaaagaaaattaggacagcttaaagcaatcagtccttatttaccaagaggggacccagtcctgaaaccactcatctatgaaatgatcttacacgaatttttggaaagtgattatgagggctttgccacattgatcagagagtggcctggagatctgtataacaattcagtgatcgttcaagcagttcgagaccacctgaagaaggacagtcagaacaagactttattgaaaacactggccgaactgtacacctatgacaaaaattatggcaatgctttggaaatatacttaacattaagacataaagatgttttccaactgatacacaagcataatcttttcagctccatcaaggataagatagttttattaatggatttcgattcagagaaagctgttgacatgcttttggacaatgaagacaaaatttcaattaaaaaagttgtcgaagaattagaagacagaccagaattgcagcatgtgtatttgcacaagctcttcaagagggaccatcataaaggacagtgctaccacgagaaacagatcagtctgtatgctgaatatgaccggccaaacctccttccctttctccgagacagtacccattgcccgcttgaaaaggctcttgagatctgtcaacaaagaaactttgtagaagagacagtttaccttctgagccgaatgggaaacagtcgaagtgccctcaagatgattatggaggaattacatgatgttgataaagcaattgagtttgccaaggagcaagatgatggagagctctgggaagacctgattctgtattccattgacaaaccaccatttattactggcttgttaaacaacattggcacacacgtggacccgattcttctaatccaccgcataaaggaaggaatggagattcccaatttgagagattccttggttaagattctgcaggattataacttgcagattctgcttcgggaaggctgcaagaaaatcctcgtagctgactctctgtcattgctgaagaaaatgcaccgaacccaaatgaaaggcgttctggtcgatgaagagaatatctgtgaatcgtgtctttctcccatcctcccaacagatgcggctaagcccttcagcgtggtggtcttccactgtcgacacatgttccacaaggagtgcctacccatgccaagcatgaatgctcctgcacagtactgtaacatctgcagtgctaagagccgtggacctggaagtgccatcctggagatgaagtagccctgcatgctcgccagcctgccctttgcttctctgctccatgtagctattgggtcacagcagctgcgttgacaccagtgctgtt

SEQ ID NO: 2172 - DNA, 2020 bp, Cricetulus griseus
gaaaggcatcttcagacctgtctgcatcagcaggctatgaggagatctcagaccctacacaggaggagaagcccagcctccctccacgcaaagagtccatcatcaagtccgaagaggagctgctggagagggagagacagaagatggagccgctcaggggctcctcccccaagcctcctggcatgattttgccaatgattccagccaagcatgccccaccggcccgagacagtaggaagccagagcccaaacctgacaaaagcaagttgttcctgctgaaaaacgacatggggctagagtgtggtcacaaggtgctggccaaggtaagtgaagaagcccaacctccgtcccatctccaggtccaaagccgagctgcccgaagagaaggtggaagccactgcccagaatccgttcttgaagtctagacctcaggttaggcccaaaccaactccttcccccaagacagagccagctcagagtgaaaatcaagtggacatacataacctcaggagcaaactcagacctgccaagtcccaggaaaaagccttattggatggcgagagccaccatgctgctggaggccatgacacagccctcaaagacctgtggtcccaccccggagaccccaccccccaagaaaacctcatcaccgttgtcatgcaggcccccccagaggtcagagggcaacagcgtgaatccaatgaaagcagggctgttcctgctccaggccgggccctccttgtccctccgaaagccaaacccttcctctccaactcttcagtgggtcaagatgacattcgaggcaaaggtgggtctgggccacgcatagctggcaaggtgggagaaaacagagagaaagcagcctccttcctcaatgctgatggcccaaaggactcactgtacgtggccgtggccaacttcgaaggagatgaagagtgcagcaggaaagcgctggccagcattcatggggctcctgctccatcccagcatcacataaacaagaccattaatggcttagctcctgtccttccattgagctcttcagtgctgacatagtctgcaccttgggaagccttgccatttctttgaatagtgtgacaattctattcggccctttcactggctgtctaaactgtccttcagggttttttctgtatactacagacagccatatcctaccacagaccaaagattccctgaagtcagaggggtgtgggctgaatgggtaggaaatgaatttgcatcaaggactgaggccttgcctttgcttggaagaatagctcgtaacttgctagggttccagcagctggactgacctgaccccaagcagagctacagagtcaagacaatggttcatactcctcacctacaaacttcccacaggccaggccttcctgctccggggagtgatgcctggtctccggtgctatctagttgaggtaccaagcccctcatatgtgagtgttccatcttccttctcgtctctccttcaaaagaccagacctggtgccatcgccaatggccttcactctcatttctatgcttttaagagcaaaggtgccccaccaggcttactacagcaataagcaattctaatgcaatggaggtatccatattatgcctgcaatgcctttgtgccctgtaattattagtagcgcctctcttactgggggaatgtgataaaccacggtcaccttagccatacacggctcctgtttcgggaccattgaggagctagttgcttctggcatccctctaggaacagtgggctctgagcagcatggcccattgtgtgtgtctgcccacagatggttctggggacccctgggttctcagcccttctcacaccctctaggctgactgacagatcctggggttggcttttgtttcccatgagtgtttaatgtaagggggcagggggtgaacacctagctatagcatgtagagactgtataccattagacttttctttttaacaaataaaaaaatagcttgactggtttcaagcttcattagtaaa

SEQ ID NO: 2173 - DNA, 2019 bp, Cricetulus griseus
gcccttccggcgcgggcagggcgctgaggatcgggcgcccctcggccgcaggccacctctagcgccgcgggatgtagcgccccggcccgcggccccccagcagaggcagccagccagccaggcctgtctaccatcacaggaagatctctgccccctggggctgagagaccccaacctttcctcaagctgaagctgcagggtattgaggtaccagccagatgtcttcccacaaagggcctgtggtggcacagggcaatggggctccttctagtaacagagaaactgacacagtggaactggctgaactgggacccctgctggaggagaagggcaagcgggcagccaccagcccagccaaggctgaagaagaacagacatgcccagtgcctcaggaagaggaggaggaggtgcgggtactgacgcttcctctgcaagcccaccatgccatggagaagatggaggagttcgtatacaaggtctgggaaggacgttggagagtcatcccatatgacgtacttcctgactggctgaaagacaatgactacctgttgcatggccatagaccacctatgccctcctttcgggcttgcttcaagagcatcttccgcatccacacagaaactggcaacatctggacccatctgcttggttttgtgctgtttctctttctgggaatcttgaccatgctcagaccaaatatgtacttcatggctcccctgcaggagaaggtggtgtttgggatgttctttctgggtgcagtgctctgcctcagcttctcctggctcttccacaccgtctattgtcattcagagaaagtctctcggactttttccaaactggactattcagggattgctctactgattatggggagctttgtcccctggctctattactccttctactgctccccacagccacggctcatctacctctccatcgtctgtgtcctgggtatttctgccatcattgtggctcagtgggatcgatttgccactcctaagcaccggcaaacaagagcaggagtgttcctgggacttggcttgagtggtgttgtacccaccatgcactttacaatcgctgagggctttgtcaaggccaccaccgtgggccagatgggctggttcttcctcatggctgtgatgtacatcactggagctggcctgtatgctgctcgcattcctgagcgcttctttcccggaaaatttgacatatggttccagtctcatcagattttccacgtcctggtggtggcagcagcttttgtccacttctatggggtctccaaccttcaggaattccgctacggtctagaaggtggctgtaccgacgactcccttctctgagccttcccacccaagggtggaggaggaacttcccaagtgcttttaaaaataacttctttgctgaagtaagagggagagtctgagttatctgtttctagaagaaatctcttagagaattgagtaccagtcagcttcagctcacagtcacagccactgggcaataaacctcccctttccattccctggctggcagtcacctcagcgaggactcctggtccttcaaggatagcctttgaagctcatgttgagatttcacccattcctccagccattttggggaaaaaaaaatatgaactgggattcttcagaaataatgtttgttttttcttgaagaaaatattcctcccttaccccatccttactttgtaacctggctgacaacaggccatccatttttgtagcacacttttcagaaacaattataacctagtcccgtctttctaggacaaacaaagctacgccttgatgtagcccggctaatcatggaagtatgtccaggcttcaagtaacttgagtttaaatactttttttttttttccttggcagagtaatgtaaaattaaaatggggaagatatttaatatttaatactaagctttaaaaagaaacctgctatcattgctatgtaccttgacgcaaagactattataataaaagaaagtacagacaacgct

SEQ ID NO: 2174 - DNA, 2019 bp, Cricetulus griseus
gctctggtctgccaaggcggtggatgtggagaaggtagactggggataaggcctgggagatcaccaagaagacctgtgcatacaccaaccacacggtgctgcctgaggccttggagcgctggccagtgtccatgtttgagaagctgctgccacgccacctggagatcatctacaccatcaaccagaggcacttggatcacgtggctgccctgtttcctggggatgtggaccgcttgaggaggatgtctgtgattgaagaaggggactgcaagagaatcaacatggcacatctgtgtgtgattgggtcccatgcagtgaacggcgtggcaaggattcactccgagattgtgaagcagtctgttttaaggacttttatgagttagagtccagagaagttccagaataagaccaatgggatcacaacccgacggtggctgctgctgtgcaacccggggctgggcagacatcattgtggagagaatcggggcgacagctgctcaactgcctgcatatcatcaccctgtacaaccgaataaagaaggatccagccaaggcctttgttcccaggactgttatgatcgggggcaaggcagcctggtcacatccattggagatgttgtcaatcatgatccagttgtgggtgacaggctcaaaagtgatcttcctggagaactaccgggtgtccttagctgaaaaagtgattccagccgctgacctgtcacagcagatctccactgcgggcactgaagcctcaggcactggcaacatgaagttcatgctcaatggggctcttaccattggcaccatggacggtgccaatgtggagatggctgaggaggccggggaggagaacctcttcatctttggtatgcgggtggaggacgttgaggccctggaccagaaagggtacaatgccagagaattttatgagcgcctgcctgagctgagacaggctgtggatcagatcagcagcggcttcttttctcccaaagatccagactgcttcaaggatgtggtcaacatgctgatgtaccatgacaggtttaaggtgtttgcagactatgaagcctacatacagtgccaggcccaggtggaccaactataccggaattccaaggagtggaccaagaaggtgatcaagaatattgcctgctctggcaagttctccagtgaccgcaccatcactgagtatgcacgggagatctggggcgtagagccctccgacctacagatcccgccccccaacctccccaaggactaattaccccaccacacagtgagaccagtggcttgtttggctgactctgtgcctgtgccagtcctcaggcactgcaagcagctgctggtccctgtgatccgatgcactgtgtttccaggacgggccatgggaatggttttgaggatctggataaaggagtgtgtggcaccctcctggttttgcaaaagaactcttgcagagtccacagcacggatgggcagagatgatcccccacagcctttagatttggaatctgagtagggatctgtgatgaagcctgtatttctatgtgttttactaggacctgggtcactagctgtagggtaaggccaagtccagtatgtggcctccttggtcctgctgagtagaatcatttcttcatgctcacagctttgtcctctgcccttggctgtattgggaatatgggttgttggcccatataggccacgcctctgtagccatctgtggaaccatgtgggtgtcatgtagaacccagaacctcaggagagcaacactgaagagggacctttaccccatatctgaggccttggttaaggactggcaaatttagagttgggttggtgttctgctttttcaacaggaaataacacttcatgaggaattgaaactagctaaagcctttctttttagcaagtaaacatcgtactagctcagtttggccctgaagccatgatacatgaccatcactctactacttgctgttacctccttgtgtgagaaatggattaaacgtctatgcc

SEQ ID NO: 2175 - DNA, 2018 bp, Cricetulus griseus
gccacaggcccagtggcacctcaaggctggagcgccacctggctgggtacgagagttcttccaccctcatgaccagtgagctggagagtaccagcctaggagactctgatgaggatgacaccatgagtagattcagcagttccactgagcagagcagtgcctcccgcctcctcaagcgccaccgaaggcggagaaagcagcggccaccacgcatggaaaggacctcatcctttagcagtgtcaccgattccacaatgtctctcaacatcatcacagttacactcaacatggagaagtacaaacttcctgggccatctccattgtgggccaaagtaatgagcggggtgacggaggcatctacatcggctcccaggcctacttcaccctcccccgaaatgagcccatccagccaattgatcccgctgcctgggtgtcacactccgctgctctgactggcaccttccctgcttatccgggctcttcatctatgagcactattacatctggctcgtccctgcctgatggctgtgaaagccggggtctctctatccacatggacatggcctctgtgaccaaggccatggcagctccagaatctgggctagaagttcgggaccgcatgtggctcaagatcaccatcccaaatgcctttctaggctcagatgtggtagactggctgtaccatcatgtggaaggctttcctgagcgccgggaggcccggaagtatgccagtggactattgaaggcgggactcatccgacacactgtcaacaagattactttttctgagcagtgctattatgtcttcggggacctcagtggtggctgtgaaagttacctagttaacctgtctctgaacgacaatgatggttccagtggggcttctgaccaggataccctggctcctcttcctggagctaccccctggcccctgctgcctaccttctcctaccagtacccagccccacacccatacagcccacagcctccaccctaccacgagctttcatcctatacttacggtggaggcagtgccagcagccagcacagtgaagggagccggagcagtgggtcaacaagaagtgatgggggggccgggcgcacagggaggcctgaggaacgggcccctgagtcaaagtctggcagtggcagtgagtccgagctttccagccggggaggcagccttcggcggggtggggaacccagtgggactggtgatgggggtccccctccatccaggggctcaacaggcggtactcctaatctccgagctcttccagggctccatccctatggacctccccctggcatggctctcccctataatcccatgatggtagtcatgatgcctccacccccaccccctgtctctactgcagtgcagccccctggtgctcctccagttagagacctgggctctgtgcccccagaactgacagctagccgtcagagcttccacatggccatgggcaaccccagtgaattttttgtagatgttatgtagggcctaccctgaggccgcattgggtccgtgcccttggcctgtcaagtttcagcttggtgctccttatagtgcctgtgttcatcctggtgcttgatacctaccacaatgtttttgccactgtgactctcaccagcagtgcctggtccttccccttcctcaggggtagtcggggacctttggttatttttagctttattttttataagccttttggggggttaaaatagactttcttatattttggggagtatttttttagtagacattttctcttttatgtgaagaaacccttctaaccccagaatatgaccaccacctccagttgcctcattagcagtcacttggagggtgggtggtggttagtggtaccctgggaagaggaagggggggcctgggtaccctagacagcagtccaaggaagctggtggtgtgtacatggggactgtgtagctgcctttgttactctatttattttagtcacttgtataaaataccaaataaagcaatagaggcc

SEQ ID NO: 2176 - DNA, 2018 bp, Cricetulus griseus
gtccgcggccgtgggcatgccggagatcagcctccgccacgtcgtgtcctgcagcagccaggactcgacccattgtgcagaaaaccttctcaaggccgacacctaccggaagtggcgggcagccaccgcaggcgagaagaccatctctgtggtcctacagttggagaaggaggagcagatacacagcatagacattgggaatgatggctcggccttcgtagaggtgctggtgacccggtctgccggagggggcggggccacagccatcgagcaggactatgaggtccttctggtcacctcctctttcatgtccccttctgagagccgaagtggctcaaaccccaaccgcgttcgtatgtttgggcctgacaagttagtccgggcggcagcggagaagcgctgggaccgtgttaaaattgtgtgcagccagccatacagcaaggactcaccctatggcctgagttttgtgaggtttcacagccctccagacaaagacgaggcggagactccatcccagaaggggaccgtgaccaagctcggccagttccgtgtgaaagaggaggatgatggtgccagctccctaaagccaggggctctcttcttcagtcgcatcaacaagacgtcttcagcctctgctcgcggcccagcaggacccagctatgcagcagctacactgcaggcttctaatgcaacctcctcggcctcttcggtctccaaggctttgggtagctcttgcaagcctcaggagtctcccaaagggaagaggaaactggacttgaatctagaagacaggaggcctgccagcaaaccttcagcagggccacccaccctcaagagacccaaactgactgttcctagtcgctccccagctgcagccgcagcctctaccccagcacagaaggcagccccagggaagccccgagaaggcacggagcccaggggagcccgagctggcccccaggagctggggaagattctgcagggtgtggtggtggtgctcagtggcttccagaaccccttccgctcagagcttcgggacaaagccctggagctgggggccaagtatcgtccagactggaccccggacagcacacacctcatctgtgcctttgccaacacccccaagtacagccaggttctgggcctcggaggccggattgtgcggaaagagtgggtgctggactgttaccgcctgcggcgccggctgccctcccgcaggtacctcatggcagggcttggctccagcagtgaggatgaggaggacgactctcccggtgagagtggtgaagacgaagctcccaagctttcccggaagcggcctcaggccaaagccaagacccaagcagcaggacccagctcgccccagagaccacccactccaaaagagaccaaatcgccctcaccagaaccccaggacaatagtgacactgaaggggaacagtcagaaggacaggacaatggggcggaagattccggagacaccgaggatgagctgaggagggtagccgagcagagggagcagaggcagcccccagctccaggggagaatggtgaggacccatatgctggctccacagacgagaacacagacaacgaggcttccacagaggctgacctgccaattccagagctcccagacttcttccagggcaaacacttcttcctgtacggggagttccctggggacgagaggaggaagcttatccgatacgttacagctttcaatggtgaacttgaggactacatgagcgagcgggtccaattcgttatcacagcccaggagtgggaccccatctttgaggaggccctgatggagaacccttccctggccttcgtccggccccggtggatctacagttgtaatgagaagcagaagttactcccccaccagctctatggagtggtgccccaggcctgagtgcacacctgtgtgcatgcttccagctgtgcacatgtacacacaggccggggtgaccatgcgtgcacacacatgagtataataaaggagactttgtttg

SEQ ID NO: 2177 - DNA, 2018 bp, Cricetulus griseus
cttttgcccgtacgggccccgctgccacttcattttcacaacgccgaggagcgccgcgccctggcccgggggccggggacctctccgctgaccgtccccgccttcagcatagctttagctttgctgggtttcccagtgccgctgccaccgccgctgccacggggctgctggacagccccacgtccatcaccccaccccccattctgagcgcggatgacctcctgggctcacctaccctgcccgatggcaccaataaccccttcgccttttccagccaggagctggcgagcctctttgctcctagcatggggctgcctgggggaggctcccccaccaccttcctcttccggcccatgtctgagtcccctcacatgtttgactctccccccagccctcaggattctctctcggaccaggagggctacctgagcagctccagcagcagccacagtggctcagattcccctaccttggacaactcaagacgcctgcccattttcagcagactctccatctcagatgactaagtcagggtagggagggacaccctgcctccttcacctctccaccctgcaccccatcccataccttcacctccccaccccttaacttctccccaattcctacattgatacatttaagctcaacgcccccataccagaacaaccttggtatgttgcccctcccctaacataaggacaagtcaatttgttggtagcttcttctggcttgaaactccctccctccatttcatagcccacttaaccacgcataacagagtcccatatttgtcagtagatgtcctttttttctattttgacattcaaaacctttttctttcagcccgaacccctgttgactaatcttgcctgggtttgtgtaggtcttcagggaggaaggttgaactagttggacgaaggttttgacataagtgggactttgtgatttaatttttttcttttttcttttttttttaagttggggaggaaggggaaactagatggactatgagagacttgattttggtgctaaagttccccaattcatatgtgacatcttaaaaaatgacaacaaaatgagagaaaagctaaaaactaaaaaaaccatgtaaggggtgagcagttaatggtattcattccacatacagtatctgtgtaaaacgatttcctgtagaagtagctttaatggattttgctctagaataccttaggtctaccttagagccctcacgccatgcttttttccctgggtttaaacttcatctaactttcagaaattggagagcaaaaattttgcttgtcactgcacatcaatataaaaaagcttatttaacttatcaaaacgtatttattgccaaactatgctttttttttgttaattttgttcatatttatcgggatgacaaatccatagaatatattcttttatgttaaattatgatcttcatattaatcttaaaattttgtgacgtgtctttccttttttccacagttttaatatattattcttcaacaacatttttgtaactttacactttttttttggttattttattttaaaaaaatgaaaaattaatttaaaaaaatgcaaaaaactgttggattatttattttagaaattttcccctttgtgttggactgcaaattgagtttcttctccttaggcctttcacaggtaggactgagaatgtatgtacaagttctgtgacagtacagaaggaaaccaccttttatgtatagcttctaaaagggaaaacaaaaaaagagagaaaccctttgactttatgtgcccatctcaagacattccgctcgcagattcgaggttctggattccaggttggagttttccaaagctaacaactggcgcacacacataaagatgaatgtaattattattcctcttgctggtcactaccgtcgctttctatttctttttctttgtgtgaatttatttaaaagaaaaaaaactttttgtaacgactatttgcagtttaaaaaaatcaataaaccccgtttttc

SEQ ID NO: 2178 - DNA, 2017 bp, Cricetulus griseus
gagcacgttggtgccttgttgattggtgaagaatatggcgatgttacatttgttgtggaaaagaagcgctttcctgctcacagggtcattttagcagctaggtgccagtattttcgagcattactctatggtggcatgcgagagtctcagcctgaagcagaaatccctctccaagacaccactgcagaagcattcacgatgctactcaagtacatctacactgggcgggcgacactgacagatgagaaggaggaggtgctgctggactttttgagcctggctcataaatatggatttccagagctggaggattctacttccgagtacctctgcaccatacttaacattcagaacgtctgtatgacttttgatgttgccagtctctactcgctccccaagttaacttgtatgtgctgcatgtttatggacaggaatgcccaggaggtactcaccagcgaaggcttattcctttgctgctctgagaaagtatattttttagctttgttaaactggtgtaagcacaatgcaaaggagaaccatgctgaaatcatgcaggctgtgcgtttacctctgatgagcctcactgagcttctgaatgtcgtgaggccttcaggactgttgtctccagatgctatcctagacgccattaaagtgcgctcagagagccgggatatggacctcaactacagaggcatgctcataccagaagaaaacattgcaacgatgaagtatggagcccaggttgtgaaaggagagctcgaagtcagccttgttggatggtgacactcaaaattatgacttggaccatggattttcccggcatcccattgatgatgactgtcggtctggcattgagatcaagcttggccaaccatccattatcaaccacatacgcctcctcctgtgggaccgtgacagccggtcttattcttattttatcgaagtgtccatggatgaacttgattggattagagtgatcgatcattcacattacctgtgtcgatcttggcaaaagttgtattttccagctcgtgtctgcaggtatatccgaatagttgggactcacaacacagtgaacaagattttccacattgtggcttttgaatgtatgtttacaaacaaaaccttcactctggagaagggcctaatagttcctatggagaatgttgcaacaattgccgattgtgccagcgtgattgaaggagtcagtcgcagccgaaatgccttgctgaatggggacactaagaattatgactgggattctggctatacgtgtcaccagctgggaagtggtgcaattgtggttcagctggcacagccatacatgattggatcaatacggttgttactctgggactgtgacgatcgaagctacagttactacattgaggtttccaccaatcagcagcagtggaccacggtggctgacagaaccaaagtgtcctgcaagtcctggcaatcagtcacttttgaaagacagcctgcctccttcatccgaatcgttggaacacacaacacagcaaatgaggtattccactgtgtccacttcgagtgtccggagcagcagagcagccagaaagaaggaggcagtgaggaaccgggcacaggggaccccagcacccccagccagcagcttgaccctcatgtgcttcaagcacccagtgccagctcactacccccgagtccgggccccaactccggctcacccaaccaacagcaccaataaaggaggcagaggatgtggtgtgacttgggcgggcctgggtggggcaggagtgtcccctcccacccccaggagcggcagacctggctgcaaaggcacccctgccaggttttacccctcatggacagaagggcacccatgctctcccagtcttcaggcagtctccaagggcaggtaagcgggtcttttctcaattccaccatcagttcctacctctaatgttaacaggtaccagaaaacaaaaagaaagaagaagaagaagaagaagaagaagaaacagcctctgcacctcta

SEQ ID NO: 2179 - DNA, 2017 bp, Cricetulus griseus
  modified_base (2009)..(2009): a, c, t, g, unknown or other
atggggaaggcacaattcctgtggagtccagtgacattgtacccacgtgggatggtatccgccttggggaaagactccgtaccatgtcctgtagtgacaaaatcctacgctggaatgtgctgggcctgcaaggggcactgctgactcacttcctacagcctgtgtacctgaaatctgtaacactaggttaccctttcagccaagggcatctgactcgtgctatttgctgccgcgtgaccagagatgggaatgcatttgaggacggactacgctatccctttatcgtcaaccaccccaaggtcggccgagttagtgtgtatgattccaaaaggcaatccggaaagaccaaggaaacaagcgtcaactggtgtttggccgatggctacgacctagagatcctggatgggcaccagaggcaccgtggatggaccagggaaggagttgtctcgggtatccaagaagaatattttccttcagtttaagaagctctgctccttccgtgcccgcagagatttactgcagctctcctacggtgaggccaagaaagctgcccgtgactacgagttagccaagaactacttcaagaaaagcctgcgggacatgggctatgggaattggatcagcaaaccccaggaggaaaagaacttttatctctgtccagtacccaatgactgacagtggggcgtgtttcccatggggtcagagggagttcatggcattcctcatcacattgggccagagttcaggggcttttttagacccctccccctttttaatggaggaaccatagtagacggtaccatccctccttggattccttcctgtggtgatgtttctccttccccactccagaggacgaagaggtgaacataaaggattggtgaaatgtttacaagggcaggagttgaaaactgtggtcaggggttgtagggcagtgggaatgtggtagaatgtggttgggacaggcaagccctgcccagtaacaaacaggccgtgctggcccgccagggaacttcccttcctgggcagcagagaaggtgagaaccagatgtggaactggggaagtgctcaagccgagcaaggtccccagtggggacccacagagcactaactgggtgcagcaacatcccctgggatgtagccacattcctgtctgcccttctgtaaagcactcctggaatctggctctatccacgtgtagcatggggcacagaccagctgtttgtgaaaagctgaggacaagtcatggagggtagatcatctttgtcccagaccagcagaagttgacaaagccttgtgtaaaattaatgtttctaaaaggccagaggtattgattctggactgcattacagacttgagatacaaatatatttttgcattagtgaatgtactttcattttaacagatggcttcagaagctggttcatgggcgaggcacatttcctctgaatggtgtggctccatctgggaacagccaagtcagtggtttcctgcactccccttgcctcacccacccctcagtgctgcctgactctcccaccctctctggccctctgccaacagcaactatatcatttgcactttgattctaatggctactgtctcctcaacctatgatcaaacctgaccaacacgagaacctatgtcttaatacactggggatgtctttgcacaacaccaaattatcgtatgtttgagaagcaaggccttcccttccacaccgttttaataaatttctgtggttgatttgtctgaactgtggctgtcttgcattctttgactaatcacgtgtaagaattgtcaatgcttgaaactatttcctgtactcaagttgaaggggtctttgttggccttggggttctgaccatgactccaagagaagagtagggaagagcccaggcatagccttggtgctgtgatggatgcagtcccttcttgtgtcccttaaatgacagtatacctttctcagaaataaaaacactgaagcaacaagaactgttaaaaaaaanaaaaaaaa

SEQ ID NO: 2180 - DNA, 2017 bp, Cricetulus griseus
attgtgctcatcttcttcctggaactggctgtggctgtgctggcctttctgttccagggactgggtgagggaccggtttccgggaattcttcgagagcaacatcagatcctatcgggatgacattgacctacagaacctcatcgactcactccagaaagctaatcagtgctgtggggcttatggccctgaagactgggacctcaatgtgtacttcaactgcagtggtgccagctacagccgagagaaatgtggggtacccttctcttgctgtgtgccagatcctgcgcaaaaagttgtgaacacacagtgtggctatgatgtcaggattcagttgaagagcaagtgggatgagttcatctttacaaaagggtgcatccaggctctggaaggctggctccccaggaacatctacattgtggctggtgtcttcattgccatctcactgctgcagatcttcggcatcttcctggcgaggactctgatctcagacatcgaggcagtaaaggcaggtcatcacttctgaaaagcagaggcagcaaatggagctgagccacacgtggaggtgaagccagccacccacagccagaccccagtcttcggcatcagtgtgacgtgatctctctgtttcttcttgctggtgctgaagacgaaggccccttctcatctgcccatacttgacatggcatctctgaaggggtttgcccagagacagagaatgtctcttcatgtggagtagtgactctgaggacagatggctcccatggctacaaggagggcttgatggccctcttggagcccatgagcaatttgcaggcccctactcactcaataaggcttaggtccatgctcaactcttaccttttgtgggcagggcatttgtgttggaccagcaggttgggaacaacttctgcatccaccggatcaaaaagcatgaggaagtgtaagtcgtccagtgggttcccgagtgccaacagggttcatggtagtgcaaacatgccaccggcttgcaggatcctcagccatgtccaagtgaaataagcctgagccagccataaccggtcccagggaagcacctcgccactgccttccaagcctacactgctctcccagggtagaacagcctgtgtctccatagcattaagccctgctgagagccagctctcctgttcttaaagcgtgtaaatagtttatttataggataagaatgttcttcaccatgtcttcattgcctctctccggcatccttttctcagcagccttacccagtgtctgggaccaagctgtcctcttcagttccctgagtgtctcaagaaccagctgtgacagcctctccctgtcgtccacattccctccacgcacccctgcttggcttcactgtcttctggtctcggtgctactgaaactgcccccagaacttgaattctgattgaccctttctccctactgccctccagggagcccaagttcctgagctagctggaaactgggttcctctcgtgaccaagtacagctagtggcccaaagtgtgctgtccctggagggtgatactctgcagccaggcccttgtgagccacagacaccaggtgctgtatggaagctcagcacgtcttatgttaactcccgaggtgacctcccccacccagtgttcactgtcagtgctgttctggggctgctcttgaaaatgatgtgtgtcttacgtactggatactcctgaggcacactgggtggctgtcctccttgggctgggctcctctctaatgcttcaatgtagctggtatctgtcctcactgttcaggggttgagtgcctaccttcagttacttgccgaggtgtacattctagtgtggtgtatactggtgatactggtgggtgtgtgttcatgatgatgatgatgactagaggaggaagaatgcttgtgttttaggaagtgtgatgcttctctttgacctgccaaactcttttatggaatatatcttaataattaaattaagcaaaaaaaaaaaaaaaaaaaaaaaaa

SEQ ID NO: 2181 - DNA, 2017 bp, Cricetulus griseus
  modified_base (194)..(194): a, c, t, g, unknown or other
gggatggatgagtctcaagatggacaaccgggatgttgcaggaaaggctaatcggtggtttgggatggcacagcccaagtctggaaagatgaatatgaatatcctccaccaggaagagctcatcgctcagaagaagcgggagatcgaggccagaatggaacagaaggccaggcagagtcatgcagccagcccanagccccctcatcctggagaaattgccagtgcacataactcctgtatctccaacaagtttgccaatgatggtagcttcttgcagcaatttctgaagttgcagaaggcacagacaaacacagatgcaccccccagtacccctcctagcacgacgacacccagcaccttgaagagacccctcctactcagcaagcggacaggcctgggactgggcagcccgctgggccctgtgaagaattactcacatgccaagcagctgcccatcgcacaccgcccaagcatcttccagtcccctgatgatgatgatgatgatgaggaggactatgaacagtggctggagatcaaagtttcacccccagagggagccgagactcggagagtgatagagaagctggctcgttttgtggcggaaggaggccccgagctagagaaagtagctatggaggactacaaggataaccctgccttcacatttttacatgataagaatagcagggaattcctgtactacagaaagaagatagctgagatcaggaaggaagcccaaaagccacaggcagctgccctgaaagtttcacccccagaggacgaagaggccaagaaccttgcagaaaagttggccaggttcatagcagacgggggtcctgaagtggagaccattgccctccagaacaaccgtgagaaccaggccttcagttttctctatgatcccaacagccaaggatacaaatactaccgtcaaaagctggaggagtttcggaaagccaaggcaggctccacagtctccctccctgctcctgctcccaaccccagcctgcggcgcaagtctgcccctgaagccctgtctggggctgtgccccccatcactgcctgccccactccagtggccccagcacctgctgtcaaccccactccatccatccctgggaagcccaccaccacagccactgtgaagaggaagcggaagagtcggtgggggcctgaggaggacaaagtggagctgccacctgctgaactagcacagagggacatagatgcctcaccgtcacctctgtcagttcaggatctcaaggggcttggttacgagaaggggaaacctgtgggcctggtgggtgtcacagagctgtctgatgcacagaagaagcagctgaaggagcagcaagagatgcaacagatgtatgacatgatcatgcagcacaagcgcgccatgcaggacatgcagctgctgtgggagaaggcgctacagcagcaccagcacggctatgacagtgacgaggaagtggacagcgagctgggcacctgggagcaccagctgcggcgcatggagatggacaagacccgggagtgggcagagcagctgacacagatgggtcgcggcaagcacttcattggtgacttcttgccccctgatgagctggagaagttcatggagaccttcaaggccctgaaggagggccgagagccagactactcagagtacaaggaattcaagctgacagtagagaacatcggctaccagatgctcatgaagatgggctggaaggagggcgaggggctgggcaccgagggccagggcatcaagaacccagtgaacaagggagccaccacagtagatggagctggctttggcattgaccggccagctgagctctccaaggaggatgatgagtatgaagccttccgcaagaggatgatgctggcctaccgcttccggcccaacccctgaaccaaccccagaccggccctactactgaatattctggaaacacaaagtctagctttcagatcagccatcctggactgtggaatgttgtcacatacatct

SEQ ID NO: 2182 - DNA, 2017 bp, Cricetulus griseus
gggggtggaggaagcggaaagccgccgagtcgccggggaccgtccggggtggaaccatgttgagtcctgccaacggggagcagatccacctggtgaactatgtggaggattacctggactccatcgagtcactgcctttcgacctgcagaggaacgtctcgctgatgcgggagatcgacgccaaataccaagagatcctgaaagaattggatgactactatgagaagttcaagcgtgagacggacggcacccagaagaggcgggtgctgcactgcatccagagggccctgatccgaagccaggagctgggtgatgagaagatccagattgtaagtcagatggtggaactggtggagaaccgaaccaggcaggtggacagtcatgtcgagctcttcgaagcacaccaggacatcagtgacagcaccggcagcagcggcaaggccagccaggacaagtccaagagtgaggcaatcactcaggcagacaagccgaataacaagcggtcccggaggcagcgaaacaatgagaatcgagagaatgcatctaataatcacgaccatgacgacatcacctcaggaacgcccaaggagaagaaagcaaaaacctcaaagaagaagaaacgctccaaggccaaagcagagagggaagcctctcccgcagacctccccatcgaccccaatgagcccacgtactgtctgtgcaatcaggtctcctatggagagatgatcggctgtgacaacgatgagtgccccatcgagtggttccacttttcttgtgtgggactcaaccataaaccaaagggcaagtggtactgccccaaatgtcggggggagaacgagaaaacaatggacaaagccctggaaaagtccaagaaagaaagggcttacaacaggtagtttgtggacattcacacgagagaacagaacccgccagtgtatttatggtgtcgctgccttttcagaagtctgaggatggtcagattcgtatttttagagaatgttaggaacagatcctctccatgggatggcagaaacagcctgtgtcgtcatggtatacctgtaaccagactgagtctgcagatcggcattttagaaactacaaatataggttcggattaaacatgtcagcaagtgtcagactggtttttggggttggggagtgacttggaagtaacctaacagatgtataaagaagagatttgatttggctgttttaacaaaaatgttatggtttacaaaaaaaaaaattagccaggttgctgaagtacagcaagtgtgcttcttgctaccataatgtaaatccacatgacaagttggtcaaaggtttaaagtctaaatattatttttaaaatggtaaatgggtaattttacatgacatattttatacatggcctattcaccaactggccatttttaatgactgggtacatttttaataggtcagacacaagtggtccaggcagtgggtccaagtcttgcctttgctaccctaggtcatagtgtagccacctttaacttatatgaagtgtataaatgtacatcttgcccctgctgtattataaccggaagtgcagcctggtgctgttgtgaagccaaggtgtgcgtcctgctgtgtgtgtgagctgtatagatgtcacgtcaagaaataaatgaaacttggccagtctgtttctttagcatttaattttaacatgaatcattttaaattttttgtcttaaaaatttatacaccagcagtttagacaaagccttaagcaaattgtatattattgatctcacgtaataaggaagtatacattacatccatgccagcaaataaatgtcacaaactatttagagcagaggttaggaaatgactgtgtacttgagacccagccccaccatctgttctgtgtggcctgtgagctaagaatggtctctgtgtttctcagtggtttcaaaaatcacatttcatgatacatgaaagtcctatgaaattcagatttgagtgtctataaaataaaaactcattggaacac

SEQ ID NO: 2183 - DNA, 2016 bp, Cricetulus griseus
cacaggcccaggcagagagctcaaagaggagcggggtggccaggcacaaagcacagccagtggtgcagagcagacggagaaggctgatgcccctcgggagcctccatctgtggagctcaagccggaccccacgagtggcatggctgctgcagaagctgaggccttgtcagagagctcagagcaagagatggacgtggagccagccagcaaaggcgaggaggaggagcacgaggaagagggcacggggcctgccgacagttaaggaagaggggatgcatctggagaacggggagaacccctgaggagaatgaagagtctgcaggcacagactctgggcaggagcttagcatggagggccggaacctgcgctcaagccacctatggggatcgcaccgagtccaaggcttatggctccatcatccacaagtgcgaggactgcggaaaggagttcacgcacacggggaacttcaaacgccacatccgaatccacacgggtgagaaacccttctcatgccgggagtgcagcaaggctttctcagaccctgcagcatgcaaggcccatgagaagacacacagcccgctgaaaccctatgggtgtgaggagtgcggcaagagctacaggctcctcagcctgctgaacctgcacaagaagcggcactcgggagaggcgcgctacggctgcggggactgtggcaagctcttcaccacttcaggcaacctcaagcgccaccagctggtgcacagtggccagaagccctaccagtgcgactactgtggccgctccttctcggaccccacctccaagatgcgccacctggagactcatgacaccaacaaggagcacaagtgcccacactgcgacaagaagttcaaccaggtggggaacctgaaggcccacttgaagatccacattgccgatggccctctcaagtgccgggaatgcgggaagcaattcaccacctcagggaacctcaagcggcacctgcggatccacagcggggagaagccctacgtgtgcacccactgtcagcggcagtttgctgacccaggcgcgctgcagcggcacgtacggatccacacgggtgagaagccatgccagtgtgttatgtgtggcaaagccttcactcaagccagctccctcatcgcccatgtgcgccaacacaccggggagaagccctacgtctgtgagcgctgtggcaagagattcgttcagtccagccagttggccaatcacatccgccaccatgacaatatccgaccacataagtgcagcgtgtgtagcaaggcctttgtgaatgtgggggacctgtccaaacacataatcatccacactggagagaagccttacctgtgtgacaagtgtggtcgtggtttcaaccgggtggacaacctgcgttctcacgtaaagaccgtgcatcagggcaaggcgggcatcaagatcctggagccagaagagggtggtgaggtcagcgtggtcactgtggacgacatggtcacactggctacggaggctctggcagcaacagcggtcactcagctcacagtggtaccagtgggggctgcagtgacagctgatgagacggaagtgctgaaagccgagatcagcaaggctgtgaagcaggtgcaggaagaagaccccaacacccacatcctctacgcttgtgattcctgtggggacaagttcctggatgccaacagcctggcccagcatgttcggatccacacagcccaggcactggtcatgttccagacagatgcggacttctaccagcagtatgggccaggcagcacgtggccagccgggcagatgctgcaggctggagagctggtcttccgtcccagggatggggctgagggccatcccacactggcagaaactccgcccacagctcctgattgcccaccaccagcagagtgagcaggtggcctctgactgcttatttaaagtgggtggcaccctgggactcaaggtgctcctgccccatccctagagaataaattggattattttactaa

SEQ ID NO: 2184 - DNA, 2016 bp, Cricetulus griseus
tgaatttccagcaagatacagcccatatagaccttactgctgtgttcaccagggtttgctgcatttacaatacagcagaacttgattcttcattaccaggctgtacataaatcaaatcttcctacattttctgcagaggttgaagaggaaagtgaagttggcagagaaagtgaagaaattgaaactaaacaatcaatgaaagaattccggtgtcaggtgagtgactgttctagaatttttcaagcaattactggcctaatacagcactacatgaaacttcatgaaatgactcctgaggaaattgaaagcatgacagctgctgtggatgttggcaaatttccatgtgaccagttggaatgtaaatcttctttacaacttatctgagctatgttgttcatcttgaggtagaccatggaattggaacaaggacaagtagaacagaagaagatggcatctgagtcaagaggatggtaaagatgatatgaaagatcctgacacatttgtgttagagaaaaatgataattcaacaacagctaacaactccacaggaagaaggtataaaaggtgaaaaagatgaaatggatgagctaacagaattatttattacaaaattaataaatgaagatagcacaaatgtagaaactcaagttaatactactttaaaggtaaataatgattttcaggaaaataattcctgcctatcagaaaaacaaaaggcaagcaatttgaagagagttcataaaagaaaaaagcatcgtgcagaaataaaaaaagaaaggttagataaaactgagccagaattatcgttgggggtaaataatgcacacaaagacgaagagaccgctgtggcagttcaaaccactgaggagcatcctgcatccttcgactggagctccttcaaaccaatgggatttgaagtgtcatttcttaagtttcttgaagaatctgcagtgaagcagaagaaaagtctgacagagaccactcaagcagtgaactaagagacgggtcccattctttatccctatgggacttgagcaaaatcgatacttcagttattgtaaataattgagttaaacctcaaacttctgtcacccagttgtcctttccatgaactatactgaattatctgtgtgattggtatcttttcagcagatcaccactcatgtatagcagtactctttatttgtagatagtttttgtatatatttattattgtaaatcatttgctgccaccagcagtctgtaagtctaaaatgagtaaatgatacatttatatttgcaattcgcacggtaggcacattacagcactctgctttgtgagtttgccatcctctattcttggatggtattcatgtgaaatttgagcagattctttagtagtttcatatagcttcaggttttttttttttctttttttcctattgcttctaattggatatagttatgagtccatgaaatgtaatggaaatgtgaataaagactttactacattgaagattttaaacattggtattttaaaatatcctttgtcaatgtgatagaaactagtagtggagcagtgtaaatattcaaggtggtggtttgtgaagtagcccagtattgccttaaataaaatcacatttcagttttgtggaaagaattttttagacattttataaattttaaaattggtatcatcaaagtgagcccatcttgtgtttataaaatgcaagaatccttaccatttatagttatatagatgaaacactttctataaggaagtcatatgttttgattttactatttataggccttaggttgtgcagattgtctgtatttttcacattgtctaatgatactatttttcattagattagtcttcaagaacagtattagtcatgattgatgatttgatcactcagtatctaattcttgctcagctttattcaccaacctatgctggaaggtagcagttattctcggagcactgacagccacgtggaaagcacagcaaacgtcaatactgcaaacaaggca

SEQ ID NO: 2185 - DNA, 2015 bp, Cricetulus griseus
gcggtcgcaaccctcgccccctctgggaaactttgcccattgcagcgggcggacacttttgcactgggacttacagtctgcgagtgaggacaggactccccaggcgccggggaggaaatttttgtctatttggggacagtgttctctgcctctgcccgcgatcggctcccctgaaaggagctcctcgcgctctctgaaggctggatatccttggggcggtggaaaacccgcagacagccgcgacgatgcccctcaacgtgagcttctccaacaggaactatgacctcgactacgactcggtgcagccctatttcatctgcgacgaggaggagaatttctatcaccaccagcagcagagcgagctgcagccgcccgcgcccagtgaggatatctggaagaaatttgagctgctgcccaccccgcccctgtcccccagccgccgctcggggctctgctctccatcctatgtgacggtcgctgcgtccttctccccgagggaggacgacgacggcggcggtggcaacttctccaccgcggatcagctggagatggtgaccgagctgctgggaggagacatggtgagtcagagcttcatctgcgaccctgacgacgagaccttcatcaagaacatcatcatccaggattgtatgtggagcggcttctcggccgccgccaagctggtctccgagaagctggcttcctaccaggctgcgcgcaaagacagcgccagcccgagccccgcccgcgggcacggaggctgctcctccacctccagcctgtacctgcaggatctcaccgccgccgcgtccgagtgcatcgacccctctgtggtctttccctacccgctcagcgacagcagctcgcccaagtcctgtacctcgtccgactccacagccttctctccttcctcggactcgctgctgtcctcggagtcctcccctcgggccagcccggagcccctggtgctgcacgaggagacacctcccactaccagcagcgactctgaggaagaacaagaagatgaggaagaaattgatgtcgtgtctgtggaaaagaggcagccctctgctaggaggtccgaatcagggtcatccccatccggaggccacagcaaacccccacacagcccgctggttctcaaaagatgccacgtctccactcatcagcacaattacgcagcgcccccctccacgaggaaggactatcctccagctgccaagagggccaagttggacagtggcagggtcctgaaacagatcagcaacaaccgcaaatgtgccagccccagatcctcagacacagaggagaacgacaagaggaggacacacaacgtcttggaacgccagaggagaaacgagctgaagcgcagcttttttgcccttcgtgaccagatcccggagttggaaaacaatgaaaaggcccccaaggtagttatcctcaaaaaagccaccgcctacatcctgtccatccaagccgaagaacgcaagctcatctcagaaaaggacttactgaggaagcggagagaacagttgaaacacaaactcgaacagcttcgaaactctgttgcgtgaactgacctatggggaggaggagctggaatgagagtagggagagcgcttcctcctcttagaactgatgcgctggacttcaaatgcatgctcgcagcctaacctcacaaccttggctggggctttgggactgtaagcttcagccataatgttaactgcctcaaactttaggcataaaagaacttttttatgcttcccatcttttttcttttcctttagcagatttgtatttaattgtttttaaaaaaaaatcttaaagtttacccacttttccaatgtaaataggacccttaaatgtaaataactttaataaaacgtttataacagttatacaagattttaagacatgtattataaaccatatttttttatttaaatacattttcatttttaaagttgatttttttctattgtttttagaaaaaaataaaataattggaaaaaata

SEQ ID NO: 2186 - DNA, 2015 bp, Cricetulus griseus
gagtttgactcccaggagcagctggtgcatcatatcaacagtgaacatatccatggggagcggaaggagttcgtgtgccattggggggctgctccagggagctgagacccttcaaagcccagtacatgctggtggtgcacatgcgtagacacacgggcgagaagccgcacaagtgcacgtttgaaggttgtcggaagtcatattcccgccttgaaaaccttaagacgcaccttcggtcacacacgggtgaaaagccttacatgtgtgagcatgaaggctgcagcaaggccttcagcaatgccagtgaccgcgccaagcaccagaatcggacgcactccaatgagaagccgtatgtatgcaagctgcctggctgcaccaagcgctacacggatcccagctcactccgcaaacatgtcaagacggtgcatggtcctgatgcccacgtgaccaagaggcatcgaggggaccgccctttgccacgggcaccgtccctttccacggtggagcccaagcgggaaagggaaggagggcccatcagggaagagagcagattgactgtgcccgagggtgccatgaaaccacagcagagccccggagcacagtcctcctgcagcagtgaccactcccccagccaggcagtgcagccaataccgacagcggtgtggagatgactggcaacgcaagggggcagcactgaggacctgtccagcttggatgaaggaccttgtgttgctggcactggactttccacacttcaccgcctggagaacctcaggctggatcagctgcatcagctccggccattagggtcccggggtctcaaactgcccagtttaacccatgctggcccactgcggcacacagcctggatcggatggggcatcttcctgtaccttcttggagaagccgagctgagtacccaggatacgcctatatccagtgtcctcgacttgaacattatggacaagtgcaggtaaaaccagaacaagggtgcctggtggggtctaactccaccggactggcaccctgcctcaatgcccaccccacagaggggtccccaggcccgcaaccttcattttcccattactcccaaccccctcctccccagtatccccagtcaggtccctaccctcggcctccccatgattatctcccgtcagaacacaggcctggccttgattttgactccccttctcattctgaaggacagctcaaagctcagcttgtgtgtaattacgttcagtcgcagcaggagttgctgtgggagggcaagggccggggagggctccccaaccaggaacttccatatcagagctccaagtttctggggggttcccaggctaatcagagccctgtcaagggtccagcagcggatctggctttgcacctgctctggccagtcacaagcccggctcctttccggccccttcgccatgccatgagacttttgcagtgggtataaacaggccttcccataggccagcagcagtgccacccaggcttctgcccccattgccttcttgctatggacctctcaaggtagggggcgccaaccccagctgtggccatcctgaagtgggcagattgggagcaggccctgccttgtaccctccccctgaagggcaggtgtccaaccctctggattctcttgacctggacagcactcagctggacttcgtggctattctggatgaggcccaggggttgagtcctcctccttcccacgagcaaggggacagctctaaaaataccccacctccctctgggacccccaacatggcagtgggtaacatgagtgtcttactggggtctctgccgggagagacacaattcctcaactctagtacctaaaaggataaggagtcccaaccggatcatgtttcctagatggccacatgaggtgcccgggaatgggaggattgggctggggaactctatttagtctatgtatgttccaggagaaaactttaataataatgacagtttcctgacaataaaggaatgctgagaaacaa

SEQ ID NO: 2187 - DNA, 2015 bp, Cricetulus griseus
cgaagaaggagaagcgtgggcccggtttccgaaaggcccggaaacagaagggtgcagagactgaactggtcaaattcttgcctgcagttggtgatgagaattcgagtcgtgctcggaagagggcagccaagaggaggtccgggtccgttgaagtccctaagccaaaataagtctccagggatcaaaacgttgcctggagagttagcaaaaggagctgtccaggctcggggtaagaagcgcccagcaccaacttctaacagtgatggggatgaggaggaagactctgaggaagatggcgtggcaaaccagggggacctgtggggctctgaggacagtgatgctgacatggtggatgactatggagctgactcagactcagaggatgaggaggaaaagttgttgcccattgaaagagctgctctgaagcagaaggcccgggaagctgctgctgggggccagtggagtgaagaggagactgatgaggaggaagatggtccccctgcgccccctgcgccccgtccctcaaaggatgatgaggcggaggggggtttgcagattaatgtggacgatgaggaggcctttgtgctgccccctgctgaggagatggagcaggatgcccaggctccagacctgcaacgagttcacaagcggatccaggatatagtgggggtgcttcggaattttggggctcagcgggaagaagggcggtctcgatctgagtatctgaatcggcttcagaaggatctggccacttactattcttacggagacttcctgctgggcaaactcatggagatcttcccactgtctgagttgatagagttcttagaagctaatgaggtaccccggccaatcacccttcgcaccaacaccttgaaaacccgtcgcagagaccttgctcaggctctaatcaatcgtggagttaatctggatcccttgggaaagtggtccaagtctggacttgtggtgtatgattcttcagtgcctattggagctactcccgagtatctggctgggcactatatgcttcagggagcctcaagcatgttacctgtcatggccctggcacctcaggagcatgaacggatcttagacatgtgttgcgctcctggagggaagaccagctacatagcccagctgatgaagaacacaggagtgatcctcgccaatgacgccaatgctgagcgcctcaagagtgttgtgggcaacctgcatcgtttgggagtcaccaacaccattatcagccactatgatggacgccagttccccaaggtggtggggggctttgaccgagtgctgctggatgctccttgcagtggcacaggagtcatctccaaggaccctgctgtgaagacgaacaaggatgagaaggacgtcctgcgctgtgcccatcttcagaaggaactgctgcttagtgctattgactctgtcaatgctgcctccaagaccgggggctacctggtctactgtacctgttccattacggtggaagagaatgagtgggtggtagactatgctttgaaaaagaggaatgtgcggctggtgcccactggcctggactttggtcaggaagggtttacccgctttcgagaaaggcgctttcacccctctctgcgctccacccgacgcttctaccctcacactcacaacatggacggcttcttcattgccaagttcaagaagttttccaattctattccccagccccacacaggaaatgtggcagcagccatcccttcggagcctgagctgaaggatcaggccactcccttgtctgagaacagtggtcagcccaccaagggagctggtggggcggcaaaggcaaagcagcagctggggagacagcagcatcccagaaagcccttccagaaactgaatggcgtctccaaagggctaggtgcagaatccactgcaccttctgtcccaaaggcccaagtgtctgcccggccctgcaatgatggtctccccactgtgcatacatatgaaatttaatatacatattttcacccctaaaa

SEQ ID NO: 2188 - DNA, 2015 bp, Cricetulus griseus
gccaccaaagaagccttgtgagccatgtggactttccttggcatcgccaccttcacctatttctataagaaatgcggggacgtcaccctggccaacaaggagctcctgctgtgcgtgctggtgttcctgtccctgggcctggtgctctcctaccgctgtcgccaccgcaacgcaggcctcctggggcgccagcagagcggcgcccagttcgccgccctctccgacatcctctcggctttgcctctcatcggcttcctctgggccaagtcaccccctgagtcagagaagaaagaggagccggagtccagtaagtgcagaaaagaaaccagcgtgtcagaaacaacactgacgggggccgctacctcagtaacagcatcttctctgaatgatccggaagttatcatcgtggggtctggtgtccttgggtcggctttggcgacggttctttccagagatggaagaaaggtgacggtaatcgagagagacttaaaagagccagacagaatcgttggcgagcttctgcagccaggtggttaccgcgtccttaaagagctgggcctcggagatacagtggagggttttaatgcccatctgatacacggctacatagttcatgattatgaaagcagatccgaagtgcagattccctacccggtgtcggaaaacaaccaagtgcagaatggagttgctttccaccatggcaagttcatcatgagtctccgaaaagcagctatggcagagcccaatgtaagggttatagaaggtgttgtacttcagttattagaggacggtgacactgtgacgggcgttcagtacaaggacaaggagactggagacaccaaggagctccacgccccgttgactgttgttgcagatgggctcttctccaagttcaggaagaacctcatctccagtaaagtttctgtttcatctcactttgtgggtttccttatgaagaatgcaccacagtttaaagccaattttgcagagcttgttctgctcaacccaagtccagttctcatctaccagatctcagccagcgagactcgggtacttgttgacatccgtggggaaatgccaaggaacttaagagagtacatggctgagcagatttacccccaaatacctgaccacctgaaggaagcgtttctagaggcatctcagagcgctcgtctgcggaccatgccagcaagcttcctgcctccttcaccagtgaacaaacgaggggttcttctgctgggagatgcatataacctaaggcatcctctcactggtggaggaatgacagtcgctttaaaagatgtgaaattatggagaaaactcttaaaaggcattcctgacctctatgacgatgctgctgttttccaggccaagaagtcattctattggtcgaggaaaaggacccactccttcgtggtgaatgtactggcccaagctctgtatgaattattttccgctacagacgattccttgcatcagctccgaaaagcttgctttctttattttaaacttggtggagaatgtgtgacgggtcctgttgggctgctttctgtgctgtcccctcaccctctagtgttgatccgacacttctttgccgttgccatctatgccacatatttctgctttaaatcagagccatgggccacaaaacctcgagcccttttcagtagtggtgctgtactgtacaaagcgtgttctataatattccctctcatctattcagaaatgaagtatctggttcattgaagggggagccacttggaagtcaagcccatggaagaggatgtatatagcccagaactgtctgacttctacggtggagactcaaggaccaagctgtgtataagcatgtaaataatgccttaatttacaattgagaatgaagggtcaaatgagctagtgtttaaaagaatgattctttccacaaattagtgctaactctggagtcttcttttgacttcagtatttggggtgattcactggacatgcaaataaaatcaagagtgaactactta

SEQ ID NO: 2189 - DNA, 2015 bp, Cricetulus griseus
cagaaagttcaggtccagagcagcagcaagatactgccctttccgatcatgaagctccaggtattggtgatgctgatgtcctggtttggtgtcctgagctgggtgcaggcagaattcttcacctctattgggcacatgactgacctgatttatgcagagaaggacctcgttcagtctctgaaggagtacatccttgcggaggaagccaagctctccaagattaagagctgggccagcaagatggaagctctaaccagcaagtcatcggctgaccctgagggttacctggctcatcctgtgaatgcctataagctggtgaagcggttgaacacagactggcctgcactgggtgaccttgtcctgcaggactcagctgcaggttttgtcgccaacctctcggtgcagcggcagtttttccccactgatgaggatgagtctggagccgccagagcgctgatgagacttcaggacacctacaaactggacccagacacaatttccagaggggaacttccaggaacaaagtaccaggccatgctgagtgtggatgactgctttggcatgggccgctcagcctacaatgaaggagattattatcatactgtgctgtggatggagcaggtgctgaaacagctcgatgctggggaagaggccaccaaaaaaaaatccctggtgctggactacctgagctatgctgtcttccaactgggagacctgcaccgtgctgtggagctcacccgccgcctgctctctcttgacccaagccatgaacgagctggcgggaatctgcggtactttgagcgactgttagaggaagaaagagaaaaatccttgttcaatcagacagaagctggactagcgacccaggaaaacgtgtatgagaggcccgtggactacctccctgagagggatgtgtatgagagcctgtgccgtggggagggcgtcaaactgaccccccagaggcagaagaagcttttctgtaggtaccatcatggtaacagggtgccacagctcctcatcgcccccttcaaagaggaagatgagtgggacagcccgcacattgtcagatactatgatgtgatgtcggatgaagaaattgagaggatcaaggaaatcgcgaagcccaaactcgcaagagccactgtccgtgatcccaagacaggtgtcctcactgttgccagctacagagtttccaaaagctcctggctagaggaggatgatgaccctgttgtggcccgagtcaaccgtcggatgcagcatatcacagggttgacagtgaagactgcagaactattgcaggtcgcaaactatggaatgggagggcagtacgaaccacactttgacttctctaggagcgatgagcaagatgctttcaagcgtttagggactgggaatcgtgtggccacattcctaaactacatgagtgatgtagaagctggaggtgccactgtcttccctgacttgggagctgcaatttggcccaagaagggcacagctgtattctggtacaaccttctgcggagtggggaaggtgactatcgaacgagacatgctgcctgccctgtgctcgtgggctgcaagtgggtctccaataagtggttccatgaaagaggacaagagttcttgaggccttgtggaacgacagaagttgattgacgtccttttctgctctaccccttcctggccccacagcccaagtcatcttcaagttcagtgtgaccacagattcctttgtatgatccagctcctatcattggaggagccagtgtttgtctgaatttgagagagtatgtcctgggcctagtcctgggtgacctgggcccagactctggccagcctgtgcctactctggctccaagggtagcattggtatggctgctgcagaaccagactgtgtagcacctagttcggtgcctttgtacctcagatgtttcaggtgggagatgttttagtgaaaccaaagttctgatgctgtgtttacaagtttgttgttatgacatttctatttgttgtgg

SEQ ID NO: 2190 - DNA, 2014 bp, Cricetulus griseus
  modified_base (72)..(72): a, c, t, g, unknown or other
gtgatcttagacatctcgaactacacgccacagaaggtaaagcaacagacggccgtgtctgagaccttttcngagtcgtcctccgacagcacccagttcaatcaaccggttggtggtggtggttttcggcgttgccaacagtgaggcctcaagcagtgagggccagtcgagcttgtctagcctggagaagctcatgatggactggaatgaagcatcgtctgctcccggctacaactggaaccagagtgtcctctttcagagtagctccaagcctggccgtggacggcggaagaaggtggacctgttcgaggcctcacatctgggctttttcaacatctgcctcggccactgcctctggctacccgtccaaacggagcaccgggccccggcagcctcggggtggccggggtagtggggcctgctcagccaagaaggagcgaggtggtacagctgctaaggccaagttcatccccaagccacagccagttaatccactgttccaggacagtccagaccttggcctagactactacagcggagatagcagcatgtcaccactgccctcccagtcaagggcctttggtgtgggagagcgcgacccctgtgacttcatgggaccctactccatgaatccatctacaccttctgatggcacttttggccaaggcttccactgtgactctcccagcctcggtgctcccgagctggatggcaagcatttcccaccgctggcccacccgcccacagtgttcgatgctggcctgcagaaggcgtattcacccacctgttcccccacactcggcttcaaggaagagctgcggccaccacccacaaagctgactgcatgtgagcccctcaagcatggtcttcagggggctagcctgagtcatgcagctgcagcccaggcccacctgagctgccgggacctgccgctgggccagcctcactatgattcccctagttgcaagggtacagcctattggtacccaccaggttcagctgcccgtagcccaccctatgaaggcaaggtgggttcagggctgctggctgacttcctgggcaggacggaggctgtatgcctcagtgcccctcacctggctagccctccagccacgcccaaggccgacaaggagggccacgtggagatggcccggccgccaggtccaccccgtggccctgctgcagccactgctggctatggctgcccactccttagtgacttaaccctgtcccctgtgccgagggactcgctgctgcccctgcaggacactgcctacaggtatccaggctttataccacaggcgcatcctggcctgggtggaggccctaagagtggcttcctggggcccatggcggaacctcaccctgaggacacattcaccgtcacctccctgtagtaccaactgaagtgccgactggaccacgaggttttgttcctggctttcaaaaaaccaatgccaagacccctcccagcgtccacatcgtcctctggcaggagcgcctgcccctctgcctcccacctgccctttgcaccccctgcagccccatatcctacctcccacccctccctgcccatctcctccacgcagaagccgaaggtgagccctttctgcacaaaaccagcaattgtaaatactttttaaaatgtacaaaacttaaaacaaaacacagttttagaaaaagacaaaaaaaaagagagagagagagagagcgagtgtgcaagaggttgcgagcggggcttcaaggtgtctagaacccctgcaagtgtgcactgagaaatttatctacaggtcgtttgacaaaaatgaacaatatcctatttattgtatatactgttttattataaattgtggattgtatattgcattctgtaaacctgctgtggtcccgtggtgtgcaaattcgcatgggtggggggggaggagaacctcttggggagttctttttttttttttttcttttctttttaaaaaaagtacaaaaaaaaaaaaaaaaaaaaaaaaaaaaaaaaaaa

SEQ ID NO: 2191 - DNA, 2013 bp, Cricetulus griseus
ctggtggtggtcggcggtggcagagatgacccaagccgagaaaggggacgcggagaacgggaaggagaagggtggggagaaggagaaggagcagcggggcgtgaagcgacctatcgtgccggcgttggtgcccgagtcgctgcaggagcaaatccagagcaacttcattgttgtcatacacccaggttcaacaactttaagaattggtcgagccacagatacacttcctgccagcattccccatgtcattgcacgaagacacaagcaacaagggcagcctctgtacaaggacaactggctcctaagagaaggactaaataaacctgaaagtaatgaacaaagacaaaatggccttaaaatggtggaccaggcaatatggtctaaaaagatgtcaaatggtacaagacgaatccctgtgtcaccagaacaggcacgctcctacaacaagcagatgcgacctgccattctagatcactgttctggaaacaaatggacaaacacatctcaccagcctgagtatttggtgggagaagaggctttgtatgttaacccactggactgttacaatattcactggcctattagaaggggtcaattgaatatccatccaggccctgggggctccctgacagctgttctggcagatattgaagtgatatggtctcatgcaatacaaaagtatttggaaatcccactgaaagatttaaagtattacaggtgcatcttattaatccctgatatctataacaaacagcatgtgaaagagttagtacatatgatactgatgaagatgggcttttcagggattgtggtccatcaggagtctgtgtgtgctacgtttgggagtggcttaagcagcacctgtgttgtagatgttggggaccagaaaacaagtgtgtgctgtgtggaagatggggtgtctcatcggaacacacggctttgtctggcatatgggggctctgatgtgtcgaggtgtttttactggctcatgcagcgagcagggttcccttacagagaatgtcagttaacaaataaaatggattgcctcctcttgcagcaccttaaagaaacattttgtcatttagaccaggacatctccgggcttcaagaccatgagtttcagattcgtcacccagattcccctgccctgctttatcagtttcgattaggagatgaaaagctccaggctccaatggcgctgttttacccagcaacttttggaatcgtgggacagaaaatgacaactttgcagcacagatcccagggagatcctgaggacccgcacgatgagcattacctgttggccacacagagcaaacaggaacagtccgcaaaagctactgctgaccggaagtctgcatccaaacccattggatttgagggggatctccgtggacaatcctctgatcttcctgaaagacttcatccccaggaagtagatttggcttcttcccagggagactgtttgatggctggcaatgactctgaggaggccctcactgcactgatgtccaggaaaactgccatctcattgtttgaaggaaaagccctgggccttgataaagccatcctgcacagcgtagactgttgttcgtctgatgataccaagaagaagatgtacagctctatcctggttgtgggaggtggtttgatgttccataaagctcaagaatttctccagcacagaattctcaacaagatgccaccttcattcaggcgaattattgaaaatgtggatgtgatcacaagacctaaggacatggatccccggctgattgcatggaaaggaggagcagtattggcgtgcttagacactactcaggaactgtggatttatcagcgagaatggcaacgctttggtgttcgaatgttacgggagcgggctgcttttgtgtggtgaaaaccaaaccaaatctctggacataaatacgtaaagaatatatgtattttaatttattgactttaagcttaattttcctaccaattaaatgaattcaattttatgttaaagta

SEQ ID NO: 2192 - DNA, 2013 bp, Cricetulus griseus
gctccacccggcccgcggcctcgctgtccgtggcggggcaggtgcttttgccgtggtgaacccttgctctggcctctagtcattggctgctggctgctggctcccgatcctgaactcttgttgaagctgggaaggggatgagaatagggtaggtgagctccagataagccagccctgccagagacctccatttttggtggatggtgctctgagccacagtgtgcttcggtatttggatctatggacctgttttgaaccatagagcctgcctatgggggaaggtgacgccatctgggccccatccatccttcctcacagcaccctcagcaccttaagccaccaccctgagctacattttggaggaaagatggaatctaaggtctcagaaggtggcctgaacgtaaccctgaccatccgcctactgatgcatggaaaggaagttggaagcatcattgggaagaaaggagagacggtgaagaagatgcgcgaagagagtggcgccaggatcaacatctcagagggaaactgcccggagagaattgtcaccatcacaggcccaactgatgccatcttcaaagcctttgctatgatagcatacaagtttgaggaggacatcattaattccatgagcaacagccctgccaccagcaagcccccagtgacattgcgactagtggtcccggccagccagtgcgggtccctgattgggaaaggcggctctaagatcaaggaaatccgggagtccacaggtgctcaggtccaggtggcaggtgacatgctgcccaactccacagagcgggcagtgacaatctcagggaccccagatgccatcatccagtgtgtgaagcagatctgtgtggtcatgctggagtccccaccgaaaggtgccaccattccctaccgcccaaagcccgcctccacccctgtcatttttgcaggtggtcaggcctacacaatccagggacagtacgccatcccccacccagatttgaccaagctccaccagctggccatgcagcaaaccccctttcctcccctcggacagaccaaccccgctttccccggagaaaagctgcctttacactcctccgaagaagctcaaaatctgatgggccagtcgtcaggtctggatgccagccccccggccagcactcatgagctcaccattcccaatgatcttataggctgcataattggacgccagggcaccaaaatcaatgaaatccgacagatgtctggggctcagatcaaaatcgccaatgccactgaagggtcgtcagagcgtcagattaccatcaccgggaccccagccaatatcagccttgcccagtatctcatcaatgctaggctgacatctgaggtcaccgggatgggtgcactctaacctacccaacatcctccatttcacacatcggatggctccagcctgcagcctcaccagctggcacactgtacagactgcctgtccttccttgcagatatgaatagagcgttttctttacaaacagacgatagtgcgagtctgcccactcaggccctgtgcgctccgtattagtgtagtctccacgcgctggcatgcagctctttactttaatgctcaacgtattcccaaatgtgatgtttcagagatttcttcctcatatccatgtgactgtctgtttaaaagttggtttgatgctttaacagcacttcctatgtcctgctgccccttgttctcagagcccctcccccctcccctggtctactgactcatccccaccctaggttgtacgcagggatcagaggtacttttcttgcaacctgcagggagcatctgtaaaggggggacttgggggttatctaaggagcaaggcagagtgccagaaggtggggtgggacccttgctttgctgggatatctcgggggagggggcacgttgtggcccccatgtgtcttccaagatgactaagaacaaggacttgccagaaagttcatctgcacccctcagagttcaataaatgtcgtgttcctccc

SEQ ID NO: 2193 - DNA, 2012 bp, Cricetulus griseus
ttgaataacagaaatatcaagccattgttgaatgccttcagtcagttacctgggagtgaaaatgaaaaaaaatagtacccttgaccaagctttcagaggtgttctggaaagaagaaattataaatcattcggcatgtgagaatgttttagctattatttctcttgctattgggggagtaactgaaagtgtctgtactgcgtccacaccatttgtgctgttgggagatgttttggactgccttcctttggatcagtgtgacacaatattcacttttgttgaaaaaaatgtttctacttggaaatcaaatacattctattctgctggcaaaaattatttactacgtatgtgcaatgatctcctcagaagattatctaaatctcaaaatacagttttctgtggacgaattcaactctttttggccaggctttttcctctatctgagaaatcaggtcttaacttacaaagtcagtttaacctggaaaacatcactgttttcaatacaaatgagcaggaaagcaccctgggtcagaagcatgctgaagatagagaggaagggatggatgtagaagaaggtgaaatgggagatgatgaagccccaacaacttgctctattccaattgattacaacctatatagaaaattctggtcgcttcaggattacttcaggaacccagtacaatgctatgagaagatttcttggaaaacttttctcaagtattctgaagaagtgttagctgtttttaagagttataaattagatgatactcaagcctccaggaaaaagatggaagaattgaaaacaggaggagaacatgtatactttgcaaagtttttaacaagtgaaaagttgatggatttacagctgagtgacagtaactttcggcgacacatcctgttgcagtatctcattttatttcaatatctcaagggacaggttaaattcaaaagttcaaactatgttttaactgatgagcaatcactctggattgaagatactacaaaatcagtctaccaactgctatctgaaaacccccccgatggagaaagattttcaaagatggtagagcatatattaaacactgaagaaaattggaactcatggaaaaatgaaggctgcccaagttttgtgaaagaaagagcatcagacaccaagcccacaagagtggtacggaaagagcagccccagaagacttcttaggcaaagggcccaacaagaaaatcctgattggaaatgaggagctaacaaggctttggaatctctgtcctgataatatggaagcctgtaaatcagaaacaagagaatacatgccaaccttggaggagttctttgaagaagccattgaacaagcagaccctgaaaacatggttgaaagtgaatataaagctgtgaacaattcaaattatgggtggagagctctcaggctcttagcacgaagaagccctcacttcttccagccaaccaaccagcaatttaagagtctgccagagtacctggagaacatggtaataaagctagccaaggaactaccacctccttctgaagaaataaaaacaggtgaagatgaagatgaggaagataatgatgctttactgaaggaaaatgaaagccctgatgttcggcgagataaacctgtaacaggggaacagatagagttatttgccaacaaacttggtgagcaatggaagattttggctccgtacttagaaattaaagactctgaaattaggcagattgagtgtgacagtgaagacgtgaagatgagggccaagcagctccttgttgcctggcaagatcaagaaggagctcatgcaacaacagataacctgatcagcgcactaaacaagtctggattaagtgaccttgctgaaagcctaactaatgactccgagacaaatagttagcttgctttcttttctttcttttttattaaactgtgataagattttgttaccaagcggcatttgataagaggtccagtggttttggtaaacaataaacagttttataaca

SEQ ID NO: 2194 - DNA, 2012 bp, Cricetulus griseus
ggaaatacaagaagacgcataagaacatcatgatcaacttgatggacattttggaggtggacaccaagaagcagattgttcgagtggagcccttggtgtctatgggtcaggtgacagctttgctgaactccattggctggaccctgcctgtgttgcctgagctggatgacctcacagtggggggcctgatcatgggcacaggcatcgagtcgtcatcccacaagtacggtctcttccaacacatctgcaccgcctatgagctgatcttggcagatggcagctttgtgcgctgcacgccgtctgaaaactcagtaccttttctatgctgtaccctggtcctgtcggaccctgggtttcctggtggctgccgagatccgtatcactccctgccaagaagtacgtcaagctgcgatttgagccagttcggggcctggaggctatctgtgaaagttcacccatgttatatgctgattgctattatgaaccgcgaggagttctgggagatgtttgatggctccttgtaccacaagctgcgcaagcagctcggctgccaggacgccttccctgaggtgtatgacaagatctgcaaggcagcgaggcactgagcggggcacctggggagccagatgcatgggaatggacttgctctccctcgctccagcttctctgctttcccagatttcagaaagaaacccctccagaaattcccgaggcagcctgatggcctccagggcagctcaggcaagtggaagcacatggggcaggcaggcccaggatgtgctgtgccaaagccaggtccagtccaaagttctctctgccatctttgggccatcctgccccttcttcctgtgtgcttaggcccgagggctaccccagccatcactgagcccactcaggtctcgaaaaaagcatctcaagatgggaagcctggccttcctgggcttttctttcttgactcccaccatctgaacctccgctagaatcccctgagtcacaacaggggcacatgctcatgactgtgtcacataggggtggttcccacgctgagtgagaaaggggtattccgccctgtgctactgtgaggaccctccctggggttggaaggaaagcatccagggtcactcacttccccctcccccgccccccagctctagttaatttcagtgccttacaaatcctaagctcagagaaagttagctccatttccgttccagagggaggggcctccaaggtccttctgccttgttagtgaagcgtggttggttgtacagccccaccttcagaactgcctggcccagctgaaaacccagagtccgagggggaatcaagtcctggaggagaagccagaattcaagagctgagctggtcacagtcctcgccgactgatgactctgcttgctgcagatgaatggtcaatgcgagctaggttagttagtgtgataactgacacaccatcattccaccagtcaagcctccatcccaaagccactgggactgtggcagtgacgccagagtgtgtcactctaaataaccaaaatccagccctccacagaaactccccaggacctgggaagggaagggattttgaatcacattagcctcaggttagtgtttggctccaatgtcttgcctgaaaagtggccgtcttccacgcatggtgagctgggtcccggacagtgcatgtggaaagtcaaagcaagcctctcccctccatggctctggtttcttggctgcatgaaagttttctggaaaatcaagagttgtagccactgtctggctagaaagctgaattggctgttactggaagggaggagagggggatggggatgggtgtggcagtgtgttgtgtgtgtttttttttttttaatttggtcatggggactaaggagaaggcatgaatcccccttatcaggctctcgcagcctcaggcactgtgcctactctccagaacacatgtccctgtggctgtagggccaccacttctgtaaaaataaagtatggcctggaagcta

SEQ ID NO: 2195 - DNA, 2012 bp, Cricetulus griseus
gatggacagccctgaggtgacctttacgctggcctacttggtgttcgcaatgtgcttcgtgttcacgcccaacgagttttactcggccggtctcaccgtgcagaacctgctgtcaggctggctgggcagcgaggacgccgctttcgtgccctaccaccttcgtcgcacttccgccacgctcctaagccattcactgctgccgttgggctactacatgggcatgtgctttgcagcttcagaaaagcagctctactcccctggtcatgcctcacaggcctggcagctgttccttctcctggctgtgacccttccccttgtctcctctaccctgatctactactggtcctggaacaaatggacccgacacccactggcccaaaccctggccctctatgcccttccacagtcaggttggcaagcagttgcctcttccatcaatacggagttccggcggattgacaagtttgctactggggcacctggtgctagagtgattgtgacagacacatgggtaatgaaagtgacaacataccgtgtgcatgtggctcagcaacaggatgttcacttgactgtgacagagtctcggcagcacgatctctcaccagactcaaatctacctgtgcagcttcttaccatacgtgtggcgagcactaaccctgctatgcagccctttgatattcggctgaactcagcggaatatggcgaactatgtgagaagctccacgccccaatccgaagtgcagccaatgtggttattcgccagagcctgggtgacctcttcctagaaacatttgcctccctagtggaggtcaacccagcctattcagtgcccagcaaccaggagcttgaggcctgtacaggctgcatgcagacacaggccagtgtgaagctggtgaagacctgccaggagccagcggtgggcgaatgccagcagtgttattgccgtcccatgtggtgtctcacttgcatgggcaagtggtttgccagccgtcaggatccccagcgccctgacacttggctggctagccgtgtgccctgtcccacttgccgtgcccgcttctgtatcttggatgtatgttgtgtacgctgagcatcgcaacatagtctttgtctccactagccactgatgaggggtggctaaagctccttgaccttgacaaaaggttctactcaaaacatacacttatctgcagccagtctctgtcttgagtctggttgattgaggattttgatttagaagaaattctcatggaaataccctacctgtaccttcagcatcctctcttcctagttacctccaggtggggctgataatttacatagaatgttccaaagccccaagatgttggagtttggcccaagagctttcatttggccagtttgccttaattctattacagatcataagagtgctctcccaagttacacatgagggttgcttaagctttagagggcccacagtgcttttggcgtcttctcttgcttcgttagtccaggggagaccaagatctcacactcccggccctagggagggcttttagggagctaaggaccagagaactacagcactatccagaaagaaatctgccagggctgcagtacaggcttagctagggctcttgtgggttccttggatcaggaagggtacttcagtggttaaggttctgttggccatctctgatacaagtagctgctggagggaggacctctccaacttgtggccctgaagcacctacatttagccgtttcaagcagtagtgacagaccaagccagccccttacccagccaatacctaaccccagggatttgctagcagagcaagcccagttctgcctgtccttgaagtacggccaggagtcagccagtttcaagggttgcctagcagaggccaaatggtttgtggttattttttaaccacagaggagttaattttataaagagaaatgtaaatgttacaaaatgacacagtatttaataaagtgttactttccaaaaaaaaaaaaaaaaaaaa

SEQ ID NO: 2196 - DNA, 2012 bp, Cricetulus griseus
gttagaccggtgcggaggtggtgcggagcgcgtcggcccgggcaactctcaaagtgtgtcgtcgcgagaggctgcggcggggcctctgtagagaaggcaggagcttgacagcttccgtaaaggccaggagcggtgacagccatccggagtcatgagcgacagcggcgagcagaactacggcgaacgggaatcccgttctgcttccagaagtggaagtgctcatggatcggggaaatctgcacggcatacccctgcaaggtcacgctccaaggaagattcaaggcgttctagatcaaaatcaaggtccagatctgaatctaggtctagatccagaagaagttctagaagacattatacaaggtcacgatcacgatcccgctcccatagacgatcccggagcaggtcttacagccgagattatcgaagacggcatagccacagccactctcccatgtctactagaaggcgtcatgttggaaaccgggcaaatcctgaccccaactgttgtcttggagtgtttgggttaagcttgtacaccacagaaagagacctaagagaagtattctctaaatatggccccattgccgatgtgtctattgtctatgaccagcagtctagacgttcaagaggatttgcctttgtatattttgaaaatgtagatgatgccaaggaagctaaagaacgtgccaatggaatggaacttgacggacgtcgaattagggttgatttctccataacaaaaaggccccataccccaacgcctgggatttacatggggagacccacctatggcagttcacgccgccgcgattattatgacagaggatatgatcggggttatgatgatcgggactattacagcagatcatacagaggtggtggaggaggaggaggtggatggagagctgctcaagacagggatcaaatttacagaaggcggtcaccttctccttactacagtcgtggaggatacaggtcacgttccagatctcgatcatactcacctcgtcgctattaaagcatgaagttgaagactttctgaaacctgccatagagctgggatattgtttgtggacaatattttctattgtctcctgtttaaaaagtgaacagtgcctagtgaagttaggtgacttttacaccttttatgatgactacttttggtggagttgaaatgctgttttcattctgcatttgtgtagttcggtgctttgttcaaagttaagtgttttcagaaaagtatgttttgcatgtatttttttacagtccaaattttgactgctgagaagtttctattgtacaaaacttcatttaaaaggtttttctactgaatccagggtattctgaagatcgaagcctgtgtgtaaaatgctaccaaatggcaaaaagcaacaataaacaagtttgatttttacttttctttctaaatatcaatgcttaaccagaaacacccttaagttaccagtaaaatactttaaaataaaaatattcattttctttcaggagtccatgaatcttgccatattcaatatacttgcaattaagtgttaaatatgctgtaactctgtgctgctagtattagaacaaaaatctttacagcaaatgcttaatgcttacattaatgtggattcgtcagcctttatgtaatctattctatatagcagggaataagagctacagatacatgtctttaaaaggctatttgttgaggctgttacaaagagataatggtatttcaactagttatcaacaagtgataacaatacattccaccacaaatgtactcttgttcttttagcttttagactatataatactgggtgcttcaaagtatggaatgagagaagggatcaccacacctgtgtcatggataaactgaagactgcctgttcattttttaaatattattttcaggtcctttgcttaccaaaggaagcccaattcactcaaatgttttgagaactgtttaaataaaggcaagaaaaattgctaatgcaactcgggttaacaaa

SEQ ID NO: 2197 - DNA, 2012 bp, Cricetulus griseus
aacgacttggagagattaatattacaggggagccattttaaatgtgaactgtgaacacataaaagcatttggcaaaaatttgtataaacaactcatctcctatccacaggaggttataccaacctttgacatggctgtcaatgagatcttctttgaacgttatcctgactccatcttagaacatcagattcaagtaagaccttttaatgcattgaagacaaagagtatgagaaacctgaatccagaagacatcgatcagctcatcaccatcagtggcatggtcatcaggacatcacagctgattcctgagatgcaggaggccttcttccaatgccaagtgtgtgcccataccaccagggtggaaatggaccgaggccgcattgctgagccctgcacttgtgcacattgccacaccacccatagcatggcactgatcccacaaccgatcactgttttctgataagcagatgatcaaacttcaagagtctcctgaagacatgcctgcttgggcagacacctcacactgttgttctttttgcccacaatgatcttgtagacaaagttcagccaggggatagagtgaatgtcacaggcatatatcgagcagtacctattcgagtcaatccaagagtgagcaatgtgaagtctgtctataaaacccacattgatgtcatccattatcggaaaaccgatgcaaaacgcctacatggccttgatgaagaagcagaacagaaacttttttcagagaaccgtgtaaaattgcttaaggaactttccaggaaaccagacatttatgagcgacttgcttcagccttggctcccagcatttacgaacatgaagatataaagaagggaatcttgcttcagctctttggtggaacaaggaaggatttcagtcacacaggaaggggcaaattccgtgctgagatcaacatccttctgtgtggtgaccctggtaccagcaagtcccagctgcttcagtatgtatacaacctggtccccaggggccaatacacatctggaaaaggctccagtgcagttggcctcacagcctacgtgatgaaagaccctgagaccaggcagctagtcctacagacaggtgcccttgtcttgagcgacaatggcatatgttgcattgatgagtttgacaaaatgaatgaaagtacaagatctgtactgcatgaagtcatggaacaacagactctgtccattgcaaaggctggaatcatctgtcagcttaatgcccgcacatctgtcctggcagcagcaaatcctattgagtctcagtggaatcctaagaaaacaaccattgaaaatatccaactaccacatacattgttgtcaaggtttgatcttattttcctcatgctggaccctcaggatgaggcatatgaccggcgtctggctcatcacctggtttcactgtactaccaaagtgaggagcaagtagaggaggagtttctggacatggcagtgctgaaggactacatagcatatgcacatagtaccatcacgccccgactgagtgaggaggccagccaggctctcattgaggcctatgtgaacatgaggaagattggtagtagccggggaatggtttctgcttacccccgacagttagagtcattaattcgattagcagaagcccatgctaaagtaagattttcagacaaagttgaagcaattgatgtggaagaggcaaaacgccttcaccgggaggctctaaagcagtctgctactgaccctcgcactggcattgtggatatatctattcttactacagggatgagtgccacttctcgtaaaagaaaagaagaattagcagaagcattgaggaaacttattttatctaagggtaaaacaccagctttaaagtaccaacaactatttgaggatattcggggacagtctgacacagcaattaccaaagatatgtttgaagaagccctgcgtgcattggcagatgatgacttcttaacggtgactgggaaaactgtacgcttgctctgagc

SEQ ID NO: 2198 - DNA, 2012 bp, Cricetulus griseus
tctggtgtgatccctccaaactcagtactttcattttgtatgtcctcctgatggatatttggaattagaccaggttcagattcagacgtatttcaagccccccagttgtcctcggactatccaggtgtctgattttgtgaggtaccattacaacggaacgttcttggatgggacactgtttgattctagccacaatcgcatgaaaacctatgacacgtacgtggggattggatggctgattccgggaatggacaaggggctgctgggcatgtgtgttggcgagaagcgtatcatcaccatccccccttttctggcctatggagaagaaggagatgggaaggacattcctgggcaggcatccctagtctttgatgttgcattgttggacctccataaccccaaggatagcatttccattgagaacaaggtagtccctgagaactgtgagcgaagaagtcagagcggggacttccttcggtatcattacaatggcacacttctggatggcaccctctttgattccagctacgcaaggaaccacacctttgacacatacattgggcagggctatgtgattcctgggatggatgaaggcttacttggtgtttgcattggagagaggcgaaggattgtggtccctcctcacctgggctatggagaagaaggaagagggaatattcctggctcggctgtgctggtattcgacatccatgtgattgacttccacaacccttcagattccatcagcatcacttcccactataagcctcctgattgctcagtgctgagtaagaagggggactacctgaaataccactacaatgcctcactcctggatgggactctgctcgactccacatggaacttaggcaaaacttacaacattgtgttgggatctggacaagtcgtgctggggatggacatgggtctcagagagatgtgtgtgggagaaaagcgaacagtgatcatcccgccccacctgggctatggagaggccggtgtagatggagaggtgcctggcagtgctgtgctcgtgtttgacattgaactgctggagctcgtctctggccttccggaggggtacatgttcatatggaatggtgaagtgtctcccaacctctttgaagaaatcgacaaggatggcaatggggaagtcctcctggaggagttctcagagtacattcatgcgcaagtggcaaccggcaaagggaagctagctcccggttttaatgctgaaatgatcgtgaagaacatgttcaccaaccaggaccggaatggagatgggaaggtcacggccgaggaatttaagctcaaggatcaggaagccaagcacgacgaactgtaagcctgacaagaaccactttgtgccaaggagagcttgacaccaagtgacctgtcatggcagagcatgctgtcaaggtgtgaaggtttctaggaaggtatgacattagcaagtagtaggtgggccatgtagtacctggtacatacgttggggtgggttgatgtccatggtgagaacttgggtgcatttctagggttagtaatagaatctgtgcagagggccttggcatgggaaagcctgtacgaccaaactatatttatgagtcctctgagaagttgtgttactaaaggaacatgatttcatagaagacatagccgtcatggaggaaacaagtagtaccaggtgtgtctacctaaagagattgatttttttttaaatcttgctggtgtcttaagaactgttcactatgtgggcagaaagaaggccagcccattcccacaccatgtggtagccatgttcctgctttatgttctgtccccaaatgttggcacttagcctgaagtaatcaagggttttccttttgaaatggccctttttttttttttacaaacttaaactgttttgtactgatgttgccctgagatagttcatgcaaatgctggacacttgttcaatgaaattaatgttagaagcctgatactttttttctggtataaaatgttgaatcata

SEQ ID NO: 2199 - DNA, 2011 bp, Cricetulus griseus
gagggcggaagtgcgcgcagggctgggctctgaccccggtggcagtcgctctgcggctgcgcgggccctggtacttctgctcctgcgcctctgcagagcgccgtgagtcaggcaggcggagcgcggcgacccagcgtcttccccctgtgaagctggagcagagcgggcacttcagtttggctttggttgaagacagaacttagcatatatgtactgctttacccactggaagaatgacagatgacaaagatgtgcttcgagatgtatggtttggacgaattccaacttgctttacactgtatcaggatgagataactgaaagggaagcagagccatactatttgcttttaccaagagtcagttatctgacgttggtaactgataaagtgaaaaagcactttcagaaggctatgagacaggaggacgtcagtgagatatggtttgagtacgaaggcacacccctgaaatggcattatccaattggtttactatttgatcttcttgcatcaagttcagctcttccttggaacatcacagtacatttcaagagttttccagaaaaggaccttctacactgtccatccaaggatgcagtcgaagctcattttatgtcatgtatgaaagaagctgatgctctaaagcacaaaagtcaggtcatcaatgagatgcagaaaaaagaccacaagcaactctggatgggactgcagaatgacagatttgaccagttttgggccatcaaccggaaactcatggaatatccacccgaagaaaatggatttcgttatatcccttttagaatatatcagactacaactgaacgacctttcattcagaagctcttccgtcctgtggctgcagatggacagctgcatacacttggagatcttctcaaagaagtctgtccttccgcagtcaccgctgaagatggagaaaaaaagaaccaagtgatgattcacggaattgagccaatgctggaaacccctctgcagtggctgagtgagcatctgagctacccagataactttcttcatattagcattgtcccccagtcaacagattgacagagcagctcctcgctggatggtggaatcaccttgagtcagggctgcctgcaagcctaggaggaagaagatcccaagagagatagggcagccgctgagacacaacaggacctggagtgtcttttcctctcatgaaatacaatgcagctgaagcctttgctctaggaataacatggaaacatgtgccacagtttgtatttctgactaacaaataagcagggtatttcctaaggtgaccgtgcttgaaccttagtcaagaaagtggaaacattggttgaattttcaagaaaattagacttaagaaagtaaaagagaaattgctgtcaataacttacagtaatttttttgtaaaagatcaaattacagtaaacccatctttccttaatgagaatttcctgtttacagtcagtctattggtatgcaaacaatcttgtaactttgataatgaacagtgagagatttttaaataaagcctctaactatgttttgtcatttaataacatacagtttgtcacttttcaaggacaccctgaatcccatatagtaagtctcttttattctgtgttccagttcctccctggtatggcgaaggtgcaggtcagtagggcaacttgtctcaggagctattggtgggtatttattactgcaacttgaagatctgtcttctttggttggttggtttggggttttttgtttttgtttgatttttggctctaggactattgtgtcactgtggtcccctgtcagccagtttttaaatcgtgaaggtgacctgtctctagactgcagtagcttttccttatcattaccaaaacctccagaggttcctggaactcctcccactctgaaggaaacttgctgcaacctatggccagctgcttggagactcctacagttgattttgtgagctagctttatgtccacattgaatgtcaacccatctgagtatg

SEQ ID NO: 2200 - DNA, 2011 bp, Cricetulus griseus
ccgcttcggcgtctcctcgggcctgtgcggtccgcggcttcccgcgcctgcagccggccgccatggggaagcgagacaaccgcgtggcctacatgaatccaatagcgatggctcgatcgaggggtccaatccagtcttcagggccaacaatccaggactatctgaaccgaccgaggcctacctgggaggaagtaaaggagcagctagaaaagaaaaagaagggttccaaagctttggctgaatttgaagaaaaaatgaatgagaattggaaaaaagaactagaaaaacacagagagaagttgttaagtgggaatgaaagctcatccaaaaaaagacagaaaaagaaaaaagaaaagaagaaatctggtaggtattcatcttcttcttcatcgagctctgattcttccagcagttcttcagattctgaagatgaggataaaaaacaaacaaaaaagaggaagaaaaagaagagccgttgccataagtctcctgagagctcagtgtcagactccgactcggatagcaaggacagttcaaaaaagagaaagaagtcaaaggatgtgactgagaaagaaaaggacactaaaggactcagcaaaaaaagaaagctgtatgacgatagagcgctgtccactgggtcgtcatcagagtcggattatgaagaggtgcaagcaaaaaggaagaaaagtggtgaagaacgcgagagaacagacaaagccaagaagagaaggaagcataagaagcacagcaagaagaaaaaaagaaggccgctgattcaagttcagactcagcgtagcatctggaagaccagggtcccttaccgagtgcaatgtcgaaggagctctcaactgtgaagattagacatacggagtaacgtgcatgaattaattcccttgtgtgtagacttgtcctggactagtcagcagccactcggataccgccatgcgtgcgaagggccatgattgttgcctgctgcttgaacaccttttcctcttccagtccttggtgactctgggagatcgtactttgcagtcatactagtggttaagacatttggaataaagctaatattttttactagaagtacgtaaggctaaatcatcagaaactgaatctggatccatctttaagatgtaaccagaaatactaagctgactctagtaaaaactttcaaagtagggattacattaaaatttcaaaatccttactctgtagataagtgtattttagtttttccccacgtatattttggtttacttggggaaggagcttttaaaagggggcgggttgctgtctcttcagctaccagaacagcgtgcctttgatctcacactaactacttctgtggacacagtagccatgtttcctgggaggtcagagctgggcaccatcagtcctgcccttgactgaggttaacgacatctgtagactgttgtatgctgcttcgtgtgaaccagagatacccagccctttgcagcatgagaacgcccccaaagctctggaatttacctccacttcaataataacaactgaatgtttttagggttaggttgtgttatgtcatttgaattaattttgcctacactttggctttggagaggaattgtttgatagacactggtactttctgaactgatagctaacaattctaaagtgcatgttttataccggctttaactggtcagagggtttttatgtagccagtgatagctactttatgttttgtatagattttatttaggctgccatgtttagcttttaactccttactcttgctgtcttcattactgtgttcagtggcacattaacacgacatttagcatgtaaaaagcggaacttttggtttttgtgtttaacagcttcatattgaagctgagacttagcacaaacaagttaagtggcaggcctggtatgctgtatcttgttacataaagctatggcagaatcttagtaaatagaatgttttaaaagtttgttgtctttgcatattaataacagattatgacatgtt

SEQ ID NO: 2201 - DNA, 2011 bp, Cricetulus griseus
  modified_base (1968)..(1968): a, c, t, g, unknown or other
  modified_base (1976)..(1976): a, c, t, g, unknown or other
gtactgtgatcactgcaccttttgcaactcaggctctgtctgggtatgtgctatttgcaaccgaacccgcaacaacatcccagtacagcatgcccttcaaccgtatgccagctctttggaaaaggaacttccaaagcctgggtccccacaacgcctcagtgcttccctgcctggttcctgcagagacccagagaagcaccgccaagataagatgcggatggaaagtcttcagctagtgagcatgatccaggaaggggaatctgcaggtgccagtccagaagagatcttctcagtctttacagtactcaggcactgaggtgcccttgcagtggctgcgttcagagctgtcctatgtcctggagatggtagctgagttagctggacagcaggatccagggctgggtgccttttcctgtcaagaagcccggaaagcctggcttgatcgtcatggcaatcttgatgaagctgtagaggagtgtgtgcgtgccagaaggaggaaggtgcaggagctccagtctctgggcttcgggcctaaagaagggtcactacaggcattgttccagcatgggggtgatgtggcacgggctctgactgagttacagcgccagcgtctagagcccttccatcaacgcctatgggacaaaggccctgaacccactccctgctgggatgggctggatagacagagcctggtcagacgacttttggcagtctacacactccccagttggggccgagcagagctggcactgtcactgctgcaagagacacctaggaactacgagttgttggacgtggtagaggctgtgaggcacagccacgaccgtgcctttcttcgccgattgcttgctcaggaatgtgcagtgtgcgggtgggccctgccccgcaaccggatgcaggccctgatttcctgtgagtgcaccatatgtcctgactgcttccgccagcacttcaccattgctgtgaaggaaaagcacatcacagatatggtgtgcccagcttgtggccggcctgaccttaccgatgacacacagttacttagctacttctctactcttgacatccagctcagagaaagcctagagccagatgcatatgccctgtttcataagaagctgactgagggtgtgctcatgcgagaccccaagttcttatggtgtgcccagtgttcctttggcttcatatatgaacgtgaacaactggaggcgacatgtccccagtgtcaccagaccttctgtgtgcgctgcaagcgccagtgggaggagcagcacagaggacggagctgtgaggacttccagaactggaaacgcaccaatgacccagaataccaggctcaaggcctggcaatgtatcttcaggaaaatggcattgactgccccaagtgcaagttctcatatgcactggcccgaggaggctgcatgcatttccactgcacacagtgtcgccaccagttttgcagtggctgctacaatgctttttatgccaagaacaaatgtccagaccctaattgcagggtgaaaaagtccctgcatggccaccaccctcgagactgcctcttctacctacgggattggactgctgttcggctccagaaactgttgcaggacaataatgtcatgtttaatacggagcctccagccgggacccgggcagtccctggaggtggctgccgagtgatggaacaaaaagaggttcccagtgggttcagggatgaagcttgtggcaaggaaactccacctggctatgccggcctctgtcaggcacactacaaagagtatcttgtgagccttatcaatgcccactcattggacccagcaacgctgtatgaagtagaggaactggagacagccactgtacgctacctacatgtacatccccagcagatggagggagaagatctccctgcctatcaggcccgattgttacagaagctgacagaagaggtacccttgggacagagtattaaanaaaaaaanaaaaaaaaaaaaaaaaaaaaaaaaaaaaaaaaaaa

SEQ ID NO: 2202 - DNA, 2011 bp, Cricetulus griseus
  modified_base (330)..(330): a, c, t, g, unknown or other
tggacaagctcttattgcagagacagttggaagttatgacaccatggatctcttcaggcacactacagagctcagcatgcatactgaaggagccataggttatgcatattgggtttgtacaacattacaagacaaaagcaacagagaaacagagctatacaagtacaacattctccagatgaacgctgttcctgcagcacagggtgttctgtgtaaatatgtggaaagaattcagaattacgctccagctttcacaatgttgggctatttaaatgaacatctacagttaagaagagaagcagcagaggcataccaaagggcaacttcccngttacattctacggaagaccaacatacttacagtgttacagtgagaaactgggcagattgttgtgttccattggtgaatatgactaaaagctgtcgaagcctttaagtcaacgccccttgaggaactggaggacatcgtaggtttggcattggcattgtttatgaaggaactatataaggagagcagcaaagcctatgagagagccttgactgttgtcaaatcagaacaagacaaagctcatgtcttgacagctctggcaataacagaatacaaacaaggacaaatggatacagccaagtcattgcttttcaaatgctctattttaaaggaaccaaccatagaaagccttcaagccctgtgtgctctagggttggcaatgcaggatgctacactgtcaaaagcagcgcttaatgagttcctgaagcacacgaagcacaaaaatgattatcacagatgccttcttacttcagcgatctgtgcactccagggccgcagcgtggcagtgcaaagacaggcagccaaggctgtccacagtaaccctgctgacccagctctttggtctctgctgtctcgagttgttgctcagtacactcaacggaatgcaaagggaggagctgtcgccggtgctgtggctcatgttctggatgcaaatcatggaaagaaggcattattgtacactgcaataaaccagttggccatgggaagtggtacagcagaagatgaaaaaaatatttctctaaagaccattcagaaggcagctttcctttctccagatgaccctgctgtctgggctgggctgatggcggcctgccatgctgatgataaactggctttggtcaacaacattcagccaaagagggtagatttgcacttggcactgctgtctgctgtttctgcctcacttaaggacaaagacattttgcaaaattacaaccagtcacttgaaaagtggtctctctcacaagctgtcactggtctaattgacacaggaaggatatctgaagcagagtctctgtgcacaaagaatttaaaaagtaaccctgatcagccagcagttatcttactgttgagacaagttcagtgtaaatcactgctggagtcacagaagcccctcccagatgctgtactagaagaactgcaaaaaacagtgatgtccaattccacctctgttccagcatggcagtggttggcacaggtgtatcagtcccaaggaatgatgggtgctgcagagatgtgttacagaaagagtctacaagtggcatcccaacagggcaattggagtgggaagctctcgagtctgttgaagctcgcactgcttgcattggaagtgtgcatggctaatgtttccagtgatcactggtcatccttgcttcaagaggccaccagcgaggccttgaaagtttgcttttgtcctctggctgtgttcttgcaagctttgttacaattcaaccgcaagatgggagcaagagagacacggagactcttggagaaagtagtgtatcagcctggctatcccaactcaattgtatcaactgcacgttggtacctcttaagacacctctacgccaaaaacgaccaagagctcattgacgtgttggtgaaaaatgctgaagctcacagtgacaaaagacattggaactgaatgagaagctgtcatcacagtaatcatggttgtgagac

SEQ ID NO: 2203 - DNA, 2011 bp, Cricetulus griseus
ggtggggtggtagacatgaggcttcgagaaggagctgctcgacccactctgcccactggccagatgcccagccacttgggagctacactgcctatagggcagcatgctgcaggagaccctgaagtccgtaaacagatgttgcctccaccaccttgcccaggcagagaactcttcgatgacccttcctatgtcaacatccagaatctagacaaggcccggcaagctggggttggggctgggcctcccaatccttccattaatggcagtgcaccccgagacctctttgacatgaagccctttgaagatgcccttcgggtgcctccacctcctcagaccatgtccatggctgagcagctccaaggggagtcctggttccatgggaagctgagccggcgggaggcagaagcactgctgcagctcaacggtgacttcttggttcgagagagcacaaccacacctggccagtatgtgctcactggtctgcagagtgggcagcccaagcacctgcttctggtggatcctgaaggtgtggttcggacaaaggatcaccgctttgagagtgtcagtcacctcattagctaccacatggacaatcacttgcccatcatctctgcgggcagcgaactgtgtctacagcaacccgtggatcggaaggcgtgacctcttctttcctggatgccttccatccctttctaccatgttctctaactcctgggacctctgttctgtagggctggccttgggtgggagctggaagcagtgtggccactgggcttagtgcccacctgagagagagggggttttagttaggaacctggggtagcatcctgcttctgcccaaacctcaccaaagtattaatgtacagagtggtctcttgcctgggccctgtctgtgccaacctgatgccctttcccccaaagggtaggttcttacaatggaaatgtgctggggtgataggcccagtggagcaattgccctttgggggaagggaaacaatcatacctctggtttacccctggtctgcagggtaccccagatccctcataacatatcctactccctatgcaactttgtgcctttgactgtctcctaggtctgtaggtactctctgcagagttctcaggcccttcattgtggataggggttgctgacaccttggcttctggaaccctgtcatgctcagcacctctctctgtgtttgggaagaatgggggcaggagtggcagctatctcctctgccttttggttgtgcagcccttaagagagtgtcccaagctgggcttggtggcacatgcctttaatcacagcactcaggaggcagagacgaggatttgtaaggccaggctggtctacaccagagtgagttccaggacagccagggctatgtagagaggccctgactccaaaaaccaaaagagagggggcaggatcggatccctgccttgctcagtgcctcctggccttgatctctattctccaaggggtctatacatttctaagcctgcccctcccacgtctgcatgtgtgttacagtctacagccaaagcatagcccttctccctgcagccccatctgtctcccacttttgggaggggtgtgtatgactgacatgtgcctccagtgtgtgtagagttaacctcgaggtgggttttgcggaggcattgagactgaagcagtggacaatccccaatgccatctgtaggtctggaactgcactctttttgttgttgttaacacgaatatattttagggctgtagatttattttcctggttttgtttctgttgcttacttttgagcacaaattatgatagtcgattacatttatatatcacctcgttgagtttcccaaacttttttttttttttaacacaactgttgggattttactctctctctggcctaaaataactaggacaggattttttggtttggatgccttataccaaagggaaatagtcttcattaaagttcgtatttcttctacctcggcctctacaaaaaaaaaaaa

SEQ ID NO: 2204 - DNA, 2010 bp, Cricetulus griseus
taatagtcgaacttcgcctttttctggagctcctggaccacgagtacctcacatcaactgagagaaaaaggctgtgctcaccaacatcctgctgcgaatacagtcatcatccaagggctttgaagtgaaggaccatgctcagaaggcagaagccaacagcctgccagcacctccccagatgcctctgcctgagatccctcagccatggctgcctcctgacagcgggcctccacccttaccgacatcctctctcccagagggttactatgaggaagccgtgccgctgagtcctggaaaagctccagagtacatcacatcaaattatgactccgatgccatgagcagttcttatgagtcatatgatgaagaagaggaggacgtgaacaaggcagaactggagaagaaattgtcttcagagaggcccagctctgatggagaaggtgctgacggaaaatggagtcacgtgtaataggaaaagaacaagtgaagaggaagaaaacctccaagtcagatgccaagggaactgtgtccaaggtcacagagggaggcagagcgggtcagcctggagctggagctgactgaggtcaaggagagcctgaagaaggccttggcaggtggtgtcaccctaggactggccatcgagcccaagtcggggacatcaagtccacagtctcctgtgtttcggcatcggactctggaaaattctcccatctccagctgtgacacaagtgatgctgaggggcccttacctgtgaacagtgcggctgtcctgaagaagagccagccatcctcaggcagctccccttgccgtgggcacgtgctgcagaaggccaaggagtgggagctgaagaatgggacatagagggagaccagctgcaccagacagagactgcatactgccaccagcctcaagtgtgacacgtgtgcctcccaaagtggcctgagcatgacttcagaagtttggactgagtctgacgctgacccttggccagcttgtgtgcacgctctctactgtacgatggtgccctttaggaaagtttactttaagactttggtgttcaaatttacttgttataaagcagaaacaaaagggttgacaagttgttctgaataccctctggcagatggggcttttttttttttttctttttattttctacatttgtgctaagaactaggcttgtgattcacttgaccttggtggatcctggaagttccacagagctgcataaagtaggtcccagggaaggcaaggctcctgacacagggctctgctgtcctgaactccccttcatgttcttagatttggtcagaaagctagtttaaaacatttgcttcaaaataagttatttatttgtatatgttcaataaatatagttttaatttatatatgtacatattggacacccatgagacatcctgtcaggattcacacagtgttctcattctatgaccccttcccaaaagccacatgcatgatcccagccatcaatggcacaggtgttctttgtgtggaaccaggtgggcagagggctttttacattctaggtattccaaatgaattgctcgtggctctaagttgtaagatgtttttcacgtcatgaatgtaattatttccttattgtattttttaaaaaaactaaagtcatatttaaaataatcttgcaaagacacaggcaaagaaaagagaaagtttttttttgttttttttaattaactatgttgtagcccatttgaaatgactgtaaatatattttgattgtgcagctcaatgtatttaattcagaaagtaaaaaattttatgcaaagagacttgcaatgaaaaatcctagttttcagcccatttccccacattttctagccacttcatccagcttctctgctttacagactgatttttctactgttgtaactatgtacccattgacggcgcccattggcggaacttgtttgtgtattaataaaactgtgctgtgtggcccagcctcatgttctcccgacagtggctca

SEQ ID NO: 2205 - DNA, 2010 bp, Cricetulus griseus
agaaagagaagcaatagactcccccagccttggcactggggacaacgccttaaaagagtcgagggttggcttctgctccgccatcttcgtcaacagaaagaggctgagaagggtccctgagcccagcctgccatcttccctggctctaggtggacatggaccagcagttgtaagcagccaaagctgatgcccggcccccaggggggcacaggagcccccaccatgagcctgggcaagctgtctcctgtcggatgggtgtccagttcccatgggaagaggcggctgacagcagacatgatcagccctccacttggagacttccgccacaccatgcatgtgggccgtggtggggatgtcttcggtgatacttccttcctcagcaaccatgggggccgctctggaagcacccaccgctcaccccgaaatttcctggccaggaagctccagcaggtgcgcagggtgggggtgccacctcgaaggacggcttccccgcctgcaccctcacctgccccacctgccatctcgcccatcatcaagaatgccatctctttgccccagctcaaccaggccacctatgacagcctggtgatgagcaagctcaactttgacagcagtcctaccagctccacagatggccgctatggttatggcctggattctgggttctgcaccatctcacgcttgccacgtgtggaaaagcacagcaaccgagaccgtggctgtgaccgggaccaggaccgggatcatgttcaagaccaagagcaaaattctttcccctgtgagccagagcttcgacgctctgactctctcttgtctttccgttttgaccttgacttaggcccctccctcctcagcgagcttatgggggccatgaatctttcagaagccccagcagctgagaccccaatccctgctgccaaccctcccacttcagcagcaactccccctgcccctactgcaaaacccccagcccgtgccataaccaccctagaccccgagacaagcctcccagcctcgacaagcctcccagctcctgcagcaagacccccatcccatggacatttccccaatggggtaactgctgtgttggacactgtggctgagacaaagcctagtcctgttggagagaatccccaggtacctcccaacatgccctttggcaggtgtggagccagctgggggccagccgggccagctggggggccagccgggccagccgccactacactgagatggatgctcggcgggagctggcaggggtgctaccacaagtccatggctcctgggagagcctgaatgaagaatggagtgcaccgcctaccagtggcagggccccagtgcccagcacggtgcaggtcaatgcctttgaatttgctgatgctgaggaagatgatgaagtcaaggtgtgagggactaggcatgggctccatgtcctgccatcctcaggactcagagagcagagggactgagctcacccaccatcacctaactagatctacccaaccggagttagcccatatccttcctggtctatgcaaagcaggcatgggtgagggggtccctactgacttgacccaactcccaccactgcatctaggccctttgccacaccccatgccaaccccactgacctcacagtgtggcttttgtgccccagatgcctcctgggtgaggtgggggtggggaggagggaccacacagggccattgtctctgagtgggactgcctgccctgctcatttagagctgccccagaaagaagggggggcagacgcggtaatgagtaaccaacctggaatgctcaatgataagaggcccaggtgggacccttatctgcagttcctggaacaccctggccccaggtgcctggaaccaatatctgccccataatcccacggggcagcttggcaggtgctcaggtcaccaggaggaaggcaggtttacatgtatagggtggctcaggggcacctcccatcttctctccacagtgctacgccctgtgcctcagttt

SEQ ID NO: 2206 - DNA, 2010 bp, Cricetulus griseus
cttcctcgtccgctatgccaagaccctctacgaggaggctgaggaggccaatgacatttcacagcaggtggctaacttggccatctctcccactaccccagggccctcctggccaggggatgctctccggctcctcctgcccggctggtgtcacctgactgttgaagatgggccccgggagatcctgatcaaggaaggggccccctcacttctgtgcaagtactttctgcagcagtgggaactcacatcccccggccatgatacctcagtgctgccagacagcgtggagatcggcctgcagacctgttgtcacatcttcctcaacctggtggtcactgcaccagggctgatcaagcgcgatgcctgcttcacatcgcttatgaacaccctgatgacatcactgccctcactagtgcagcaacaagggagactgcttctagctgccaatgtggccaccttgggcctcctaatggcccggctcctcagcacctctccagctctccaaggaaccccagcctcccgaggtttcttcgcagctgccatcctctttctgtcacagtcccatgtggcacgggccacccctggctctgaccaggcagtgctggccctgtcccctgactatgagggcatctgggctgacttgcaagagctctggttcctgggcatgcaggccttcacgggttgtgtgccactgctgccctggttggcccctgctgccctgcgctcccgctggccacaggaattgctacaactgctaggtagtgtaagccccaactctgtcaagcctgagatggtggctgcctaccagggtgtgctggtagaattagcgagggctaaccggctgtgccgggaggccatgaggctgcaagcgggtgaagaaacagccagccattaccgcatggctgccttggagcagtgcctgtcagagccctgaggggcatccagtagggatagacccaggggcgggcagcgagggaaggagggaggaggcatcttccctgaagcccccaaactggacccttcttcagacttcccctacaaacaccccagctttctggcttttctgagggctagggcatgatgcccacctcttaagtataaggaactgcatcctgcccccagcccccttggggcagggattggcttggaacagaggttggccccgccaggccggggaaggttggagcagccccagaacgagggcaactaagtgtcattatacccaatgtctggctccctgacagaagggagggttccagggtaggagcgggctggcaggcgctgactgcctcagcctatgtgccctgccggccagggcgtggcctccccaaggctgtggtgccccttctggctccccaaggtccgcgccctttatattggccatttggttcttgcctttagtcctcttggacggagagcaggctcaggccattgacatcgcagttcttcctttcaactttagtgacccagggtccgacatgcccctgtccttccagggcaatttggagcaggcagaccagtgggggggtggggaacctctttccacctgcgcttccttgagggaacccaagagcccttggtcccaggtctcttgagcttttgtgtcatgttgcagcagagtgaagatgggggttgggttatttatttgcttgtccttatccttgcttggagacctgagcatcagatccctgtgcccctggtgccatctggcctggctggagccaggagcaggaggttacaccaccctagaatccgcatgttttcccagtgattgcactccactgccaccgtggtgcctggcttcagctcctctaccccaatccctgcttagactcctgcagggagacgcgactggcggctccagcaggaactacctttctgaacccttggagacccgcatactcctgaccccttgcttcaccccacccccgcccccagtgcgttctgtgaccgccaagttcaaagctgtgtacatgtggacactcaataaatgttcattggtgatgagaa

SEQ ID NO: 2207 - DNA, 2010 bp, Cricetulus griseus
cttcagacgaggtagcactcaggattggccaccctgccaacagctaggagcagaagtgtgagctcaacttgtttcagagcttccctaccatgacctccaagaagctggtgaactctgtggaagggtgtgctgatgatgctcttgctgggttagtggcctgtaaccctaacctgcagctcctgcaagggcaccgtgtggccctacgttctgacctggacagcctcaaaggccgggttgcacttctttcaggtggaggttcaggccatgagcctgcccatgccggttttatcgggaagggaatgctgacaggggtcgattgcaggatccgtgttcgcttctccagctgtgggcagcatcctggcagccattagagctgtggcccaagcaggcacagcgggcaccctcctcatcgtgaagaactacactggggatcgactcaactttggatttgccatggaacaagccaaggctgagggcatctctgtggagatggtggtaattggggatgacagtgccttcactgtcctgaagaaggcaggccgtcgtggcctgtgcggcacagtgcttatccacaaggtggcaggtgctctggctgaggaaggtgtggggctggaggagatcgcaaatcgggtgaacgtggtcgccaaggccatgggtacccttgggataagcttgtcctcctgtagcgtccctggctccaaacccacctttgagctggcagctgatgaagtggaattaggcctggggatccatggagaagctggcgttcagcggataaagatggcacctgctgatcagattgtgactcttatgcttgaccacatgacaaatacctccaatgtatcccatgtgtctgtacagtcaggctcttcagtggtgctgatagtcaacaatctgggtggcctgtctttcctggaactgggcatcatagctgatgctgctattcgcttgttggaagaacgtggggtgaaggttgcccgtgccctcgtgggtaccttcatgtctgcactggagatgtctggtgtttcccttaccctgatgcttgtggataaccccctgctgaagctgatagatgctgaaactactgcaacagcctggcctcacatggccaaggtctctgtgactgggcggaatcggatcagagcagctcccacagagcctccagaggtcactgaggccactgcagcaggaggtatagcatcaaagcagacaatgcttgtgctggagcgagtgtgcaccaccctgctcggactggaggagcacctgaatgccttggatcgggctgctggtgacggggattgtggccatacccatagccgggctgccaaagccatccagggctggctaaaggagggcccagccctagccagccctgcccaggtactttccaaactgtctgtcctgctgctggagaagatgggaggctcatctggggcgctctatggcctgttcctgactgcagctgcccagcctcttaaagccaagactgacctcccagcctggtctgctgccatggatgccggcctggaggccatgcagaagtatggaaaggctgcaccaggagacaggacaatgctggattctctgtgggcagcaggacaggagctccaagcctggaagagcccaggagccagtgtcctcccagtcctgacgaaagcagtcaagagtgctgaagctgcagccgaggccaccaagaacatgcaagctggtgctggaagagctagttacatcagttctgcacgactagatcagccagaccctggagcagtagcagttgctgccatcttccgtgccatcctggaggtcttgcagacacagggagcatgactgcctttttcctcctcatctcttctccctgttccattcctcttgccttcagatggtcacctcacctctaataaaatacatgcagcaataaaaaaaaaaaaaaaaaaaaaaaaaaaaaaaaaaaaaaaaaaaaaaaaaaaaaaaaaaaaaaaaaaaaaaaaaaaaaaaaaaaaaaaaaaaaaa

SEQ ID NO: 2208 - DNA, 2009 bp, Cricetulus griseus
  modified_base (321)..(321): a, c, t, g, unknown or other
  modified_base (351)..(351): a, c, t, g, unknown or other
gaagatttcaggactcaagtgcaagacactaaggaatggctggagttggaagaagatgcccaaaaaacttatgtgatgggacttctggaccgactggaggtggttagtagggaacaacggcttaaggtggcccgggctgttctgtatctagcccaaggcacttttggggaatgtgattcagaggtggatgtgcttcactggtccagatacaactgcttcctgctctatcagatggggaccttctcggccttcctggagctactccacatggaaatcgacaacagccaggcctccagcagtgcccttcggaagccagccgtntccattgctgacagcactgagctcagggtnctgctgagtgtcatgtacctaatggtggaaaatatccgcctggagcgagaaatagactcctgtgggtggaggacagcccgagagaccttccgaactgagctcagcttttccacccataatgaagagccttttgccctcctgctcttttccatggttaccaaattctgcagtggcctggcgcctcactttccaataaagaaggttctgcttctgctctggaaggtggttatgtttacccttggtggatttgagcatctgcaggctctacaaaatacagaagcgcgcagagttgggcctgcctccactggctgaggacagtatccaggtcgtaaagagtatgcgtgctgcctccccaccttcttacactctcgatcgtgggggagtctcagctggcccctccaccctccaagctgcgggccgccgtggttctcgaaggcaactcctcaccaagcaagacagcctggacatctacaatgaaagggatctcttcaagactgaggagccagccacagaggaagaagaagagtctgcagctgatggagaacgagccttggatggagagttagacctactagagcaggatacctctggtgccacctccaccctcacagacacctctctctactgaccgagtagcctttcccaagggccttccctgggcaccaaaggtcagacagaaggacattgagcacttcttggagatgagcagaaataagttcattggattcaccctggggcaggacacagataccttggttggattacctcgacccatccatgagagtgtgaagacgctaaagcagcacaagtatatctccattgcagatatacagatcaagaatgaagaggacctggagaaatgccccatgtctttgggagaagaggtggtaccagaaacaccatgtgaaatcctctaccagggcatgctgtacagccttccgcagtacatgattgctctgcttaagattctactggctgcagcccccacctccaaggctaagacagactctatcaatatcctagcagacgtcctgcctgaagagatgcccataactgttctccagagcatgaagctgggcattgatgtgaacagacacaaggagatcatcgtaaaaagtatctctgccctgctccttctacttctcaaacacttcaaactcaaccatatctaccagtaagtatgtaatggatgaaatatcttcaaataatttgcaaagtttatcaaaccgtgacagcaatcctcattccaagcagtttactgagcatagcatcaggcaattttattaatcttgagtcaggctactatgttttaatgatatttgagtaaaaagataattatccaggaaagagaataatcaatctactttaaagttgtatcatattcagttgtataaggaaaaaaaaagttgccttttaaaaacacacacaaatgctttcagaggcacggacatatgctaagatttaatatgtcgaattttattacttataactctgagaagattaattctcaatacagatggagaaactaaccttgcaaggatgaataattagtttcaaatgacatcatcttcctctacaacttgctgtggctggttttctgctattggcagctagccccttgtgctaagataactgggttggagctcccaatttgagag

SEQ ID NO: 2209 - DNA, 2009 bp, Cricetulus griseus
  modified_base (1988)..(1988): a, c, t, g, unknown or other
  modified_base (2000)..(2000): a, c, t, g, unknown or other
tattgccgcctaggggaagtgcgtacccacattcgtgtgggcgtcgtaggccttcccaatgtggggaagagcagtctgatcaacagcctgaagcgcagccgtgcgtgtagcgtgggagctgttccctggtgtcacaaaattcatgcaggaggtctacttagacaagttcatcaggctcctggatgctccaggcattgtcccaggacccaattcagaggtgggcaccatcctgcgtaattgcgtccatgtgcagaagctggcagaccctgtgaccccggtggagaccatccttcagcgctcgcaacctagaggagatttccaacctattatggagtctctggaccaccacctactcacactctgcccacgcatctcagtgctgagattgttaaggagatgactgaggtctttgatattgaagatactgagcaggccaacgaagacaccatggaatgcttggccgtgggagaatccgatgagctgttgggtgacatggacccacagaaatggatgccaagtggctccaattctccgctggtgaaaatagcagatgccattgaaaataaaaccaccgtatataagattggaaacctcactgggtattgtaccaatccaaaccgtcaacagatggggtgggctaaacgcaatgtggaccaccattgcccccaaaacaatcgtacagtggatggcagttcagtggaccgccgcccaatgttgcagaggatcctggagacagacccacttcaacaaggccaggctttggcatctgccttgaagaataagaaaaaattgcagaagcgttcagataaacttgccaataagttgtctgactccatgatgtctatgctcgacctctctggcaactgtgacgacactgctggtgactgatcaaccaatcttctcctcatactgcaaaacactgattcccatgggatgggagaatacagatggcaattcgattctccctgatgtacctacatattagaacaccccccatacaatgcatcttctgcacggtgccctccattgtcatcaaaggtctggagctgccaaaccccaatgccctccacttaattcttactgtctttgaaaatgactttttgtttgttttgtggtgccaaggattgaacctaataggtcctcacacatgttagacaaacattctattactaagctgtatcattatcatcatcaccatcatccatccactacatcattggagaaagattctgcttactcagcttcccaagttagtgggattacaggcttttgccaccacttccagctcccacttttattaattattatttatttatttatttggtttttcgagacagggtttctctgtattgctttggctgtcctggaactccatctctagaccaagatggcctcgaactcacagagatccgcctacctctgcctcccaagtgctgggattaaaggcatgcaacaccaacgcccggctatcctagcaagcactgatctttttcctgctccttattgtgaacattataagtcacacaggagcttgcttaatgccattaggcttttggtttgtactttgaaactttatatttgagtaaaatacagtttataagccctgataaatggataaagttgagtatcaagaacagaaggattctattagcctcccccaccatctgctgtgatgtcaaatctagttgtctcaacctaacccatgccaatcactgacgtgtgctttcactttctgccttgtctcttgaaaagagttgtaagtggaattgaacagtatgtaacttttgagaataacttgctgtgaattatagatttgagatctgtatcactgggtgtatcaatagtcctaatttctatttcatacttcattgtgtggatgtactactgcttattcaatcccaagttggaagacatcctttacagttgaggaggaagttatgaataaagctgctataagaattaaaaaaaaaaaaaaaaaaaaaaaaaanaaaaaaaaaaanaaaaaaaaa

SEQ ID NO: 2210 - DNA, 2009 bp, Cricetulus griseus
gactcgcggcccgggcgagagctcgccagccccgccgcgatgcccccgcgcccaggacgcctcctcccgtcgctggccgggctgccggccctggccgcgctcctcctgctgctcggctcgcgcaggggagcccgggcccaggaggcggcggcggacggcggagccgagcaggacccgcacgccaagcacctgtacacggccgacatgttcacgcacgggatccaaagcgccgcgcacttcgtcatgttcttcgcgccctggtgtggacactgccagcgactacagccaacttggaatgacctgggagacaagtacaacagcatggaggatgccaaggtctatgtggctaaagtggactgcacagccaactccgatgtgtgctctgcccagggtgtgcggggataccccaccctaaagttttttaagcctggccaagaagcggtgaagtaccagggtcctagagacttcgaaacactggaaaactggatgctgcagacactgaaggaggagccccctacaccagagccggaagcggaaccacccaaggcccctgagcttaagcaggggttgtatgagctctcagccaacaactttgagctgcatgtttctcaaggcgaccactttatcaagttcttcgctccatggtgtggtcactgcaaagctctggctccaacctgggagcagctggctctgggccttgaacattccgaaactgtcaagattggcaaggtcgactgcacacagcactatggactctgctcagaaaaccaggttcgaggctatccaactctgctctggtttcgagatggcaagaaggtggatcagtacaagggaaagcgggacttggagtcactgagagactatgtggagtcgcaaatgcaggatccagaggtggccccggagactgtcgaaccctcagaggccccagtgctggctgctgaacccacaggtgacaagggcactgtgctggcactcacagaaaagaactttgaggacaccattgcacaaggaataacctttgtcaagttctatgctccatggtgtggccactgtaaaaatctggctcctacctgggaggagctctctaaaaaagaattccctggcctggcagaggtcaccgttgcaaaagtagactgcactgctgagcgtaatgtctgcaccaagtactcggtgcgaggctatcccacattgctgcttttccgaggaggagaaaaagtgggtgagcacaatggaggtagagaccttgattctttacacagctttgtcctacgtcaggcaaaggatgaactatagaaacccccacccctgaagaaatgctcctagtgcataggagtgacatcacatggacatccatgtttccactgtggttagccagaaaacggtgtgtcctcagcctgtgtatcttctccatgtgtgcttcttcagccaccacacactacggatcttgattgcgtgtctctaatcaagctgggcaaatattttcagtggcaatccaccctgtaaccttctcttggcaatattaaattggcttcccttgcaactaaaatacagttaagaaaaacaaaataaactgaactctcttggcccctaggaatgtctagcaacagctctgattctcttcccaagcagtccttttagcagcttgagcagtgggattcatttgacctgaagaccaaagactgcagttggcagtttgtgcccagacccttcacccacctcccatgagcaggtgaactcaacccctggcacagaatgtatggtaaggagactagaaacaagaccaagtctacttcctgagcagcggaggcgccctgccagcccgttacagacatttattattaatcatgtgtggttcacagctgtcctttaaaaccagctctagaggcccagctcacagtggcttcagctttgcatcatgagtcttgtattaaaagaaaactcaaatggtacaattggtttatactttctaaataaatttttttttaaagaaaaaaaaaaaaaaaaaaaaa

SEQ ID NO: 2211 - DNA, 2008 bp, Cricetulus griseus
aaattctttcatgtctcgtggctgatgtggtggtattcaattccattttaatatggaatcatttctcacttccattggaaagttcctgaagctcattcctgatcacagacctaaggatctggaaagcataatcagaccgaagtgtcaagttatttattttcccatcaggtttcctgatgtgagcagattcatgcccaagcacaaaatagcccacttaaggaggatgctcagccttaatggaaatgatgttgcagccctgtccgtgatgcttccttcccaaccagagcagaggaattctaagaagttcttggagaattttaaatcaaagtctgaggaacaccctggccttgatgctggacaagaaaccctgaccaacccatcaatcaagaaatcaggctgtcttcctgtgagcacaaaatctagctcttgatcccagcagccttttttgtggagctgatgatcagcaaagacccttgcacatcgcatggccccacaggtgggagcatgacaaagatccagagaggttttttaaggttttaatgcagctaaaggacttaggactcaatttcctcgtctctgtccttggagaaacgtttacagatgtcccagatatattttcagaagccaaaaaggcactgggatcttcagtcttacattggggctacttaccctgtaaagaagactatttccgagtactgtgcatggctgatgttgtcatctcaacagctaaacatgaattctttggagtagcaatgttggaagctgtgtactgtggctgttacccactttgtcccaaagacttggtttatcctgaaatatttccagctgagtatctgtattccacacctgaacagctttacaaaaaggctccagagtttctgcaagagaccagatattataagaaacatcttataaggtgaagtggctcatttcctggcagcctacatggtaaattcaggtctctgctcacaacagaacccaggaagatttgtgacagatggggctaagtcacaaacttgcagcctaaggcagaatctgaagaactttccagagtgtgcccatatttacctgatcagagagaaaagaaaatctgcagaggaagccgagcctggctgcttgtcatagctgacacagagccatctgccacaaacctgtggcggcttcagatctccaatccctgccaccaccccaactcaaattaaatacagattcctagagacgttatgatggttacacatgtcctcggcatcacatgtaggagactgttcaaaaaaaatatgtggcctgttgtataaccgcactcatgtatcccatatgtggtgccacattgaatttccggttgaatccgtttttatcctttgtactggatgacatggtgcctgaattctttctttctgccgacactatggcagccaaactgcagcttcaaacactcacacttggctgagtttctacctgggttgccaggttatcatcggagccttcttgtgtcctcaaagggccacagggcctagaaagaggatcagaatgctactgaactaattgggcagccatctcaaagctgctgtaggcaaagggctgctttagcacttttcttttagcaaattaatgactctctggcacaggagttttaagtgaaggtattaataaggggtctggcaggtattcccatgattcacagagtttcatttgcatttaattaatcttaaagaaacttgcaagataaacagctgtaattcggacaaacatggcagatacagtgagtgaagtcctctcatccataaaatgaacacaagatacttgttttaacatttttatgggtaaaaatagagaaatcaaaatgcttctaacaaaacctttatttggtacaaatcttcttcaaaaatatttgcatccaactacaaatataccctctctgagataagtcacttaggattcttgtagccaagctgctctgtttgttggtgtaaagatatttaaatggctggattgtaaaataatttttaat

SEQ ID NO: 2212 - DNA, 2008 bp, Cricetulus griseus
gttgggcacaccgccctggggctgagtttggtggagggtggcggggaccccggcaggaggtggtggcgtccccggcggcaggacgagcatggattggggcaccgagttgtgggatcagtttgaggtgctggaacgccacacgcagtgggggctggatctgttggacaaatacgtgaagttcgtgaaagaacgcgcagaggtggagcaggcttatgccaagcaactccggagcctggtgaaaaagtaccttcccaagagacctaccaaagatgaccccgaagtcaagttcagccagcaacaatcattcgtgcagcttctccaggaggtcaatgattttgcaggccagagagagctggtggctgagagtctgggcatccgggtatgtctggagctggctaagtactcacaggagatgaagcaggagaggaagatgcatttccaggaaggccgtcgggctcagcagcagctggaaaatggcttcaaacagttggagactagcaagcggaagtttgagagagactgccgggaggctgagaaagcggctcacacagctgagaggctggatcaggacattaatgccaccaaggcggatgtggagaaggccaagcagcaagcccaccttcggaaccacatggcggaagagagcaagaatgagtacgcagcccagctgcaacgcttcaaccgcgaccaggcgcacttctacttctcccagatgccccagatattcgataagctgcaggacatggatgaacgccgagccacccgcctgggggctgggtatgggctcttatcagaggctgaactgcaggtggttcccattattggcaaatgcttggagggtatgaaggtggccgcggagtccgtggatgctaagaacgactcacaagtcctcatcgaactacacaagtcagggttcgcccgcccgggtgacttggaatttgaagactttagccaagtcatgaaccgagtgccttcggacagcagcctgggcaccccggactgcaggcctgagctccgagcagcctccagccgtagccgtgccaagcgctggccttttgggaaaaagaacaagacggtggtcaccgaagatttcagtcacctgcccccagagcagcagagaaagcgactccagcaacagctggaagagaggaaccgggagttgcagaaggaggaggaccagagggaggccctgaagaagatgaaagatgtgtatgagaaaacgccgcagatgggagaccctgccagcttagagccccgcattgcagagaccctgggcaacattgagagactgaagctagaagtgcagaagtatgaggcttggttggcagaagctgaaagccgggtcctcagtaaccgaggggatagcctgagtcgtcactccaggccgcctgatcccccagctactgccccaccagatagcagcagtagtagcaacaatagtggatcccaggataataaggagagctctgaagagcccccttcagaagaaggccaggacacccctatctataccgagttcgatgaggactttgaagagcctgcatcccctatcggccagtgtgtagctatctaccacttcgaaggatccagtgagggaaccatctccatgtcagagggggaagacctcagtctgatggaggaagacaagggtgatggatggacacgggtcaggcggaaacagggaggtgagggctatgtgcccacctcatacctccgagtcacactcaactgaaccccatcagagcgggggacgagggggcagggctgtcagctgctgcttctgggccacagggggcccacaagatcttgcactttattcctgcccttgtggcttttggctgagacctgtgtaacctgctgtccccctctcccaccccgcctgtcaccctctagggacccacttgtgccttcccgcgtggttgtacataattgtcatttaagacctttcttcctgccgctcggcttgggccaagttttgtttatattaaaaagtatatatatatatata

SEQ ID NO: 2213 - DNA, 2007 bp, Cricetulus griseus
cccccagggccacctgtaactctctgaccctgaacagacgctgccatccccttctcctccccagtttttctcctcctgcacccacctgtgccttggaaggatcttcggcacctgctctgcctgcagacaaagtcctagactgcccaggcccccctggacatgatggtgccacgactcaggccgatgcgtccaccacctcccccaccagccaaagctccggatcctggccatctagatcctctcacgtgaaggccagggggtcactaccccccagtgatgctgtctggagcgacataggcaaaagactgcaatcttctctcatgtccatgttcacctccggggtagaaactgaccctgttcccatttctgggatttgagcccactcctttcccccattgttcccctgtatctctgggctggaactatccctttgactttttgccatcaccccatatctagggtgggccaggagaggagcagatcttaggaagtcagaaggagcttgagccaggatacaaagcaactgtaatggtctgagcagatttattgacagtgaataaagggcatgaagtccaagctagggcctgggcctcttgcatcaagagggcagggagcctaaggtgctattgctttagggtcccaccacgggcagggcctggtcccagctgccacactcctgcatgtggagcgaggttttggggaaggcaggccaggcaacctgttggcaggtagggaaaggaaaaagaatgaggggttgggagttgggaggcgctcctcctgaggtccctcagcctgggaccatgtcactccagatagaagtagagctggtccctcaactgaggagcaggctgtccagtggaggggagagccttcatggctgtccataccctggcaatgcctgctggtaatccatcagcacagtgaagactgaggcttggaagaaaggaggggggaacagtgttgcttcctcttcaagctctgatcctccgttgcctagcatagggacagtaatatgagtccaccactgcccagtgaagccctggccatgtcttcatacctgctgacctgaggtgtccagtttgtttggctgtccatttgcctcttgacgaggcagccctgggcttgggcctcttcctctagtgcccaaggtcagttctgcagaggttccaggagttgcctcaagtgtactagggactaggctatcatccttgattcctccattctgcactgagtgggtggctacagcctgggaggatggtggctcagggagcagcctctcaatagcagctgtccctgtcctaggctgccctcctccagccacctgactggcccctggttcctgccccccaccagagccccagcttctgtctgtaggggaaccatcacggtgttcatgtaggccatagcgtttctcaatgtgtgtcactcggaatctggatgggaagagaacattgcaatttagcactacagctcaaatgtcacctaaacctccctccctggggttgacctggggtaggggggccatctgagattgtgggacacttaatgcagcttgacccctgctgcagttgctcagtcattcagaggagagatcgggccccacctttgggggacaggattattggggaccaacttagcctccattttcttgaaccactgtattcccacctgcccactgagaatacagtggtctctccaggcctggggcggccttttccttccttagagcgaccctgacggacaagcgggggcctcttgttgcggctacagtgaatacaaggagctgcagagccaagatgcactgtgtgatgatgggaaggggctccgtcctgcaggctggaggtggcatccacactggagcacaggaagaaagggagcagaaatgatatttcatttcccttcctgccatttccttctgttctctccataggctctttaagcctccccaaaccccaccttccctaggttccagcatcctttgtctttagtaaattcagtgttaagcca

SEQ ID NO: 2214 - DNA, 2007 bp, Cricetulus griseus
ctctgtccgtgatacagatggttgccttccttgagcagagagccagtgctctgctagctagctgtgcgaaaaactgcacaaattcgcctgccattgtgaagattactgaccagtcccgaggtgtgctacctgcgcccttctctgctccaggaacttgtgaagaacccacagaaaaaggaaatcctgaggctggcagatcacagagcgagccagtccgtgtccttgacatggtagccaggctggaatccgagtgtctgaagcaccagggccagcgggaaccggggaccctgtcacggaataacagcttccgtcgaaatgtaggcagggtgctgctcactaatggtgctcaggccagtgaccaaagtggaaaaggccccgcagatgtacccgacacccaggtacatcccatgcaatccgtgtctgtgggtgaaggactgcccacagctgaccactgttctgccagtgaccaggcctgggatggtatgtctcagggctgtccctcacttgtaccacttacaaaccacagtcctgatcagagaaaggaacctgtgtgcatcagcatcacggtgtgcacaatagagaaggagcagccttctgctttagactcccttgaagagccgcttccagggatgctgttttttctgtcacctggagaggaccagcaagaatgctcccagttgaatgaacacacagcacaagaggcttcagaggccaggaagcctcaagatgctgctgagggcaacagtgtatgcgaggagaaagatgtttctgtggagccatttgtctcagcagttgctgtggtggaaagtacattaccagtgcttgaggtggccagttggaagaagcaggtgtctcaggatttcctggagaccaggtttaaaatccagcagcttctggagcctcagcaatacatggtatgcctgcctcaccacatcatggttaaaatcttcaggttactccccaccaggagtttagcggttcttaaatgtacctgccgctatttcaagttcatcattgaatactacaacatcaggccagcagattcccggtgggttcgagacccacgctatagagaagacccttgcaagcagtgcaagaaaaagtatgtgaaaggggatgtgtccctgtgccggtggcaccccaaaccctattgccaggcattgccttacgggcctgggtactggatgtgctgccaccggtctcagaagggctttcctggctgtaagctgggccttcatgacaatcactggttacctgcctgccacagctttaatcgggcaatccataagaaatcaagagggagcgaaacggaagaggagtactgaagtccatctaagaggcagcgggactgtgaaacacctgggtcaaccctgaggcgtgcgacctcatccccgccctttccggaatctctgctcagaccagactgccattgaacaggcagtttttaaacactgaatttgccagctgtacatgagattcgttccatggttttgtatggtggtgcctcacatttaaccctttcagctgtgaagaactctgcctgtttgcctccatcaaggacatctggaggtcaccaggcagtccccacagggggatcctgaagtgttccagtacaggctgtgtatctggagtgagtggaaaagaaagcaaaacctctgagaattatgcctaaacagaaagttgggcactttacctataccttgtatgcttgattctgtgagaatgatgtttgcagtggagtttatgccctgtggtgtttacagtgtatataatggttgtgttttcctggggctgtgaaagtgcacattaaaccttgagcgcctgtacctggagacgagtgctttggcccctctgtaaataacgtgattaaaatacagtaatgtatacattatggacagttgactaaacagaatcaccagagtaagacagtatcatataatagtcagattcaaacattgtccatccttttgtcaagttaaaaattttttaaaaaaacttcaataaaaa

SEQ ID NO: 2215 - DNA, 2007 bp, Cricetulus griseus
cacagatgaagaagaactaaacgattacaagctacgaaaaaggaagacttttgaagataacataagaaaaaataggactgtgattagtaactggataaaatacgcacaatgggaagaaagtctaaaggaaattcaaagggctcgatccatatacgagcgtgctttagatgtagactatcggaatattacactctggctgaaatatgcagaaatggaaatgaagaaccgccaagtcaaccatgcccgaaatatctgggaccgagccataacaactctgccacgagtcaaccagttctggtacaaatacacgtacatggaggagatgttgggcaatgttgcgggtgcccggcaggtgtttgagcgctggatggaatggcagcctgaggagcaggcctggcactcctatatcaacttcgagctgagatacaaagaggtggagcgggcccgcaccatttatgaacgcttcgtgctggtgcaccctgctgtgaagaactggatcaagtatgcccgatttgaagagaagcatgcttactttgcccatgcaaggaaagtctacgagagagcagttgagttctttggagatgagcatatggacgaacacctgtatgtggcctttgctaaatttgaggaaaatcagaaagaatttgaaagggtacgagttatctacaaatatgccctagatagaatttcaaaacaagaggcccaagagctctttaaaaactataccatctttgagaagaagtttggtgaccggaggggtattgaagacatcatcgtgagcaagcgaagattccagtatgaagaagaagtgaaggctaatccacacaattacgatgcatggtttgattacctgcgcttggtggaaagtgatgcagaagctgacactgtgcgggaagtctatgagagagccattgccaatgtgccgcccatcccagagaagaggcactggaagcgctacatctatctctggatcaactatgcactctatgaagagctggaagccaaggatcctgataggacaagacaggtctatcaagcgtctttggaactaatccctcacaaaaagttcacatttgccaaaatgtggttatattatgcacagtttgaaatacgacagaaaaatctgccatttgccagaagagctttggggacttccataggcaaatgtccaaagaacaagttattcaaaggctatatcgaactggaactacagcttcgagaatttgacagatgtcggaagctttatgagaagttcttggaatttggacctgaaaattgtacctcatggatcaagtttgcagaattagagacaatccttggtgatatcgatagagcacgggcaatctatgaattagccatcagccagccacgcttagatatgccagaggtactttggaaatcatatattgattttgagattgagcaggaagaaactgaaagaacacgaaatctttaccgacaattgcttcagcgaacacagcatgtcaaggtatggatcagttttgctcagtttgagttatcctcagggaaagaaggaagtgtggctaaatgcagacagatttatgaagaggcaaataaaacgatgagaaactgtgaagaaaaagaagagagacttatgttgctggaatcctggcgaggttttgaagatgaatttggaaccgtatcagacaaggaaagagtagacaaactcatgccagaaaaggtcaagaagagaagaaaggtccaggccgacgatgggtccgatgctgggtgggaagaatactatgattacatctttcctgaggatgctgccaaccagcctaacctcaaacttctggcaatggccaagctttggaagaaacagcaacaagaaaaagaagctgccgaacaggatccagataaggacattgatgagagtgaatcctcatctttttaaatgttgtaatatttttatggattaatagtttagaactttgacttctgaatgttttgtatatttacccaggaaggagttgtttggcatttttg

SEQ ID NO: 2216 - DNA, 2006 bp, Cricetulus griseus
gccgccgattcctgagccgggtagccgccgctgccgccgccgccactgcagctccggtcgccgccaccgccgctgccgccgctgctgccgccgtctgaggagtgggcctggggaagacgcagtcgccgccctccgagcttcccggaagcgcctttgctcgctacagtcctccacggaatgaccatggacaaaagtgagctggtacagaaagccaaacttgctgagcaagctgagcgctacgatgatatggctgcagctatgaaggctgtaacagaacagggacatgaactctccaatgaagagagaaatctactctctgttgcctacaagaatgtggtaggtgcccgccgttcttcctggcgtgttatctccagcatcgaacagaaaacagagaggaatgagaagaagcaacagatgggcaaagagtaccgtgagaagatagaggctgagctgcaggacatctgcaatgacgtactggagctgttggacaaatatctcattcccaatgctacacagccagaaagcaaggtgttctacttgaaaatgaaaggagactattttaggtatctttctgaggttgcatctggagacaataaacaaaccactgtgtcaaactcccagcaggcttaccaagaagcctttgaaattagtaagaaagaaatgcagcctacacacccaattcgacttggcctggcgctgaatttctcagtcttctactatgagattctaaactctcctgaaaaggcctgcagcctggccaaaacggcatttgatgaagcaattgctgaactggatacgctcaatgaagagtcttacaaagacagcaccctgatcatgcagctactcagggataatctcactttgtggacgtcagaaaaccagggagatgaaggagatgctggagagggagagaactaatgtctgtcgtgctttgtgatctgtttgctgtcactccgtatcctccacattatatccctttgtgcgataaacaaaaacaaaaatcgaatgttgactttcgatttttcacagcctaagtctagcaaaaatggtccctgggataaacagctggtatttgtatctgaaactcagactggtcccttaaatgccacggcatttctgaagtcttgattttgatcagcattgacaggattgctgtgtgtttaatttttacaaactgaacactgtgattatggggttttgtaacttagcaaagctcttactgatagaaaaaatagacctgaattatgtataactttttagaaagtttaatctgatatcaaaatagtcactgaaagtacaattctgttgtaaagttgtacagaaagttgtagagagtccgttgtgatgtcaggacttagggtgagatgctcgccattggcaccctgagtttggtaactcatggtaactttgcctgtggttgaggtcttattgatcagtatgggctgttgccactcaagttcatgaccacagatatctgcagtgtcttctcctgaggaaactcaaaaccaggaagtgaaattctttggctgataattgggctgtgacaccacaaaaaaggtcccgctcataccacatgtgtgactaaaccctttactacagcagtgtgctcctgattagcaacttgtgaaaacagatctgtttgactttgcttttctcctctttaaatttacagcttttctgctttcttagtatccatggcctctccctgttgcagccagccctgataatgcttgttagcgcctgtgaccaggtcttcccagtgtactcatccagcttagttcccagacatgtctaaacaagaccctgtaacccagggaagttgcatggacactacaatagagagaaccaagaacagccaggcctatgagtctcacagtatcacccctctaccttgacattccatgtagccgtagagtccatctgtgtgtccatctgctgaaatgagaaaagaactcatgcactgatttaaaaccaaaaaaaaaaaaaaaaaaaaaaaaaaaaaaaaa

SEQ ID NO: 2217 - DNA, 2005 bp, Cricetulus griseus
  modified_base (1017)..(1017): a, c, t, g, unknown or other
  modified_base (1096)..(1096): a, c, t, g, unknown or other
tctgggagttgtactgattattggagcttggaactaccctttcgttctcatcatgcagccactggtggggagccatcgctgcaggaaatgctgcgattgttaagccttcagaactaagtgaaaacacagccaagatcttggctaagcttctccctcaatatttagaccaggacctgtattcggttgttaatggtggtgtctcggagaccaacagagctcctgaagcagcggtttgatcacattctctaacacaggaaacactgcagtgggaaaaattgttaatggaagctgctgccaagcacctgacccctgtgaccctaggaactcggggggaaaagcccgtgttacattgacagagactgtgatctggactggggaaagtacatgaagttgtggtcaaaccctgtattgctccagactatgtcctctgtgaagcctccctccaggatcggatagtgcagaagattaaggaaacggtgaaggacttttatggggaaaatataaaagagtctcctgattatgaaaggatcatcaatcttcgtcactttaagaggttaacagagtttgcttgaaggacagaaaatagcttttggcggggagactgatgaggtcacacgctacatagctccaaccatacttactgatgttgatcctaattccaaggtgatgcaagaagaaatttttggaccaattctttcctaatagtgtctgtgaaaaatgtagatgaagccattaatttcataaatgatcgtgagaagcccctggcgctctacatattttctcataacaataagctcatcaaacgggtgattgacgaaacatccagcggtggagtcacaggcaatgatgtcatcatgcacttcactgtcaattctttgccctttggaggtgtgggtgccagtggaatgggggcttatcatggaaagtacagttttgatactttttctcatcaacgcccctgtttattaaaagggctaaagggagaaaagtgttaacaagctcagatacccccccaanagtcagtccaagatcggttgggcgaagttcttcctgctgaaacagttcagcagaggagggctggtgatgctgatggttncatgcttggctgtggctgcagctatgattgtaatttacagatgtactgcaatcaaacctaagttgttgccacttaccattaacgaaactcactgtttgagccaaattccagcatttgtcagcagtgacggtactaggaggatgtagactgtgctggggtgagaacatgtctcaccaaatcccagcttcacggggatgtgccagggagactcaagtgtcaacacagcccaggcttaacacctgtcctctactgtctggagaagtgaggttaggtcttcccagctcctgttaggggttgaggtactaaaactgggcaagtggatacatccgcctcatccaccgtgacgagactctggccttcaggagtgggctctccatctaaacagcctttgttgtttgttgcacatcacccaaagtatgtgtgtctgtgacagtctgttgtgagtgtccacagtgcctttatgatgacttaaactacactgagcctcttgccaagaagcagtgctttctttgtgaataccactgagagcttcttgtggtcacaactgtcccagaggctgaggctagaacactgccttcctgggatttagatcaagacttgacctactcgatgagaatgtaacttgctttattgaatgtatagccatctttgctgaataacctgtcattgaggctgtctgaagggtgttgtctctactaaagtatgaggtatcaaaaccaaatcattggcctgtgtagcaagtagttgcttaagtggcaattgtcattgactaatcataaaatattttgcacaaaatttcaatgtagaacttatacttattattatattaaattataaatcatagcttttagttaagctagaatacttacacattatactgatcttcaaaataaatatatttacaataaa

SEQ ID NO: 2218 - DNA, 2005 bp, Cricetulus griseus
ttccaggacagaagtcgctggagccatccctgggcgccgggcagctgagaagcccgaggcggcctctgctaccgctcggcttcgcccacctcgacccagggctttgcccagtgttcccgggcttgctcttcctgtgaggcggcccggtgcaggcgggcggtggcggaggatgctgcggggcccggagccgagaggaaggtcctgacccagccctctgattgctcctcgaggtcttccgagaggcccttcctcggccccaaagccgacagcgggtaaaggcttcacgagcaggcgagagcagcagacgccgcccatccccggacccaacaccatgtcgtccgccaggtttgattctgcagaccgctctgcctggtacatggggccagtgtctcgccaggaggctcagacccgtctccagggccagcgccatggcatgttcctagtccgggactcctctacctgccccggggactatgtactgtccgtgtccgagaactcgcgtgtctcgcactacatcatcaactccctgcccaaccgccggttctacaagatccactacctggatacgaccaccttaatcgaaccagcgcccagggtatccaagcccaccaatggggttctgtctcagcacccaacttgtctgcagcagaagaaaatgtggaatatgtacggactctgtatgattttcctgggaatgatgctgaagacctcccctttaaaaagggggagattctagtgataatagagaagcccgaagaacagtggtggagtgcccggaacaaggatggccgggttgggatgattcctgttccttatgttgaaaagcttgtgaggtcttcgccacatggaaagcatggaaataggaattctaatagttacggcatcccagaacctgctcacgcatatgctcaacctcagaccacaactcctctacctacagttgccagtactcctggggcatcgatcaaccctttgccatccacacagaatggacctgtctttgcaaaagcaatccagaagagagtaccttgtgcttatgacaagactgccttggcattggaggttggtgacattgtgaaagtcacaaggatgaatataaatggccagtgggaaggcgaggtgaatgggcgcaaagggcttttccctttcacacatgttaaaatctttgaccctcaaaacccagatgacaacgagtgattgctattgccgtccctgctgctgccttgtgctgcctgtcatagtctcctttgaagtgggaagcgttctctcacatgcaagtcacaccgtgctgctggtggccagctttccatacattggcggtctcctgcacatttggaatgcctccagcagctgcctcttggcatttgtatcatagtcatactgtcaaagagtagctgattttagagtttcttctggattcatggagagggttagcctctgcaagctcttgccgttgctgggccacagagcaatggctttgccacaacttgtttttcttgggacgacagaggaagtaaactccagacagttctgtccgaacttctgaaatctggcttgtttccactttcttttgtttagttttggttttggaagactaattcattagagttgtgtgttccgaacagattttttaaatagtaggttggattttttgtgatagtgtaaggaacaatacttgtccctgagcttccaaacagaagctgctgtatgtaactaaactgaaattacaaaggtttgagtcaccacacccagctcttaagatcttttgaaactacatttaactaaaggggcttggtgccttttgattatagcagcttgcttgtgcaggcagccatttctgagagcagggtttcccttctcaagtctgttgaccagcaagactgcatgtagattcaggatcaaaatgtcccataaacctggagtttggtttctgaaatcagctaatttggcccatgtaaatgtttctacagctccctcagatccaaagctggaaataaagacttaa

SEQ ID NO: 2219 - DNA, 2005 bp, Cricetulus griseus
gcaggcaatggtggtgaggaaagtacatgaaatcaggaaatgtcaaggacctcacccaagcctgggacctctattatcacgtgttcagaaggatctccaagcagttaccccagctcacatccctgggagctgcagtatgtttcccccaaattctcatgtgccgggaccttgaattggctgtgccaggaacgtatgaccccaaccagccaatcattcgcattcagtccatcccgtctttgcaagtcatcacgtccaagcagaggccccggaagctgacgctgatgggcagcaatgggcacgagtttgttttcctgctgaaaggccatgaagatctgcggcaggatgagcgtgtgatgcagctcttcggcctggtgaacacgctcctggccaatgaccctacttctcttcggaaaaacctcagcatccagagatacgcagtcatcccgctgtccaccaactcgggcctcattggctgggtcccccactgtgacacgctgcacgccctcatccgggactaccgggagaagaagaagattctcctgaacatcgagcatcgcatcatgcttcgaatggctcctgactatgaccacctgactctgatgcagaaggtggaggtgttcgagcatgcggtcaacaacacagctggggacgacctggccaagctactgtggctgaaaagccccagctcagaggtgtggtttgaccgaagaaccaactatacccgctccttagccgtcatgtcaatggttggatacattttaggcctgggagacagacacccatccaacctgatgctggaccggctgagcgggaagatcctgcacatcgacttcggggactgctttgaggttgctatgaccagagagaaatttccagaaaagattccatttagactaacaagaatgttgaccaacgctatggaggttacaggtctggatggcaactatagaaccacctgccacacagtgatggaagtgcttcgggaacataaggacagcgtcatggctgtactggaagcctttgtctatgaccctttgctgaactggaggctaatggacacaaataccaaaggcaacaagcggtcccgaacgaggacagactcctactctgcaggccagtcagtagaaattttggacggtgtagaacttggcgaaccagcccataagaaaacagggaccacggtgccagaatccattcattctttcattggagatggtttggtgaaaccagaagccttaaacaagaaagctattcagattattaacagggttcgagataagcttactggtcgggatttctctcatgacgacaccttggacgttccaacccaggtggagctgcttatcaagcaagcaacgtcccatgagaacctctgccagtgctacattggctggtgtcccttctggtgaccggaacctggcagactacagcatctcctcagaggcttttgaaccttggtgtgtgcttccagtggactaaagccaaggtcctaaagttgactttgttaaatatttttaaatgtatatgaaaagaactactgtatattccaggttggtttgagccaacctcctagctgctgtgggggaacagaaaatgggtaactaagaaatacgggttttgacttaacttacaagagaactcatcacaaacatttgctgaatgctgaaatcacaaagtctggcctcccaggaggggaggtttgctcagatgcctggccatcctgtgagcaggtgcgccaaggatccaaacacagggcctgcaccattcctgccgtgttcagtgagggatgagtgtgttgtttggagccaggggctcagaaggcaagtgctgttgtggaggtgccgatccacaccagacaggtcgggaattatgaacaaagtaaatatccaactaaataaacaaagtataaagtgaaaacacgtctagacaccatgttatatctgagtactttctgtgccaataaatgacatcagaattttaaaataataaaaaaaaaaaaaaaaaa

SEQ ID NO: 2220 - DNA, 2005 bp, Cricetulus griseus
gtcgccggagcccagcggagcgagcgcgccatggccggcctcaactcgctggaggcggtgaagcgcaagatccaggccctgcagcagcaggcggacgacgcggaggaccgcgcgcagggtctgcagcgcgagctggatggcgagcgcgagcggcgcgagaaagctgaaggagatgtggccgctctcaatcgccgcatccagctggtggaggaggagctggaccgggctcaggagcgactcgccacagctctgcagaagctggaggaggccgagaaggctgcagatgagagcgagagaggcatgaaggtgatagagaaccgagccatgaaagacgaggagaagatggagatccaggagatgcagctcaaagaggccaagcacatcgccgaggaggctgaccgaaagtatgaggaggtagctcgtaagttggtcatcctggagggcgagctggagagagcagaggagcgtgcggaggtgtccgagcttaagtgtggcgacctggaagaggagctcaagaatgtcactaacaacctgaagtcactggaggctgcatctgaaaagtattctgaaaaggaggataaatatgaagaagaaattaagcttctgtctgacaagctgaaggaggctgagacccgagccgagtttgcagagaggacagtttccaaactggagaagacaatcgatgacctggaagaaaaacttgcccaggccaaagaagagaatgtgggcttacatcagacactggatcagacactaaacgaacttaactgtatataacccaaaccagaagagtcctgttctgacacgaactcgactccagagagtgtgctgtgtcttcctctcttgtaagaagttcctcttgttactgtgtctccaccttactggaaatgccaagcacataatgaattcatgaccaaatattttgtatcaggcaagctttgagcaccatttaagtttctttccttttcttttcaaatggcaccagcttctttagctagtcttattcttaaattgcatttattcctaaaataggcagggaatttcacactgagtgtagttgcttaaggctgagggcatttggttcctgggaattagtcagccccacactttcaagcacaggctcaggtatctgatagtatctggtcactgttggggaagttatgggaggctgggggttgttacaagaaaaagtaggaattttccacccagagctaaaatttaaaacgggctagtatgggaagtcaagccatagctagattggcctgatcatgctgagtcggctccacactccactgtgcagaacaaacttcctttaagcattccaagtgaggaggctgaagtgattgcccatctgtcttccagtagatccttgatgctgttccatgcacattttccttccactccaaaattgttctctgaggagcaagtgtcttactccaggacttgcctgctgtggtctagtgacatactcagtagagccagtggcggagtccaatcctttccagaccatactaataccaactgttgggcaacgaaaggtctctccagcagcaaagtgatagaaaaagaaattggtttaacttcatctccattgttcagggaacaacaaatggaagcttgactttgccaagacttgaattccttcgggaatgacactaataaaagaccaagaaacccctgattgaactggatgtggagtattctgtaggctgcacattattttgggtttgttgtagttttgctttctaagttaccatctcagactgaaacattccacattccctagcagtgtggggaaaactcaagtttacaattccacctgaaaatcaccctgcttctagcttatctgaagccctgcccctcactcctatttattaagcatcacactaccaggaagatgaatttttagcaaactgcaattgaataaacctactctgttctttagattcttgcaattgtatatgtgataatatcactttttctacattttggtcaaataaatttt

SEQ ID NO: 2221 - DNA, 2005 bp, Cricetulus griseus
tcgcccgccgcccgagacgcagacttcacaatgtagccccgattccaggctgtcattcacagaaaataggaaaggaacaagggacagaaggaaggtgcagaagccagcgagaacacagagtaaggagggatcatcgcatccacttggtggcctgaagcctccatgccaccgggtgaggaagtactcacagacatccagaggagaagccaaagatgttgaccaggaagattaaactctgggacataaacgcccacatcacttgccgcctgtgcagcggctacctcattgacgcaactacagtgactgagtgtttgcacacattctgcaggagctgcctggtgaagtatctggaggagaataatacctgccccacttgcaggatcgtgatccatcagagccacccactacagtatattggtcatgacagaaccatgcaggacattgtttacaagctggtaccaggcctcccaggaaagcgggaaaatgaaggaaaacagagagaattctatcaacaaactgggcatggaggtaccaggtgacatcaagggggaggcgtgctcagccaaacagcacttagatccccgaaatggtgaaaccaaagcagacgacagttccaataaagagacagcagaagagaagcaggaggaggacaatgactaccacaggagtgacgagcaggtgagcatctgtctggaatgcaacagcagcaaactacggggcctgaagcggaagtggatccgatgctcagcccaagccacagtgctgcatctgaagaaattcatcgccaagaagctcaatctctcctccttcaatgagctggacattttatgcaatgaggagatcctgggcaaggaccacactctcaagttcgtggttgttacaaggtggagattcaagaaggcacccctcctgctacactacagacccaagatggacttgctgtaagcccagccagactcagcccacacccagtgttctacacggcaaaatgtgccgtggaatgttgcctctgggtgccatgtggaccagatttctgaatagagaatatttataacttttgtatgagagaatccactcccaacaagacactaccagcacgcgtttacagaggatgaaaacacttcgcagtttgctcgtctctgcttcaggtccccaggccagagaataagtgaaatagtgacacgtttccacaccacgtctgaatacagcacctctgcttgctttccaggtcttgagaatcagagtttgttttggtttaattcgtggattagttttcatgataagcctcagaaatacttgtactttcattaagtccttcctaagttattgaaagtctttttgtggtatatatttatgttgcctttagcttcctgaagacttaagagatatataaaaattttggtctgtgctggtggcaaggcaagaccttcatcactccccaatgtcgtgtggctgcaattccggcaccctcggtaaggcaactagaggtggtttggccagtgcagcgctggcttgttgaaaagttcttgagataattatccttggaaatgccatcactgaagttcctgcctttccctttttgtttttcttctgctagcaagatgtggtggctatgtttgtcacttatcaaacagcacaagccatcctgtggggagaccttatgaagacacttgggaggcagcctctagcttccatgtccctggtagaaaaaagaaaacttaactttataaaattatttattctattttaagccttctatcatattttcccatccagttgtttggtttctgtggtccagctttatttacaggcatataagataaaattgtgagatgttttgcaagcttcttttactttatgtagcctttggtttgtatgtttttatagggatgaagagcatttttatgcttttgtgcaataggctccaacatgcatttattagagtgtttaaattgtgatctagcatcgattctactaaattgaaagggaatataggtggaatttc

SEQ ID NO: 2222 - DNA, 2004 bp, Cricetulus griseus
ctcgagacagccaggctgcgggctgcggagcgtggaggtttgcggcctgcgttcggccagctccagcggctcacaggccgaagtaccgaggcgcagcaaagccgagcctccccgctcctccgactgcgtgggccatggagactcaggtgctgacgccgcacgtctactgggctcagcgacaccgtgagctgtatctgcgcgtggagctgagtgacgtgcagaaccctgccatcagcatcacggaaaatgtgctgcatttcaaagcccagggacatggtgccaaaggagacaatgtctatgaatttcacctggagttcttagacctcgtgaagccagagccagtgcacaggctgacccagaggcaggtgaacatcacagtccagaagaaggtgagtcagtggtgggagaggctcaccaagcaggagaagcgcccactgtttttggcccctgactttgatcgctggctggatgaatctgatgcagaaatggagctgagagccaaggaggaagaacgcctaaataaactcagactagaaagtgaaggctcccctgaaacccttacaagcttgaagaaagggtacctgttcatgtataaccttgtgcagcttctgggcttctcctggatctttgtcaacctgacagtgcggttttttattttaggaaaagagtccttctacgacacgttccacaccgtggctgacatgatgtatttctgccagatgctggcgctagtggaaactctcaatgctgcgattggtgtcacgagttccccagtgctgcctactctcatccagtttcttggaagaaattttattctgtttatcatcttcggcaccatggaagaaatgcaaaacaaagctgtggttttctttgtgttttattcatggagcacaattgaaattttcaggtaccccttctacatgctttcctgcatcgacatggactggaaggtgctcacgtggctccgttacactgtgtggattcccctatacccgctgggatgcttgtcagaagctgtggcagtgatccagtccattccagtattcaacgaatcaggaaggttcagttttactttgccatctccagtgaagatgaaagtcaaattttccttctttcttcaggtttatcttgtaatgttgttcttggggttatatattaattttcgtcacctttataaacagcgcaggcggcggtatggacaaaaaaagaaaagctccactaaagagaaatttggtagcttcgtgccggtttgagctcaatctatgattcttactgttttaccttcttgtactgtagaactgactttttgaaaatcaggtaaacttattgattaaacatttttgagtcagagtagggctggagaacactttgtatttgatgtcttttggcctaaagacattcattatgacagcacttatcaacatgagcatcaaagaggcagagtgatttaaagaaagaatcagaacttgggaaccccatgaatacttcattcctagctaaatcagaactatctgcaacactggagaaagagggagcattacttgcaaaacactgacattttaagttccaaatgtgaatgaagacagtgtcatcctctccacattccatgtaaaccaagtgatgacataacactataacaagagcttaaggggtaccagtgtctagatctgccactcccagtgttcttggggaggaaggagacttgtgttgtctcaataagcacaaagtagattggcattaaactggctggtttgacacaccccatctcatcgaagagtattttccaggtctgcagcttctgtcaacgtttgttggtattgccttctggtgttccttccactgactgtggagtgaggggcaggtcagctttacagtccactgtgcgcatccttgtgcaaaatcccatgttctagttgctgttagcatcccctttgttgctatctgagaaagtgaaagattgtgtatttctattaaaacatttacagtcaaaataacctaaaaaaa

SEQ ID NO: 2223 - DNA, 2004 bp, Cricetulus griseus
gtccagcactgacatgctgcagaccatccgacagtttatgacccaggtcaagaactatttgtcccagagctcggaactcggacccccctattgagtcgctgatcccagaagaccaaattgatgtggtgttggagaaggccatgcacaaatgcatcttgaagcccctcaagggccatgtggaggccatgctgaaggacttccacacggctgacggctcgtggaaacaactcaaggaaaacctgcaacttgtgcggcagaggaacccccaagagctgggggtctttgccccgaccctgacttggtggaactggagaaaatcaaacttaaattcatgaccatgcagaagatgtactcaccagagaagaaagtcatgctcctgcttcgggtctgcaagctcatctacactgtcatggagaacaactcagggaggatgtatggtgcggacgacttcttgccagtcctgacctatgtcatagctcagtgtgacatgcttgaattggacagtgaaatcgagtacatgatggagcttttagacccatcactgctgcatggagaaggaggctattacttgacaagcgcttatggagcactgtctctgataaagaatttccaagaagaacaggctgcgaggctgctcagctcagaggccagggacaccctgaggcagtggcacaagcggaggaccaccaaccggaccatcccctctgtagatgactttcagaattacctccgagttgccttccaagaggtcaacagcggatgcacaggaaagaccctcctcgtgagaccatacatcaccacggaggatgtatgtcagctctgtgcggagaaatttaaggtggaggcccctgaggagtacagcctctttctcttcgttgatgaaacatggcagcagttggcagaggacacttatcctcaaaagatcaaggctgagctgcacagccggcctcaaccccacatattccacttcgtctacaagcgaatcaaaaatgatccttatggtgtgattttccagaatggggaagacctcactccctcatagaggacagacacatgggactactcatgaatgcatccaaaagggagctaggagtctagccttctggctgtcacatgtttgagcttgaacgatagccacctcctcaaggacccctcagttcagtgtctaagtcatccgtaagctgacttagccaagggcatcttttagatgcagtgcccaaatgaggtagttgggggttcatgaaatagttagaatctcctccagaatggagaattgtatttgatggttcaggtgtccagagatcactggctgcttaaccttagccagcttctcggttggcttacatgtttgtatatgtgctgaggaaacacttaaggtacaagctcttcccttgggttcaacagcaggtgttgacaagactgtccgatgcagtgcgtcaggtacctcttgattctgtggatgactccatccttccctctttcccctctttcctccatccttcagtctatatttttttttacaaagagcctttgtgttttttttatatatttcatagaaaattttatagcagttgcaggtaaactgtcaggattggtttttaaaatatttttgtaactttaaaatattctataagtatgcatgtgatttaacatttaatatttgaagataaatctcttgctggatttgagagtattgtgttttagatctctcttctataactggatgttttggcaaattttgggaggagagactgctggttgtcttaaagcaaatccttgacactggccacagcatgttactgtactgtgtaaggatgcacaggcatctgtattttgggaggtccttttacctagtatccttgtcttttgtaccagaaccctcagcacatactgtgttgtactgccttttgtaaatgattttcaatggaattttgcacataatacattgtaatactgtacaataatcctgtgtaaaataatttttcaatattacaaaaaaaaaaa

SEQ ID NO: 2224 - DNA, 2003 bp, Cricetulus griseus
cacagggaccctggaagtacgagtggtaggctgcaggaatcttccagagaccatcccctggaacccttccccctcagtgggggcacctgggacccctgacagccgtacccctttcctaagccgcccagcccggggcctttatagccgaagtggaagccttagtggacggagcagcctcaagggggaaatggagaacacaactgaggtcagcaccgtgctcaagctggacaatgcagtggtaggacagacagcatggaagccatgcggccccagtgcctgggaccagagctttaccctggagctggagagggcacgggagctagagttggctgtgttctggcgggaccagaggggcctgtgtgcgctcaagtttctgaagctggaggacttcttggacaatgagaggcacgaggtgcagctggacatggagccccagggctgcctggtggctgaggtcacctttcgaaatcccatcattgagcggatccctaggctccaaaggcagaaaaaaatcttctccaaacagcaagggaaggcatttcagcgtgccagacaaatgaacattgatgtggcaacttgggtgcggctgctccggagactcatccctaatgctgtcaccacgggcaccttcagtcccaatgcatctccaggctctgaggtccggcacactggagatatatccatggagaagctgaaccttggtgctgactctgacagctcgtcccagaagagcccaccagggctgccctccacattgtatagcttgagttctccaactcatgaatccaccacttctccagagctgccttcagagacccaggagactccaggccctggcctgtgcagccccctggggaagtcgtccctgagtcttgaggacttcaagttcctggcagtgctgggccgaggtcattttgggaaggtgctgctgtctgaattccgctccagtggagagctctttgccatcaaagccttgaagaaaggtgacattgtagcccgagatgaggtggagagcctgatgtgtgagaagcggattttggcggccgtgaccagggcaggacatcccttcctggtgaaccttttcggctgtttccagaccccagagcacgtgtgctttgtgatggagtactcagcaggcggagacctgatgctgcacatccacagtgatgtgttctcagagcctcgggctgtcttctattcggcctgtgtggtgctggggctgcagttcctccatgagcacaagattgtgtacagggacctgaagttggacaatttgctcctggatactgagggctacgtcaagatcgcagactttggcctctgcaaggaggggatgggctatggagaccggaccagcacattctgcgggactccagagttcctggcgccggaagtgctgacagatacatcctacacgcgagcagtggactggtggggactaggcgtgctgctctatgagatgctggttggcgagtctccgttccctggggacgatgaggaggaggtgtttgacagcattgtcaacgatgaggttcgctatccccgctttctgtcggcagaggccattggcatcatgagaaggctgctgcggaggaacccagagcggaggttgggatccactgaacgcgacgcggaagacgtgaaaaaacagccttttttcggactctgggctgggacgtcctgctggctcgtcgcctgcccccacccttcgtgcctacgctttcggggcgcacagacgtcagcaacttcgatgaggagttcactggagagttgcccacgctgagccctccacgggatgcgcggcccctcacagctgcggagcaggcggccttccgggatttcgactttgtggcgggaggctactagccccaagcccctgccttgcccaagagttcttggtttttaaaaagccctttggggtttgccccataaaaaaaaaaaaaaaaaaaaaaaaaaaaaaaaaaaaaaaaaaaaaaaaaaaaaaaaaaaaaaaaaaaaaaaaa

SEQ ID NO: 2225 - DNA, 2003 bp, Cricetulus griseus
ggaaaataaggatgcaagcagtgtgattacagtgagggtagctggtgggaaaacagtgcaaggagaaaggtggagaacaacaccttatcaagtggcggccgagattagtcaagaactagctgaaaatgcaataattgccaaagtgaatggtgaattatgggacctggaccgcccgttggaaggggattccactgtagagttgctgatgtttgacaacgaggaagctcaggctgtgtactggcattccagtgctcacatactgggggaggccatggaactttactatggaggtcacctgtgctatgggccacccattgagaatggattttattacgacatgttcattgaagacagagtggtgtccagcactgagttgtctgccctggaaaatatatgtaaaactatcatcaaagagaagcagccgtttgaaagattggaagccagaaaggcacacactcctggaaaatgtttaaagtactaataaatttaagtgccggattctgaaggagaaaagtcaacactccaacgaccactgtttacaatacgagaggaatatcacaagcgtaacttcactgaggtgctgtctctaacatgtacaacagtaaactctgggaaacctcgggccactggcagcattacagtaacaacatgtttacctttgatgttgaaaaggacacttttgccctcaaacccatgaactgtccagggcactgtctaatgtttgcacatcgcccacggtcctggagggaaatgcctgttcggtttgctgattttggagttcttcacagaaatgagctgtcgggaactttaagtggcttaacccgggtcaggcgcttccagcaggatgatgctcacatcttctgcatggtggagcagattgaagaagaaataaaggggtgcttgcactttctgcagtctgtttactcaacgtttggcttctcctttcaattgaacctgtcaacgcggccggagcacttcctaggagaaattgagatgtgggatgaagctgaaaggcaactgcagaatagcttgatggaatttggaaaaccatggaaaatgaacccaggagatggagcattctatggccctaaaatcgatataaaaattaaagatgctattggcagataccatcagtgtgctacaattcagctggacttccaactgcctattaggtttaacctcacatatgttagtaaggatggggatgataagagcaggcctgtgatcattcatcgtgccattcttggatccgtggaaaggatgctagccattctttcagagaactacggtgggaaatggcctctctggctgtctcctcgccaggtaatggtcattcctgtaggtccaacttgtgaaaattatgcacttcaggtgtccaaggaatgttttgaagaaggctttatggctgatgtggacttagatgagagttgtacactaaataagaagataaggaatgcacagctggctcagtataattttattttggtggttggtgaaaaggaaaagataaataatgcagtaaatgttcgaacaagagacaacaaaattcatggagaaatttcagtagcttctgtcattgaaaaattgaagaacctaaaaaaatcgcgtactctaaatgctgaggaagacttttgaagtctgttccttggggctactaatgagtccatctaaaaggaaaatgattatttgatatatacatattttattttaattcattgtgttctgagactaaataggagaagctggagaaattcacaagagatcaagacttcagagacctcactggtaaaatggtattcattcaaagagggaaacactagtgagaattatcaaagttatgctgtgttgtttctcagtagtcatgcttccaggctgggggctgtaggtttgtgactacagcatctgccttgcatgtatgaggccctgggctcatccccagcaattgccacctctcaaccaacaaacaaaatagactttaaataaagccatggtccttttgaaca

SEQ ID NO: 2226 - DNA, 2003 bp, Cricetulus griseus
  modified_base (475)..(475): a, c, t, g, unknown or other
ttattgaagaagccgatgggaccagcccactgggaaaagatagaagccattaaccaagccatagccaatgaatacgaagtccggaggaagctgctaatcaaacgtttggatgtcactgtacagtcctttggctggtctgacagagctaagagtcagacagaaaaattagctaaggtttaccagccaaagcgttcagtcttgtctcctaaaggtaacatttccgttgctcatcttctggctgctagacaggacctgtcaaagattttaaggacaagcagtgggtccataagagaaaagactgcctgtgccatcaataaggtattgatgggcagggtgcctgacagaggtggtcgacccaatgaaattgaacctccaccccagagatgccaccatggcagaaagacaagatggccccagcagcaatcaggaggccgaggaggagggagaggtggttaggggaggaagaggaacaaanaccaaggaggctggacagatggagggagtggaagtgggggtggctaccaggatggtgggtaccgagattcaggtttccagcctggtggctaccatggcggccacagtagtggctaccaaggtggtggctatggtggtttccaaacatcttcatatgcaggaagtgggtatcagggcggtggataccagcaggacaatagataccaagatggtgggcaccatggggatcgaggcagtggtcgtggtggaaggggtggtagaggaggccggggtgggcgtggaggccaaggaggaggctggggaggaagaggaagccagacttaccaccaagggggccagtttgagcagcacttccaacacggagggtatcagtatagtcattctgggtttggacaagggagacattatactagttgaggctacagaaacttctattttgctagagctcaagtaatagaaacttagtttcagaaccctgaatctgccatctcttttgaatgaatgtaagaccacaggtggcaggcatacacctgcttgggacaaccatttgttggtcttcattcgattctccctctctttttattaaacagttttacataacactgtttatttaagaaacatatatctcctttctaggaaaaaaaacaaactttaaaggcaatttaagttgcctttaattgaccagtagactaatccagttagaacatacatgcttttttgaagtaaattacttgaataaaatagttctcatgttttcaatatgcaagttttgaaaatgaggatttgcctagactttttttacatttactgctgggaaccctttctcatattaacaacctatgtgtgtttttcttatactatctttctgatgtgtgttctccaagcatagctctgcccctgattggcattttattcagagaggttttgtcacacagctttgtgacagacctgttgggttggttcctattacaagagctcttttgcagataacacattcagtagccttatcctgttggtggaatactgtaccatatgctcctccaaaaaccatgaacatggccaaaatccataaagacaacaaaagcaaacttaagttgtgaactctagtatctgtaggcacttagttaagtatagcaactcaaacagacctgcatccatccgaaacaaaagttcctccttcaaccttgttttacttgaaatttgctagaagaaatggcaagcagaaatctgttttatgcacgagttaatgccactggctcaagcaaatacaagttagtttgctttaggcaagagcccttttttgtgatggaagtgcactacaaagtcagacccagtactgctcagcgcaggaggccctttatcattgctgcagaagacaaaagcctggctgagtcgctctccacatcccttactgaaatccccatgcctgctgccgggttttgtccatgtaaacactgtcaagctgtgaaaggaaatggctggaggtgtgtttggtgtgagaggtgagcaataaagtatctgtacattct

SEQ ID NO: 2227 - DNA, 2003 bp, Cricetulus griseus
gcttattgtgggaggctactcctcatccgaggagtcatgactctgttctccatcaagagcaaccaccctggacttctgagtgagaaggccgccagcaagatcaatgaaaccatgctgcgcctgggcatctttggcttcctggcttttggctttgtgctcatcaccttcagctgccacttctatgacttcttcaaccaggcggagtgggagcgtagcttccgggactatgtgctgtgccaggctaatgtgaccattgggttgcctaccaagaagcccattccggactgtgagatcaagaatcggcccagcctcctggtggagaagatcaatctgtttgccatgtttggcactggcattgccatgagcacctgggtctggaccaaggccacactgctcatctggaggcgcacctggtgcaggctgactggacagagtgacgatgaacccaaaaggatcaaaaagagcaagatgattgccaaggccttctctaagcggcgtgaactgctacagaacccgggccaggagctctccttcagcatgcacactgtctcccatgatggacctgtggcgggtttggcttttgacctcaatgaaccttctgctgatgtctcctccgcctgggcccagcatgtcaccaaaatggtggctcggagaggagccatactgcctcaggatgtgtctgtcacccctgtggcaactccagtgccaccagaggaacaagccaacctgtggctggttgaggcagagatctccccagagctagagaagcgcttgggccggaagaagaagcggaggaagaggaagaaggaggtgtgccccctggggccagctccggagcttcgccaccccggccccggccccggccctgccaccagcgcggttcctcggctgcctcagttgccccggcagaagtgcctggtagctgcaaatgcttggggaacaggcgagtcctgccgacagggagcctggactctagtctccaaccccttctgtccagagcctagtccccatcaagacccatttctccctagtgcctcagcccctagggtctgggctcagggacgcctccaggtgctgggatccattcattcccgcactaacctaatggaggccgagctcctggatgcagactcggacttttgatctgccccacccaatagagtctggctggcagtgtcagtgtccagcagagcttgtaccaaggcaggaatggcagaggcaggggtgacattacccagagtgggctgtggtggccagtgaagtaaccaagcccacgtctggcagatgagggctggctgcccttttctgtgccaatgagtgcccttttctggcgctctcagaccaaaagtgtttgttgtgtcatttgtcctttgtctaagtggggacagaactctcttcttcctcttctgggtagttgtgatgaccactcccagaagcgctataactgctctcaacaggtagcctaccccaaacatatcctgttttcctgtgctctctccttcacatgcacatctcagttccaccagaccaactgtttcctgcttagcaccctaaaactgcaacacacacacacacacacacacacacacacacacacacacaccacacacaccacacacacacacacacacacacacacacacacacacacaccttactactgagctcagtctccaggcgagagactggttctgctccaggacttcgagagacatgttatttcttctgtatgtccatccagtggggatggatcctctgacttaaggggttacattgggaagcttctgtagcttcagctaggcaagaaagcttcttccaacttctgtatctgctgggaggggggactcccccacttttttttttactagtgtctagtcatgttcatagcaacccacattcaagaaccagacagcaggatgccttagaagctggctgggttccaggtcgaggggatcggtatgagaagaagaaacaaacaagtaaataaaattgttttgtaataa

SEQ ID NO: 2228 - DNA, 2003 bp, Cricetulus griseus
  modified_base (122)..(122): a, c, t, g, unknown or other
  modified_base (143)..(143): a, c, t, g, unknown or other
accactacctgagtacgagttgagtccatccaagttaggacaggaggtggacgatgtgtatctcattcgagctcagggactgccttggtcctgcactgtggaagatgttcttaactttttcncagactgcagaatccgaaacngtgagaatggaatccatttcctagagatgggaaacggaggggcgatgccttaattgagatggagtcggagcaggacgttcagaaggccttagaaaagcaccggatgtacatggggcagcgctatgtggaagtatatgagataaacaatgaagatgtggatgccttaatgaagagcctacatgtcaaatcttcacctatggtaaatgacggtgtggttcgcttgagaggacttccttatagctgcaacgagaaagacattgtcgacttctttgcaggactgaacattgtagatattacttttgtgatggactatagaggaagaagaaaaacaggggaagcctatgttcagtttgaagaaccagaaatggccaaccaagcgcttttaaagcacagagaagaaattggtaacagatacatagagatatttccgagcagaaggaatgaagttcgaacacatgttggatctcataaggcaaagaaaatggtgtcatctcctactgctaaatatataactgagccagaagtggtatttgaggaacatgaagtaaatgaggatattcggcctatgacagcttttgaaagtgataaagagatagaactgcctaaggagatgtcagaaaaacttccagagactgttgattttggatcaatgccttcactccactttgtccacatgagaggattgcctttccaagccaatgcccaagacattataaatttctttgctccattgaagcctgtgagaatcaccatggagtacagctctagtgggaaggccactggagaagccgatgtgcactttgatacccatgaggatgctgttgcagctatgctcaaggatcggtcccatgttcaacataggtatattgagctcttcctaaattcatgtcctaaaggaaaataagacgtcagcagaacctcagatgataaggatgaagcagggagcgcctcatttgcacatctctcttgaacctgggctataaagatccatttgattggcagcaaccgctggagaaaggatctgggcatcgtgtttagagccagaaagattcagtttaggattatgaaataagctacaaatttaaaattccatttgaacagtcctggatctgattgagaaagtctggtttatgtaacttagtttcctgtcatggaggatatgtcacagatgatgctctattcagtgctgctctttagaaccttatttccgctcgttttttgcctatggttgagagctctgatgtaaaacttctcatggaataaaatatggtgtatttttgctaaacactcaccaaagcaagggaaggtttcagaactttaataagccagtctgattttgatttggtcaagtagtgtttagtttgtctgtatttaattgcttagggctagaaattttcaaaaatacaaaccacagattattgagcataagtggtcacttggcagttttgtctttagaaactttgcctccctaagccttgacctaaaggcttttaatgtgggtgcctgtctttgtcatgggaagtctaggctaaccagactggtaaggacattgtagcttctctctaattaaaccagctctagacaggaaaaaaccaacccgagtctcctcattcgcttttccagtggggtagctaccccatattttagaacaagtaggggtgccttgcttaaataaaactagcatttaatatataactgtgtgaagggtttatggatagagctgtatttctgtcacattgtggcagtaccttctgctttaatactaaatagcttgttatttaaatattggacaaaatggctggcttcaaaaatagtcattaataaacttaactttatgtatacctgtgtagaagaataaaa

SEQ ID NO: 2229 - DNA, 2002 bp, Cricetulus griseus
cggagctggagggcgaagccggtggagtgagaggatgggcgagcagtctgaatgccagaatggataaccgttttgctacagcatttgtgattgcttgtgtacttagcctcatttccaccatctacatggctgcctcaataggcacagacttctggtatgaatatcgaagtcctgttcaagagaattcaagtgattcgaataaagtggcctgggatgacttcctcggtgatgaggcagatgaaaagacttacaatgatgcactgttccgatacaatggcacaatgggattgtggagacggtgtatcaccatccccaaaaacacatactggtatactccaccagaaaggacagagtcctttgatgtggttacaaaatgcatgagtttctcactaaatgaacagttcatggagaaatatgttgatccaggaaaccacaatagtggaattgatctgcttcggacctatctttggcgttgccagttccttttacctttcgttagcttgggtttggtgtgttttggggctttgattggactctgtgcctgtatctgccgaagcctgtatcccaccattgccacgggcatcctccatctcctggcaggtctgtgcacactgggctctgtaagttgctatgttgccggcattgaactactacaccagaaactagggctgcctgagaatgtgtccggagaatttggatggtccttctgcctggcctgcgtctcggctcccttacagttcatggcgtctgctctcttcatctgggctgcccacaccaaccggaaagagtacaccttaatgaaggcctatcgagtggcgtgaatgggcagctgcctgcttgacaatggccgtttttaaattttttttttctattgaagttttcccttgtctatcgcccagttgtctttcatatttttgtggatatgccattttatcctaaaagtccctttaatttatatacagtgccactaaataccacttaaaatggatgtggctcactttgagtggctcagtcttttaccagattgatctaggttcagaattcagacaagaagaactgtagagatgtgaacctactttgtgatagaacattggcagtggaaaattgacccagaacagggcctgctgatgtctgctaaacgcagtagtgtagtaacatgtgctgaactagaaactaattccatatgagatctgttatcactgtcaaaacttcatgtttaatttcctgttgttgataccagcagtaccagtgttcctaaagatgtgtgcacataaaattgggaaattatttttagcatccttgtccctaaactttggtacattgcttcattcatctgacataaaatatggcagctgtttatactgtgattgtctacaagaaaaaaaaaagtgaaaaatgatgtttacttgaaattgtagcttttaactgcaaagtttcaattcaatgagaaaagctgattaatcatactacattatataagttttttttttttttaaactgaaactcattaggattttcagtgccaccaaaccattgtgaatttctgctgtgaatttccccctccacacaccaggcttattaaaaaagtgctttctttttaacagagcattagaagaatcacagtccatttcccaactgctttgttccagctaagtactaagtgggaggtcctaccaacagtgacccccagacctgggggttccaccaccacaagatataaagctgtggctacccactaacttccaactgtggtctttatttcttgtggtgaaatgatgtgcctttccgtgcccaaatcccttcctggtgtgtatcaacattatttaatgtcttctaatgcaatcattttttataatatgtctgtaaacattgaactttaaaaatcttatttatttactccattactgtagaacttcacagatttaaaaaaaatgtaactcagtaatttcttaccaaatcctaaatctgtcttttttaaaaaaataaaaaaaaagagaatcat

SEQ ID NO: 2230 - DNA, 2002 bp, Cricetulus griseus
cccatcctggcacctggcggacagccccgcggtaaatggagccactggccacagcagcagtttggatgcacggggaggtgatccccatggcagccgtaaagcaagcgctgagagaggccggcgatgagtttgagctgcggtaccggcgggcgttcagtgatctaacatcccagcttcatataaccccagggactgcataccaaagctttgaacaggtagtgaatgaactcttccgggatggggtaaactggggtcgcattgtggccttttctccttcggtggagcctctgtgtggaaagcgtagacaaggagatgcaggtattggtgagtcggatcgcaagttggatggccacctacctgaatgaccacctagagccttggatccaggacaacggcggctgggacactttcgtggaactctacggaaacaatgcagcagctgagagccggaaaggccaggagcgcttcaaccgctggttcctgacgggcatgactgtggctggtgtggttctgctgggctctctcttcagtcggaagtgacaagacagtgaccacctactcacatctcgcctcccaccctatccccaccacaactctctcttcagccaccattgctaccaggagaaccactacatgcaactcacgcccacccccctatcgaagggttgggcctagaccgagtccccttgcagttagctttctagaacctaccacacttctgtgagagccatcttctccccacatctcaattcacttggcctcaaaattcacaagattgtcccccaaatcggtcccttggaggctagcaggcgtgggaaagggtgtgctagagagggaggagggacctgtctggttggggaacccttattacccctgagcctcctgggaatgcttttctgcagggatccccagaaagaggctagattgccttggtttgatgtgtgtggcctcagaattgatcatttcccatcccactgtgtccctgggccccccttcttcccatctctacccccaagagccattgagaggccccttttttgactaattagaaattcagactgcttgggataaagaggcagttaccagcacctccgccctgcttgtggcctggccaaagcccccactcctggtctgaatgttctcctgaggcttctggctagaggccagcccaactcaggaggaggggcttagctgcagaaagtcctccagtctagagctagagtggctctctcagcttagcaccaccctagaccttctccacccctcccctggctcccatgaccatgactgagggaccaactgggcccaagataggtgccccagagctgttaatgacttcagctgcctcacttcctgcaagatcagcctgtggcatctttgccttgggtgctggccacagggtccagggactctggcctcagcccagaagtgaaggggagctatacagagcagctgtgggagcccctggggatttccctacctcaggcaggaagggcaggaaggagagcctggtgcacaggtgaggaggactgcaagggcctgtgccctgcccccacccagcctgggcagcagggctgccaaggtcagagtggcatggccaggaacccttcaggcctctctctcttctgctccacccttggcctgtctcatcccgtgggggtcccagctcagctctggccaccccgggctctctgctgtacatattcgagacttagtttttattccttgtgaagatgatatactatttttgttaagcgtgtctgtatttatgtgtgaggagctgctggcttgctgtgcgcgtgcacgtggagagctggtgcccagagactgacagcctgatgctccctccctgcccttgcctggggaagcccactgggggtcctggcttttgagaggcacctgtccctcccctcccctcaccctacacttgttccagctctttgaaatagtttgtgtgaaggtgaaagtgcagttcagtaataaacggtgtcgactctgtgaa

SEQ ID NO: 2231 - DNA, 2002 bp, Cricetulus griseus
caggagacggccagggcgtgtgggattggagaagtggaggaggaggcggagagtcagggctctgagggggtgctgttccccagctgagggaggagcccccggaagacgccgcggaaggcagcgaagcggaggcggccggagccggggacgcgatgcagccggagccgcgcggctgcgctgaggcgcccgcggcctgagcccccacggcgttgcgctcggctcggttcggcccggttcggctcggctcggctaccggcgaagtcaatgcccttgagcgtggctgcgcgcggcccggctgtgcggcccgcgccgcgcgcgctgagcctctcggcggcccgggccgccctcagccccgcgctcgatgtgtagccacatagttatctgtacacttcgtcgccggggctttaatgaggacctgagtcgcgagggcgtgtgaatcaccgcctgggcccgggaaggaggacggcgcatttaaccccctcccaccccgctccatgtccgtgtgtcacttcggctcagtccacctggcgcggcgggtcctggcgctgctactgctgctgacgatctgctcccctcgcgcctctcgccccagaacctcttgtgcgcccacggaacttctactttttttccgtagctccagcacttctgctcttgttttttgttttctgcgtaaacctctggcccactctcaaaaggcaagatgtccagtcatgtcccggcggatatgattaatttgcgcctcatcttggtgagtggaaagacgaaggagttcctcttctccccgaatgactctgcctccgacattgcaaagcacgtgtatgacaactggcccatggactgggaagaagaacaggtgagcagcccaaacatcctgcgactcatttatcaaggcagatttctacatggaaacgtcacattaggagcattaaaacttccttttggcaaaacaacagtgatgcatttggtggccagagagaccctgccagagcccaactcacaaggtcagaggaatcgggagaagactggtgagagcaactgctgcgtgatcctgtgatgtgtcgccagtatgtgctacagtctgttgatgctgctgggacagaggaggttcaacagcatcccacacctgtcggacagtcacctgcacatcatggggctgaattactcgggaactctgtcatctcttcttataaagtaaaaagaaccaagaacactctcatctggtcctttattcctgtctctcttacctgtgttgagcagtctgaaatgcacagtggtctccaggggagccacagtggctgtcctcacaggatatcaaaaagtctccagatactaattttgttactttatgtagtttgcatttggaatcagtgcttgcaattgtattaaaatcacaagctgatttttaaggcatacctgattagtagcaccattcttatttttaccaataatttaaagattgatatgctataaataaacaatttgcacagcactaaagcatgagctaatttcatctaaacctgtaaaaaaaagattttatatttttttcactgggaagaaatcttcctagatgaaattacaaatatgtgtagattatatttaataaaaagacataaaatatctaactgtagaatgcaaatatagattggcgtgtagcatatagaccagtatttcatatcaacaccattatccagcctttctaaagatgaagttgcagactgcgttgtgttccgtatttaatgaggcatcctggctctcggcaacattaaatgtcaatggtctcgatggtcatctttgtttaaatgcaatcaggttactttattcattgttaatgcgttgataaagaggctttatatgcagtagatctacgaaaatattgttcatactgatcagaattaaatttgtatagagcagagttttaaaatgaatgtaaatagcactaaaccttttctttctgcaacctgtacttaatagattccttctgtaaactaaataaaaaaaaaaa

SEQ ID NO: 2232 - DNA, 2001 bp, Cricetulus griseus
  modified_base (671)..(671): a, c, t, g, unknown or other
  modified_base (677)..(677): a, c, t, g, unknown or other
gctgccctgtggcgatgccgcgagggcgcggtggcggtggcgtgcgccacgaccccaccgcgtccgcgcccttggcgagccccagctactacgaaagggtgggccagctccagcaggcgctgcgggacagtgaacagaagagattggacctggaagacaagctttatgaatacaataagtctgataagtgcagagctaagttgaaatgtgcaaaaactaaagaaatacctgaaaagaagtatgtgaaatctgaaaagaagggctcatgtccgaaaaccaaggatatttaaagaagttccagtgtgtccagacttatgttgaacacttgaccacaaatacagagaagcttcaaaaaactgaagactgaatatgaggctgaggtaggaattaactcacggacagccatgtcaagaggattgtatcaaccagcaacaatctttatgggccgccagatgtcagccatctcaagcattgatgatttcagcacagagcagagatctaagcaacccacaaagaactgttcaattcctgacccacattcacaccagcagacagcccagagcagccgtgtgacagacagctgtgtagtacaaactaatagtgacacacagtgcttaaaataagtctgacaaaatagatggaaagcaatctcttcagattgttgagaaacncccgtnacaagccatgcttgtctgaggaagaacaaactcattgctgggagatagggagcagcacacgtcacagcaagagtaatttatctgaaggcaggaagtctgctgaactccattcctcgttacaggaaagattaagtccagagaacagaaccactgatttaaagtgtgacagttccagcagatcagagggatcaggtggagaaatactgacacaagaacatactgaagtcagggaagaaagagccagcctgccggtgcccacgctatcagtttcagaacactgtgcatctgtggagagaagcattctgcttggaaaggtttctcagatgatcttgctcatggggacccaaagtcaccaaaggcctttctaaaaatgcaggaagagcaggaggaggaaagctcgtgcagcagcagtgacctcacagtttctgtaagtgaagagaaattgagtttggagaatctggaatcactactaagtccaggaaccaagctggatggtgaagatggaaggcaggcctcatggtcagtctacaccacattgcaaagagatccactcatcactgattgcagtttgcagacccaaacctttcctgattcaaaaagggaatccttcccagactcaccaagacaatctgaacaaatgccagattggcacttattgaagacacaaggacagtgtatgaaggaacataataattctcctaaagaagaggccacagcattattgaaaaaagtccttacagaagaatgtgaccataggtcagctattcacagcaatgaatcatcttgcagcatgccatctattctgaatgacaataatggaataatggaagcaaaacccgctctgcggctcaacagtgttcttacaagggaacaagaagtttcaagtggctgtggagatgagagcaaagaagaaagcatagctgcaatcccagtcacaggacacagagaggcggatatagtaccctcagaactgtttcagttcagcctgggagcaaccatgaaagagacaaaagcctaccagttaatgaagaaatctacccttcaggataatttgaatcaaactgaagagagatttgaaagtcaattttcaagtttggatattggcagcagcatattcaagacaaagacagcccacaaaatcgcttcggaagctagtttttcatctagtgaaggaagtcctttgtcaaggcatgaaagcaaaagggacccagtgaccactataaagtcgaatgccttctggggggaatcagatgacagtaactctgaaatcgaagctgctcttcgtcctagagaccataacatgtccgatgactttgatgacttt

SEQ ID NO: 2233 - DNA, 2001 bp, Cricetulus griseus
agggagagacaggctcaacgaagaagataaccttgagctcacagagaagctagaccaagactggaaagaaatccagactcttctgtcacgtaaaatctcagaaatcagaaaacaaagagaaaaggaaaaccccagccagatgcatatgacataatggttcgtgagcttggctttgaaatgaaggctcagccctctaacaggatgaaaacagaagaggaattggcaaaagaggagcaagagcggctcaagaaattggaggctgagagacttcgaagaatgcttggaaaagatgaagatgaaaataaaaggaaaccaaaacatatgtcagcagatgacttaaatgatggatttatactagataaagatgataggcgtttgctttcttacaaagatgggaagatgaacattgaaaatgtccaggaggagcagagcaaggaagcaggtggccaagagagtgaccagaaagaggatgaagatgagagtgatgaggaagagggtgagatgagagtagggaggacacagaagaaagcgatggctcagacagccactcggacctggagtctaatacagagagtgaggaggaaaatgagaagccaaagaaagagcaacatcagactccttgggggaaattgccaagtgatgatcagaaggttcaaaaggctgctggagctgagctgccctatgtctttgcagctcctgaatcctatgaggagctaaggtctttattatcaggaagatcaatggaagagcagcttttggtggtggagagaattcagaaatgcaaccatccaagtcttgcagtcggaaacaaagcaaaattagaaaaactgtttggcttccttttgcaatacgtaggagatttggctacagacagtacaccagaccttgagaccatcgataagttgattgtgcagttatataatctttgccaaaagtttcctgaatctgcaagtgactccatcaaatttgttctccgtgatgccatgcatgagatggaagaaatgattgagaccaaaggccgggcattatttccagggttggatgtgctcatttatttgaaaatcaccgggctgttatttccaacttctgatttctggcatccagttgtgacccctgccctgatgtgcatgagccagatgcttactaagtgtcccgtcctgtccctacaagatgtgataaaaggcctgtttgtgtgctgcttattcctggactatgtggccctgtctcggaggttcatccctgagcttttaaattttcttcttgggattctttacatagcaactccaaacactaagagccaaggttccgctctggtgcacccttttagagcacttgggaagaattcggaattgcttgtggtctctgataaagcagatatggccacgtggcagaagggaagcctctccttgcactgggcaagtagactgagcactgtgacagcaactgaagccaatcataccagactatcctgcctggcctcatgtctgaccctgctgaagcactgtgtgctcatgtacagtgtattgccctccttccatgccatcatcaaaccccaccaagccctcctgacagagcatcttgtgaactgtagcctccctcaagaccttcaggagctgtctcgaagcatactgtcagaaatggaaagccaaaaacagcactgccagccactgatatgtgagaagagcaagccagtcccgctaaagctgttcaccccccagctagtcaaagtgcttgagtttggacggaaacaaggcagcactaaggaagagcaggaaaggaaaagactaatccacaaacacaagcgggaatttaaaggtgctgtccgggagatccgaaaggacaatcagttcctggccaggatgcagctctcagaaatcatggaacgggatgcggaaagaaagcgcaaagtaaagcagctttttaacagcttggccacacaagaaggtgaatggaaggctctgaagaggaaaaaattcaaaaaataaatggttttgtaatgta

SEQ ID NO: 2234 - DNA, 2001 bp, Cricetulus griseus
  modified_base (366)..(366): a, c, t, g, unknown or other
caaatacttcaaggggagaaaaaagctgttatagaagagttccgccacctgccagtccccttccaccagaagcaggaagaactcaagttcaccacagcccttgggaggcttcagcaccgagtgcgggagacgcgccttctccgagaaagtctgcagcaagggccaaggctggggaacaaaggtgtctctgcacagcttgatagaaagtccggccaatggcactggtccaagcgaggacctgaccaccatgctgcaggggactgtgggggacctggaggccacccaggccctggtgctgaaaaggatccagatttggaagcggcagcagcagctggcagggaatggcatccctttgatgatagcctntcgggctgcagaaaaggtgtgaaagcttggtggaaatctactcccagctgcagcaggagcctgtctctgccgttggtagttattgtccacggtaaccaagacaacaacgccaaagccaccatcctgtgggacaatgctttctccgaggtggaccgagtgccttttgtggtagctgagagagtgccctgggagaaaatgtgtgaaaccctgaacctcaagttcatggctgaggtggggaccagccggggacttctaccagaacacttcctcttcctggcccagaagatcttcaatgacaacagccttagcgtggaggctttccagcaccgttgtgtgtcttggtcacagttcaacaaggagatcctgttgggccgaggcttcactttctggcagtggtttgatggtgtcctagacctcactaaacgctgtctccggagctattggtcagaccggctgatcatcggcttcattagcaaacagtacgtcacaagccttctcctcaacgagccagatggaactttcctcctccgctttagcgactctgagattggcggcatcaccattgcccatgtcattcggggtcaggatggcgccccacagatagaaaacatccagccattttctgctaaagacctgtccattcgatcactgggagaccgaatccgggatcttgctcagctgaaaaacctctaccccaagaaacccaaggatgaggccttccggagccactataagcctgaacagatggggaaggacgggaggggttacgtatcgactgccatcaagatgactgtggaacgagaccagcctcttcctactccagagcctcatatgcccaccacggtgccatcttacgatcttggaatggcctccgatacctccatgcaactcagctcagatatggggtaccctccaccgtctcattccactcatttcaaacccccctggaagagtcaatcaatgtacttccagccttccaggaggctcctcacctgcaaatgccccccaacatgaaccagatgagcctaccctttgaccagcctcacccccagggcctgttgcagtgtcagtcccaggagcatgctgtgtctagccctgaacctttgctctgcccagatgtgaccatggcagaagacagctgcctaactcagcctgtgggaggtttcccccagggcacctgggtcggtgaagacatgttccctcccctactgccacccactgaacaggacctcaccaagctgctcctggagggccaaggggaggcagggggagggtccttgggggtgcagcccctactgcaaccttctccttatgggcaacctgggatctcaatgtcccacctggacctacggaccaaccccagttggtgattccagctggagaagcccagacacagagcctcttctgtctctatggacctgctctgggacctgctcatgcaggtgcctcccgtctccagctgttccttggtcaggaggaaagaactggctgggcgaatgcaaggcggcgtatggaaccacagcattgtgtgcttccaaacacatcagggcccccttttccagcacagggggcagagggatgctgtgttgagccagggcctggggcacacatgcagaaaccataagacactgtgcc

SEQ ID NO: 2235 - DNA, 2001 bp, Cricetulus griseus
cattgttcctcacagatttgtattctccagagtatccaggcccttctcataaaataaaaaagaactgtacaggtggagcaagccaaagttttaatcaaagaaggtggcgttcagttgctgctgacgatagttgataccccaggatttggagatgcagtggataatagtaattgctggcagcctgttatcgactacattgacagtaaatttgaggattacttaaatgcagaatcccgagtgaacagacggcagatgcccgataatagggtgcagtgttgtttatacttcattgctccttcaggacatggacttaaaccattggatattgaatttatgaaacgtttgcatgaaaaagtgaatatcatcccactaattgccaaagcagacacactcacaccagaggaatgtcaacagtttaaaaagcagataacgaaagaaatccaagaacataaaattaaaatatatgaatttccagaaacagatgaggtgaacattgtgattttactaattctaagaaaataatgtttgataagaacacaacatgcaggatttgaaagatagttactaataacgtaacactatgagaactacagaagcagaaaactaagcagcagtgacttacaatggagtggataacaacaagaataaaggacaacttactaagagtcctctggcacagatggaagaagaaagaagggaacatgtagccaagatgaagaagatggagatggagatggaacaggtgtttgagatgaaggtcaaagaaaaagttcaaaaactgaaggactctgaagcagagctccagcggcgccatgagcaaatgaaaaagaatttagaagcacaacacaaagaattagaggaaaaacgtcgccagtttgaagaagagaaagcaaactgggaagctcaacaacgcattttagagcaacagaactcttcaagaaccttaggaaaaaaacaagaagaaaggcaagatcttttaaactctattgaccaccagttatgtattagttgccaatatgccagcttggacatcagtgtttgttggatccgttttgaccaatttgcaccaattttatccataatgatggatttaacagcatgacaaaaattatttttttttgttgttctcgaaggagattaagatgccttgaattgtctaggatattgtgtacttagaaattaacagctctaagtaccttctacttttttcttttttttttaaatttaaaaagatgtcttcagtttaatgcaagaaaacattttactgttgtacaatcatgttctggtgggttgattgtttacagaatattctaaaataaaaggactctggaaggttttcattgaggataaattgccataatatgatgcaaactatgcttctctatgataattataatacagaggttccattcaatgcagcctatacaataatgtatttagtctaacacagtggaccctatttttgacacttccattgtttaaaagtacacatggaaaaaaacctatatgcttacagtgcacctagagctttttataacaacctttttttcgttgtttgtttgttttggattctttaaatatatatatatatattattctcatttagtgcccctttagccagaatctcattactgcttcatttttgtaataacatttaatttagatattttccatatattggccctgctaaaatagaatatagcatctttcatatggtaggaaccaacaaggaaactttcttttaactccctttttacactttctggtaagtagcaggaagagaaatgcgtttgtagaacatttctaggcaaattgtgaagctaacgaccaacctgtttctacctatactcagtcttttattttactagaaatgggaatcatggcctcttgaagagaaaaaaagtcaccattctgcatttagctgtatccatatattgcatacctgtatttttttgtttgtattgtaaaaaaattcacataataaacaatgttgtgatagta

SEQ ID NO: 2236 - DNA, 2001 bp, Cricetulus griseus
agaggccggtgaaagctgtcttcctgcgccggtggccggttaagggtcggcaggagagatcggttcctccgctgtggccatgcctgtatcctctaggggcggtagccccacgaagttgcagcctcaggccaggcacggctggacactcatatcccgcccaggggtctggcagagggcagtgactggcaccctcggtaggtcgtgtgttcccccaagaaacaggacggtccaaaagatggctgctgacatgcagaggaagagaagcagcgaatgccccgatggcacgttggctccttccgatggccaaggtgttgagagagctgaaagccccacaccaggactgacacagggaacagagccaggtgcggggcaggagggtgccatgtttgtccatgcacgttcctatgaagacctgacagagtcagaagacagggaagcttctggggacagccccaaagagtatgctgggagtcccccgccactgcctacagacatgcgccagatcagccaggacttcagcgagctaagcacccaactgacaggggtggcccgtgacctgcaggaggaaatgctgccaggaagctctgaagactggctagagccccagggggcagccggacgaccagccacagagccctctcaagagggcacaactgaaggggatgaggaggacgctaccgaggcatggcgcctccaccagaagcatgtgtttgtactgagtgaggcagggaagcccgtgtactctcgctatgggtctgaggaagcactttccagcactatgggtgtcatggttgccctggtgtccttcctggaggcagacaagaatgccatccgctccatccatgcagatggctacaaggtagtattcgtgcgccggagccctctggtgctggtggcggtggcccgcacacggcagtcggcccaggagctggcccaggagctactgtacatctactaccagatcctgagccttctaactggcgcgcagttgagccacatcttccagcagaagcagaactacgacctgcggcgccttctctcaggctcggagcgaatcacggataacctgctgcagctaatggctcgagaccccagtttcctgatgggcgcagcgcggtgcctgcccttggcagcggcagtgcgggacacggtgagtgccagcctgcagcaggcacgtgctcgcagcctggtcttttccattctgctggcccgcaaccagctggtggcgctagtgcgccgcaaggaccaattcctgcatcccatcgacctgcacctgcttttcaacctcattagttcctcctcatccttccgtgagggcgaggcatggacccccgtgtgcctgccaaagttcaatgcggccggcttcttccacgcacacatctcttacctagaacctgacaccgacctttgcctgctgctagtctccaccgaccgtgaggacttctttgcggtctctgactgccgccgccgcttccaggaacgccttcgaaagcggggagcccacttggccctgcgggaggcgctgcgcacgccttactacagcgttgcccaagtgggcatccctgaccttcgccacttcctctataagtcaaagagctcaggactcttcaccagccctgagattgaggccccgtacaccagtgaagaggagcaagagcggctgctgggcctctaccagtatctgcacagccgcgctcacaatgcctcgcgcccactcaagaccatctactatacaggccccaatgagaacctcctagcctgggtgacaggtgcctttgagctctacatgtgctacagcccactgggaaccaaggcatcagctgtcagtgccatccataagctgatgcgatggatccgaaaagaggaagaccggctcttcatcctcacacccctcacctattgagggaagtgggaaggcacactgggcgtgggaagccatgggagcctccaggtgaggctggcttctcctgcccagccagcaggcagggactgtgggttggt

SEQ ID NO: 2237 - DNA, 2001 bp, Cricetulus griseus
gataacgaaaagagcaaagatgtgaatggacctgaaccactcaacagccgaagcaacaaactgcactttgctttcaggctatatgatttggataaaagatgacaagatctcccgtgatgagctgctacaggtactacgaatgatggttggcgtgaacatctcagatgagcagctgggcagcattgcagacaggaccattcaggaggctgaccaggacggggatagtgccatatcctttacggaatttgttaaggttttggagaaggtggatgtagaacagaaaatgagcatccggtttcttcactaaaggacagggaccaaattattcttgcttcctagtatttaagaactggaacttccttctgtcctccagccccaccctatcctgtcatccccctttcccagaatactactgctcttgcatgacaacctgaagtctctcctgtccacactgacttgcctttggtgtataaacagggcgttacagaatggtaccctcagtctatttctgttcagtgtgcacccaccgggtctctatttgtaagtaccatcttcccctgatttgctgctgaatgccgtgcatccatcctgtctgaggaaatgactccgggctctgctgtcaagcttgtctccaatgtgacaggatagtgagtggtccggtggtttatatctacctaatcctggacgtgtctctgggacattgcctatccaggagctgttttcagcaaccagtacaactcttagaagcatgtgactctcttgatcccctgctctcatcacagggcttatgaacagagatattctagaaaggtggtcatggtgaggcttgtagagccatgtctcctaggtggtttccccaggtctctctacctctggctttttattttcaacatatttatgtggcttcttttctgagtacagtgttgacattcagaaaatagtcttatgcctgccagtttgtttctctttgggacacattgtcaccaatagagtagctgttttgacaacatggtaggggtccttcttgtagttttctgaagagtctaggcaccctggagagctgcccacatttactctgcagcatgggatatgcctcagtgtggaagatcttcaaatttccaaacaaaaagactagtgttatggaagtgcctgacttatcttagtcctcaagaattaaattgtccttggtgtcttaaagttttgcacaaaattctgaatgaattttatgcgtggcaaattttaatgctggaagccctgtagtcagttcataatcctggtcccggtgttgaatgtattgtctcatgagcttcctaatcacatgaccttcctagctccttgtgtagagtgtagaccactgcacatcctttagaagcatagggcctggcactggtgacaccaactgaagtgatagtagaggtctttgaatgacccagctcaacttttgggccaaggtcagcttggtttaaacctccctgaatcaggctgcttctattccgtgtctgtgtaaatctgctcttggctggctttctctggtgtttgcttacttgcttgcttgcttctttgctttggaaggctatccaagatgtgtaaacaattctttagaaaagaaattgctattaaaaacccaaacaaacaaaaacactgcaaaagggaagggtaaaggtgaggatcgggggagtggccaggatggatggatggagtctacatgaattggggaattctttatgaaatatctgtctgactttgtgatcaaatgatgtaatataagaattgtataaaagggaagaattgtctgatactgatctgtttgagaagtacttcagaggcttcttgatttacatatttaaagtttctaagattatgcctcccttggctgtatagcaaactgttttaatccacagttgtgccttattgtcccattaaaattgtattcctcagtccatcaataaattaattgtaattaaaaaaaaaaaaaaaaaaaaaaaaaaaaaaaaaaaaaaa

SEQ ID NO: 2238 - DNA, 2001 bp, Cricetulus griseus
gaaatgtgtgatgtatgtgacacaaccattttcaacctgcactgggtgtgccctcgatgtgggtttggagtgtgtgtggattgctaccggatgaagaggaagaattgccaacagggtgctgcctacaagactttctcttgggataagatgtgtgaagagtcaaaatacatgagcctgagaacttgatgcccacacagatcatccccggcaaagcccctctatgatgttggagacattgtgcattctatcagagcaagatggggcccctctgaacaagtccagcacagtcctccacacttttaacagcacaattttgacacctgtgagcaacaataattctggaaacaagggcagccagtgatggtgtcaggagtgcatcataaattaaatactgaactctggaaacccgagtccttcaggaaggagtttggtgagcaggaagtggatctagtcaattgtaggaccaatgaaatcatcacaggagccacagtaggagacttctgggatggatttgaagatgttccaaaccgtttgaaaaatgaaaaagaaaagaaccaatggtgttgaaacttaaggactggccgccaggagaagactttagagatatgatgccttctagatttgatgatctgatggccaacattccactgcccgagtacaccaggcgagatggcaaactgaacctggcctctagactgccaaactactttgtacggccggacctgggccccaagatgtataatgcttatggattgatcactccagaagatcggaaatatgggaccacaaatcttcacttagatgtatctgatgcagctaatgttatggtttatgtgggaattcctaaaggacagtgtgagcaggaagaagaagtccttagaaccatccaagatggagattctgatgaactcacaatcaagcgatttattgaaggaaaagagaagccaggagccctctggcacatatatgctgctaaggacacggagaagataagagaattccttaaaaaggtatcagaagagcagggacaagaaaaccctgcagaccacgatcccattcatgatcagagctggtatttagaccgatcactaagaaagcgcctttatcaagagtatggagttcaaggctgggctattgtacaatttcttggggatgtggtatttatcccggctggagctccacatcaggttcataacttatacagctgcatcaaagtggctgaagattttgtgtccccggagcatgttaaacactgcttctggcttactcaggaattccgttatttgtcacagactcataccaaccatgaagataaattgcaggtgaagaatgttatctaccacgcagtgaaagatgcagttgctatgctgaaagccagtgaagccagtttgggcaaaccttaactcctctctgacattggagatgaattattggcagctgatcaaactcttcaggcaggcttcctgtggactttgagatttcatgttacctcatcttcttttttaaagtacacccaacttgcaagggtactgtctctaatgtatatttctagtgtttacagacactaagtgtgtatatggagtaactatttacagaccacgcatccttatactgtgacttcacctagtgcagctcttctacctagctgaagacctgttggctctgaaacaatacttgcagttattccccagctgtttatttggacagctcattcaaatggattttttaactattagggatcactgctaaatttaatgggattttattttatgccggtcagagcaccctcccccacccacaagcgtccagaagagcagtggaggaaatgacagccaatggtgcagttctaaatgtattgcataggactggcattatatagcagaaataactactgtataattcttggggttaaccatctttagttaatggaattttaatttaaatgaagctttgctaattttaagtggtataagcattttgcattaaaatattcatataata

SEQ ID NO: 2239 - DNA, 2001 bp, Cricetulus griseus
caggctgtaggtcatcttattgctgctgtcctaaaagaacatggtgtttcagaaaagatacaccaagccacaaaccagacggctgccttgaacttgctgtgggagaagtgctgcagtgacaatgtggtggttcgaacagcctgctgcgagggtctggtggcccttgttgctcagggtcatgcagagttcagctatgttctcaatgggatactcaacttgatttccttccaccaggaatatgcctggtttgataaaagcccttgtgaaattattacaaatgcaagcactaaaggagacaagtggggagaaggacattcaggatatatacactatcaggaaccatcctcaccctttgatcaccgtgcttgaacacaggcctgattgctcggcccctactccctgcagcagctgacagtctttcttccagcaattgcctccctccctcctcaaagtggtgatgaaacccatagcaactgttggggaaagctaccagtatcctcctgcaaacttggctgcactcctctccccacttatgaggctaaactttggtgaggagatacagcaactctgccttgagattgctgtgactcaggcaccatcatcgcagagtgcagctgcactgctgggcttgtgggtgatgcctccactgatccatggactgagcttgaacatcaagagatcccttctggtatccatgtcactgtgggtaaagcacgtctctgatgaacagatccaagcttttgttgaaaacctagtggtggcagtttttaaagcagcttccccacctagccatcctgagttgtgctcaagtgccttacagggtctgagccaggccatgaaactgcccagcccttcccaccacctctggagtctgctctgtgatgctactgggaaaatttttgaccttctgccaaataggattcggagaagtgaactggagctgtacatcagtgtagcaaagtgcctctcagagatgacggatgaaggtgccaaccagatttcccagattaacaaggacaacatagaaaaggctgcctttgtcaaactgtacttgatctctcaaggacgactccccttgatgagcctgatggatctgatcactgctgctgtgcagcaccatgaaaaagagcctctggcctggatgattctgcacagcttataccaggcacgaattgtgagccatgccaacacaggtgtgttgaagagactggagtggctcttagaactgatgggttatatgagaaaccttgcgtaccagcaaccatctgttcagagtgtggctctcgatgaggctttggactacttgctgcttatatttgcagctgcagtggtggcgtgggcagaccatgaggctccacttctccttggcctcagtgccagttggttgccatggcatcgagagaatggccctggtggtccagcagcaaccttgcttggcaagagtccgatgcatagagtcactgtgcaagaggttctcactctccttcccagtagcatgctactgctgctacagaaagacccatggagggaacagacccagaagttcattgactggctatttagcatcatggaaattcctaatgaagcctttgcagcaaagtccaaggatcttttgaaagccacactgctatccttgagagttcttccagaatttaagaagaaggctgtatggaccagagcatatggttggtgacagtcatggaaccagcgccattccccacggaatgaggcagaccagataaacacgttttttgggactggtatctgagattggtgagaattgattttcctagttagaggtcatgggaaggtggctccatactgacatttcaacttgtgcatgccaggaaaggggtgcattacttgggtacccaagtattggaaactgaaataggaacagaacttctgtatgaccagagttcattgtaaaaatttccttttctttgtgaaaactgaaattatattttctctcccttaaattctagtaaaataaccttgtga

SEQ ID NO: 2240 - DNA, 2001 bp, Cricetulus griseus
  modified_base (445)..(445): a, c, t, g, unknown or other
ccctcagtctgataccatcttggcaattcaggctgatgggacagtggcagggctgcacactggggatgccacaattgatccagataccattagtgctttggagcagtatgcagcaaaggtgtccattgatgggagtgaaagtgtaacaagtacaggattgattggagaaaatgagcaagagaaaaagatgcagattgtcttacaaggacatgctacaagagtaactcctaagtctcagcagagtggagagaaggcatttcggtgtaaagatgatggatgtggaaaactctatacaacagctcatcatcttaaggtccatgaacgctcgcacacaggagaccggccttatcaatgtgagcattcaggctgtgggaaagcatttgcgacaggttatggaattaaaagtcatttcagaactcatactggacaggagatctacagaagnacatcagaacccatacaggagaaaggccctttaagtgtcctattgaaggctgtggtcggtcctttacaacatcaaatatcagaaaaagtgcacattaggacacacacaggagaaagaccttactactgcacagaaccagggtgtgggagggcatttgccagcgcaacgaattacaaaaaccatgtgaggatacacacaggagaaaagccatatgtctgtacagttcctggttgtgacaaaaggtttacagaatattccagtttatataaacaccatgtcgttcatactcactctaaaccgtacaactgtaatcactgtgggaagacatacaaacagatctccacactggctatgcacaagcggacagctcacaatgacacagagcctattgaggaggagcaggaagccttcttcgagccctcccccaggtcaaggtgatgatgttcttaaagggtcccagatcacatatgttacaggtgtagaaggagaggacattgtatctacacaagtagctacagtaacccagtctgggctgagtcaacaagttacacttatatcccaggatgggactcaacatgtcaacatatctcaagctgacatgcaggccattggcaataccatcaccatggtaacacaggatggcacacccatcacggtccccactcacgatgcagtcatctcctcagcaggaacacactctgttgctatggtcaccgctgagggcacagaaggacagcaggtttgcaattgtggctcaagacctggcagcattccacacagcctcttcagagggacaccaacaacatagccatcatttagtaactacagaaaccagacctctgaccttggtggcaacatccaatggtacccagattgcagttcagcttggagagcagccatctctggaagaagctatcaggatagcatctaggatccaacaaggagaaacgccagggttggatgattaatactcagagccacagagcaataaagcaggaggcaggagcctttcattttctggctacagaaatccttgaggccccgccctgcagagcggaagttccattcctgaagcactgtacacgtttttatgcaagagtggagaacactttcttcttgacacttttgtgtacatagcccctggaataaattcctaaagtgattcattgtgtacaaggaagtatgaaattagggcactacagcaactcttcatgttactctatcacacagccgacttctggaatccacccacaggaccatccaggtctatagagagtcaagatgagattttaacttactgtagaaaaatgccgacggctctccatgtcaaacagtcataacttcaaagccatctcagaaaataaaggatgcaagccttcaggtgtccctcaagttaagtgtctggagttttttgtcccactacacacccatttttatttgtatttcaaggattgaagacctcatttgtagtgtcccatccctgttacataacacttcttcaaaactaaaatgcctattattttagcattacattggattgtgtataaaattaaaaa

SEQ ID NO: 2241 - DNA, 2000 bp, Cricetulus griseus
gcctcccagcaatcatgcagaaggcagactgtaccaggaaggaggtgccactaagcctgctgttgctggtgaagagcttaaagaaccgggtgggctcctgcacacactgtctttagcagtgtggttcagttggtctcattagtaccaaagggtaaactgcccatcctgcccttttcaagagtgatagctacagaggtgggcaaagtggaatcagatgttgataatgccaaactgtcttcatctggatgcagggccaactgtgatgagagactgcccatcacagaaaggtttgatgcagccaccacgatgcccagcaaggtaactgctctgcatgggtccaagcagaatgcttgtgaaagtgccttcagtcctgtcactaaattagatctcagccacaaagtaaaaccaagcagtgggggcaagaaagagaaaaggaagaaaatggaaagtgccagatgagattttagcattgcagggcaaaaggaggaaatacattattggtatgtgtggagatggtgtggaaaggggaagaaacagtccccaagaacccagagaccagaagcccaaggctacttcgagaaagtatcgtagcatcatgcccaagcctgtcatcgtcatgtctgctttagcacccctggaatcccctgcagctgcactgcagtcccaggctcccagcagcttaggtcaggatgccctgctgaataatgcactgcctccgaaatgccttgtctccaagcagagtgacagccctgccccaaagttcagctctgggctcagaaacggattctctggcattaagaagccctggcacatgtgtcccatctgtaaccaccacttccaattcaaacaccaccttctggaccacatgaatacacacactaacagacggccttacagttgtgggatctgtcgaaaggcctatgtccgtcctggcagcttgagtgcgcatatgaaacttcaccatggtgagaatcgtcccaggaaactagtgtgctgtgagttttgtgcaaaagtgtttggtcatgttcgagtctattttggccatctgaaggaggtacacagggttgtgatcagcacagagccctcctccagtgaacagcagccaggagacacatcaaggaacaaggacagagatacctatgtgcagagaccggatggcccactggagagggaaaccaagtcaagtttggaagaagatttccttctaaaccaggcaggtaaagtcaagttgcaaatcagatgtgcccgttgtcaaatcactgctcagtcttttgctgaaataaagttccatttgcttcatgttcacggggaagagatccaaggccggcttcaggaggtaatcttaccaggcagcagagtggggcttccccaccagaagcagcaccctgagagaaggaagcaggcaaagccctgggcctctgtggaggactccctagcatgtcctaaagtgaaaaggcaaccaccctgtcatcagaacagggaggaagcacaggcaggaagtgaaggtggccagtggggaatgagcagcccacagcaccccaccaagcttctctggtcccattcaggctttaactgcctgctctgtgccaagatgctggggaggaaggaagacctgcttctccactgggtacgccagcacaactgtgaggaccccgccagactctgggctatcctgggggccatctctaaccagggagctcctgaattcctcagtgaagtaaggcagtgacaccgaggccacccagctgaagagacctcacaccacctttctgtcaccctgtttctgttagtattttaattgtaaggatccagcactccagggccaacaccagtgtacagaggtaatttttctgggtagttttattttcttaagaaataaaatatgtgccctggatgcatttttctaacatatgtagtctcactttaaaattccatgcattctctaatattatagactttatttaataataaataaaaatattaaaattaggaaattgaaa

SEQ ID NO: 2242 - DNA, 1999 bp, Cricetulus griseus
cccagctgtttccccgtacctagtctgcagttatggcgtcgctcaccgtgaaggcctatcttctgggcaaggaggaggcggcccgagagatccgccgcttcagcttctgctttagcccggagccggaggcggaggccgaggccgcggcgggtcctgggccgtgcgagaggctgctgtgtcgggtggcctcgctgttccccgccctgcggcctgggggcttccaggcgcactaccgcgatgaggatggggacttggttgccttttccagtgatgaggaactgacaatggccatgtcctatgtgaaagatgacatcttccgcatctacattaaagagaagaaggagtgccggcgggaccatcgcccaccgtgtgctcaggaggcatcccgaagcatggtgcaccccaatgtgatttgtgatggttgcaacgggcctgtggtgggaactcgctacaagtgcagtgtgtgcccagactacgacctgtgcagtgtctgcgaggggaagggcctacacagggagcacagcaagctcatctttcctaacccctttggccacctctctgatggcttctctcatggccgctggcttcggaagctgaagcatggacattttggttggcctggttgggagatgggtccaccggggaactggagcccacgtcctcctagagcaggggatgctcgcccttgccccacagctgaggcagcttctggtccgtcagaggatcccagtgtcaatttcctgaagagcgtgggggagagtgtggcagctgctctcagccctctaggcattgaggttgacattgatgtggaacatggagggaagagaagccgcctgacacccacctccccagaaagttccagcatggacacagaagacaagtgcagcactcagccaagtagctgctcatcagaggttaacaagcctgacgaggcaggcgaaggcacttcacagtccctgacagagcaaatgaaaaagatcgccttggagtcagtgggacagccagaggaacagatggagtctgataactgctcaggaggagatgatgactggacacatttgtcttccaaagaagtggacccgtccacaggtgaactccagtctctacagatgccggaatcagaagggccaagctctctagacccctcacaggaaggacccacagggctgaaggaagctgccttgtacccacatctcccaccagaggctgatccccgactgatcgagtcactctcccagatgctgtccatgggcttctctgatgaaggtggctggctcaccaggctcctacagaccaagaattacgacatcggagctgcactggacacaatccagtattcaaagcaccctccgccattgtgacgggcttgtgccaaagccctgtgacccaccccctttgtcttgtagttgcatcaagtagagcagcagggcctcagtagggccagtttcttagcattcttccagaatctacaggtgggaatgtgtgaagcctttaaagcagtaggagagtgacatgaggggacagttccaagagtgtacatgctgacgcctgagaacagacccaggtacttgtggctgagctgagcttccctctgccttccctgagcctggcctttgccagggagctgcagaggtacactgcacttgctcttaccgccagcattgcaccagcagtcagaattcttgtctgatgaccttctgtgttttctttgttaaaagtgattaatacactgacagttattttcaacaaataaagctattatgttaagagggggctgtccacagtaagtcaaaggtggcgggcatttggggcctctggctcctgggggatggagaactcttgaagtcagctgaagggtctcaccatatactttttaataatgattcacacttagttttcgttccaatgttaatgcttttaaaatgaaaccccatgttagctttctctgacttgaatttctaaaatgacctgtaattaagtggcatatgcactttaacca

SEQ ID NO: 2243 - DNA, 1999 bp, Cricetulus griseus
cggctaccgacctagagttggtccggggcaagcgcgccgcgctgttcttcgccgcggtggccattctgctgggacgtgccgctctggtggaagaccacggagacctaccgggccccgttcgccttattcccagatcagtaggctgaatgccctgcagctccggctcacggtgccagttacagttgtgtttactcgggactctgtgcccctggacgaccagttgaagctacccttcaccgttgtgcatgagcgagaaatccctctgaaatacaaattgaaaatcaagtgtcgattccagaaggcctaccggagagctttggaccacgaggaggaggcattgtcactaggcaatgtacatgaggcagaagccgtattatttgagccggagaagcaagcagagggctccctgactgtgtacatgatctccgaacactcctcccttcttccccaggacgtgatgagctacattgggcctgagaggacagctgttgtacgggggataatgcaccgggaagccctcaacatcattggccgtcgcataatccaaatagcccaggccatgtctttgactgaggatgtgcttgctgctgctctggctgaccacctccccgaggacaagtggagctccgataagaggaggcctctcaagtccagcttgggctatgagatcactttcagtttactcaacccggaccccaagtcccatgatgtccactgggacattgagggggccgtccagcggtatgtgcagcctttcctgaatgccctcagtgctgctggcaatttctctgtggattctcagatcctttactatgcgatgttgggagtgaacccccgctttgacccagcctcatctagctactacttggccatgcacagcctcccccatgtcatcaaccctgtggagtcccggctgggatccagcgctgcctccctgtaccctgtgctcaactttctgctctatgtgcctgagcttgcccactcccctctgtacattcaggacaaggatggggctccagtggccaccaatgccttccacagtccccgctggggtggcattatgatatacaacgttgatcccaaaatctataatgcctcagatctgccagtgaaagttgaggtggacatggtgcaggtgatggaggtgttcctggctcagttgaagcttctctttgggattactcagccccaggtgcctccaaaatgcctgctttcaggaccaaagagtgaaggcctcatgacttgggagctggaccgattgctctgggctcggtcagtggagaacctggccacagccaccaccaccctcacctccctggcccagcttctgggcaagatcagcaacattgtcatcaaggatgatgtggcatctgaggtatatagggctgtggctgcagtccagaaggcagcagaggagctggcccttgggcacctgtcatctgcctttgtggccagccaggaagctgtgacatcttctgagcgtgccttttttgatccctcactcctccacctcttgtatttccctgatgaccagaaatttgctatctatatcccacttttcctgcctatggctgtgcccatcctcctgtctctggtcaagatctttctggaaactcacaagtcctggaaaaagcctgagaaggtagactgagctgggtggcatgtcagaggtagacttcttgtctggccaagctaggagtgttgggccaagacaccaaagtgaggtttgatggtctggcttgaacttaaaggcctttgcctgtctacccctgggcagtggcaccttgtccttccagcctgtcagcacagcataccgcttctcacttggagccacaggttttcatctgtcggaaagcattaatgacgtcactctcagaagggcattggattaaatgtgataagcatataaaagtgttgtgtatattgggctctttaaaaatatgtattaggttgttaataaacattggttgaatatgagttgaaaaaaaaaaaaaaaaaa

SEQ ID NO: 2244 - DNA, 1998 bp, Cricetulus griseus
cactgaacaggacttttcctttcagcctgcagtatatctgccgtgcggtgatctgcaggtgcaccacgtatgatgggattggtgggctccctctgccgtcagtgttacaggactttttaaaagaatatcactataaaacagaaagttagggttcgctggttagagcgagaaccggtcaaggcaaagtaacccctgtccccaaagggcattacctaggtctgctcttgtgtgtatcagacagtacagccataggaagcacagagttggcccctaggattgttcacccagaatgtgagcttagtcattagcctctatccagtgggatcttctgttactcagacaaaggtgcctaggaacaacagatggtttgcaggtgtgctgtgatgactgagtgaggaaactctggggcatttgctatggagaattctatttcttattgaagaacaaattattaatattggatgggtatttcaacagtgtgactaacgtttgaaattattttttctaagaatttttctataaccttccaaaagtagtaatgtttgtagttaactataaatcaagctttgaaagtccaaaacaaataaagaaaagactgccttccttttagagaaaaaaaaaatgcagtttcctggccacagggctttgtgcagtgtcaatgtggtttatggccagtgtccttttgtctcagagaaagagactctcaagtaaactgtacaaccaccatgtctgtaaataacgttacttggcaacttttggtcacttagaatagtacgtaatacaacttgagtgaacgcttcaggaagtattgtcagattctagtgttgcttctccgtgtcagactgagttcttgactccatcctagatatttgcactacagtagccaagtccattctcgttgtctgtcaccgtgctctgtccctgctggtgagcactcctggggtccatgccagctgctgcaggggctattttttttcctctggctatcaccagggctactgaaaagaaacgctatatttgtatgcaacactaaccctttgactgctaacgtctgtttctgcttgctgtgccttgttctggctgctttttcgtgctaataaagtatatttggtgtctgccttgtatatctgctgttttatgcatttgccacagtttctcttgtacatggaatggtttggggtttttaagcattacctgacaactttctatagctaatgcaggttcacctgcaacccaatactgacctgtcagagtaagctaaatctaacctaatgctctctagctagcagaggaacattagagcacccagctgcatcacaaacccgttaccgaaagtctgtgaaccaggacacagcaccacttaccggtttggggaccattttaattgatgataaacgcccaaaatgtggacctttaaccaaagacttgtccattttaatgcaaaacggggatggaaggaacttagattttctgttatttgtagtataagtccctgaggaacatataccaaagtgtttgagaacttcatccaaacctactttcaaagcataatgtgcaattaagttgttctgatgtaattctattgcataattgttgggtttgttttcttgagcttataatgtacctggaaagtaaccctcttgaggaacagaagtccatactgaggactggaggaggactgtttgtgagcaactgatgctgtgaagagaacttgaaactccgagaaagcacttgatgtttttatatgcttgtagcaaattgatgttctcactatagttttctaggaaatattaatcttttatgtatttcagaacttttcctgtgttgttatgcaaattgtttaagtgtgtaacttgagtttgtgtaagcatgtgtacactgtgctaaaaggcactctcgtttcagtttgtgtacaatataaatatgcaactttggggttaaaaaaaaaaaaaaaaaaaaaaaaaaaaaaaaaaaaaaaaaaaaaaaaaaaaaaaaaaa

SEQ ID NO: 2245 - DNA, 1998 bp, Cricetulus griseus
acacagcagtctcagacccttcctcaacaccaacgaagatccctactgatactagcactcctcccagacagcacttgccaactcatgaaaagatgacacagcggaggtcatccttcagcagtcagtccataaactcccagtctgttggtccatcattaacacagccagtgatgtctcaagctgcaaatttaccaattccacaaggcatgtcgacagttccagttttcagcttaggagccatgcagcatctaaaagaccagctggagcagcggacacggatgatagaggcaaacattcatcggcaacaagaagagctaaggaaaattcaagaacaagcttcagatggttcatggccaagggcttcagatgttttgcaacagtcaaactctggattgaaagacatcccggttgctccatggaatccttcaacacagctcaccctttctactgacttcccactacaacagagccctttccctccgtcaccacatcaccagcaacaccagcctcagcagcaacagcagcttagtcggcacaggactgacagcctgactgacccttccaaggtccagccacagtagcacacacactttctctctgacactacagaggtagattcttttcccttggatattactgtgtgttaaaatgtttccactatgttgaggtctttttttttttaaagttggaacgcagatagcatttttagtatttcttttttctgtttctttggtgattaaaggtttgttggtaaacatttgtgtaaaacttgttcaagcctatcacctttccagtacctgtgggcctgttcttagcaccacggagtccacattagaaggtataaacactggatattaatattgctgagggtatatagccaggattgagctgactggaacttttcagtggtggagaaggaacagcacaaaggcacttgccgttttcatagtgattagagaaaaaccttttaagtgtgtctggactgagtgaacactcttctaagaggagcttgtgaagtaaatgcaaaggaaaagagttgactatttttatagcatatttaatatatttgtatataactatgagtgtagtaggaaccctccacctgtctcccacttttctagtccctctcccccttttgccatagccctagtacagcctcatccgcatgggtaatgtgcctattgtcagcctacctaccaaaagatagagctgctgctttctgagacaggtgagatgagactctcatgcctggggatcctttatgggaggaatagcacacacttaaaacaacataccacagtctaaaagcatcatttgaaaggtaataagcactttattgcaactattcatttagataatgtttgtatcttaggcattaaccgtttttaaaggatcccctaatcatcacttaggtgaatttataaatgacacatttctgagaaatgtttagagccagtgaaccgtagcaggtttatgggagtgatttcaaggtagccaaataaactctgacttttgttttgaatgtggtgggattgggagattgtagatgcgtagttccatttaaacactattgtaaacctatcttgcctattgtgtggacaccaaaagagaccaatgagcctgtttcttttcagaggtctaggaatatgcatctgtctgagtagacatacagaactaatctataaacagttggtagtaatattttaggatacagtaatttcaagaatttttgagtgttttaaatgtgccctgaaatgttggcatgtcatttcagcgttcccatttgagttgctcttgtaatatttttgcacaaaaaggactgagaaaagactgctttggttgaaaactataatttggtcttatcttaatgtctcctgtgggaacactggaggtaaattttgctggtatagttactaattcaggatatttaaaacagtgttgaacagctcaccagaaattaagcaaacttatatatttaaaaattaaaaatcttttttt

SEQ ID NO: 2246 - DNA, 1998 bp, Cricetulus griseus
atgaaaactgaggaggatgtgggaagtcccctgaaatatgaattccaggtgagcccagtgggagatgggctggcggcttgggcacactggtcctagtcctggccctgccagccacctgggaaccttgtcaaccctctcaaccttattctctctgaacctggagacaagccacattctccacagcgcaggcggagacaactggatccagggggagaccagggctctccacctgtcacgctagctgctgctaaaaaagccaaatctgagactgtgttgacctgtgccagtggtcgtgctcgctgtgtgtggctggaatcgtcccattcctgacacctccattgtcaccaatgtgaccgtgaaggcacgggtgtggaacagcaccttcattgaggactacagagactttgacagagtcagggtagatggctgggccactttgttcctgcgaaccagcatccctaccattaacatggagaacaagaccacctggttctcagtggacatcgactcggagctggtggaggagctgccggctgagattgagctgtggttggtgcttgtggccgtgagtgccgggctgctgctgctggggctcatcgtcatcctgctatggaagtgcggcttcttcaagcgagcccgcactcgtgccctgtatgaagctaagaggcagaaggctgagatgaagagccagccgtcagagacagaaaggctgaccgacgactactgaggggggcacccccctgccccggcccacccggtgtgacttctttaagccgacccgctactaccggatcatgcccaagtaccatgcagtgcggatccgggaggaggagcgctacccgcctccaggaagcaccctacccaccaagaagcactgggtaaccagctggcagattcgggaccgatactactgaccccctccctgacatccctcccagtgttcccttccttcctatttatcataaattatgactcagacagtccaaaaggggccacaagtttggctggcaccagcaggctcaggcatatacccctcttcagtgcaggcatgctttctggggccctagactctccttcaagaccttgcaatgtggagcacagcacagccctgcacactggacacacacacagggcctcatggagggtgccatgtccaagcctctatctgtgccaaaaccaagccaaagcgcctctactgggagccaggaggaaaagttcctgatatggtgacatctctcttccacaccggatcccccatgagccattgtccctggactgactttattgtccagaatagaactactgatgacaaggagacaatcaggcccatctgcaagtcctggcacccactggaaagtagggccacaccaaaggaggggatgttcttgtgacccaagagctcagacccaagagcaatgaattaaaaagcaagtccccagaatgggctttatgaatggatctccaaaaccttggctacagatggagttggcaagaaactcagcccataggaacaaagagaaaccatggacagcctggacagactgtgctggggctgacctggagcatggtggcatccttcagagagtagggtaccaatcctggcccagcagatattggcaggatgcagaggagatccttctgacccgtcctggccacctcagcctgggcaaggcctggagaccccacaagaccacgtggggtgtgatacttgaatgtagggcaggggagagcccaacccctgccccagctggccagacttaactctgctcttttgaccacagagatggtattctgagctgcctgtggctttctgagaaacctagccacgcctcccctgctcccctagtatccccattctagtagtggaggctgattcccagtcctctccccaaccctacccacaggcaggcccactccccagctctgccccttcacggtactatagcagcttcccctaccctgtgccttctttgtatatgggcttctcactaaaataaa

SEQ ID NO: 2247 - DNA, 1998 bp, Cricetulus griseus
  modified_base (302)..(302): a, c, t, g, unknown or other
  modified_base (413)..(413): a, c, t, g, unknown or other
ttaagtctaatcattctaagattgtgccaccacccagccacttcaggagacccacacatccagtataccttcacctacagctttgcccatctcagcactgaaacaaccaaatgttgaagggccggggctccaaagaacagaagagagtgtggtttgcagatggcatactgcctaatggtgaggttgctgacacagcgaagctaacatctggaagtaaaaaatgttctgatgactttagtcctgtcctacctgatgtgcccacaattatgaataaagtggatcagtgcctttagtacaagaanacccatctcatgagcagatcatttcgcttcttgaaaggtgaaagatttcctgccacatttgttctaaatgctaacctacttgtgaatgtcaagttagtatttatgctcagntaaatattggtacttctcaaccaatggattgcatggcttgggacaggcagaaattattatcctgttgctatgtttgccaaatgaggatacagttcctaaggacatctttagactgttcattaccatatacaaggatgctttaaaaggaaagtacatagaaaacttggacagtctgacctttactgagagttttctcaatagcaaggatcatggagggttcctgtttattacacctacctttcagaagcttgatgatctcccagtgccaaggagtccttttctctgtggtattctcatccagaaactggagattccttgggcaaaggtttttcctatgcgcttaatgttgagattgggagcagaatacaaagcttatcctgctcctctaacaagtgtcagaggcagaaaacctctttttggagaaataggacacactataatgaacttacttgttgatcttcgaaattaccagtatacattgcataatattgatcagctgttgattcatatggaaatgggaaaaagctgtataaagatacctcggaaaaagtacaatgatgtaatgaaggtaataaattcttctaacgagcatgtcatcagcattggagctagttttagtacagaagcggattctcatctggtatgtgtacaaaatgatggagtttaccaaactcaggcaaatagtgctactggccagccaaggaaagtgacaggagcaagtttcgtggtattcaacggtgctctgaaaacgtcttcaggatttcttgccaagtccagcatagttgaagatggtttaatggtacaaataactccagagaccatggatagcttacggttggctttacgagagcaaaaggactttaagattccttgtgggaaagttgatgcagtagacctaagggagtacgtggacatctgttgggtggattcggaagaaaagaagaataaaagtgttgtcagtgcagtagatggcatatcattagaagggtttccaagtgaaaaaataaaaactggaagcagattttgaaactgaagagaagactgtgaaatgcactgaggtgttctacttcctaaaggaccaagacgtatctgttttatcaactaattaccagtttgcgaaagaaatagccatggcttgttgtgccgctctatgccctcacctgagaactctgaagagtagcagaatgaacagaattggactcagagtttccatcgacactgatatggttgaatttcaggcaggctgtgaaggccaacttctgcctcagcattacctaaatgagctcgatagtgcgctgctacctgttatccacggtgggacctccagctctagtgtgcccttagaaatagagttaacattttccattttagaaaacctttttgagtgaaagaatgtgctgtgttatatgttgcaaactcatctgttaaaatgaatcccagcactaaaactgagatgttacaaacactaaatgattgataattgaaataaataattttgctttttaggcaggaatgatttttcagaatcattagcacaatatttaaatatctaaaaatttaaggaatccaccatttttatagattt

SEQ ID NO: 2248 - DNA, 1998 bp, Cricetulus griseus
ctgaggtaccggctgccagcgccggatcccgggtcgcggctgggcggcgcggcccgggctgcagcgaggccgggccgcccctcgcgccctgccgccacgccgccatgcaaggcccgggagggaacgtgagccgcggactgccaggcgcaccggcctccacagtcgcgtccggggcgggccgctgtgaaagcggcgcgctcatgcacagtttcggcatcttcctgcaggggctgctcggcgtcgtggccttcagcacattaatgcttaaacgcttcagagaaccaaagcatgaaagacgaccgtggaggatatggtttttagacacttccaaacaagccatagggatgctgttcatccactttgcaaatgtgtacctagcagatctcactgaagaggacccttgttcactgtacctcatcaactttcttctggatgccactgtaggcatgcttctcatttatgtgggcgtacgtgctgtcagtgtcttggtggagtggcagcagtgggaatccctgcgttttggagaatatggagaccctctgcagtgtggtgcctgggtggggcagtgtgccctttacatcgtaatcatgatctttgaaaagtcggtcgtcttcatcgtccttctcatactccagtggaaaaaggtggccctattgaatccaattgaaaacccagacctgaagctggccatcgtcatgctgatagtccccttctttgtcaatgctttcatgttctgggtagtagacaatttcctcatgagaaaggggaagacgaaagctaaactagaagaaagaggagccaaccaggactcaaggaatgggagcaaggttcgctaccgaagggcggcgtcccacgaggagtccgagtctgagatcctgatctcagctgacgacgagatggaagagtctgatgccgaggaggacctccgcagacgaagaagaagcaccgctttgggctgcctgtatgacacattcccacactgcagatgacagtcatggaacctagccctccagcagcatcccttccctcttctctctaccctcctcttctacctccactcctcttgctgtctctgcccgctctccacctgcccccagactactgtgactcaaaagagggaagaggacctgtgcctgagggggctgtgggcagctggaggtcccgctcagttgcactacaaacactgaccaaatatgcaagcgaagagctttgtttgtttgttgtcgtccctttggggtgttgtgacacccctgtcctatgtctgaccaggtggcatggtggaagaaaacagagcacacatagactgttgcagggcctcatgctgaggccggggccttgtggacatgtgacgtgcttggggttaacagccactgattgacccaagttggaagaggaatgctttcttactcaaagtggcttttgtaactctttatttctaaagccagttttatgagctgtgacagtgttactgttttttgagtatgtgtttatttcctacaaagtatctatgggtctaatgggcaaacagatttttaagtcttccgtatactgtttgacttttatatttttaagttatattttcatactactgtatttaaaactcttttaatccccaaagtctctgagctgctctgtgaagctggctcagcagagaaggaggtccaacagctgtctgatactggaacctgtctgtgcaggcttggtgcgtgtttgccctgcccctcttcctgtgcatatgtgtgcacgcacacatacagcataagcacacacactcacacaatactgcatctcgagagcctcccgcagctgctaaggcatttctattactgtggtgcgctgcctcactagagtggatgtagagggctctggtcggggcgtcttcctgaactgtcctcctccctggaatgagtgtccccatcacttattccacgatgccttatgaggtgggaccctttactggctgatggcagacatcaccaagagtagggaaggaaaaaa

SEQ ID NO: 2249 - DNA, 1997 bp, Cricetulus griseus
aagaactggctgactggaagaggcggcagcagattgcgtgcattggaggccctcccaacatctgcctggatcgcctggaaaactggataacttcattagcagagtctcaacttcagacccgccaacaaattaagaaactggaggagttgcagcaaaaagtgtcctacaagggggaccctattgtgcagcacaggccaatgctggaggagaggatcgtggagctgttcagaaacctaatgaaaagtgctttcgtggtggagcggcagccctgcatgcccatgcaccctgaccggccccttgtcatcaagactggtgtccagttcactactaaagtcaggttgctggtcaaatttcctgagttgaattatcagcttaaaattaaagtgtagggtgtcagatcacatgggctaaattttgcaaagaaaacatggctggcaagggcttctccttctgggtgtggctagacaatatcattgaccttgtgaaaaagtatatcttggccctttggaatgaagggtacatcatgggcttcattagcaaggagcgggagcgtgccatcctgagcacgaagcccccaggcaccttcctgctgagattcagcgagagcagcaaggaagggggtgtcactttcacttgggtggaaaaggcatcagtggcaagacccagatccagtctgtagaaccatacaccaagcagcagctgaacaacatgtcgtttgctgaaatcatcatgggatataagatcatggatgctaccaacatcctggtgtctccgctggtctacctctaccctgacattcctaaggaggaggcatttgggaagtattgtcgaccagagagccaggagcatcctgaagctgacccaggtgctgccccttactgaagacaagttcatctgtgtgacaccagcagtttggaataacggtgaaggtgctgagccctcagcaggagggcagtttgggtcactcacgtttgagatggatctgacttcggagtgtgctacctcccccatgtgaggagctgcaaatgggagctgcagagatgactgaggcacctgcctgctccgggttccacccttaagcagtcaaaccccagctcatctgagactcctaacttttgtggttccagatttttttttaaatctcctacttctgctatcttttgagcaatctgggcactttttaaaatagagaaatgagtgagtgtgggtgatgtgcttttatgtaaagaggaaagcgctctctgagtctgtgatggggtaaaataaaaaaaataataagaattaaagggcaaaacacactgagacagcatagcctttctgtagcaaagaaaactagactctggaccctgtttcagagtcagcctgtcctgagggtgccttactaggcctaggatcaacctggcttcctttcccacttgaccttgcttgtggtatgtctccttcccatgtcccaaggtccctgtcctgcttgcattgggagtcctggtctcgggaccttgtgatcagagagacttaagatacagctttgaatcggacttggactacaggtcctcagcaaagctcagggattatgggccttattctatttgcttggttcccaggggcacctgtaaccacagggcaaaagctttccagactgagccatggctaggacattgtctccaagacaaactgcttgccttggctacccctggccttctgctttgagacagttattgctcccccttccccagaacattctttagtatgcaataagctgaagtcccaggccaaaagggtatttggaaaggcaaggctcggggcatactgacgactttaaagcctggggacccgggagcaagggctcgggcttctctgggacagatgttgtaaaggtcccggctctgggaagttacctgggtggcctgggctaaccaccgttgttgtttgtttgtttgtttgtttttgtatattgctgtaactactttaacttccagaaataaagattatataaggaa

SEQ ID NO: 2250 - DNA, 1996 bp, Cricetulus griseus
atctgagggctgaggcgcagtggacgtttcgagggccgccgaccccgcaggctgagagccccgcaccgcctttcgtggacgcctgagccggctgagcagctttctcccggattcctgtaaccatgtccaccaacgagaatgctaattcaccagctgcccggcttaacagattcaagaacaaggggaaagacagtacagaaatgcggcgccgccgaatagaagttaatgtggaactgaggaaagcgaagaaagatgaccagatgctgaaaaggagaaatgtcagctcatttcccgacgatgctacttctcctttgcaggaaaaccgaaacaatcagggcactgtaaattggtctgttgaagatattgttaaaggcataaacagcaacaatttggaaagccaactccaagctactcaagctgctcggaaactgctttctagggagaaacaacctcctatagacaacatcattcgggctggtttgatcccaaaatttgtgtccttcttgggcaaaacggattgtagtcccattcagtttgaatctgcttgggcacttactaacattgcttctggaacgtcggaacagaccaaggctgtggtagatggaggtgctatcccagcattcatttctctcttggcatctccccatgctcacatcagcgagcaagctgtttgggctcttggaaacattgcaggtgatggttcagttttccgagatttagttatcaaatatggtgcagttgacccactgttggcacttcttgcaattcctgacctgtcttccttggcatgtggttatttacgcaaccttacctggacactttcaaacctttgtcgcaacaagaatcctgcaccccccctagatgctgttgagcagattcttcctactttagttcgtcttctgcatcacaatgacccagaagtattagcagattcctgctgggctatttcctacttgactgatggtccaaatgagcggattgaaatggttgtaaagacaggagttgtgccccaacttgtgaagcttctaggagccactgagttgccaattgtgactcctgcactcagagccatagggaatattgtcactggaacagatgaacagactcagattgtgatagatgcaggagcacttgcagtttttcccaacctgctaacaaactccaaaactaatattcagaaggaggccacgtggacaatgtcaaacatcacagctggacgccaggaccagatacagcaagttgtgaatcatggcttagtcccatatcttgttggtgtcctctctaaggcagactttaagacacagaaggaagctgtatgggctgtaaccaactacaccagtggtgggactgttgaacagattgtgtatcttgttcattgtggcataatagaacctttgatgaacctcttaagtgcaaaagataccaaaattattttggttattcttgatgccatttcaaatatctttcaggctgctgagaaactaggtgagacagagaaactcagtataatgattgaagaatgtggaggcttggacaaaattgaagcactacagaaccatgaaaatgagtctgtatacaaggctgccttaagcttgattgagaagtatttctcagtggaggaagaggaagatcaaaatgtggtgccagaaactacctctgaaggctttgcctttcaagttcaggatgggactcctgggacctttaacttctaatgtccagctgaggcacaaagttgttagctacgtgctgtgttcttgttctcataaatttgtcttactgtttctctactaagaactctttttaaatgtggtttgttattgtagcactttttacaaaaactatacttgaacagttgtaaactgtacatactatatgaagctgtcctgagtttcttatttctatgtggaatttcgtatcctgcagtgtcctgtaaataaagattaggttccactctttaaaaaaaaaaaaaaaaaaaaaaaaaaaaaaaaaaaaaaaa

SEQ ID NO: 2251 - DNA, 1996 bp, Cricetulus griseus
ggaaatgcagaatgacccggaagccattgcccggctggccctggagtctcctgaggttcaggacctgcagttagaacgagagatggcactagccaccaaccggagcctggcagagcagaacttggagttccagggtcccctggaaatcagccgctcaaacctttcagacaaataccaggagctgcggaagcttgtggaacggtgccaggaacagaaagccaagctggagaaattttcctcagcgctgcagcctgggaccttgttggaccttctgcagatcgaaggcatgaagattgaggaagagtctgaggccatggctgagaaattcctggagggtgaggtgcccttggaaacgttcttagagtccttttcctccatgaggacactgctgcacctgcgccgagttcgtgtagagaagctccaggaggtggtgaggcggccccgcgttttgccagagctggctggagatgctcctccacctcgtccaccgcctccacgcccagcgccccaagcaacaccccctgtgactgaagaacagcctccacagccctctgttgtgactccctaccctttgccctacagcccatccccaggcttgcctgtgggccctacagcccagggagccctgcagccagcccccttccctgtggtggcccagccttcctcctacagtaggcctgtgggtccttcttacccatcacctcagccagcacccagggctgctatgggctactcttggtccccacagaggagtgtgccaccccgacctggctatcctgtggccccaactagcacttctggtccagggtaccccttagtgggaagcctagctcctgctcccgggtatccccaacgcccccatacctcccatcacaaagcaaacctccctacccaacacaacctcagctccctggcttcccaggacagccacagcctccagtgccccctcaacctccatacccttctgggccaacccctccctatggctttcaccccccaggtcctgcctggcctaggtactagccctggtccctgtcaccttcttccttccatctgcatcatagtctctggcctccatctgctgagatttgaggttgacactggaagtggggctgatgctccctgcagagttgggacacagagttgggacacataggccccctaaaaggccccagacagtgagtgcagcatgggtccttctgggagctccttctgccagggaccagctcagcacatcctgaggtagcctggtgggagccacagggctctccagtgtttgcatgagcaagtgtgttcatgtctctgcacagctagcttgctccctgacatctgaatcagtgcagatttagttgctgtgccaatgtcaggcaagtgtgttctgtgtgctggttagaaccacagcagcactgctatggggagagagctggggaatgccaagggaaacacaggtctcacttgtatggttggatgtcctaggggtcactctggagcccctggctggagtggagggcccgggttacctcccagccatctttcactcctggggccctccacctctggctggctttttctgaggttcacccacccatccctccattcctttagtgccttgaatttcatttgttagcggcccctctatccttgtgtaattccttcctgccccaagtgtccctgcaggtaacagacctgccctcacagaacatccaaacggtgctcccagacatcatcactacattggggttggtttctctacactctctcatctccagaatgtaaagggcagggattgtgagtgcagccccagcactggggccaaagcctgcttagtaataaaagtgactgactacactataccaaaggggttgcagcagacgatgtatcagtatggctggtccagatgtgaatcaggtctcagggtggaccctggagctaccccgtgttaggaagttgtatgtgccttgaaacatcccctgcctgggtacccagcctctggtgg

SEQ ID NO: 2252 - DNA, 1996 bp, Cricetulus griseus
gccaaccaaaatctaccagccttcttacctgtctatcaacaacgaagtcgaggagaagacaatatctatttggcacgtgcttcctgatgacaagaaaggtatacatgagtggaacttcagtgcttcctctatcagaggagtaagcatctccaagtttgaagagcgctgctgtttcctttatgtgcttcacaattctgatgatttccagatctacttctgcacagagctgcactgtaaaaagttttttgaaatggtgaataccatcaccgaagagaagggcagaggcacggaagaaggagactgtgaaggtgactccctagagtatgactacgaatatgatgaaaacggtgacagagtcgtgttaggaaaggcacttatgggatagtctatgcaggtcgagacctgagcaaccaggtcagaattgctattaaggaatccagagagagatagcagatactactcagcccctgcatgaaagaaatagccctacacaaatatctcaagacaccaaaacattgtccagtacctgggctctcttcagtgagaatggctacattaaaatattcatggaacaagtccctggaggaagtctttctgctctccttcgttctaaatggggcccattaaaaagacaatgagcaaaacaattggcttctatacaaagcaaatattggaaggattaaaataccttcatgacaatcagatagttcaccgggatataaagggtgacaatgtattgattaatacctacagtggtgttctcaagatctctgacttcgggacatcaaagaggcttgctggcataaacccgtgtactgagacctttacaggcaccctgcagtatatggcaccagaaataatcgataaaggacctcgaggctatggaaaggctgcagacatttggtctttgggctgcacaacggacactcttcttgggcattccagatgaaaactttgaagatcacagtgcgcccccttcccctgaggagaaagactctggcttctttatgcttgagaaaggatagcgaaaggcgggctaccctccacaggatcctgacagaagtaccaggacaaggtcgtgcggaacctgatggagtcactggcccagggtgctgaagagccgaaactaaaatgggaacacatcacaaccctcatcgcgagcctcagagagtttgtgaggtccactgaccgaaaaatcatagccactacactgtcaaagctgaagctagagctggactttgacagccatggcatcaaccaggtgcaggtggtactctttggtttccaggatgcggtcaataaagttctccggaatcataacatcaaaccacactggatgttcgccttggacagcatcatccgaaaggctgtgcaaacagctattaccattctggttccagagttgaggccacactttagccttgcatccgaaagtgacacagctgatccagaagacttggatgtcgaagatgagcatgaggaatcccattcgaatcaaactgtccgtagacctcaagccgtcgtcattgaggatgcggtggctacctcgggagtgagcacgctcagctccactgtatcccatgattcccagagcgctcaccggtccctgaatgtgcagcttggaaggatgaaaatagaaactaatagattacttgaagagttagtacggaaagagaaagagttacaagcactccttcatcaagctattgaagaaaaagaccaggaaattaaacacctgaagcttaagtcccaaccaatagatatccctgggtttcccatgtaccacctgaactctgctggcacaaccactgaagattctgaacttactggctggctgagagaaaatggagctgacgaggacactatcagtcggtttctggctgaggattacacactagtggatgttctctactatgtcacacgcgatgatttaaagtgcctcagactaaggggaaggatgctgtgcacgctgtggaaggccatcgttgactttcgg

SEQ ID NO: 2253 - DNA, 1996 bp, Cricetulus griseus
ggacccggcccagccagtgcgcaacgggccgggcgctcggagaggagacggagcagcggcgcccgggccggccagctctgcatcggccgccgagatgctgcagaccttgtatgaccacttctggtgggaccgactatggctgcctgtgaacttaacctgggctgatctagaagacagagatggacgtgtctatgccaaagcctcagacctctacatcacacttcccctggccttggtctttcttgtcattcgatacttctttgagctttatgtggctacacccctggctgccctcctgaaatgttaaaggagaaaacccgactacgagcacctcccaatgtcaccttagaacatttctacctgaccaacggcaagcagcccaagcaggtggaggttgagcttttgtctcggcagagtgggctctctggccgccagatagaacgctggttccgccgccgccgcaaccaggacaggcccagccttctcaagaagttccgagaagccagttggagattcacattttacctgattgcctttgttgcgggcatggctgtcattgtggataaaccctggttctatgacttgaggaaagtttgggagggctatcccatacagagcatcgtcccttctcagtattggtactacatgattgaactctccttctactggtccctgctcttcagcattgcttctgatgtcaagcgaaaggattttaaggaacagatcatccaccacgtggccaccatcattctcctcagcttctcctggtttgccaattatgtccgagcagggactctcatcatggctctgcatgactcttctgactacctgctggagtccgccaagatgtttaactacgcgggatggaaaaacacctgcaataacatcttcattgtcttcgccatcgttttcatcattactcgactggttatcatgcctttctggatcctacactgcacgctggtatacccactggagctctaccctgccttctttggctattacttcttcaacatcatgatggcagtgctacagatgctgcatatcttctgggcctacttcattttgcgcatggcccacaagttcataactggaaagctggtagaagatgaacgcagtgaccgagaagaaacagagagctcagagggggaggaggctgcagctggggcaggagcaaagagtcggctcctatctaatggccaccccatcctcaataacaatcatcctaagaatgactgaaccattgtcctagctgcctcccacattaatacacgaagccaagaaactagccaaccttccctttatagggacatttgagcactggggagaaaggatataaggaaaagagtctacattaactctccttttgtcacccagttgcctttaaaccaaactctaaccagcctatcctcaggtaagagaaggttggttatatcttctagagaggggatggtcttatttccctctctatcttccaagctactcttataactcacattccttattcttaagaattctgagctagctgtttgcctttgactccctgacttcaagccagggttgtgccttactgtcccatctctgggcctcactctgccaaagctggaccaaggttccacctttctaagctccctagctcaggccaaaaatgaaagctgagctacttttaacttttctcctccttaagaaacaaattaagtgaaggagggtatacaggctcctcaccctaccccggggaccatggttccaggatctcactgcctcctttctctggcctttctttcctttcccttcagctgagacaagctggagtggagtagaacggcaactagttgttatttattgaacatttggggtttcagttataaagccagaactacagctaggacctggcatttccgcaagggaccatttcagaccaaaatgtactgttaatgttttttttaattaaagtatattaaaggttaaataaaaaaaaaaaaaaaaaaaaaaaaaa

SEQ ID NO: 2254 - DNA, 1995 bp, Cricetulus griseus
gagtttctggcactgcgagaccgtttgcacgctgctgagcaggagagcctgaagcgctctaaggagctaaacctggtgctggacgaaatcaagagggcagtgtccgagaggcaggcgctgcgggacggagagggcaatcgcacttggggccgccttactgaggatccgcgactgaagccgtggaacgtctcgcacaggcacgtgcttcatctgcccaccgtcttccaccatctgccgcacctgctggccaaggagagcagtctgcaacccgcagtgcgggtgggccagggccgcaccggagtgtccgtggtgatgggcattccaagcgtgaggcgcgaggtgcactcgtacctgactgacacattgcactcgctcatctcggagctgagcccgcaggagaaggaagactcagtcatcgtggtgctgatcgccgagacggacccacagtacacctcggcagtgacagaaaacatcaaggccttgttccccacagagatccattctgggctcctggaagtcatctccccttcccctcacttctaccctgacttctcccgccttcgagagtccttcggggaccccaaggagagagtcaggtggaggaccaaacagaacctggattactgcttcctcatgatgtatgcacagtccaaaggcatctactatgtgcagctggaggatgacattgtagccaagcccaactacttgagcactatgaagaactttgccctccagcagccctctgaggactggatgatcctggagttctcccagctgggcttcatcgggaagatgttcaagtcattggacctgagcctgattgtggaattcatccttatgttctaccgagacaagcctattgactggctcctggaccacatcctgtgggtgaaagtctgcaaccctgagaaagatgcgaaacattgtgaccggcagaaggccaaccttcggatccgcttcaagccgtccctcttccagcatgtgggcactcactcctcactggcgggcaagatccagaaactgaaggataaggattttggaaagcatgctctccggaaggagcatgtgaaccccccagcggaggtgagcacaagcctcaagacgtaccagcatttcaccctggagaaggcctacttgcgagaggatttcttctgggcctttacacctgcagcaggagacttcatccgcttccgcttcttccagccactgcgccttgagcggttcttcttccgcagtgggaacattgagcacccagaagataaactcttcaacacttctgtggaggtgttgccttttgacaatccccagtcagagaaggaggcccttcaagagggccgctcagccactctacggtaccctaggagccctgatggttacctccagatcggctccttctacaagggtgtagccgaaggggaagtggatcctgcctttgggcccctggaagcactgcgcctctccatccagacggactccccagtgtgggtcatcttgagtgagatctttctgaaaaaggctgactaaatggaaggcttccaagggtgctccgtggccggctctggagtccacggttccaagggtgttgctgctgctgccgccgatccaagaggaccaggcatatccaccccacctgaagggttctgcctggcaggcggctcgggctggcctggggtccaccgctggcccggaggccccagaagctggtgctgcgccgggccgcgggaggaggcaggcggcccccactctgtgcctgagggccggcctgctgccgcccaaaaagaaccgaaccgaaccgtttgcccctggccggtcggcttgagccaggccattttagaagagctttttcttgggcgcccgctgtgtgcggcgcgaacactggaatgcatacactactttatgtgctgtgttttttattcttggatacatttgattttttcacgttaagttcgcatatacttctataagagcgtgacttgtaataaagggataatgaag

SEQ ID NO: 2255 - DNA, 1994 bp, Cricetulus griseus
agacacgggagttagtggacagagctgtaaaccgaatcaaagaaataattaccaatggagtggtgaaggctgctacagggacaagtccaacttttaacggtgcaacagtcactgtctatcaccagccggctcccattgctcagctgtctcctgctattaaccagaagccttccttccagtcaggagctgaatattctagatttgtgaatcaaatcaatactgctgtacctttaccagctatacacaaccctctgctataagtagtatccctcctcaaccaccatattatccatccaatggctatcagtctggttaccctgttgtttccccctcctcagcagccagttcagcctccctacggagtaccaagcatagtgccaccagctgtctcattggcacctggagtcttgccagcattacctactggagtcccacctgtgccaacacaatatccgataacacaagtgcagcctccagctagcactggacagagtccaataagtgctccttttattcctgctgctcctgtcaaaactgccttgcctgctggtccccagccccagcccccactcccagctcagccccaatcacagaagaggcgattcacagaggagctgcctgatgaacgggaatctggactgcttggataccagcatggacccattcatatgactaatttaggtacaggcttctccagtcagaatgagatagaaggcgcaggatcgaagccggcaagttcctcaggcaaagagcgagagagggacaggcagttgatgcctccaccagcctttccagtgactggaataaaaacagagtctgatgaaaggaatgggtctggggccttgacaggaagccatgattatccagctaagaagatgaaaacggccgagaagggacttggcttagtagcttatgcggcagactcctcagatgaagaggaggaacatggaggccataaaaatgcaagtagctttccacagggctggagtttgggctatcagtacccttcatcacagccaagagccaagcagcagatgccgttctggatggccccataagaaataggggcagacctttgatgctcggtgactcttcttagcaataatgcatgcacttgattaaacaagactctgggacctgttctgggggccatcttggaccttgaagacattagggacgaagtgtcctctgtcataaagggatgccatcctttttaaaaccctgtttctgcagtggcataatatccgttaaaattcacttagaatcacaaatttgcgtcaagctttttaatagttgatgaaatgtccgtgtccagagaaacatcaggactgtgtcaatgccacatatgtttgacctggtctagccttttccaaatgaatagcctcaactctgttgtaaagaaagttttatttgtattttactactattgggtcaattttgataataactggttacaaacaaagccttactacttattagtgggaaatggttttaagacccttccttcgagtacttacatttaattctaagagcgcctcatccctctttccatttggatcctttctgtttggaaaatgctgttgtagtaatttgaaatggtcagatacaactggattgaaatgaaattatttttgcattgtttcttaactgggatgatccaaagctggcacttgtcagcacacttgtttcaggtagccattgctattgttactgcccttctaattccttgttttcagctgggtcaaagaaaacgaaatattggtgtgtggaagtgaaggaattggttttggctgagccaggagtgtttgagatactgtcatttttgcacatttttggatattttggaggctggctttgtacaaacttactctctggtttcctatatgttgtaaataattagaccataatttcattataaataaatgtataaatattctgcttgtcattttcttttttctttctgcagccccattcatacactaatatcaattaaa

SEQ ID NO: 2256 - DNA, 1994 bp, Cricetulus griseus
gaggttggaatggacagaggatctggcactggatctgggtccccagagccgggagctgaccctcaaagtgcttcggagcagcagttgtggagatgctgaactccttggtcaagccacactgcctgtaggctcaccctctaaaccactgtcacgaagacaagtgtgcccattaactccagggccagggaaatctctgagcccagcagccactatgacagcagagctgcactatgagcagggttcccctaggaacctgggcacacccacctcttccacccctcgccccagtatcacacctaccaagaagattgagctggaccggaccattatgcccgatggcaccattgttaccaccgtcactaccgtccagtcccgaccccgtatacgatggcaaattagactccccctcccgctccccgtccaaggtggaggtgactgagaagatgacaactgtgctgagtgagagcagcggccccagcaatgcctcccacagcagcagccgggagagccacctttctaatggcttggacccagtagcagagacagcaattcgccagctgactgagcccagtgggcgggcagccaagaagacacccaccaagcgcagcacgctcatcatctctggtgtttccaaggtgcccattgctcaggacgagttggcgctttccttgggttatgcagcttctctggaagcctcgatgcaagatgatacaggaaccagtggtggtccttcatcacctccctcagacccatcagccacatccccaggacccccagatgccctctccagtcccacaagtgtccaggaagcagatgagacgacacgttcagacatttctgagaggccatcagtggatgatgttgagtcagaaacagggtctactggtgccctggagacccgaagcctcaaggatcacaaagtgagtttcctgcgcagtggcactaagctcattttccgccggaggccccgacagaaggaagctggtctgagccaatcacacgatgacctctccaacacaacggccacccctagtgtccgaaagaaggctggcagcttttctcgtcgccttatcaagcggttttccttcaaatccaaacccaaggccaatggcaaccccaacccccagctctgagaaccccccctgaactaggaaagggcaagagttctctgagtccattccccacatccccttctttaccccttcctggattcccagtgctggggcaaggaaagcccttgggttctaagaagccccagcactctgggctgtggggtaagttggaaggatgtttgacatgggaagcatttgagaggcaggcactcattgctgtggacataggagtttggcagctgggagtaaggggcaggctctgtcttagcatgtgtgggcattctttagaagtctatgtctatgccctctgctggtactgcccccagagaggagccctggggtactcatctcctgggcagatccttctcccttatttattctcttttctatttatatgtgtggtctaggacccttggcaaacagatgctagagggcatctctccaggtgacccttttctgtcccaggagggtaaggcaagttccaggaggggtttctatacctctcttcggggtccccacttagacgagcaccagtgtctgtctcaggaagacattggcagatcataggaatccgggctagtgcccaggatggggggcaggtactccccacctccctacctcccacactgctcctcttttctccttccctttgttaccattttgtacttgatgccttctccatgagcagtggctcagttagaaggagggagccaggaggctggtaggaagccttccctagagagatagctttaggagctttaaagacggtatgatcatagagcaaggttgcacctctgtatgttgggggatgatgatgtccattgctgtgtgatggcttggaatttaatttatttaattaaagtcaaattggaagtttataaa

SEQ ID NO: 2257 - DNA, 1993 bp, Cricetulus griseus
  modified_base (509)..(509): a, c, t, g, unknown or other
ctctagtatctaatcacaatttatctcacagacagcccgagacagtccttacagaaacaccccaggacacaattgaattaaacagactgaacttagaatcttccaattcaaagtactccttgaatacagattcctccgtgtcttacattgattcagctgtaatttcaccagataacgtcccccttggaacgggtacttccatattatctaaacaggttcaaaataaaccaaaaactggtcgaagtttattaggaggaccaactgctcttagcccattaaccccaagttttgggattttgccattagaaaccccaagtcctggagatggatcctatttacaaaactacactaatacaccttctgtaattgacgtgccatccaccggagccctacaaaaaagtctagttgccagaatgggccaaactggaacaaagtctgtctctcacagagtggaaatagtcgagaagtcactccaattcttgtcgcacaaacacaaagttctggcccanaaacaagtacaacacctcaggtattgattgagccacctaccttctcaccactacagtactggttgggtattgtgccaaattggacgagcttattttgaacttttcagaatacatgcaggctgaaagaatattctcagaagttaggaggattgagaactacagagttgaaggtatggagatctactctacaactactttggcatcttcagaaagatgttgcttctttcagtttctttacaaaagtatttaacagacatggttcagcctcgcagaaatgcacttccagaaagcacttgatatcaaccctcagagttcagtcttactttgccacattggagtagttcagcatgcactcaaaaaaatcagagaaggctttggataccctaaacaaagccattgttatcgatcccaaaaaccctctatgcaaatttcacagagcctccgttttatttgcaaatgaaaaatacaagtcttgctttacaagaacttgaagaactgaaacagattgtccccaaagaatccctcgtttacttcttaataggaaaggtttacaagaagttgggtcagactcaccttgccttgatgaatttctcttgggctatggatttagatcctaaaaggagccaataatcagattaaagaggcaattgataagcgctaccttccagatgatgaggagccaataacccaagaagaacagatcatgggaacagatgaatcccaagagagcagcatgacagacgcagattaagccagctatatacatatatatatattacattatcagatctagagtttcatagaaagctttcccctgagttctgttgcagacctagagaaagctaagtgcagaactttatttgctgaatgtaattaacttttttttttttagtaggagttgtatgtcctgtgccagagagagtttctggtactgattttgagacaaaggatagaggcatagttgtggcagtggctggctatagagacagtcacagacacttggccagctttctgtttcctcacacctgcttttaacatctccatactggagccttattgccacgtagtagccatttcttcttaggtttccttttctttctgtcttttccttttcccttttgtttctttttttttcaggagaacagatggtactcaaaataatgaaaggtggtctcttaactctttctgtattttgttacttaaaatcttttatccaagaactgcaagtaacatttgaactatgctgctgttgtaccttaaacaaaactcagtgataaccagtgtttagtctattaaaacattctttttgaagaaaacagtttgaaagtctctgattagccagagtacggtataggtcttcactgaaaaaaagtggcagacagcccattttctttgggaaaatgcaagtgtgggtgtgataagtgtgttctatttgcattgaaacaatgtacttttgtgtcttctttttgctttttcctgtactt

SEQ ID NO: 2258 - DNA, 1993 bp, Cricetulus griseus
gggtgtgatagtgactctcagtgatgatggtcacctgcagtgttcatatcttgggacagacccttctctgttccaagctccaaaagttgaatcaagagagctcaactatgatgaacttgatgtagagttgaaagaactgcagagaatcatcaaagatgtaaaatctcaaggtgtttggcccatgaccgaaagagaagaagacttgaaagtctttgctgtagtctcctctagccttgattctgtgtctcaagccactaacattgaggttggaaccgactctgttccgtccatcacagtgaagattaccctgcagaatcgagtggtgttgcaaaaagtcaaattgtcagtctatgtgcagcctccattagtacttacttgtgatcagttcacctttgactttgcagtaccagatatgaccagcgtagcagcattttctgtttacctgaagaaaaattacataccatctgaattagaaggaaatgcagttgtttcttattccagaccaacaggaattcctcgggttatccaatgtaaatttagacttcctctgaaactaatttgcctaccaggtcagccttcaaaaactgcaagccagaaactcactatcgacaccaacaaatctcctgtcagcctgcccatcctcttcccagactttgccaagcaattcagatgatgatcagataaatgtaatgggtttccgtctcctaggcggctctcgagttactcttcttgcttccagaacttctcaacgataccgaattcagagtgaacaatttgaagatctgtggctcataacaaatgaacttatcctccgccttctggaatattttgaaaaacagggaatcaaagattttgcatgttctttttctggatgtattccccttcaagaatattttgagttgattgatcatcattttgagctgcggataaatggtgaaaaattagaagaacttttatctgaaagagctgtgcaatttcgggccatccagcgccggcttctaacaagattcagagataagacacctgccccactccaacacctggacaccctgctagatggaacgtacaagcaggtgattgctctagcagatgcagtggaggagaaccaagacaggctgttgcagtcctctgctggcctgaggagtgccacccatttgctgatcctgctcgtcaggctgtggcagaagctgagtgctgaccagactgctattctagaagcagcgtttctgcctctacaggaagacacacaggaactgggctgggaagaaacagtggatgctgccattgcccacctattgaaaacctgcctgtcgaagagttccaaggagcaagctttgagcctcagcagccaactgaccatacccaaagacaccagccggctgaagaagcacatcactttgctctgtgatagattagctaaaggtgggcgtctctgcctgagcactgatgctgcagccccacaggccctggtcatgccaggtggctgtactccaatcccagagtcagacacagaggaaagatcaccagaagagtccgcagaactgtttaccaaccacaagcacctcattgcagagacccccgtgcctgaagttgcagccctccaaggagttttggaatagtcagagtcaagctaactagatggaaggaagacaccctttctgaggccaaccctgtgtggacattgtgctcctacctggtgctgtgccaagctcacccctggaggtgacttcgtggagatggggacagagcttttgattgtgctgggagaacttggaatatcacagatgggtcatctgaaagacaagatttgtcttttctttcccaggaaaaactgttgctacccttagtcatgagtgcttatagataggggatatagcaagatgacaaatatataatgactatataatgcagggatctcgatgtaaaataatttgatagccccctttttcacagatttcttatgtagtaaatgtatcaagtttaataaagcatc

SEQ ID NO: 2259 - DNA, 1993 bp, Cricetulus griseus
gggaagggctgtggggcacctgtcaattcgccactatgaacgtggtttttgcagtgaagcagtatatttccaaaatgatagaggacagcgggcccggcatgaaggtacttctcatggataaagaaacgactggtatagtgagtatggtttacacacagtcagagattcttcagaaggaagtatacctcttcgaacgaattgattctcaaaatcgagagatcatgaaacacctaaaagcaatttgttttcttcggcctacaaaggagaatgtggattatcttattcaagagctccgaagacccaaatacagtatatattttattatttcagtaatgtgatcagcaagagcgatgtgaagtccttagctgaagctgatgagcaggaggttgtggctgaagttcaggaattttatggtgattacattgctgtgaatccacatctgttttcccctcaatattttgggttgctgtcagggccgaaattgggacccagcccagctagccagaacaactcaaggactgacagctctgcttttgtctctgaagaagtgccccatgattcgctaccagctttcatcagaggccgcaaggagacttggagaatgtgttaagcaagtgataagtaaagaatatgaactctttgagttccggcgaacagaagttcctccactgcttctcattctagaccgctgtgacgacgccatcaccccactgctcaaccagtggacatatcaggccatggtccatgaactactgggcataaacaacaaccggattgatctttccagagtgccaggaatcagcaaagacttgagagaggtggtcctgtctgctgaaaatgatgaattctatgctaataacatgtacctgaactttgcagagattggtagcaatataaagaatctcatggaagacttccagaagaagaaaccaaaagaacagcaaaagcttgaatccatagcagacatgaaggcctttgttgagaactatccacagttcaagaagatgtctgggaccgtatcaaagcatgtgacagtggtcggagaactgtctcggttggtcagtgagaggaatctgctggaggtttcagaggttgagcaagaactggcctgtcagaatgaccattctagtgctctccagaatgtgaagagactcctgcagaaccctaaagtcacagaattggatgcagctcgtctggtgatgctgtatgctctacattatgagcgacacagcagcaacagcctgccaggactcatagtggacctcaggagtaaaggtgtttccgagaagtaccgaaagcttgtgtcagcagttgttgaatacggtggtaaacgggttagaggaagtgacctcttcagccccaaagatgctgtggctataaccaaacagtttctcaaaggattgaagggagtggaaaatgtgtatacacaacatcagcctttcctgcatgagaccctggaccatctcatcaaaggaaagcttaaggaaaacctctacccttatttaggccccagcaccctcagagacaggcctcaggatatcatcgtctttgttattggaggagccacctatgaagaggcgctaacagtttataacctgaaccgcacaactcctggagtgagggttgttctgggagggacaacaatacacaacacaaaaagtttcctagaggaagtcctggcttcagggctgcatagccgcagcagggagagctcacaggccacctcgaggtcaacaagcagaagatgaaacggcaatgaagaatgacgagaatagcacagcctccctcttaccccggcctcagcccttccctgctgcccggggcctcaggaaggctcttgtgtttgttgtaactcgtgccaggtaaccccaatccctgaactgctggcacagacactggaacgcccatgatgagcccatccccaacccacttgtgattctgtaccaaataaacatgtcctttgtgtatttgtcagcaaaaaaaaaaaaaaaaa

SEQ ID NO: 2260 - DNA, 1993 bp, Cricetulus griseus
cgacggggttccagcgggaccagctcagctgcccagcagccctagtgcgggctgtgtgtctcttgtgccgggaagccatcaaccgggcccggcttcgggatgctggtggtttggagctgctgatgggcctcttgcaggaccctggtgccagtgcctggcacccacgtgttgtggctgctcttgtaggcttcctttatgatactggggccttgggcaagttacaggctctgggcctcgtgcctcttctggccaggcagctatgtggtgaagctggtgaagaggaagaggaaggaatagaagctgcttcctgggacttccctgaggaacggactcctgggcagacagaggtgggaagcttccgaagccttaggttgtggctgatttctgagggttatgcagcaggccctggagatatctccccagattggtctcctgagcgttgtccgatgccagagctatccgagtcagtgagtcctacccctggccagaccgcagcgtcgacaccccgaacacttcgcaaactgggccgtatccctgctgccactactgaggagccttgggggccaagaggggccagcactgttgctgttgtcacgcttctcccaggctcctgacccaagtggagctctagtgactggtccagcactttgtggcctgttggcctatgttacaggtgcaccaggaccaccaaacccacgtgcactacgtatcttggcacgtctcacctgtaaccctgcctgccttgaagcctttgtgcgcagctatggtgcagcactgctgcgcgcctggctgatactcggtgtctcaccagatgactggcctgtgccacatgcccggcctgtacaccgaaaccagcaccgagagctgggtgagatgctgctgcagaacctgactgttcaggctgagtccccttttggagtgggtgccctcacccacttgctgctctctgggagtcccgaggaccgtgtagcctgtgcactgaccctacccttcatctgccggaagcctactctgtggcgccgcttacttctggaccagggtggcctccgccacctcctcacagcactaactcagccggttccacacccactcttcctcttctttgcagcagattccctttcctgtctccatgagctggtgtctcccaccgtgagccccatccttttctctgtcatgccctcggaacctgactcaacctccccttgcctctatgaacctctcctgggcccagcccctgtcctagcccctgacctgcacttcgttctggattcaggcctacagctccctgctcagcgggctgcttcagctactgcctccccttcttccgggctctgctatccggaagctttgctgaagcgcagatggatttggtaccacttcgaggcctgtccctagtgcagcatggccagtcctgcatcatttgcatggctgtcgggggtgtggggctgccctggggtcaatacccccacttggccagcccctgctgggatccaaggctgaggaagctctggaggctgctggtcgtttcttgctgcctgcactagaggaggagctagaagaggctgttggccgcatacacttgggtccccaaggtggccctgagtcagtgggtgaggtattccgattaggtcggccccggctggctgcccactgtgtacgatggacactggggccagggcagtgccctagaaaacgggccctggcccttatagggcttgtggaagcagcaggtgaggaggcagggcctctcactgaagctttgctggctgtgttaacgggaattgagccatagcacaggtgctccaggctaaactgttggcatccctggaagagcacccagagatgagttcgttggacgggaggcttctctcagcatggcatgaggggagactgcgaaggagctatcctcagggactgaagagaaagtggaaccaaatccaggctgaagatctgaagatctgtgactaaaagccagcaccagagtctagtgcag

SEQ ID NO: 2261 - DNA, 1993 bp, Cricetulus griseus
gctcggagcgcctcggtcggccgcgctcggctgggcgcgtcccgcccgcgccatggcgggagccggaggaggcggctgcccggcgggcggcaacgacttccagtggtgcttctcgcaggtgaagggcgctatcgacgaggacgtggcggaagccgacatcatctccaccgttgagtttaactactctggagaccttcttgcaacaggagacaaaggtggcagagttgttattttccaacgggaacaagagaataaaggccgcactcactctaggggagagtacaatgtttacagtacctttcagagtcatgagccagagtttgactatttgaaaagtctagaaattgaagaaaaattaataaaatcaggtggttgccgcaacagaatgctgctcattttctactctctacaaatgataaaactattaaattatggaaaataagtgaacgggataaaagagcagaaggttataacttgaaagatgaagatggacgacttcgagacccatttagaattacggcactacgggttccaatattgaagcccatggaccttatggtagaagcaagtccacgacgaatttttgcaaatgctcatacatatcacataaattccatttcagtaaatagtgatcatgaaacatatctctctgcagatgatctgagaattaacctatggcatttagaaatcacagatagaagcttcaacattgtagacatcaagccagctaacatggaggagctgacagaagtcatcaccgccgctgagttccacccacaccagtgcaacgtgttggtctacagcagtagcaaggggaccatcaggctgtgtgacatgcgctcctctgccctgtgtgacaggcatgccaagttttttgaagagccagaagaccccagcagtagatcctttttctcagaaataatctcgtctatatctgatgtcaagttcagccacagtggtcggtacatgatgaccagagactatctgtcggtgaaggtatgggacctcaacatggagggcaggcctgtcgagacccaccaggtacatgagtacctacgaagcaagctctgctccttgtatgagaatgactgcatctttgacaagttcgagtgctgctggaacggttcagacagtgccattatgacgggctcctacaacaacttctttagaatgtttgatagaaacactcggagagatgttacgctggaagcctcaagagagaacagcaaaccccgagcctgcctgaagccccgcaaagtatgtacagggggtaagagaaagaaggacgagattagcgtggacagtttggacttcaataagaagatccttcacacagcctggcaccccatggagagcattattgctgtagctgccaccaataacttgtatatattccaggacaaaattaattaaggaaactgactggaggaccaagtgttgtcttgcatagttaagccggttgttttcccgtcaaagaaatggcattgtcctctccattgagaatagtgacgcacttccacttccctcatagacacaggagaagaaggggtctcagctggagtcttgggagagatgaatgctgctgctgaagggaaaacctactcgaagctgaattggtggactttgttcaataaaggccgttactcaaatgtatttatttaagtctgagccttcctttccaatttatagaccaaaaaactaacatccaagaggaaaaaaaaatcatcacatctctctccagctcttccttctatctctgccatccatccctgggctttaacctggacatggtgtggccaccacccacggtcctctctggaggaccttggagccccccagtgggctgcaacaccaccactggtgcaaggatacgcccgagcaggctcaggcagctttactcacccactgtacctgccatcacaccttctgtggagctacttaataaacacaacacactgtgaagtgtttttaaaacccaaaaaaaaaaaaaaaa

SEQ ID NO: 2262 - DNA, 1993 bp, Cricetulus griseus
  modified_base (1832)..(1832): a, c, t, g, unknown or other
gggataaaacttgaaggaggcaatgcggatgctggagagcagtcagagaagaacagaggaggaaaacggaaagaagccagtatcagaggacattccagggccactccagggcagtggacaagatatggtgagcatcctccagttagttcaaaatctgatgcatggagacgaagatgaggagcctcagagcacccgaatccagaatattggagaacaaggtcacatggctttgttgggtcatagtctgggtgcttatatttcaactctggacaaggagaagttgagaaaactgactaccaggatactttcagacactactttatggctacgccggattttcaggtatgaaaatggatgtgcttatttccatgaagaagagagggaaggacttgctaaaatctgtaggcttgccattcattcttcgctatgaagactttgtagtggatggatttgatgtgttatataacaaaagcctgtcatatatcttagtgctgctgctagaccgggcctgggccaatacctttgtaatcagcttggcttacctgtgtcctgcttgtgtcgtgtgccctgtaacactatgtttggatcccagcatcagatggatattgcctttcttgagaaactgatcaaagatgacatagaaaaggaggactgcccttgctgcttgttgcaagtgctggaactgcagcagttggacatacggacaagattggacgtttgaaggagctctgtgagcaatatggcatctggcttcatgtggaaggtgtgaatctggcaacattggctctaggttatgtctcctcgtctgtgctggctgcaaccaaatgtgatagcatgacactgactcctggccgctcagttctcctagttagtggtgttcagatttttccaagaattaccaggttcagatccagcctttaaagctgtcccagtatccaacgtggcacctgcagctattggtcgggagagagatccctgtgatgcactgaaccgatggctaggggaacaactgaaacagctggtgcctatgtgtggtctcactgtcatggacttggaggtagatggcacctgtgtgcggttcagccctttgatgacggcagcagggttaggatccaaagcaaactgccggttttgacgtgtacactacagcttcgagaagagttcagacaggaggtagaggggacagcaagcctcctctatgttgatgaccccacctggcctggaatcggggttgtcagatatgagcatgctaatgatgataacagcagtttgaaatctgatccagagggggagaaaatacacactggacttctgaaaaagttaaatgaactggaatctgacctcatatttaaaatgggccctgagtacaaaagcatgaagagctgcatttacattggcatggcaagtgatgatgtggatgtttctgaactagtggagaccattgctgtcacagcccgggaaattgaggaaaactcaaggcttctagagaacatgacagaagtagttcggaagggaattcaggaggcccaggttcaactacagaaggcaaatgaggaaagacttctggaagagggagtgttgcggcagatcccggtagtagggtccgtgctgaattggttttctccagtccaagcttcacaaaagggaagaagttttaacttaacagcaggctctctggagtccacagaatacacttacgtccacaaagtacaaggaacgggagtgacaccgcctcccacaccctcaggcactcgaagcaaacagagacttccagtgtggaaatggcgtccaggaatacgggcctattcgaagttgttctgtctttgtcatcntaaatagctaatcatctaaagaaccatttccatgacaggctgtaaggacactgccctaccactgctgtaatctagttccaaggctgtccccttagctgataaaactgcaaatgttgacctcccataataacaaagctgccaccaccaaattccttccctgt

SEQ ID NO: 2263 - DNA, 1993 bp, Cricetulus griseus
  modified_base (1985)..(1985): a, c, t, g, unknown or other
catcaagaaagaccttgatgcagaagagaagcccctggtagaaccatcatccttctgcctagagaagacacacttggcctcacctccagagcagaagggcagcagtccttccgacctggccaagatagcaaaagtgatgaaaaacttccttacagtagatgagggctcgatggcttccttcagtgtgggaaccagccaagacctggaccggctcagcttccagagcagcaagatgagtgacttgttcacccgattcccagagaatctcttgctacaccgggtggagaacagccagggccatattctgtatgctttcttggtggagaacaaagagcgagagagtcgagtggtgcacttcgctgtgctcaaggctgagacagccacctctgtggccaagatgctcaatatcttcacagaattcaactctgattggtctaaggtcaaggtggtctttgtggacccttcattccctcaccaagctattcttcaggagatcttccctgctgcccgtatcctcctttctatctaccacacaactcgactcttagagaagaagttacatcaaagctctgcaaacgcatcctttaaaaggctcatgaaggaagctcttcgggaggctgtgtttgtctcttctgatgcaagcctaaaaaatctctgtcagatgtcccaggccctactggatgaggagctcttcaggttcctgcaggcccattggttttcctgtgaactgctgtggtacatgcatgtgagaaagggtctgcatgcgtgtaacacatacatggacagcttggacatagtcaccagtaaagtgtcaggcctctttcgggagcagcaatccctactggactgcatccttcactttgtggattacatagacttctttaataccaaaggtcttaagagcttgcccaaaaattcccccaagttaaaaagaactcagctcccaagcatgccaccaaggcccaagaagcccttttaagaacttgtagagggaatgtcaccaggctccctgtggaagaggaagagaccaagtcagactcacaggagtctcaactgttacagccccaggatcagtcctgcaagagtggcatgctagacattttgcaccaaagtggttctgaactagcctacaaattgtgccataatgagtgggaggtggtacagaattccacccacctggtggacgtggctggttcctcggtcgctgttaaactactagaagactcacaccaggtgagcaaagatggctgtagctgcagctgttcctttcagcaatgctaccatctgccatgccgccacattttggccctattgcataccagccagcagccagtaggagaagccatggtgtgctgccggtggcagaagaagtaccagcacctccttggacccaatggggagcttcaggaccgtggaataatcccgaactcagatcagcctgaaaagcaaggtcagaaccacatgatccaggacctaagcagggagctggcaaacctgctcatgcagactgaggggccagagctggaggagcgctgctccaccctgcgcaaaatcgtggacatctgggccgaccccttacagctacctgagtccagtcagcagccagttgacttcaatgatgtggggtgcctccctttcctctggggacagctagaggaaggggacagctttcctcttgctgaagccatggctcatgagtgaagtgtttgtactagtgcactgtgtctcaaaaccttggaagtttcaaagtgggtgggtcacgctgtaggtcagtattttaatcaatgtcttcctaggtaagggctaagaagatctcaaaagtgaggggattgggaccccactgtgtgacatcctttgagcctgcccgttttcagcccttcatttggcgttctatagacagctcattcattgttcaaagccaaagttattccatactgaaaggtcatgcccctttcttccgcagccttttgttttgttaaaaaaanaaaaaaaa

SEQ ID NO: 2264 - DNA, 1992 bp, Cricetulus griseus
ggatgaccttgaggccttggtaatgcctacacttcggcaagcagcagaagataaatctttggcgggttcgctatatggtagctgacaaaatttctagagctccagaaagcggtggaccctaaaatcacactcaatgacctcatccccgccttccagagcctccttaaggactgtgaagctgaggtccgagcagccgctgcccacaaagtaaaggaactttgtgagaacttgcccactgaaggtagagagaccataattatgactcaaatcctgccctatataaaggaattagtgtctgataccaatcaacatgtgaagtcagctctagcttctgtaattatgggattatctacaattttgggcaaagagaataccattgaacatcttctgcctctttttttagctcagttaaaggatgagtgtcctgaagttcgtttgaatatcatctccaacttggattgtgtaaatgaagtgattggaattcgtcagctctctcagtctctccttcctgccatagtggaactggctgaagatgccaagtggagggtccgcctggctatcattgagtatatgccgctgctggcaggccagctgggtgtggagttttttgatgaaaagctgaattctttgtgtatggcctggcttgtggatcatgtctatgccattcgggaagctgccaccaacaatctcatgaagttggtccaaaagtttggtaccgagtgggcccagaataccatcgtacctagagtgctagtgatggcaaatgaccctaattacttgcacagaatgaccactctattctgcatcaatgcactgtctgaagcctgtggtaaggaaataaccactaagcaaatgttgcccatcgtgttgaaaatggcaggagaccaagtagcaaatgtccgtttcaatgtggccaagtcattacagaaaattggaccaattctagataccaatgccctgcagggggaagtgaaaccagtgctgcagaagctaggtcaggatgaagacatggatgtcaagtatttcgcacaggaagctataagtgtcagaaacaatcaggtgagctgaccaccatctgctctcaccagtttccatctcaggacataaaggtagccatagaatgagggatttctacttgaaaggagtgagaggagcaaacgggagcttacgacaggatccagcatgatggttcgtgttcttcaccaggcgactgtcctcacctccgctctgtgtgtcagtgcctaacaggctgtctgttgatgggtgctcccggcttctctctgcagcctgtaaccttctgacagcctctccgtagcccctcatctgtcgcctaactgtcctgccatagctgctaggtctcctgggctaagcagctcacagccctgttggggggcaggagtttatgccaatctgtagcggtgctgttcttgcagtcctgaaatgagcggcccccattttcaatcaaatcatcgatcttaagcatgaggaggaacagaaacaaaagaaacaaatttatccttactggattttcagttattcaatcacaaaatgacagtccctcctactatctattcctgctgacacccacagcccaattccaagcagagcgcatttgcaaagcagcccagcaccagttgggacccaacaactacagtctctggccagcctcaaagatgctagctcgctcgaatcaccagcacgggctgagcggggctgggctggtggccaggatggctctccgtagacttcccatgcctagtcttcccttgcctgcctggacacttactacagagaggaaaggcaacttataggtgtttctaggtgcagcatcagtgtagtagctctcttcttgtgctttaaggaagacgctttgtgcttagtgcattcatctgctgataggacaagccactctaaagaacagaaattataatttttataaataatactgagtttgtaacacctggatgtcactgtgcaaatgacagaattact

SEQ ID NO: 2265 - DNA, 1992 bp, Cricetulus griseus
gggaaagatggcggtggctggggcgtcggcccgggagcggctagtacactggtgcacacagcagttgcggaaaactttctccctggatgtcagcgaggaaatcatacagtatgttttgtcaattgagagtgctgaagagctacgagaatatagtgacagaaccttctaccaggggaaatagaggggaaaaaaggtacaattcatagaagatcttataagcaaatggcaaaagaatgatcaagagttggtttctgattcttttcagcagtgctggaaaaaagatgaaattttagatggacagagatcagtagaccagctaaagcggagtaggaggaaaggaagaaacaaacaagaagttcctgcatttcctgaacctgacctgactgtagaggtcaaaacacctttagatttggccaaggcacaagaaagcaacaactcagtaaagaagaagacaaaatttgtcaatttatacacaagagagggacaggacaaactggcagtcctgcttcctggtcgtcacccatgtgattgcctgggccagaagcacaagctcatcaataactgtctggtctgtggtcggattgtctgcgagcaagagggttctggcccctgcttattctgcggctctttggtatgtactaatgaagaacaggacattttacagcgtgactcaaacaaaagtcagaaactgctaaagaagctcatgtcaggggcggaaaattctggaaaggtagacctctctaccaaggaccttcttcctcatcaagaatctcgaattaagtctggtttggagaaggctatcaagcataaagaaaaactattagagttcgacagaactagtatccgaaggacacaagtcattgatgatgagtcagattactttgctagtgattctaaccagtggctgtccaaagttgagcgggaaactctgcagaaacgagaggaggagctgagagaactccgacatgcctcacgactctctaagaaagtcaccattgactttgcagggcggaagatcctagaagatgaaaatccactggcagagtatcacagcagactagatgagacaatacaggccattgccaatggaactttgaatcagccactgatgacattggatagatcctctgaagagcctttgggagttctggtaaatcccaacctgtaccagagccctccccagtgggtagacaacactgggtcagccccacagaagaagacttcactctcagcaggacggagactagaacttggtttacatcagcaccagctgcgaatccaggaccaggaattccaggaaggctttgatggtggctggtgcctctctatgcatcagccctgggcgtctctgcttgtcagagggattaaaagggtggagggcagatcctggtatacacctcacagaggaagactctggatagcagccacaggcaaaagaccttcctctcaagaagtctcagaactccaggccacttattgtcttcttcgtgggaaagatgtggaatttccaaatgactatccatcaggttgtcttctgggctgtgtggacctaattgattgcttgtcccagaaacaatttcaggagcagtttccagacatcagtcaagagtctgattctccatttgttttcatctgcaaaaatccccaggaaatggttgtaaagtttcctattaaaggaaatcctaaaatctggaaactggattccaagatccatcaaggagcaaagaaggggttaatgaagcagaataaagctgtctgacccagggaaaaaggaactatatagcatagtgaagtcttgtgtactaaattgctatctgctggtcctttgggattgaagcagtataaagctaaaggcttgacatgacaccagattcaatctctgagaatttaaaactcttaaccaaatctgttattttcttacatggtggattctttatgtagtgggccaaaaatctttgaatacattatttataaaaaactcaatttaagaaa

SEQ ID NO: 2266 - DNA, 1991 bp, Cricetulus griseus
tttaggtaaagttggccgagtacaacagatttattcagacagtgatttaaaggtggaagtttgtggcacatcttggacatataatcctgcagcagtttccaaggtggcatctgcaggatcagccattagcaatgcatctggtgaaagactctcacagcttctgaagaaattatttgaaacccaagaatctggtgacctcaatgaagagctggttaaggctgctgccaatggggacgtggctaaagtggaagatttgctgaaaaggccagatgtggatgtaaatgggcagtgtgctggccacacagcaatgcaagctgctagtcaaaatggacatgttgatattttgaagttgcttttgaagcaaaatgtagatgtagaggcagaggataaagatggagaccgagccgttcaccatgccgcctttggagatgagggcgctgttatcgaagtcctgcaccgaggcagtgcggacctgaatgctcgcaataagcgaaggcagacgcccctgcatatcgctgtcaataaagggcaccttcaggttgtgaagacgctgctggacttcggttgtcaccccagtctccaggattctgaaggtgacacccctctccatgacgccataagtaagaagcgagatgacatcctggctgttcttttggaagctggagcagacgtgaccatcaccaacaacaacgggttcaatgccctgcatcacgctgcactaagaggaaatcccagtgcaatgcgtgttttactctcaaaagttaccaaggccgtggattgtggatgatgccttgcacctggccgccataatcatgtggaagtggctgagctgttggtgcatcagggaaatgcaaacctggatatccagaatgtgaaccagcaaacggccctacaccttgctgttgaacggcagcacactcaaattgttaggcttttggtccgcgcaggtgctaagctagacattcaggataaggatggagatactcctttgcatgaggctttgaggcaccacactctgtctcagctacggcagctacaagacatgcaagatgtggggaaggtggatgctgcctgggagccatcaaaaaacacactaataatgggacttggtacccagggagcagaaaagaagagtgcagcatctattgcctgttttctggcagccaatggtgctgacctcagcattcgaaataagaaggggcagtcaccactggatctctgccctgacccaagtctctgcaaagcactggcaaaatgtcacaaggaaaaagtcagtggccaagtgggttctcggagtccttctatgattagcaatgattctgaaaccttagaggaatgtatggtatgctcagacatgaagagagatactctttttggtccatgtggacacattgcgacttgttctttgtgttccccacgtgtcaagaaatgcctcatctgtaaagagcaggttcagtccaggacaaagattgaagaatgtgtggtgtgctctgacaagaaagcagctgttcttttccaaccttgtggacacatgtgtgcttgtgagaactgtgccagcctgatgaaaaagtgtgtgcagtgtcgggcagtggttgaacgcagggtgcctttcatcatgtgctgcggtgggaagggttcagaagacccctctgatgagatctcaagtgggagtattccagtgctgcagaaggacaaggacaacaccaatgtcaacgcagacgtgcagaagctgcagcagcagctgcaggacattaaggagcagactatgtgccctgtgtgtttggatcgtctgaagaacatgattttcctctgtggccacggaacatgccagctctgtggagaccgaatgagtgaatgcccaatttgtcgaaaggcaattgaacggaggattcttttgtactgattaagaaacacagagtgttttgttagctaaagtatgtgatcatgagatcttagtgggttctaaagctagttggaagtttaatctaatg

SEQ ID NO: 2267 - DNA, 1990 bp, Cricetulus griseus
cgcttcctccccgccggccccacgagctgctgcctagctctctgccgtcctcgtcagacccagccttccgcgccggcctctcccgcctgccccgccatgcctctctactcggttacagtaaaatggggaaaggagaaatttgaaggtgtagaattgaatactgatgaatctccaatggtgttcaaggcccagctttttgcactgactggagtccagccagccagacaaaaagttatggtgaaaggaggtacactgaaggatgatgactggggaaacatcaaaatgaaaaatatggagttaccatgtggattgtacaaaccttggtaacacttgttacatgaatgctacagttcaatgtattcgttctgtgcctgaactcaaagatgcccttaaaaggtatgcaggtgccttgagagcttcaggggaaatggcttcagcacagtatatcactgcagcccttagagatttgtttgattccatggataaaacttcttctagtataccacctattattctactgcagtttttgcatatggctttcccacagtttgcggagaagggtgaacaaggacaatatcttcagcaggatgctaacgagtgctgggtacaaatgatgcgagtgttgcaacagaaactagaagccatagaggatgactctgcgacagagacagattcttctgcatcagcagtgacaccttctaaaaagaaaagcttaattgatcagtttttggtgttgagtttgaaactaccatgaaatgtacggaatctgaagaagaggaggtcaccaaaggaaaggaaaatcaacttcagcttagttgtttcatcaaccaagaagttaaatatcttttcacagggcttaaattgcgacttcaggaagaaattactaaacagtctccaacattgcagagaaatgctttgtacatcaaatcttctaagatcagccggctacctgcttacttaactattcagatggttcgatttttttataaagagaaagaatctgtgaatgccaaagttctcaaggatgttaaatttcctcttatgttggatgtgtatgaactctgcacaccagaacttcaagagaaaatggtctcttttcggtcaaaattcaaggatctagaagataaaaaaagtgaatcagcaaccaaatgcaaatgacaagaagagtagtcccccaaaagaggttaagtatgaacccttttcatttgctgatgatattggctccaataattgtggatactatgacttacaagcagtgctaactcaccagggaagatctagttcttcaggtcattatgtatcatgggtgaaaaggaaacaagatgaatggatcaagtttgatgatgataaggtcagcattgtaacaccagaagatatcttgcggctgtctggtggtggagactggcacattgcttatgttttactttatgggcctcgaagagttgaaataatggaagaagaaagtgaacagtaatcttcaatttagctatttatgcagaggtgtgaaataaatgtttttttgttgttattgttgatcatttttataatcttgagctctaaggggaacaaaggagaacagaaccaggccacttgtgcatcagcctaaaaaaaattacgtttgggtgctaccctgtataaaggtagatggaagacattctttaaaagcttatttcttgcattaattcttacaaattcctagctgaagtccatttattccccttgcccttccagctcaagatttagcaatgatgtttattgcacacctacttgttggtcttgcatggttaacatcaccattcagtagctgcccgtcctttaccttatctaacgaattatttttctaggaagatggaaaaggaaggatgttgctctcatcgtgtaactcagtgctgctgtccacatcccatcaactgggtacaatcaagtattttgtccagactgactgttgctggcctttcatgactttacaataaattgtgatcaataagaa

SEQ ID NO: 2268 - DNA, 1990 bp, Cricetulus griseus
ctgcaaaccctaggtctgggtctgggcatggaggcagacccgccgctctaccctgtggctggggccgccggccctcaaggggatgaggaccggctcggagttcctgatgggccagaggctccgctggacgagctggtgggcgcgtaccccaactacaacgaggaggaggaggagcgccgctactaccgccgcaagcgcctcggcgtggtcaagaacgtgctggcggccagcgcgggtggcacgctcacctatggcgtctacctgggcctcctgcagatgcaactgatcctgcactatgatgagacctacagggaggtgaagtatggcaacatggggctgccggacatcgatagcaagatgctgatgggtatcaacgtgacgcccatcgctgccctgctctacacacctgtgcttatctaggttttttggtaccaagtggatgatgtttttagctgtgggcatctacgccctctttgtctctaccaactactgggaacgctactacacgctggtaccctctgctgtggctctgggcatggccattgtgcctctctgggcctccatgggcaactatatcaccaggatgtcccagaagtactatgagtactcccactataaagagcaggatgagcagggacctcagcagcgcccaccacgcggctcccacgcaccctatctcttggttttccaggccatcttctatagcttcttccatttgagcttcgcatgtgcccagctgcccatgatttacttcctcaactactacctgtatgacttgaaccacacactgttcaacgtgaagagctgcggcactaagagccacggcatcctgaccggcttcaacaagacggttctgcggacgttgcctcgcagcagaaacctcattgttgtagagagtgtgctcatggcagtagccttcttggccatgctgctggtgctgggcctgtgtggagccgcttaccggcccacggaagagatcgacctacgcagcgtgggctggggcaacatcttccagctgcccttcaaacacgtgcgtgacttccgattacgccacctggtgcccttctttatctacagcggctttgaggtcctctttgcctgcactggtttcgccctgggttatggtgtgtgctctgtgggactagagcggctggcctacctgctcatagcttacagcctgggtgcctcagcagcctcggtcctggggcttctggggctgtggctgccacgctcagtgcccctagtggctggggcggggctgcacctgctgctcaccctcagcctctttttctgggccccattgcctcgggtcctccatcacagctggatcctttactttgtggctgccctctggggtgtgggcagtgccctcaacaaaaccggacttagcacactcctgggcatcctatatgaagacaaagagaggcaggacttcatcttcaccatctatcactggtggcaggctgtggccatcttcgttgtgtacctgggctccagcttgcccatgaaggccaagctggcagtgttgctggtgaccctggtagtggcagcaacctcatacctatggatggaacagaagttgcagcaaggcctggtccccagacagccgcgaattccaaagccacagcacaaagtgcgtggctaccgctacctggaggaggacaactcagatgaaagtgatgtggatgggggcggcgagcagggccagggggactgtgcggaggaagaagcaccacaagcaggggccctaggtgcagagctagctggtccctgccgcaggccctgtccctatgaacaggctctgggtggtgatgggcctgaggagcagtaagagacccagggggcctgccctgggcttcagcctcagctttcctgtttcctagcctcagtttacagtttctcaggttgagagtccccctgaaccctgctctatctgccagaaggtccctctttcccctcccagagcctgggccacctggaccttcctcca

SEQ ID NO: 2269 - DNA, 1990 bp, Cricetulus griseus
gtcaccctggagtttcatgagtctcgagaagccaacccagagaagttcaacagccgctttcggaataagatgttctatgctgggacggccttctctgacttcctgatgggcagctccaaggacttagccaagcacatccgagtagtgtgtgatggaatggacctaacccccaagatccaggacctgaaaccccagtgcatcgttttctcaacatccccaggtactgtgcaggcaccatgccctggggccaccctggggagcaccatgactttgagcctcagcggcatgatgatggctacctcgaggtcatcggcttcaccatgacatccttagcagcactgcaggtgggtgggcatggagagcggctgacccagtgccgagaagtgctgctcaccacggccaaggccatccctagtacaggtggatggtgagccctgcaagcttgcagcatcacgtattcgaatcgcccttcgcaaccaggccaccatggtgcagaaggccaagcgcaggagcgctgccccacttcacagcgatcagcagccagttcccgagcagctgaggatccaggtgagcagggtcagtatgcacgactatgaggctctacattacgacaaggaacagctcgaaggaggcctctgtgcctctgggcaccgtggtggtccctggagacagcgacctagagctctgccgtgcccacattgagagactccagcaggagcccgatggtgcaggagccaagtccccgaccgtgccaccaactatcctccaagtggtgtttcttggatgccaccactgccagccgcttctacaggatcgacagggcccaggagcacctcaactatgtgacggagattgcccaggacgagatttatatcctagaccctgagctgctgggggcatcagcccggcctgacctccccacccctacctccccgctccctgcctccccctgctcccccataccccggtcactgcagggggatgctgcacggcctcaaggtgaagacctgattgaagccgccaagaggaatgacttctgcaagctccaggagctacaccgagcaggaggtgacctcatgcaccgggaccagcagagccgcacactcttacaccacgcagtcagctctggcagtaaggaagtagtccgctacctgctggaccatgcaccgccagagatccttgatgctgtggaggagaacggggagacctgtctacaccaggcagctgccctgggtcagcgcaccatctgccactacattgtagaagctggggcctccctcatgaagacagaccagcagggtgacactccccggcagcgagctgagaaggctcaagacacagagctagctgcctacctggagaaccgtcagcattaccagatgatccagcgggaggatcaggagacggccgtgtagttaaggggaccacggatcagcgagggacactaccagaggactagagctcctctccttgcccacctcactgccacattcctgtgggatggccatggggggaccctgccctagggaaggagccccatgccacccccccagaagccactcagatctagggctggactcaggagctggactctcacctgtccctgggttcatggggaacaggagactggctgggctggctgggtctcttcagggcagccttcccctcaccacagctgatggaagggcaggccagagctcagcagcgacagggaggcctgcagccacctggttctttgggctgtctggaggcttctgggcgcctagcccttctatctgccccacccactctgggccccccagaaactcaagagcctgctgtattcatatgcccgctgccctgcttggcacccccctggcgatcctcatgtacccagtcatttcattttggactgtatggcctggggtggggggtggggctcccacggtgacttgtttacagctgggtgtgactcagtaaagtgtaattttttttccaaaaaaaaaaaaaa

SEQ ID NO: 2270 - DNA, 1990 bp, Cricetulus griseus
tccttgttgtcccttaccccatccttggcctctggtgagaccgcaaaggagggcaagacgtacaggtgtaaggtatgcccgctcacctttttcaccaagtctgagatgcagatccactccaagtcgcacacagaggccaagccccaacaagtgcccacactgctccaagtcctttgccaacgcgtcctacctggcccagcacctgcgcattcacctgggtgtcaagccctaccactgctcctactgtgacaagtccttccgacagctctcccacctccagcagcacaccagaatccacacaggcgacagaccctacaagtgcccacatcctggctgtgagaaggctttcactcagctctccaacctccagtctcaccaacgccagcacaacaaggacaactgtagcatgtgtgggcgcgcctacacctcggagacctacctgatgaagcacatgtccaaacacacagtggtggaacacctggtgagccatcactcacctcagaggacggagtcccccggcatcccggtgcgaatctctctgatctgagcccacctgttgcgccaccccacccacttggcagacacagacctaggcaacacccagcctaactcctgctggggcctccaggaaccaccaagctctcttcatgaccttcccaacctgccagaaagcttggtccgcagaagccctgcctggttcggctcctgggcagccaggccaactgcaagatcatggactgttctggtggcatccaaagacgatctcagagcactttgaacctgtctgttgggttttctttttgttcccctccctcacttgcttcactgtttcttgtttttttaaagtttgtttttggaaataacaaaaaggatatttattggccagaatgttggtgctgctaagaacgagaaattaaaaggactggagagacggatacagagaaccagagggcagcgtgggaccttctctggccatagcctcaggtcttgagggaaggctcaggcctggggttctggacttcaaagggggaccctcccccaggtgggaggagacaggagacagctggagtgagcccttcagcccccgcaccccgctcaaactgcctgagccttgcctttcgccttcactgggcagagggtgtggcagctgccagggctgcttggcttcagggcatggaaacaagaggggtctggagagccgcgggaccaaagggcgcagtgacggctgggtggcaagcccagggaaatgggttaggggggtgccagatgagacctggcttctcccctgctgccctgaagacaccccagtctacctcggtgctggccaggaaacctatcggctacctctcccaccactccagactgtgggcagggggatggggatggagtgggcctggggctaagacctccttcagaattcactccagaaggggacagttcccagggaggggttgtctttctcaacacagaaggggactccccaacccagaccccaggccctgcggcagggataggatcctccaaaggaggtcccaggagcagaccctgcccccagctacccccagacatcccaatccgaaagccatgcgtgtccgtgtatataggaactatgtacagagcccagagaagtccttccacaccctccccccagagaagaagaaaactagacaaaactcatctatatattctgtatctggagtccatttgaatattaactgtgttatttttatacactttttaagccttaactcgccattgatttaccagtttatcgtttcctggggtttcttttccactgggggttccctgccccccacccgacccctttgtttgacttgcgtcgtctgatactcagtattgtagcttttcgtccgcatgttactaccctgtaaatatgctgttccaatgctgttaacacccttggctttttttctatgggacctccaggccaccatatttagaaatagttaccttattaaaaaagagaaaa

SEQ ID NO: 2271 - DNA, 1990 bp, Cricetulus griseus
  modified_base (69)..(69): a, c, t, g, unknown or other
agagtaccatccgaatcttaggggcctgctgagtacataccacctatcggggacgagcctcttcctagngaaaagctgaagatttggaaatcggttaatgcctgccttcaccacaccctccaagattccatactctgatgtgaacattggcactggatttgcccactcaccccagtggacatcagacagcactgtggcagaagtgacaagcattcagctggagtttcgggagctctctcgtcttactggaaataagaaattccaggaggccgtggagaaagtaacagagcacatccactcccctgtctgggaagaaggacgggctggtgcccatgttcatcaacacgaacagcggcttcttcacccacccaggagtgttcactttgggtgccagagctgacagctactacgaatacctgctaaagcagtggatccagggtggcaagaaggagacagcactgctggaagactatgttaaagccattgaggggataaaaacacacctgctacggcattctcagcctggaaagctcaccttcgtgggagaacttgcccatggccgcttcagtgccaagatggaccacttggtgtgcttcctgccggggacactggctttgggtgtccatcatggccttccagctgaccacatggatctggctcaggcactcatggagacctgctatgagatgaaccggcagatggagacaggtctgagccctgagattgcacacttcaacctgtacactcgggcggatcataaggatgtggaggtcaagccagctgacaggcacaacctgctgcggccggagactgtggaaagcctgttctatctgtaccgtgtcacaagggaccacaagtaccaggactggggctgggagatcctgcaaagcttcaataagtacacacgggtcccctcaggtggctattcttctatcaacaatgtccaaaattcccagaagcctgatcccagggataagatggagagcttctttgtgggagaaacgctgaagtacctctacctgctgttttctgatgatctggagctgctcagcctggacacctgtgtgttcaacacagaggcccatcccctacccatctgggctcctgcctaggaggatagcccgtggcctggggacagatggagggctgacgtgggcctattgggtctgtgaccttcacagggcccacatagttttgggcagccatcaagtgtgatgctcctgctcagttctaggcctctcctgtctcagctttccatgaagatgttggggggaacaagagtcaaatcagcaggtatgggattctgggatatttaggctgacttgtctaccagaagcctttgacttccttgaaaactcatgccatgactcctgattcctatgcccaaatgaccttgttggctggctgcaggcagcccccatggtagtcccaaaacttcttatcacctcctggcaccactcaggactccagtacctgtgttgagttcagagtgatatccctagtcagtgaggtgctgggcttggcctgaaggcctgttgacccacaggtctggtgggccatgtgacctcaaggggccttgtggctctggtgtttacgggttggactcagggatcctcctggctaccctactgggctggcaggggttagaacagcaaatttgtcttatttccaggacaccctgggataatgtgatttctcagctgagatgaaaagtggacttggtcccactgtgatgcgtcctgtgttggggagggtgtgccttggtgtctgagctcatggagtagggtaaactagacagaatctaaggcacctcaggctcggggcctgtgttacctgtgcaccccaagatctggaggtttgacttgctcactccccatctgcagctcagtggcggccaccttgtgtctctgaggcaaagtagttgccccagggacttcctgtcaaccacttataccccaagccagctctaatcccaaaggtgtctacaaag

SEQ ID NO: 2272 - DNA, 1990 bp, Cricetulus griseus
gagttcatcacctggagccagaatgggcagtagtttctggtcttggatgagcagagatttgacaaaagaaattcttcccaagtacttcaaacacaataacatggccagctttgtgagacaactaaatatgtatggcttccgtaaagtagtacatatcgactccggaattataaaacaggagagagatggcccctgttgaatttcaacatccttacttcaaacaaggccaggatgacttgttggagaacattaaaaggaaggtttcatcttcaaaaccagaggaaaataaaattcgtcaagaagatttaacaaaaattataagtagtgctcagaaggttcaaataaaacaagaaactattgagtccaggctttcagaattaaaaagtgagaacgagtccctttggaaggaggtgtcagaattaagggcaaagcacgcccagcagcagcaagttattagaaagattgtccagtttattgttacattggttcagaataatcagcttgtgagtttaaaacgtaaaaggcctctacttctaaacactaatggagctcaaaagaagaatctatttcagcacatagtcaaagaaccaactgataatcaccatcataaagttccacatagtaggacagaaggtttaaagtcaagagagcggatttcagatgacataattatttatgatgttactgatgataatgcagatgaagaaactattccagttattccagaaactaatgaggatgttgtgtctgatcccaactgcagccagtatcctgacattgtaattgttgaagatgacaatgaagatgagtatgcccctgtcattcagagtggagatcagagtgaactagccagagaatcattaagtttgggaaatgctggcggcagcagccccctcatgtctagtgctgtgcaattaaatgccccatccaacatgaactctgaggatcctgtgaccatgatggattccattttgagtgataacattaacctcttgggaaaggttgagctgttggattatcttgatagcattgattgcagtttagaggacttccaagccatgctctcaggaagacagtttagcatagacccagatcttctggttgattctgagaataagggattagaagctaccaagagcagtgtcattcaacaagtttcagaagagggaagaaaatccaagtctaaacccgataaacaacttatccagtatactgcctttccacttcttgcattcctcgatgggaactctgcttctgctattgaacaggggagtacagcagcatcatcagaagttgtaccctctgtagataagcccatagaagtcgatgagcttctggataacaacgttgatgcagagccaacccaaagcaagattgttcggctggaaccactgactgaaactgaagctagtgaagccacactgttttatttatgtgaacttgctcctgcacctctggatagtgagatgccacttttagatagttaagcccccaaatggacactgtatgtatatattcatcaaaatgatgaagtatttattttaaagtatcatttggtactttgttttgtaaattactttttgtttaatcagatactgtggaataaaagcaccttttgcttttctcactcaccacactcttgcaaagctttcaggtgttactcggctgcctaggtatataaattttaatgaacattattggaatatcttaagttgacttcaaatggccattttctccagttgtatttttttttttttttttttttttttacaaatataaccattttaatcccagttaaacttgtttattttcaattgacctttaagtgtttagaactaaaggtagaaaactctggtctagttctttattatttttgactttggcttatttttaaaactgggaacataaagtgcctgtatcttgtaatatttcatgtctttgtttgtttcttttgaaccatggtatttagtaaaataaatgtgacggatgt

SEQ ID NO: 2273 - DNA, 1990 bp, Cricetulus griseus
ggaggcagcggcggcgtcggggagctcggtggaggaccggccggagttccgggggccgatgccgaggaagaagcccttcagcgtgaagcagaagaagaagcagctgcaggacaagcgggagcggaagcgagggcttcaagatgggcttcgctccagttccaacagccgcagcgggagccgggagcgacgggaggagcagacggacacctcagatggggaatccgtgacccatcacatccgcaggctcaaccagcagccttcccaggggctggggccgagaggctacgatcccaaccgataccggctgcatttcgaacgggacagccgagaggaagtggagaggagaaagagagccgccagagagcaagtgctacagcctgtcagtactgaaatgctggagctggatatccgggaagtctatcagcctggttcagtcctggactttccccgacgtcctccttggagctatgagatgtccaaggagcagctaatgagccaagaggagcggagcttccaggaataccttgggaagatacatggggcatacacttcagagaaactcagctactttgagcacaacttggagacatggaggcagctatggcgggtgttagaaatgtccgacatcgtcctgctgatcactgacatccgacatccggttgtgaacttccctccagcactttatgagtatgtaactggagagcttgggctagccctggtgctggtcttgaacaaggtggatctggctccaccggcccttgtggtggcctggaagcattactttcaccagcactaccctcagctccacattgtcctgttcacctctttccctcgggactcgagaacgccacaggagcctggtggtgtcttgaagaagaatcgaaggcgggggagaggatggactcaggcgctggggccagagcagttgctaagagcctgcgaagccatcactgcggggaaagtggacttgagcagctggcgtgagaagattgctagggacatggccggggcctcctggggtaacggctctggcgaggaggaggaagaagaagatgggccagtggtcttggtagagcagcagactgactcagcgatggagcccacaggcccctccagggagcgctacaaggatggagtggtgaccatcggctgtgtgggtttccccaatgtggggaagtcctcgctgatcaacgggctggtggggcggaaggtggtgagtgtctccagaacgccaggccacacccggtacttccagacttactttctcaccccttcagtgaagctctgcgactgtccgggccttatcttcccgtctctgctgcccaggcagctgcaggttctggctggaatctaccccatctctcagatccaggagccctacactgctgtggggtacctggcctcccgaatccccgtgcaggctctgctgcacctgcgccacccagaggcggaggacccttcagcggagcacccctggtgtgcctgggacatctgcgaagcgtgggcagagaaacgaggttataaaacagccaaggcagctcgcaatgatgtgtacagagcagccaacagccttctgcggctggctgtggatggccgtctcagcctgtgcttccacccacctggttacagtgaacagagaggtacctgggagactcatgcggagacgactgagctggtggtgttgcagggtagggtggggccagcaggagatgaggaggaggaggaagaggaggaagagctgagcagctcctgtgaggaggaaggagaggaagaccgggatgctgatgaagaaggagaaggcgatgaggacaccccaacctcaggccctgggtcctgcctagctgcccgcaacccatacgccctgctgggcgagggcgagtgctgagccccccttcctgtctccattgtcctcggtagctttgcttttggactgagctggaggtcttccccatggccaccctgattgtgaataaagatggtctgctttgta

SEQ ID NO: 2274 - DNA, 1990 bp, Cricetulus griseus
  modified_base (527)..(527): a, c, t, g, unknown or other
ggaggacagaaggaagaccagcaagtcgccaaccaagccccaatctcctacgtcatcagtggaggctgagtccccagaccagaagagaagcattggcctgtggtcaaaatccagttttgatggttccactctgtcgggtgataagaatgagagtaaagccgaaagcaagacagacactaagaccgaaagaaaaaagtcttcgtcttccagccagtacaaggcgaacatttcacaagttatttcttgatgtcccaactgaagagccactgaggcaaagctttacctgtgctctccagaaagaaattctataccaaggaaagctctttgtgtcggaaaactggatttgttttcattccaaagtctttggaaaagatactaagatctctatccccgctttctcagtcaccctgataaagaaaaccaaaactgcccttctggtgccaaatgccctgatcatagcgacagtcagacctggacggagtggttcgacacgaaggcaagacatggaaggatacagcagctccggntcccagactccagaatctgagaactccccgagacttccatgtgaccgagtctcagacagttctgaatgtcaccaagggagaaacaaaaccacctcggaccgatgcccacgggaacagagcgccggatgggaaagccaagagcctgcctgtgcatggccagtcagaaactgtcgggattttgcataacgtcaagtctcagaaatgtccaactctccgccatattcttatattctatgcagttgttgtctgtgcattgatcgtctcaaccttctacatgagatacagaattaacactctggaggagcggctggggtccctgacgtccgttgtggatccatacagtactgagcagacagtcccatcgggcctgggatcacaagtccagctaaatgtggaagccctctgccaagaacttacagctaacatagtgaaattagaaaagatacaaaacaacttacaaaagctgcttgagaatggtgactgagtgacaagatgctggggccaacataatacctcatgttttccctcgaagaaggtgcttcccgagagaatctgttatgcgccccctgctggccagaggcgcaagaggctgagaatccagatgtgtttgcgcttggaggtctccagctcaggaagaggggaaagggaatgattttgcttttgtgcaatataagttgaccttgactctgctgctgctgcctgaaagaaacagacccatctcgggaggtgtgcaaggtcccagaggacgcctgtagctcaagggttatggtgatggtcagtaaacactgcactccatgcttttcagcctttcccagcctcctcttcgctccctacacccatcccaaccaaccttctgacctaaagagtacgccatataccaacaaactcaatatggtcctttaaagaattagtaaagtgaattaagtattccatttatgttacaccattttgttccccatgactagtacttaattggagtgattctgcccctcctctgaccaggaatcttagaggtgggaagctcaaatactaaactagattcactctgaaaccaaaactaatcttcaggccaaaagctgtaattgtgatttaatatgcgatggaaagtactgtttctaagattgtaagtggactacggtagccgttctgtaaccagatgtctgtgttggaccctaagtcccatctcagcatggtaaccggatgttctttctcctacaataaagcagtaagtggtggttggctaactttacttacagtatggattggatgtttttattaataattatctagggttgtaagtataaaacattctatctgcaaatgcgttttataatcatttctatgaaatgtattttgtttaatcagagaagctaataagtggattggttacgtcgtttgtatttgtcagcctactgggtaactgtgcctggtgcactggcttttaataaatactcattggctaa

SEQ ID NO: 2275 - DNA, 1989 bp, Cricetulus griseus
gcggaagctcctagccggtggcggcgatgtctagccggtctaagcggcagtctcatggttccacccgcgggaagcgcgagtccgagtcgcggggtagctcgggtcgcatcaagaaggagcgagaccgcgagcgggagccggaggcggcgagctctcggggcagtccggtccgcgtgaagcgggaagccgagccgactgcgcgagaggtcccggcgcctgcgcccccggccgtgagggtgaagcgggagcgcgaggccgacgaggactcggagcccgagcgggaggtgcgagcaaagaatggccgagtggattctgaggaccggaggagtcgtcactgcccatacctggataccattaacaggagtgtgctggacttcgactttgagaaactctgttctatttccctctcacatattaatgcatatgcctgtctggtgtgtggcaagtactttcaaggccggggcttgaagtctcatgcctacatccacagcgtccagttcagccaccacgtcttcctcaacctccatactctcaagttttactgccttcctgacaactatgagatcatcgattcctcactggaggatatcacatacgtgttgaagcctactttcacaaagcagcaaattgcaaacttggacaagcaagccaaattatcccgggcatatgatggtaccacttacctgccagggatcgtggggctgaacaacataaaagccaacgactatgcaaatgcagtgctgcaggctctgtcaaatgtccctcctcttcggaactactttctggaggaagacaattataagaacatcaagcgccctccaggggatatcatgttcctgttggtccagcgttttggcgagctgatgagaaaactctggaacccccgaaacttcaaggcacatgtttctcctcatgagatgcttcaggctgttgtgctttgcagcaagaagactttccagatcaccaaacaaggggatggagttgacttcctgtcttggtttctgaatgctctgcactcagctctgggcggcaccaagaagaagaagaagactattgtgactgatgttttccaggggtcaatgagaatattcaccaaaaagcttcctcatcctgatctgccagcggaagagaaagagcagctgctccataatgatgagtaccaagagacaatggtggagtccacgttcatgtacctgacactggaccttcccactgccccactctacaaggatgagaaggagcagctcattatcccccaggtgccgctcttcaacatcctggccaagttcaacggcatcaccgagaaggaatacaagacttacaaggagaacttcctgaagcgcttccagctcaccaagctgcctccatatctaatcttttgcatcaagagatttactaagaacaactttttcgtggagaagaatccgacaattgtcaacttccctatcacaaatgtggatctgagagaatacttatctgaagaagtccaagcagtccacaagaacaccacttatgatctcattgccaacattgtgcatgatggcaagccctccgagggctcctacaggatccacgtgcttcaccatggcaccggcaagtggtatgaattacaagaccttcaggtgactgacatcctgccccagatgatcacattgtccgaggcatacattcagatttggaagaggcgggataatgatgaaaccaaccagcagggggcttgaatgcccctgtctgccctggtgtcctgtgctgtctccactccttcctttcagcatcagcaggcagagctcctacagatggataccttcttgaattgttgcaagtatcaaagagcagataattccttggaaacatcgtcttgagattctaggaataaacatgaagctaacagcatccttctgtctatcataggtagatggttttcctatagttcctttctctcccatgggacttttggaatggattaaatatcctcctgttttaaaacca

SEQ ID NO: 2276 - DNA, 1989 bp, Cricetulus griseus
gatgctgagcctgatattattgagcaactggtggaatttgcttatactgctagaatttctgtgaatagcaacaatgtccagtcattgttagatgcagcaaatcagtaccagattgaacctgtgaagaaaatgtgtgttgattttttgaaggaacaggtggacgcatcaaattgtcttggtataagtgtgcttgcagagtgtctggactgtcctgaactgaaagcaacagcagatgactttattcaccagcattttaccgaagtttacaaaactgatgaatttctacaacttgatgtcaaacgagtaacccagcttcttagccaggacactctgactgtgagagcagaggaccaggtttatgacgctgcagtgaggtggttaaaatacgatgagcctaatcgccagccatttatggttgatatccttgctaaagtcagatttcctcttatatcgaagaatttcctaagtaaaacagtacaagctgaaccacttattcaagacaatccggaatgccttaaaatggtgataagtggaatgaggtaccatctactgtctcctgaagatcgagaagaacttgcaggtggcacaaggcctagaagaaagaaacacgattaccgcatagctctgtttggaggctcccaaccacagtcctgtagatattttaacccaaaggattacagctggacagacatccgatgcccctttgagaaacggagagatgcagcatgtgtgttttgggacaatgtagtgtacattttgggtggttctcagcttttccccataaagcgaatggattgctacaatgttgtgaaggacagctggtattccaaactgggcccgccaacacctcgagacagcctggctgcctgtgctgcagagggcaagatttatacatctggaggttcagaagtaggaaactcagctctatacttatttgagtgctatgatacaagaactgaaagttggcacacgaagcccagcatgctgactcagcgctgcagccatgggatggtggaggccaatggtctcatctatgtttgtggtggaagcttaggcaacaatgtttctgggagagtgcttagttcctgtgaagtctatgatcctgccacagagacatggactgagctgtgttcaatgattgagcccaggaagaatcatggactggtgtttgtaaaggacaagatatttgctgtgggcggccagaatggtttaggtggtctggacaatgtggaatattacgacattaaattaaatgagtggaagatggtgtccccgatgccgtggaggggtgtaacggtgaagtgtgcagcagttggctctatcatctatgtgctggcaggttttcaaggtgtaggtagattagggcacatccttgaatataacacagaaacggacaaatggattgccaattccaaagtccgtgctttcccagtcacaagttgtctaatttgtgttgttgatacttgtggagcaaatgaagagacccttgaaacatgattgagtggacctgactcatctgagactcaaaaatctggccaccaatggtttgttccattagtttggttgtgaagttctggtctggtattttgataagtaagattccaataaaatacaagtttatttcatctggatttgattacttaattcaaagaccatattttagctggccatataaccaagaagctatcagccagaaaacttgaaagttataagcatttcttgaaaaaatttcaaatgtataactgattctgacagagtggggcatgctcatcagagaagtagcccagcttagctttagattctattttcatattgtgtaagtgctgtgtagttagtctgtttgtttctgtttggtcaacactaagtagtagtatggattatatttcaagatggcaaagtctgataaagtaactgtatgtagtattacgtattttgcttgtcttcatttatttcacttagtgccaaactattccattctaaagtaaacaa

SEQ ID NO: 2277 - DNA, 1989 bp, Cricetulus griseus
ggtcctgctgccttaaagatgacagtcctagggcaccctcgaagttggagctgccagtgtttgccagtcctgatactgttgctgggcacaggccatgggccaggggtggaaggtgtgacacactacaagcccggcgaccctgtcattctatatgtcaacaaagtgggaccctaccataaccctcaggaaacttaccactactatcagcttccagtctgctgtcctgagaagatccgtcacaaaagtcttagtttgggtgaagtgctggatggggaccgaatggccgaatctttgtacgagatccgctttcgggagaatgtggagaagaaaattctgtgccacatgcagctcagttctgcacaggtggaacagctgcgacaggccattgaggaattgtattactttgaatttgtggtagatgacttgccaatccgtggttttgtgggctacatggaagagagtggcttcctgccacatagccacaagataggcctctggacacatttggacttccacctagaattccatggagatcgaattatatttgccaatgtttcagttcgggatgtcaagccccacagcttggatgggttacgatctgatgaattcctaggccttactcacacttacagtgtgcgctggtctgagacttcagtggagcgtcggagtgaccggcgccgtggtgatgatggtggcttctttcctcgaacactggaaatccattggttgtccatcatcaactccatggtgcttgtgtttttactggtgggttttgtggctgtcattctaatgcgtgtgctacgaaatgacctggctcggtacaacctagatgaagagaccagctctggaggctctagcgatgactttgaccagggtgataatggctggaaaattatccatacagatgtcttccgcttccctccataccgtggtctgctctgtgctgttcttggtgtgggcgcccagttcctggcccttggcacgggcattattgtcatggcgttactgggcatgttcaatgtgcatcgtcatggagccattaactcagcagccatcttgttatatgctctgacctgctgcatctctggctatgtgtcaagccacttctaccggcagattggaggcgagcgttgggtgtggaacatcatcctcaccaccagtctcttctctgtgcctttcttcttgacgtggagcgtggtgaactcagtgcattgggccaatggttcgacacaggctctaccagccacaaccatcctgctgcttctgacagtttggctgctggtaggctttcctctcactgtcatcggaggcatcttcgggaagaacaacgctagtccctttgatgcaccttgtcgaaccaagaatatcgcccgggagatcccaccccaaccctggtacaaatctactgtcatccacatgactgttggtggcttcttgcctttcagtgccatctctgtggagctgtactacatctttgccacggtctggggccgagagcagtacactttgtatggcatcctcttctttgtcttcgccatcctgctgagtgtgggggcttgcatctccatcgcactcacctacttccaattgtcaggggaagattaccgctggtggtggcgatccgtgctaagcgttggctccacgggacttttcattttcctctactccgttttctactatgcccggcgctctaacatgtcaggggcagtacagacagtagagttctttggctactctttactgactggttatgtcttcttcctcatgctgggcaccatctcctttttttcttccttaaagttcatccgttatatctatgttaacctcaagatggactgagctctgagtgacagaactattgctctcctcctgcttacatcatgccccactgattccactcgatagcttctgactgaattgtgtgatggcaattgccgccttccttccctcaatctctatgatataaggatatatatttgaactttatta

SEQ ID NO: 2278 - DNA, 1989 bp, Cricetulus griseus
gcctgcttaccatcctgggcagcccgtccccggatcgcatgggcccggccgactcgttgccacccacaccgcccagcggcacgccgtcaccggggccgcccccacgctacctctgcccgcgcccgccctgctggccgacggcgactgggagagccgcgaggagctgcggctgcgggagctggaggaggcacgcgcgcgagccgcgcaaatggagaaaacaatgcgctggtggtccgactgcacggcgaactggcgcgagaagtggagcaaggtgcgcgctgagcgcaaccgtgcgcgcgaggaggtgcgccagctgcgccagcgcctggacacactcaccaaggagttggctggcgcgcgccgcgagcgccaggaggctcagggcgagtgcgaggcgcgcggacgtgagctggcccggctgcggggagcgcatggcacggtggacaaggacacacgacggcccggagcctgagcgcgagcatgagcctgtgcgcgacatcggggcggagaggccgcctggcagccaggagctggacctggtggagagcctgctgaagagcagaccagaggagactgaaggctgctgggatgcctgcagtatggcagctgggggctctcgagccagctcaggccgccaggatcgcaaccgcctgccctgggaggatacagccagtacagaggaggatgcttccaagctgactgccctgcggctccggctggatgaatcccagaaggtgctgcttaaggaacgagaggataaactggctctgagcaggagcatcgagaagctggagggagagcttagccagtggaagatcaagtatgaggagctgagcaagaccaagcaggaggtgctcaagcaactcagcatcctaaaggaaacacaccaggatgaactgggccgcatgtctgaagacctggaggatgagctgggcgcacgctccagcatggatcgcaagatggctgaactgaggggtgagatggaaaggcttcaggcagagaatgcagctgagtggggccgcagagagaggctggagacggagaagttgggcctggagagggagaacaagaagctgcgtgcacaggttggagacctggaggaggccctggctcgcagacggcgtcagaatgccagtgccctggattgtgatctgagggccagccaggccgctctcttcgagaagaacaaggagctggcagacctgaagcatttgcatggcaagctcaagaagcagtttcaggagaaggtggcagagctggcacacgccaatcggcgtgtggaacagcacgagacggaggtaaagaagctgcggctgcgggtggaagagctcaagaaagaactggcccaggcggaggacgagctggatgaggcccacaaccaggcacggaagctgcagcggtcactggacgagcagacagagcagagcgagaacctccaggtgcagctggaacacctgcagtccaggctccgcaggcaacagcaaaatgcccccctttttgggaagatccgcagtacccgatttggcaccgaggaagccggagatggagccagcgacctagatgaggatgaggacctgcaaatccaggtggcctagaacatccggggcagaacaggactggcctgaagccacagatgcccagatgagcatccactcaaaccaaattgtgcagctcttcatgctctctgcactcccttgggtcccatcccactgttggggacgacttcctcctctcccaggaaggctgcactctcacctactcataccccatggatggggaacctgttggatttgtatatgtatatatgcccagggttgcttggacccattcgatttttataaacacaggacccagttcctaagaccccatctgcataggacttcatgcaaggatggagcatatggagggaggcttggtggtctggcaggggctattcataataagataccatgaactcagacttttgtaataaatggagttcaagctctc

SEQ ID NO: 2279 - DNA, 1989 bp, Cricetulus griseus
agccaggccagcatgtccccaaagcggagtgcgtgctgggtggcgctggccccgctgctgtgcagttgcgccctggcgctgcagggtgggatgctcttccccagggagagcccgtcgcgggaggtcaaggctctggacgggactgtggcgcttccgcgctgacttctcggaaaaccggctgcaaggattcgaacagcagtggtaccgacagccgctgagggagtctggcccaactttggacatgccagtcccttccagcttcaatgacatcacccaagaggcccggcttcggaactttattggctgggtgtggtatgagcgggaagcaatcctaccacagcgatggacccaagacatggatatgagagtggtgctgaggatcaacagtgcccattactatgctgttgtgtgggtgaatgggattcatgtggtggagcacgaagggggccatctcccctttgaagctgacatcagcaagctggtccagagtgggcccctgaccacctgcagggtcaccattgccatcaacaacacactgacccctcataccctgcctccagggtccatcatctacaaggctgatacctccatgtatcccaagggttactttgtccaggacataaactttgacttcttcaactatgcgggactgcatcggtctgtggttctctacaccacccctaccacctacatcgacgatattactgtgaccactaatgtggaacaagacatcgggttggtagattactggatttccgtcaagggcaatgaacatttccagctagaagttcgtcttttggatgaggatggcaaagtcgtggcccaggaaacaggggaccagggtcagcttcgggtgccaggtgccaacctctggtggccttacctgatgcatgaccatccagcctacctgtactccttggaggcgaggatgacaacagctgggcctgtgtctgacttctataccctccctgttgggattcgaacggtggctgtcacagagagcaagttcctcataaacgggaaacctttctatttccatggcgtcaacaagcacgaggattcagatatccgagggaagggctttgactggccactgctgatgaaggatttcaatctactctattggcttggtgccaactcctttcgtaccagccactacccctactccgaagaggtactgcagctctgtgatagatacggaattgtggtcattgatgagtgccctggtgtgggcatcgtgctgccccagagtcttggcaacgagtctcttcggcaccacctagaggtgatggaggaactggtacgcagggacaaaaatcaccctgcggttgtgatgtggtctgtggccaatgagccttcttctgctctgaaacctgccggttattacttcaagacgctgatcacccacaccaaaaccctggaccccacccgtcctgtgacctttgtgaccaacaccaaatatgatgcagacttgggggccccatacgtggatgtgatctgtgtgaacagctacttctcctggtatcatgactatgggcatctggaggtgatccagccacagctgaagagccaatttgagaactggtataagactcacaagaagccagttatccagagcgaatatggagcagaagcaattgcagggtttcacgaggatccacctctcatgttcagtgaggagtaccagaaagctctcctggagaactatcactcggttttcgatcagaaacgaaaagaatacatggttggagagctcatttggaattttgctgactttatgaccaaccagacaccaatgagagtaatagggaacaagaaggggatcttcactcgccagagacaccccaaaaatgtggcatttattttgcgagagagatactggaggattgccaatgaaaccagacatcaccattcagtgccaaggacgcagtgtttgggaaccagaccattcacattctaaagctagaactacctcactgcagacccaaa

SEQ ID NO: 2280 - DNA, 1988 bp, Cricetulus griseus
ggagcgagcggctggagcagcgcgtcctcggtgcagaaaaacctgcaaaaatgtctctttatccatctcttgaagatttgaaggtagacaaagtaattcaggctcagactgccttttcttctggccctgccacccaggcagttttggtggatgtttctggtgcttaccctacagatggaaatctctatcctaaactgtatccagagctctcccaatacatgggactgactttaagtgaagaagaaatatgtgcaaatatgcccatggtctctggagcaccaacccaagggcagttggtagcaagaccatccagtgtgaactatatggtagcacctgtgacaggtaacgatgctggaattcggagagcagaaattaaacaagggattcgtgaagttattctgtgtaaggatcaagatggaaaaattgggctcagacttaagtcaatagataatggtatatttgttcagctagtccaggcaaattccccagcctccttggttggtctgagatttggggaccaggtactgcagatcaatggggacaactgtgcgggctggagctctgataaggcacacaaggtgctcaagcaggcatttggagaaaagatcaccatgaccattcgggacaggccctttgagcggacaattactatgcataaggacagcagtggacatgttggttttatctttaaaagtggaaaaatcacatccatagtgaaagatagttctgctgccagaaatggccttctcactgatcatcacatctgtgagataaacgggcagaacgtcattggcttgaaggattctcagattgcagacatactgtcaacagctgggactgtagttaccattacaatcatgcctgcttttatctttgaacatattattaaacggatggcaccaagcattatgaaaagcctgatggatcacaccattcccgaggtttagaaactttgaacaacgcattacagctgaatgtttccagttttcttcttcggcaacttctatattttgcatatgaagctttccgggagccagggagaatatgctgcatggggacctgtctatcttccatcatggctgggaacctcactctatctgatgtcttctgcagattttaagatagttgtagccttatcctggttttacagatgtgaaactacttactgactttcctagaatcgtttctttactggaaacctgatgtttttataagccattgtggttaggatgactggtgtaggcttagctgtgtgataagtggtcacctttgtcctagatgaagcacagtgctagtcgtgtgcttcacttctgtggcacacctggatttttagaacatcagcatagtacattgaggatgattgcctttggtagttacttttaagttttctctgtatgagtgtgtaaaattccagttaatcaactctggtttcattccacaaaagcattatatattgtgtgtactttgcaaaagactgtcatgattgtcactaaattttaactaccttcacttaatatgcttcaactgtcgccttaactacagcaagcatttagaataaaagccaaaatagaattattgctgccttctgagacctgagtgttagctctctattaagctggtacctgccagccccaagcagctcactgctaagcagagctgcctagttgtatggagattttctagtcactgcataaaggaaacgcctaaaagttgccgtatcgctttctgaaaaataaatcgctatatatttcatgcaaacattgttatagaaacagaacaaatttgggggtcgccttttcacttgtagattatgtgggcaatattaatttggcatttgaatcctaatattatgtaatttagtcactttggggtcatcttagaatgtttccctagccattttaatttgttctattttctgattccgtcctctaaacaaaaatgacaatgacactttatcattttttttttcttggtttatgcctatccta

SEQ ID NO: 2281 - DNA, 1988 bp, Cricetulus griseus
tgcgccctgtaacgccaacaaagcctcgcgtttcggttgcctgccgcgctcctcagttctgtcgggtggaacagccccggaggcctccatcctcttcccagaggtgtcggggcttggcccccgcctccatcttcgcggctcaggatggcgagcagcagtggctccaaggccgaatttatcgtcggggggaaatacaaactggtgcggaagatcggatctggctccttcggggacatttatctggcgatcaacatcaccaatggcgaggaagtggcagtgaagctagaatcccagaaggccaggcatccccagttgctgtacgagagcaaactgtataagattcttcaaggtggggttggcatccctcacatacggtggtatggacaagaaaaagactataatgtgctagtcatggatcttctggggcccagccttgaagatctcttcaatttctgttcaagaaggttcactatgaagaccgtacttatgttagctgaccagatgatcagtagaattgaatatgtgcatacaaagaattttatacacagagacataaaaccagataacttcctaatgggtattgggcgtcactgtaataagttattccttattgattttggtttggccaaaaagtacagagacaacaggacaaggcaacacataccatacagagaagataaaaacctcactggcactgcccggtatgctagcatcaatgcacatcttggtattgagcagagtcgccgagacgacatggaatctttaggatatgttttgatgtattttaatagaaccagtctgccatggcaagggctaaaggctgcaacaaagaaacaaaaatatgaaaagattagtgaaaagaagatgtccactcctgttgaagttttgtgtaaggggtttcctgcagaatttgccatgtacttaaattactgtcgtgggctgcgctttgaggaagctccggattacatgtatctgaggcagctattccgcatccttttcaggaccctgaaccaccaatatgactacacatttgattggacaatgttaaagcagaaagcggcacagcaggcagcctcttccagtgggcagggtcagcaggcccaaacccccacaggtttctaggcatgaattgaggaagagaagcagcagagcagatgattggagcagcatttgtttctcccaaaactagacattttagttcatatgtacactagccagtggttgtggacaaccatttacttggtgtaaagaacttactttaagtataaactggccccggacagcattgctgatgctgatcctgcgctatagccgctgtaattgtgaatattaactgaggtagtgaaacatggtgtctggttttctattgcattttttttaagtgttaaagttaactaaaggttaacacaaattggtgcacacgaattgtgtggagaaattgtatatgccaattttttgttaaaaccttttattttgaactagactgctttgagatctcatttcagaagaacggcatgaacagtcttcagccacagttgtgatggttgtaaatgttcacaattgtgtgttcttagggttttccatccctggggtttgcaagttgttgacttaaaacattctttaaacggctggcttcttgtttgcaagccagctgatatggtagcaaccaaagattccagtgtttgagcatttgaaagactctgcctgcttacctgtactagaaataacagcatctaaagtgaagacttaagaaaaaaaacatagcgactactagattatccttaggactctgcattaactctataatgttcttgctattaaaaaagcatatttgtcacagaaatttagttaccgtcttacaactgaacatgtatgtgtgttgcttagataaatgtaatcactgtaaacatctatatgatctgggattttgtttttattttgaaatgggagctttttgtttacaagttcattaaaaactaaaaactgtt

SEQ ID NO: 2282 - DNA, 1988 bp, Cricetulus griseus
cccttgtcattcccctgcttggagccatgatgctattggagtcccccatagatcctcagattctcagcttcaaagaaccccctttgatgtttggcgttctgcaaccaaatacaaagttgcgacaagcagaaaggctatttgaaaaccaacttagtgggccagagtccttggtaaatatcggggatgtgatgtttactggcacagcagatggcagagtggtaaaacttgaaaatggggaaatagagaccatcgcccggtttggttcaggcccttgtaaaacccgaaatgatgaacctacgtgtgggagacccctgggcatccgggcagggcccaatgggactctttttgtggttgatgcgtacaagggattattcgaagtaaatcctcagaaacgtgcagtgaaactgttgctgtcctctgagactctcattgagggcaagaaaatgtcctttgtgaatgatctcactgtcactcgggatgggaggaagatttatttcacagattccagcagcaagtggcagagacgggactacctgctcctggtgatggagggcactgatgatgggcgcctgttggagtacgatactgtgacaagagaagtgaaggttttgctggaccagttgcggttccctaatggagttcaactgtctcccgaggaagactttgttctggtggcagagacaaccatggccaggataagaagagtctatgtgtctggcctgatgaaaggaggggcagatatgtttgtggagaacatgcctggatttcctgacaatatccggcccagcagctctggcgggtactgggttgctgctgcgacaattcgtgctaaccctgggttttccatgttggatttcttatctgagaagccttttattaagagaatgattttcaagctgttcagtcaggagacggtgatgaagtttgtgccacggtatagcctggtcctagaagtcagtgacagtggtgccttccggagaagcctgcatgaccctgatggggtggtggtcacctatgtgagtgaagcccatgagcacgatggacatctctacttgggttccttcaggtctcccttcatctgcagactcagcctccaggctatttagccagcccagcagctgttcccactgtgcatgccaggaatcatcacactcagccaccataggtccggagggagccatggacatagctttatccctgtgctcctgatagcccttggaagtgcgggagtagctgctgtaacctggagaaggtcaagaggtgcccctcacctggacttgatgtcacttttagagggaaacagtgtatctgctgtggggaagacagctcacagaaagccatttctcttcaaaaatatgctaagtacacaaattctgtaggacttggaagatttcatatacttgtcaaagggctcagggtttggtgattagagtaggggattagctatgcagggacctttctgtcatgagtagctctgtctgccatgttcagtgtcttcattctaaagtggggtcttacctttggggatggcatgcaagtgccagtgcaggtgtgatgaggttgctggctgggatcatgcaagctgaaactttgttctcaggggccacgtgagatgtgtgagaatacgtggacttcttcctccacagtaaaggggtgccctaccaccatctccatgctgtggcctggcctcttttcgtgccagagggttttcagaattcctatttcagtggctaagagggttgcattgggcttctttctgtgactacctcctccactggagttgggtgacccagccagtctgtacctgcacagggtgcttcagaaatgtcctttttatggcttgactccttatcttagacccacaaaaatgtgagtagtgacctgttgatgtaatgtttgtgcaatgtaataagcttggagttgcttatttcttggcaaatatgtttatacactggtcttaattttgataataaataaataatataaaa

SEQ ID NO: 2283 - DNA, 1987 bp, Cricetulus griseus
aagctgaaccgcgcagttcagtcagaggacgatgcccggcaggatgtcatccaagatgtggagatcagtcggaaggtatacaagggaatgctagacctcctcaagtgcacagtccttagtctcgagcagtcctatgcccacgcaggtctgggcggcatggccagcatctttgggcttttggagattgcccagacccactactatagtaaagaaccagacaaacggaagagaagtccaacagagaatataaatacccctgttggcaaggaccctggcctggctgggcggggggacccaaaggctatggcacagctaagggtccctcagctgggtcctcgggcaccaagtgctacaggaaagggtcctaaagaactggataccagaagtttaaaggaagagaattttgtagcatctgttggcattcttagatgctgtgatgttggaaagagaagggatgggtatggaccagggtcctcaggaaatgatcgacaggtacctgtccctaggagaacatgaccggaagcgcctggaggatgatgaagatcgtttgctggccacacttttacacaacctcatatcttatatgctactgatgaaggtgaacaagaatgacatcaggaagaaagtgcggcgcctgatgggaaagtcccacattggtcttgtatacagccagcaaatcaatgaagtgcttgatcagctgaccaatctgagtggacgtgatctctccatccggtccagtggcagccggcacatgaagaagcagacatttgtggtacacgcagggacagacacaaatggagacatctttttcatggaagtgtgtgatgactgtgtggtgttgcgcagtaacattgggacagtgtatgagcgctggtggtacgagaagctcatcaacatgacctactgtcccaagaccaaggtcctgtgtttgtggcgtagaaatggctctgagacccagctcaacaagttctatactaagaagtgtcgggagctatactactgcgtgaaggacagcatggagcgtgcagctgccaggcaacaaagcatcaagcccgggcctgaactaggtggtgagttccctgtgcaggacatgaagactggagagggtggcttgcttcaagtcaccctggaagggatcaatctcaagttcatgcacaaccagttcctgaaattaaagaagtggtgagccacaagtacaagacaccaatggcccatgagatctgctactctgtgttgtgtctcttctcgtatgtggctgcagttcgtagcagtgaagaagacctccgagccccacctcggcctgtctctagctgatagagagggttacacagctggcccagcccaggggtcacccctcacctcttgctgctcttctgcgccaaagctgctggctcaagagtgtgtgtgtgtgtgtgtgtgtgtgtgtgtgtgtgtgtgtgtgtggtgtgtgtggtgtgtgtgtctgtggggccactgtgagcccaccattgacctgggacagttccgctctgggaagtgagagatacttggggccagccttcctggctgagggttgggcaggaggaggacaggaggattcaggggaagctggggttaatggcaaacttcctgcttcctcacacaattcctaaactggccacaggtcatgctgctgcctgccccaactccatcagccaaatagtgttcccgagtgactgccatgtgctgagttgggatttttacagtgatcttcctggcctttggcatgaaattacagaggggttagggtgatggttttccagtggccaccagctactctgcctaagagccatggaagggtgggtcacagccaagttgagtccagcacatgtgcctgtctgcaggcagtgtctcctggcttcagtgccaggaggaagatacggactggacagatggaatgtaaatatttcagctctgcattatttatagacaatgtacagctgtgtgatgtgaaataaacgtccttaac

SEQ ID NO: 2284 - DNA, 1987 bp, Cricetulus griseus
agccggggaacacggccggagcgaggacgcgggctgtggggccgccgcgtgcccggccccgctcgcccgtgcccgccgccagcccgccatgcccggcctggagaagcccaagcggcggctgctgtgcccactgtgcgggaagcccatgcgcgagcccgtgcaggtgtctacttgcggccaccgcttctgcgacacctgcctgcaggagttcctcagtgaaggagtcttcaaatgccccgaggaccagcttcctctggactatgccaagatctacccagacccagagctggaggtccaagtgttaggcctgcctatccgctgcatccatagtgaggagggctgccgctggagtgggcaacttcgccatctacagggccacttgaacacttgcagcttcaatgtagtcccctgccccaatcgctgtccagccaagctgagccgtcgtgatctgcctgctcacttgcagcacgactgccctaaacgccgcctcaagtgtgaattctgtggctgtgactttagtggggaggcctacgagagtcacgagggcatgtgtccccaagagagtgtgtactgtgagaacaagtgtggtgcccgcatgatgaggcgactgttggcccagcatgccacttctgagtgccccaagcgcacccagccttgtgcctactgtaccaaggagtttgtttttgataccatccagagccatcagtaccagtgcccacggctgcctgttccctgccccaatcaatgtggtgtgggcactgtggctcgggaggacctgcccagccatctgaaggacagctgcagcactgccttggtgctctgccctttcaaagagtctggctgcaagcacaggtgccctaagctggcaatggcacgtcacgtggaggagagtgtaaagccacatctggctatgatgtgtgccctggtgagtcggcagcggcaagaactgcaggagcttcggagagagctggaggagctatccataggcagtgatggagtgctcatctggaagattggcagctatgggcggcgtctccaagaggccaaggccaagcctaacctggagtgcttcagtccggccttctatacacataagtatggctacaagctgcaggtgtctgcgttcctcaatggcaacggcagtggtgagggcacacatctctctatctacatccgtgtgttaccaggcgcctttgacaatcttcttgagtggccctttgcccgccgggtcaccttctccctgttggatcagagcgacccaggtctggccaagccacagcatgtcacggagaccttccaccctgatccaaactggaagaacttccaaaagcctggcacttggcgaggctccctggatgaaagttctctgggttttggctaccccaaattcatctcccaccaggacatccggaagcgaaattatgtgcgggatgacgcagtcttcatccgtgcctctgttgaactgccccggaagatcctcagctgagtggagctttctgggcttaagcgggaagggaggtgggacagggactggagagggggccggaccctctttcttcttttgcctaggttactagcccaccaccctctccctaccaccaccaccaccaccatccctacccctcaggtgcctccaattggtgcttcagccctggcccctggggggagcaggtctcggggttatcaagggctggaaacaagtgatcccagggcctgtctcccctcctgggcagggcagacatgccttggtgccagccacattctacctggactgaggtgcctgctcaggtgctatatcccaagagccatagttggggtggggggtattggaaaagggaggggtagttgtaagattctgccttgagattaatgtctccttccttacccagtgtcgccctctctggttatttatttctttagtgctaggagggcacagcaggggaactcttgatttttaataaatcctgaattgtatttattaacttga

SEQ ID NO: 2285 - DNA, 1987 bp, Cricetulus griseus
ggaccatccacagatgctgacggaggtgctgcgtggaccctgtccaccgctgcgctgagcatgggctctggcataagccagtgcaactgcagcagcaccgctgtccatgcccaccctacactcagaaggtgctgtgttagtgtgtaagccctggtccccaagaacacagtcatctcccctgactgcggaggaatttaggcactggggctcacagcagctgtcctctccgcacacacacagaaggaagaacagaactacgttgacaggttccgggagaggatcctaacctcaccctacagttgttaccttcagcaggagagcagaaacaacgctaagtgctcttctgttcaaggctctcctcctaagcagagcagatgtgctggaaaggagagacggaagcacaaacggaagaggttgccggtgcctttgggcaccagttccccgcagcactagtagctcccagccaggccccttatgttctttcatcttttcccttcccagatgtggcctctctgggagtaggggacgtctgcaggctgggagctgctgttgaactgcccacctctgtccacaggccctcagtctgttccggctttcccttctgcctacttggacacattcacgaccatcttcctacacaactcccccatctttcctctgtggtcagcgtcattcccctcgtatccattcctgggggccacagcttcttctggaatgacacccttagtaccagcaatggctccacacctggaaccaacttcttcagaccacagccaaaggagagtgggggaaagctgggagacacacggtgaagagcatccatttatcagctcaaggagcagttcgccattacagttaaatttactccaggaagagatgcctgcaccgtctgaatctccagatccagtgagaaagggcattggcccagagtctgagtgtcactgtatcacagggaacagtggcagtaggagcggtccctgtgccaccggtgaactagccgcagcatcagtacaccaggagtctcagtctgcagctgcctcaggaagcagtgccagcagtatgtacttcagtagcagcgactattctgaattttctgaaaatggacagaagtcccaggatagacagagagatgaagcctttcccggggtggcggaagagtccatctggagaatgatagaacaaacaccagagtgtgttctcatgacataccaggtgcccaagaggggaagggaagaggtgctgagagaagacctggagaagctgagcagcatggagcagcagcagccccagttctcccctgcacagaaggaggagctggccaaggtgcgctcctggatccacagccagaccgcccctcaacggaagacacctccaaaattgtgtcgcctgtgaagacagaggttcagctggtaacactgctgaggcccacgaacagcacccaggagaagacaccagttgagcaactgtgaagatgtctttctttgccttcgacacatcttatggactatgtattatccaggcttgatggaaactggtgcttgtagtcaggtctgtaaagcctttaaccaagtttcccctccactagggatgtcgtcagtgcactcagatccagcccctgctgctgaggtgtccagcagaactggctgccccccgtgggggccataccctgtggagactctgttgttcaaacttactttttgtattaataactattgaactggtaacaaaagtatgtattgtagacttcagtgtttacatgactctttcccccaaagctttattttcttgggtcacatgtcagaatttaagaaaacaagatgttgtgtgaatggattaaatgaaacatcattataatttacaagatggtattttaatcagattggcaatttgtttatagttgtgaatttgcttgtacttaatggttattaatcttttgattgggtatctttttggagtaaaaacaataaagagtatatgtgtaaaagtg

SEQ ID NO: 2286 - DNA, 1987 bp, Cricetulus griseus
gccgcgggatcgccgagggagttcacagctctgtttttacgaagcttcactaccagagcactatgaatgttaatgacctcaaactcaggttgtccaaagctgggcaagagcacctgctgcggttttggaatgagttggaagaagcccaacagacagaactttatatggagctccaggccatgaactttgaagagttgaacttatttttccagaaggccattggaggatttgatcattcctctcaccaagaaaaggtggatacccgaatggagcctgtgccccgagaggtgttgggcagtgctaccagagatcaagaccagctgcaggcctgggagaatgaaggactttcccagatttctcggaacaaagtagcagttctccttctggctggagggcaggggacaagacttggagttgcttatcccaagggcatgtatgatgttggcttgccatcccacaagacactttttcagattcaagcagaacgtattctgaagctacagcggttagcggaaaagcagtatggcaacaagtgtgtcattccatggtatataatgaccagcggtagaacaatggaatccacgaaggagttctttatgaagcacaagtactttggcttacaaaaggagaatgtggtcttttttcagcagggaatgctgccagctatgagttttgatgggaaaattatcttggaagagaaaaacaaagtctctatggctccagatgggaatggtggtctttaccgggctcttgcagcccaaaatattgtggaagacatggagcaaagaggcatctggagtattcatgtctattgtgtggacaacatattggtaaaagtggcagacccacgcttcattggattctgcattcagaaaggagcagattgtggagcaaaggtggtagagaaaacaaaccccacagagccagttggagtggtttgcagagtggatggcgtttaccaggtggtagaatacagtgagatttctctggcgacagctcagaaacgaagctcagatggacgactgctgttcaacgcaggaaacattgctaaccatttcttcaccgtaccatttctgaaagatgttgtcaatgtttatgaacctcagttgcagcaccatgtggctcagaagaagatcccatatgtggactcccaggggcactcaattaagccagacaagccaaatggaataaagatggaaaaatttgtctttgacatcttccagtttgcaaagaagtttgtggtgtatgaagtattacgggaagacgagttctccccactcaagaatgcagacagtcagaatgggaaggacaacccgaccactgcaaggcatgctttgatgtcccttcatcattgctgggtcctcaatgctgggggacacttcatagatgaaaatggctctcgcctcccggcaattccccgtgctacaaatggaaagtctgagaccatcacagctgatgtcaatcacaacttgaaagatgccaatgatgtaccaatccagtgtgaaatctctcctctcatctcctatgctggagaagggctagaaggctatgtggcagataaagaattccatgcacctttaatcattgatgagaacggagtccatgagctggtgaaaaatggcctatgaatcctaaagtgagctctgccacatgggagtcttgtttttgatagaccaactgtgaacctgcgggaccttgattctcagctcactgaaggtcttatttatatttcctaactgtctaagttcttccaagccaaggcttacattggccatccacaaaacttcctcagcttgactctgtttgggatggtgagcatgacttcacttggggctggaagcttttgcttttgaagttgtacatagtgataatgagtcattgtacatttcaaaaggtttctatggtactaaaattttgttttattttatcaagcattaaagttttttaagaaaataactggacaacaaaataaaattatcttcttgtc

SEQ ID NO: 2287 - DNA, 1986 bp, Cricetulus griseus
gaagcttaagtgaaaatggtacatgttagaagacacgaaacaaggaaaaattctaaaactcaagtacctgagcaaaaatctcgagttgattggcgtcgaactaaaagaagtatctcacagttatttgatagtgatgaagaacttgatagtgatgaggaacttgaagttgatagtgatgaagagcttgagagtggtgaaagtgttgatagtggtgaagagcttgatagtagcaacgaatcctggtattagtgaaataccagaaaaggaaacagagcctaaattaatcaaagttgaaactgagggaagcaacagtaaacctcttacaaacaccagcaatagttcaacagatgaagaaaaaatgaacaaaactgaacatgatttaccagacgatgaaaatcgtccatcaggtcaagagaagggtgatgtcaacaggcataccaaacaaagcgtagaggaggatatggaagatgaatacatcaagcctggaaaaagaaaaaggctgtcttctgtaatgtatgacagtgatgagattacaaataatgatgaaaatggagatgattatatgattgatgattttgtagtacaagatgaggaaggtgatgaagaagaataaaaaatacaaacaaaggaagaaatttgactacatcacaactgaaattagtaaaacagaattctctttattcttttagtgaccactatactcactttgaaacagttgtgaaggctcttctgatcaatgctttcgatgaatcttttctggaaaccttgtatgctggcaccaggaagaagtcgtatgcacaagatatgttgacatctcttcattatttggataatcgctttattcaaccccgtctagagagtttagtctcaagaagtcgatggaaagaacaatataaggagcgagttgaaagctactctacactaagtatccattcaaagaaccctgcggactgctcctgccaggcttgtgggctgcatcgccactgtgtatactcagtgcatctctcaggaaagctgtacaacaccaggacaatggagacagatgatttcatgtcacatgacaagcaggtatttactgttggcagaatttgtgctgatcgcaccagaatttatcataaactaaaacattttaaaattcaaactgtaccaagaatgttgctccattgccaaaacagaagaagatggagatgaacaggttaaagaaacagtaggaagagtcttcagtcagtcaaaagaaagcggctggattagaaagaaatatgatcaactgcaagactatctcaattctgcggattactttcaagatgagaagtttgaattatagcaggtttccttcagagaagattgtataagtttctgtaaatgtgaagatcatgagttttgtttctctgtatcatgtaacattgttgtatattctaaaattcttgtttatatctcatctgattttcatgaaatgccacagtgaagtctaataaagcctgcatagatgtacatggagaacatcagatttgtgattcaaaatccatcaatgtatttggtcatgtattgatgattttctcataaatgacctacaattgaatgttctatcatgtcctcctgtcagtttagtagaaataggctgtattaaaatatatttggactgacctggagatggctcagtcagtataatacctgccttacaagtacaaggacctgagttcagtcctgtgtcaacttgacacaagccggggtcatcagaagaaggagcctcagctgaggaaacgcctccataagatccagctgtaaggcattttctccattaaaggtcgacggggtagggcacagcccattgtgggtggagccatccctgggcaggtggtcctgggttctgtaagaagcaggctgagcaagtcatgaggagcaagccagtaagcagcactctccatggcctctgcatcagctcctgtgattttcaccataaaaaaaaaaaaaaaaaaaaaaaaaaaa

SEQ ID NO: 2288 - DNA, 1985 bp, Cricetulus griseus
gtgaagcttgccacagaaccactggaacaggctatgcactctggacccgtctggagaggaagtagaaagccgtgtgcaggtattgctggaggaagcaaaggacttgctctctgactggctggattctacaggtggcagtgaggtgactgacaattctattttctccaaactgcccaagttctgggaagaagagtttccacagagacatggaagccctgaatgttctccctcctgatgtcctgacccgggtcagcgagtatgtgccagaaattgtggacttcgtccaaaagattgtggacaatggttatggctatgcttcaaatgggtcagtctactttgacacagccaagtttgctgctagtgaaaagcactccgtatgggaagctggtgcctgaggctgttggggaccagaaagctcttcaggaaggggaaggtgacctgagcatctcctctgaccgcctcagtgagaaacgctctcccaacgactttgccctgtggaaggcctccaagccaggagagccatcctggccttgtccctggggaaagggtcgtccaggatggcacatagagtgctccgctatggcaggcacactcctgggagcctcaatggacattcatggcggagggtttgacctccgcttcccccaccatgacaatgagctggcacagtcagaggcttactttgaaaatgactgctgggtcaggtactttttgcacacgggccacctgacgatagcaggttgcaagatgtccaagtcactgaaaaacttcatcaccatcaaagacgccttaaagaagcactcagctcggcagctgcggctggcattcctcatgcactcttggaaagacacactggactattcctgcaacactatggagtctgcacttcagtatgaaaagttcatgaatgagtttttcttaaacgtgaaagacatcctccgagcccctgtagacatcactggccagtttgaaaagtgggaagctgaagaggtggagctcaataagaacttttatgacaagaagacagcagttcatgaagccttatgtgataacatcgacacccgcactgtcatggaggagatgcgggctttggtcagtcagtgcaacctctacatggcagccaggaaggctgaaaggaggaggcccaaccgggctctgctggagagcattgccatgtacctcacccgcatgctgaagatctttggggccatagaggaggagagccccctgggtttcccagttggtgggcctggaaccaacctgaatctggagtccaccatcatgccctacctgcagatattgtcggaattcagagaaggtgtgaggaagattgcccgagagaagaaagtccttgaggttctacagctcagtgatgctctccgggatgacatcctgcctgaacttggggttcggtttgaagaccatgaaggactgccaacagtggtgaagttggtagaccgagacaccttactgaaagagaaggaagagaagaaaagggctgaagaagagaagaggaggaagaaagaggaggcagccaggaggaaacaggagcaagaagcagcaaagctggccaagatgaagattgcacccagtgagatgttcctgtcagaaaccgacaagtattccaagtttgatgaaaatggtctgcctacccacgacactgaaggcaaagagctgagcaaggggcaggtcaagaaactgaagaaggtctttgaagcccaggagaaactgtacaaggagtatctgcagatgttgcagaatggcagcctccagtgatgccacagcagcccagcagtatacctgccagtctggccaccatggattgtggccacacctactcaggccctgtgccctggtcatgtttacagctgttctcacacctgaatcaggcagagtggcagcagctctgggacattgataataaattcttctgaacactgaaaaaaaaaaaaaaaaaaaaaaaaaaaaaaaaaaaaaaaaaaaaa

SEQ ID NO: 2289 - DNA, 1985 bp, Cricetulus griseus
  modified_base (30)..(30): a, c, t, g, unknown or other
gctgcaggattccagtcttgttatgagtcncttgctctccatcttggcaggaagaggaaggaagcagagtacacactgggcttctggaagacctttcctggaaaaatgacggattcattgaggaagcctgagcgccgactgctgtgtgagagcagtaaccgagccctgtcgctacagcacgcaggcaggttttctgtgaattggtttattctcttcaatgacgccctggtccatgctcagcaggatgatgtgtgccaagggcacccactgggcaggcttgtggagaccctggttgcagtgtacagaatgacgtatgtgggtgtgggggccaaccgccgactactgcaggaagctgtaaaggagattaagtcctatctcaagcggattttcctagcttgtgaggttcttatttcccgtagcttcctgaagagggcagcacaattcctctttctgctcctccacccaccggaaggaggtccttctgcactgggaagtcagagtccacatccgagtccccagagcctggttatgtggtaacaagttctggcttagtgcttcctgtcctgctgcctcggctctaccccccgcctgttcatgctttatgccttggacaatgaccgagaagaagacatttactgggaatgtgtgcttcgactgaacaaacaggcagatatcgctctcctgggctttctcggagtgcagaggaaattttggcctgcaaccttgtcaatccttggagagagcaaaaaggttttgccaaccacaactgctagcagatcagcacaacatttactccatcagacaaacttaaagtcattcagcagacctttgaggagatctcccagagtgtcctggcctccctgcaggaggacttccttgtggtccatggatgacttgttccctgtcttcttatatgtggtgctacgggccaggattcggaatttaggctctgaagtccacctcattgaggatctgatggacccctatctgcagcagtggggaacaaggcataatgttcaccaccctgaaggcatgctactaccagatccagcgtgagaagcttaactaggcacctgacagcttgagaactggattatctgctgcagaggccacagcggcaaagaacagtgttgaaattggaatggactatatgttattttggttgtaatttctgagccttagtaataatgaagagcctcagctcaggttgaaaacagactggaaaaattcaaatgtatagtgcaaataggaaataagactcagaccagaccatctgtggcctgtactaagatccatacacctccatgaaaaggaaccggttaccctttcctttataggaagaggtgtcagctccatgaagttacaggaaaatttcccaagaaagctgcttgtgttgaagaagttgatgactgtatttaagttcctggtttgtccacatccatttgcagttaccccacatccctcggcaaggagcaggttgtacttgagactgaagtagccataccttgccttcctagaacccttccagccacatgtgcagcatgctactttgctcggggaggaagctgggaactgcaactgtccccagcccagtgtgtggccttccctgtacctcacactgaactcagaagggaagaaaggaaagacacactttggttgttcccacctcaaaagtattgtggcaccaccacatttccacggtttgctttttacaaaacccgttgtaggttgttggtttacactgtagcggtaactcctcgtagctgtttgagtaacacaggtgctcttccgtctcatctgctgtactccatggtgagcacagtgccctgattcatgtgaaatgactcagcaggcgttaattacttttgaaaaggatcatgatttccaagctactttataatcaagacacgtgtttgttaaaatactgttttggaatgttggctgtaatgtaacagcagttttcataataaaaagacattcatctc

SEQ ID NO: 2290 - DNA, 1985 bp, Cricetulus griseus
ctcaccaactgagtgtcacattcaacaagagcattgcaaagcaggcagagcttgtcttccccagcaatgtcatctgcaaaaccttccactccatggcctatagtcacgtcgggcgaaagtaccagctgaagaagaagttgaatctcttcaagttaacacccttcatggttaactctgtccttgcagaagggaaaggtggattcataagggctaagttagtgtgtaagactttagagaactctttgcatcagctgacgaagagctgactatcgatcacgtgcctatttggtgcaagaatagccaaggacagagagtcatggttgaacagagtgagaagctgaatggtgtccatgaagcaagccgactttgggacaacatgcggaagctgggggagtgcaaagaagaggcataccaaatgacacatgatggctatttgaaactctggcagctgagcaagcctttgcttgcctcttttgacgccatctttgtggatgaggcccaggactgtaccccagctatcatgaacatagttctgtctcagccatgtgggaagatctttgtaggggacccccaccaacaaatctataccttccgaggggcagtgaatgctttgttcacagtcccccacacccacgtcttttatctcacacagagttttagatttggtgtggaaatagcttacgtgggagctaccatcttggatgtctgcaagagagtcaggaaaaagacgttggttggagggaaccatcagagtggcatcagaggtgatgtaaagggacaagtggctctgctgtccaggaccaatgccaatgtgtttgatgaggctgtacgggtaacagaaggagaatcaccttcaaggatacatttgatcggggggattaaatcatttggattggacagaatcattgacatttggacccttcttcagccagaggaagaacggaggaaacgaaacctcatcattaaagacaggttcatcagaagatgggtgcacaaagaaggctttagtggcttcaagaggtacgtgactgctgctgaggacaaggagctggaagcaaaaatcgcagtagtggaaaaatacaatatcaggattccagaactggtagaaagaatagagagatgccacatagaagatttggactttgcagagtacattctgggcactgtgcacaaagccaaaggcttagagtttgacactgtgcatgttttggatgattttgtgaaagtgccttgtgcccggcataatcttgcccagcttcctcacttcagagttgagtcgttttctgaggatgaatggaatttgctgtatgttgctgtcactcgtgccaagaagcggctcataatgaccaaatcactagagaacatcctgactctggctggggagtatttcttgcaagcagagctgacaagtaacgtcttgaaaacaggagtagtccactgctgtgtgggacagtgcaacaacaccatccctgtggacaccatccttaccatgaagaaactgcctatcacttatagcaacagaaaggaaaacatgggtggctacctctgccactcatgtgcagagcagcggatcgggcctttggcattcctgactgcctccccagagcaggtgcgtgccatggaacgcactgtggaagacatagtgctacccaggcacgaggccctgctcttccttgtcttctgaggctgtgactctacgtgctgctgcatccctgcttatgggagactctgagttcaatcacagagcatttttgaggaagaagataccaactagagttggacctgccatttctccgttccttacaaatagccagttcccacttgcctgtcctctatatgcattaggtcagggagtgggaaaagtccttttgaataaaaaaatcattttatgtatttaaacttttattacaaggtttcaattaaataggcattgcccattggcatgccactgtgaaatctaaaaaaaaaaaaaaaaaaaaaaaaaa

SEQ ID NO: 2291 - DNA, 1985 bp, Cricetulus griseus
ggaggagatcggggcagtggaacctccgcggtggctatggaagcatccagctatagggtggtatttgagaagggaggcgtgtacctgcacaccagtgccaggaagcaccaggacccggactctctcatcgcgggtgtcatccgtgtggtggagaaggacagcgacgtcctcctgcactgggctccggtggaggaggctggagacccgacccagatcctcttctccaagaaggactcaagtggagtcgagcccagcaccacagaggaggaacctacctttgacccaggctatgaacctgactgggctgtcattagcacagtgcgaccaaggccccacctggcagagcccaggagaggtgcagagcccagctgcccccagagctcctgggccttctctgtgagcctgggggagctcaagtccatccgcaggtccaagccaggcctcagctgggcctacctggtcctggtgacacaggctgggggctccctgcctgccttgcatttccacaggggaggtacccgagccttgctccgggtcctcagtcgctacctgctattggccagctctccgcaggacccccgcctctacttggtcttcccgccacgattcctctgccctctccaactccttccatcacctgcagctctttgaccaggacagttccaatgtggtgtcacgcttcctccaggatccctactccaccaccttcagtagcttctctcgagtgaccaacttcttccggggagcactacagccacaccctgagggggcctccccccctgaccttcctctgcggccagatgatgagccagagcccggttttgaggtcatctcctgcgtggagttggggcagcgtcccacagtggagcggggtcctccagtcacagaggaagaatggacccgccacgtgggtcctgatggtcgcctgcacaatatccctgagttgaaaaatcggatcttctcagggggtctcagccctggcctgcggcgggaggcttggaagttccttctggggtaccttagctgggagggttcagctgaagagcacaaagcccatgtgcggaagaaaacggacgagtacttccgcatgaagctgcagtggaagtctgtgagtgctgagcaggagcgaaggaactccctgctgcatggataccgtagcctcattgagagagacgtaagccgcactgacaggactaacaagttctacgaaggccctgagaacccggggctgggcctgctcaatgatatcctcctcacctactgcatgtaccactttgacttgggctatgtccagggcatgagtgacctcctgtccccaatactcttcgtggttcagaacgaagtggatgccttctggtgtttctgtggcttcatggaacttgtgcatgggaactttgaagagagtcaggagactatgaagcggcagctggggcagctcttgctgcttcttcgggtactggatcagccactctgtgatttcctggattcccaggactcgggttccctgtgcttctgtttccggtggcttctcatctggttcaagagggaatttcccttccccgatgtccttcggttgtgggaggtgctgtggacggggcttcctggccccagcctgcacctgctggtggcctgtgccatcttggacatggagcgggatgcgctgatgctgtctggctttggcgccaacgagatccttaagcacatcaatgagctgaccatgaagctgagtgtggaagacgtgctgacgcgggcagaggccctgtacaggcagctgactgcctgcccagagctgccacacaatgtgcaggaagtcttggggctggcacagccaaaagagcccagtagcccatctcctcccatatccccgctgccgctgtccactcgggccccgctgcccccaaggccgccgagggaggatgtggttgcgcagcctgacagcagcctggagatcttgcctgaggacgacgacggtgcagactcctagc

SEQ ID NO: 2292 - DNA, 1985 bp, Cricetulus griseus
ccggaatccgagagggttccaacggtggaggattgggttccaaattttcccctggttgttttctcctgccaccgattacttggaagttggactgaagcagagttcggaaagaaggaaaaagtttgcatcgggactggatttactttgcacatcgcagaaagaagagagtccgagggagaggggttggtgcaaagccgcgatcacggagttcagatgtgttctaagcctgctggagtgaacacactgccaagacctgatggaggccagagctcagagtggcaatgggtcgcagcctttgctgcaggcgccccatgacggtggcaggcagcgtggggagccggatcccagggacgccctcacccagcaggtacatgtcttgtctctggatcagatcagagccatccgaaacaccaatgagtacacagaggggcctactgtgattcccagacctgggctcaagcctgctcctcgaccctccactcagcacaagcatgaaagactccacggcctgcccgagcaccgccagcctcccaggctccagccctcgcaggtccattcttcaagggtccctctgcccaggtccatcagcacggtcagctcagggtctcggagcagtacaaggacaagtaccagcagcagctcctcagaacacagactgttaggatcatccttctcccccgggcctgctgctgctgctgatgggataatccgggtgcagccaaagtctgagctcaagcctggtgagcttaagccactgagcaaggaagatttgggtctgcacgcctaccggtgtgaggactgtggcaagtgcaaatgtaaggagtgcacctacccgaggccgctgccatcagactggatctgtgacaagcagtgcctttgctcagcccagaacgtgatagactatgggacttgtgtgtgctgtgtgaaaggtctcttctatcactgctccaacgatgatgaggacaactgtgctgacaacccgtgttcttgcagccaatcccattgttgcacacgatggtcggccatgggtgtcatgtctctctttttgccttgtttatggtgttaccttccagccaagggttgccttaaattgtgccaggggtgttatgatcgagtgaacaggcctggatgccgttgcaaaaactcgaacacagtttgctgcaaagttcccactgtcccccccaggagctttgaaaagccaacatagcattagtaatcaggaatattacagtaataaagattgttctccaccccctctttttttaacacacatatgcaaccaactaaataaacagttgtaatcttggcactgttaatagggggttagagtaatttgtcgtttgcagtgagatgcttttgttttttactttttttttttttttttttttttttttttttttttttgccattttaactgatatgcttgctagaattcagctaatggaactccaaggaattgtttgtgaatagtccttgcaaaaatttgtaaattagcaaatgaccccgacccccccattgttttccccagagataatgtgctatatttttgtatatacgataatatttgcaactgtgaaaaacaagttgtgctatactccatggcacagtcacaaaatattatactaatatgttgtacattcggaagaatgtgaatcaatcagtatgtttttagattgtattttgccttacaggaagcctttattgtaagactctgatttccctttggacttgatgtatattgtacagttacagtaaaattcaacctttattttctaattttttcaacatattgtttagtgtaaagaatatttatttgaagttttattattttataaaaaaagaatatttattttaagaggcatcataaaatttgccccttttatgaggatgtgatggttgctgcaaatgaggggttacagatgcatatgttcaatataaaatagaaaatatattaacgtttgaaattaaaaaaaaaaaaagaaaaa

SEQ ID NO: 2293 - DNA, 1985 bp, Cricetulus griseus
  modified_base (266)..(266): a, c, t, g, unknown or other
  modified_base (313)..(313): a, c, t, g, unknown or other
agatgagcttagttcttgtcatgcggtactttcaactcaacttgctgatgccatgatgttccccatttcccagtttaaagaaagagatctgaaagaaatacttacactaaaagaagtattattgctagtaatgatcatgatgctgcaattaacagatacagccgattgtcaaaaaaaggagaaaatgacaaggtaaagtacgaagtaacagaggatgtgtatacttccaggaagaaacaacaccagactatgatgcattattttgngcattaaatactcttcagtacaagaagaaaatgctttgtagaacctntacttggatatatgccctaaatgctaggaataaaacaggtttggtgtcatctacctgggatagacagttttacttcacgcagggtggaaacttaatgagtcaagcccgtggagatgtggcaggaggcctggccatggatatagacaactgttcagtgatggctgtggactgtgaagacaggagatactgttttcagatcacttcctttgatggaaaaaaatcttcaattttgcaagcagagagttaaaaaagaccatgaagagtggatgcacgagtaaatcagtctgctttggaagctgtcactccttccccatctttccagcagagacacgagagcctgcgtccagcaggacaatcccggccaccaacagctcgaaccagcagttcaggatccttgggatcagagtctacaaatttggcttccctctctctagattctcttgttgccccagatactccaatacagtttgatatcatttctcctgtgtgtgaagatcagcctggccaggcaaaagcttttggccaaggaggcaggcgtacaaatccatttggagaatctggaggaagcacaaaatcagaaactgaagattctattcttcatcagttatttattgtccgattccttggttctatggaggtaaaggcagatgaccatccagatgttgtttatgaaacaatgcgccagatcttagcagctcgggccatccataacatctttcgcatgacagaatcacacttattagtcacttgtgactgtttgaagttaattgatccgcagacccaagttacaaggctcacatttccattaccatgtgtagttttgtatgctacacaccaggaaaataaacgactttttggatttgttctccggacatcaggtggaagaagtgaaagtagtttgtcatcagtgtgctacatatttgaatcaaacaatgagggggaaaagatttgtgattctgttggattggcaaaacagatagcactgcatgctgaactggatcgtagggcatcagaaaaacaaaaagaaatagagagagtaaaagagaaacaacagaaagaactcagcaaacaaaaacagattgagaaggacttggaagaacagagtcggttgatagctgcttccagtagaccaaaccaggctggtagtgagggccagcttgtccttagcagtagccaatcagaggagagtgatttgggagaagaagggaaaaaaagagaatcagaagcataaacttgcttttgctttttgattgatttcccctttcccctggaatgtggcacaaggtaaccatgttaaaagaccaaggaagagactaagctttatacttgcttgtttcagcttcaatttaaaaaagactaaacatgataacaggttatattgagcatatccccttaaaaataaaatactatgcattatcatacaaaactttttttttttggggagcacagaatcgttttattgttctgaatctgggttcattcctatcatggtcactgggcagaggcaagtatgtcttgcttccttctgtcttggttccactgggatctgctcagattctcttccatgttcaaagtgcactgagaaagcttcacagtttcaatacatttttagatgttcaactgaagcagagtgaggaaatggccctcccgccccacccacctaaaacaaaac

SEQ ID NO: 2294 - DNA, 1984 bp, Cricetulus griseus
caagtcataccaccaatgctatggacccagtcttgaccactacaagccccatttctacaacggaaagccccaattctgctatagaccttgctctaacctccagctcctctgcagacctcacactcccaggcactaaacctctgccttgcagtcactcagcctccactccctacactaaaacagaccccacagcatcttgcacctcttcccagagtcttgcttgttctggttcagagactctcacaagccctgccccaaattccccagaacaaattcttaagagcccaaggttctctccctcatccatagcccctgcaccccaacattcagaacttagcccggccacagctgctcaagccccagtccccgaagcaactggaggagctggggacaaaaggcttgaagaggccctggggaccctaatggctgccctggatgactatcgtggtcagttccctgagctgcagggtctggagcaggaggtgactcgactagagagtctgctcatgcagagacaaggcctgactcgaagccgagcctccagccttagcatcactgtggagcatgccctggagagcttcagcttcctcaatgatgatgaagatgaagacagtggggccggggccaggcccacaagcagcccagaggctgtggcagaggacagattagattcatcaaatgctcagtccctaagcacagggtgtccagccctggatgctaccttggtccagcacctgtaccactgcagccgcctcctgctgaaactgggcacatttgggcccctgcgctgccaggaggcatgggctctagagcggctgctgagggaagcacgcgtgctcgaggaagtatgtgagcgcagcaagctatgggggaactctgccagctctgcccaggaagtggtgcagttctctgcctctcggtctggcttcctgacattttgggaccagtgtacagagggactcaaccccttcatctgcccggtggagcaggtgctcctcactttctgcagccagtacggtgcccgactttccctgcgccagccaggcttagctgaggctgtgtgtttgaagttcctggaagatgccctgggacggaagctgcctaggaggccccagccaggccctggggagcagttcaccatcttccagttctggatttatgtagaagccttggacagcccctccatggatgcctatgtgacagagactgcagaggaagtgttactggtacagaatctgaactctgatgaccaggctgttgtgctgaaagccctgaggttagcacctgaggggcgcctgcgaagggatgggcttcgggctcttagctccctgctggtccatggcaacaacaaagtcatggctgctgtcagcacccagcttcggagcctctcacttggccctgtcttccgggaaagggctcttttgtgcttcctggaccaacttgaggatgaggatgtgcagactcgagtggctggatgcctggctttgggctgtatcaaggctcccgaaggcattgaacccctggtgtacttgtgccaaacagacacagaagctgtgagggaagctgcccggcagagcctgcagcagtgtggggaagaaggacagtctgctcatcgacgactagaggagtccctggatgctctgcctcgcatctttgggcccagcagcatggccagcacagcattctgaacaccggctcccagtgttccttcccccattttcagggttcaccaggcactggcagggagggtgagggctggttccagacacctctccccacaaatttctatcaatgaaagtctaatatattctcttgttacccctggggttggtagagtgcctgaaatgaagtgcctcccagccttggttctgcatattctttgccacacaagtgtcaggggcctggccatgtcttgctctgcctcaccatatccccttggttttatattttatttacagaattttacagaaaataaaaagcaaaa

SEQ ID NO: 2295 - DNA, 1984 bp, Cricetulus griseus
  modified_base (502)..(502): a, c, t, g, unknown or other
gatgttgtggcctatgttgaaggtatggtcttccaacggtacagaaaattattcaaagacatttacaaaacaacttgaggatatgggggcaacggtttcaaaaactttgaacaagcaagtgacccatgtgatcttcaaagatgggtatcaaagtacctgggacaaagcccgtaagacaggggcaaagctggtttccgtcctctgggttgaaaaatgcaggatggctggagcacatgttgatgagtctttgttccctgcggtgaatactgatgaagaattaccaagcctaattagctacctcttcccagatgtttgaacagtctcaacagaacccaaatatcactccgtgtgaagcatctttgaacattgctcatgaatcttcacgttcagatgaatcctttgccagttgttcacactcatcttttgatggtctccttggaaatcaggaaaggaaactgggaagatctgttaatgagatgaccaggatggcatgctctgcctnacctgtgttgaagataagcagttcttacagttcattgtctcccaaccacctctgtcaaccaagtcctcagaaagctaaggaccgtcctccaaaggaggacatcagctggcagaaagatgctgcaggtgagaaggctgagctggagagagagcaagctgcacatgtgtctcaggggatgtcctgatgagaagctctgtctgtcccctgccaccacagggaacatagatgccatagatgaacccaaaagttgttcagccaagagaaaaaggccagtagacttgggttcacctccgaaaaaggaaaactcaagaagaagaggtaccaatacggaattctgccttgtcgatacagctgttcaaatctgaccatagaccacagttcaccaccagccccatcctggggactcctgatgttggggcttcctcttatgaggactacttttcccctgataatctcaaggaaaggaattcagaggctcttcctcctgaggctcaggcattatcaagcccttctctgttccactgcagaagtctctcaaagtgggagcgaagaagcatactggaaatgtgtgattttacctccattggtgacaaaacccagatccatatcagcattactgactcagtttcaagaagtacttctagtcttgagaaacccgacaaggaggaagtgagtacaggagaagcagagcctcatcatccaagtggtgaacacactgaaaggcttttcattcacacctgaggtctgcgagtccaccacccatgtgctggtggggaagtctgtccgcaccctaaatgtgctgatggggatcgctcgaggatgctggattctttcttacgaatgggtgctgtggtctttagaattgggtcactggatttctgaggaaccttttgaactctctgagtccttccctgctgctccgatctgcagacttgaacgccagttgtctacccagcggtaccaaggaaccctctttgcaaatcagccgaagatgttcattgcaccagccagcagccccccaagagccaagctgtgtgaactggtcctcctgtgtggtggccaagtcagcccagcccctcagcaagccagcctcatcattggtccctactgtggcaagaaggaagcaaggatccagtaccgtggtgtgtgtgtgtgtgtgtgtgtgtgtgtagtgtgtgtgtgtgtgtgtgcttttatcttcaaaattcttttatgtaacttattcatgactcatattgtagttcagagaagtcttggccggcaccagtcctgggctctgtgtataatactaataatgaccatgatgaaaaggtcacagaacctttgtcttcaagatactttactcccaattatagaatggaaattgatttaaaccattttgatcctaaacaatcaaatgaccccctaactttcttggcttggactctgagatctttattagtgtgctgtgtctagataaggacaatcatgcattattaagat

SEQ ID NO: 2296 - DNA, 1984 bp, Cricetulus griseus
atccctgtcctgagactccacaggagagaaaagaaatggcttccggagtcaataccaggatcgatgatctccagatggttctcaatcaaacagaggaccaccgccagagggttctgcaggcagctgctaagaacattcgggtctggttcatcaaggtgcggaagatgaaggcgatctaccataccctgaacctgtgcaacatagacgtgacccagaagtgcctgattgcagaagtgtggtgccctgtcactgaccttgactccatccagtttgcacttagaagaggcacgtggttctacggttccttccattctgaacaggatgcagacaaatcagactcccccaacgtacaacaaaaccaacaagttcacacacggcttccagaacatagtagatgcttatgggattgggacttaccgagagataaacccagctccatacaccatcatcactttccctcataaacatgttcctcttctcctacccagagtctggtaatgcaatgctgtactctggacagaaagggatacagtgtttcctcatcgtggtcgccatgctttgtgtcccttggtgctgtttaagccactgatcttgcgcccatcagtatctgaggaagaagcatctgggaactctcaactttggttggggatcagggtgggcaacggacccacagaggaggatgctgagataattcagcatgaccagctctccacccactcagaggacgcagaagaggaggacgaagagtttgactttgcggacaccatggtccaccaggccatccacaccatcgagtactgcctgggctgcatctccaacactgcctcctacctgcgactgtgggccctcagcctggcgcatgcacagctctcggaagtactttggaccatggtgatccacatcggcctgcatgttcggagtctggctggagggttcgcactgttcttcatcttcaccgcctttgccaccctgactgtggccatcctgctgattatggagggtctctcagccttcctccacgcaatccggttacactgggtggaattccagaataaattctatgccggggccggtttcaagttcctccccttctcctttgagcatattcgggaggggaagtttgatgagtgaatcctcagcagggctcgtgcccagagcagctcccctgcttgcctccatggtgattctctgtgttccttttgcctgttggttgtgatccctgggtaccagggcgtttgtgtcacccctgccagcctgtccccgccgtgagtcatttaggtaggtgctggccttccctgggtctccaccccaaatggctgtgcctgatacccatccatcccaacaacaccagtcttggcctcctggcctccggacagacagccctattctactccttgctggtgagccaacctgcatagtcacatgggtgtgcagagccctcaggatgaaaggggtccctcttcagtcccgagttcttggtcacacctaggaagaggatcaaaactggtttcctcctagtaggggacatggtttatggaatatatcccactccagttagcagggacagtcaggaagatgctcttgtcagcctttgcccacgcctttccagttagtattaagagggaattcagatggccccatctgggccatcttctccttgtcatcccaaaggtcccaggataaccagcaccaccctcctctccagccctgttggcccagcatagcatccctggaaagggaaagtctaatcaacttgtgcacagggcttcccgaccttagattaccttctacccagtctgcatgaatgggccttgccccacactacatcccaggcagaggttaaacctgatcatgatgtcctgaggctgtggtcagtaaggttggttctgccggcaggcctgccttgatttgcccactgatagttcctcccaactcccacaatgaccccaggtttcaggagtcgaatccctggcaggaaaggtca

SEQ ID NO: 2297 - DNA, 1984 bp, Cricetulus griseus
gataatgatgggaagcctcgtgtggatatcttaaaagcacatctcatgaaggagggcaggctggaggaaagtgtcgcattgagaataataacagagggtgcttcgattcttcgacaggaaaaaaacttgctggatattgatgccccagtcacagtgtgtggggacatccatggacaattctttgacttgatgaagctctttgaagtgggaggatcgcctgccaacactcgctacctcttcttaggggactatgttgacagagggtacttcagtatcgaatgtgtgctgtatttgtgggccttgaaaattctttacccaaaacactgtttttacttcgtggaaatcatgaatgtagacatctaacagagtatttcacatttaaacaagaatgtaaaataaagtattcagaacgtgtttatgatgcctgtatggatgccttcgactgccttcccctggctgcactgatgaaccaacagttcctgtgtgtacatggtggtttgtctccagagattaacactctagatgacatcagaaaattagaccgattcaaagaaccacctgcttatgggcccatgtgtgacatcctgtggtcagatcccctggaggactttggaaatgagaagacgcaggaacatttcactcacaacacagtcagggggtgttcatacttctacagttatccagctgtatgtgacttcctgcaacacaataacttattgtctatactccgagcccacgaagcccaggacgcagggtaccgcatgtacaggaaaagccaaacaacaggcttcccttctctgattacaattttctcagcaccaaattacttagatgtgtacaataacaaagctgcagtgttgaagtacgagaacaatgtgatgaacatcagacagttcaactgctctccccatccgtactggctcccaaatttcatggacgttttcacctggtcgctgccgtttgtgggggagaaagtgactgagatgctggtaaatgtcctcaacatctgctcagacgatgagctggggtcagaggaagatggatttgacggagccacagccgcagcccggaaggaggtcatcaggaacaagatccgagcaataggcaaaatggccagagtgttctcagttctcagagaagagagtgagagtgttctgaccctgaagggcctgaccccaacaggcatgctccccagtggcgtgctttctggagggaagcaaaccctgcaaagcgctaatcaaaggattttcaccacaacataagatcactagcttcgaagaggcgaagggcttagaccgaattaacgagaggatgccacctcgcagagatgccatgccctccgacgccaaccttaactccatcaacaaggctctcgcctcagagactaacggcacggacagcaacggcagtaatagcagcaatattcagtgaccacttcctattcactttttttttttttgagctgcaggtcatgatgggattgctgcatctcagcagttggattttcttgcctctgacggtagctttgctctgggggccaggaattggattcagtttacactatcatggaaaaaaaaaaaaaaaaaaagagggagagataataaactatattttggtgagggtggtgattaaacacctcttttgggtatgccttttaaaaaaatgcttctagggaaaaaagttttaaaacgaaagctaatgctagtctatactgcaatgttaggggaatgaacatgttttcctactgcactagggacttctagataggttaatgaaaggccttttattctgttactggacacgaaaactttgtctaatttcttatactctattgtacgtttacagtgcagcactaaaaatggatgacgtcaaacatttttaacaacaacaacaacaaaaatgatgtacaaactaaataaggactatttattgataaggttttgctactcttgtcagacaatggctataaactgaattaggcagt

SEQ ID NO: 2298 - DNA, 1983 bp, Cricetulus griseus
  modified_base (781)..(781): a, c, t, g, unknown or other
  modified_base (828)..(828): a, c, t, g, unknown or other
gaaagaaccccaccagcccatgttcagaactcgggtctgcctgcagccaagagtcaaccctttaagttcagctatggagaaaagtgcctgtacagtgtcagtgcctatgatcagaagccacactgggaatgaggccctcaaccccccgacaccatccagtactccagtgtctccactacatcatgcatctccaaacacaactcatactccgaaacctgacaggcccttcccagctcacctccctccttctcagtccataccagacagcaactaccccatggaccacagatttcgtcgacagctttctgaaccctgtaattcttttcctcctttgccgacattgccaagggaagggcgtcctgtgtaccaacggcagatgtctgagccaaacatccccttcccaccacaaggctttaagcaggagtaccatgacccagtctatgaacacaacaccatggttggaggcgcagccagccaaagcttcccccctcctctgatgatcaaacaggaacccagagattttgcatatgattcagaagtgcctagctgccactccatttatatgaggcaagaaggcttcctggctcatccaagcagaacggaaggctgcatgtttgaaaagggccccaggcagttctatgatgacacctgtgttgttccagagaagttcgatggagacattaagcaagagccaggaatgtaccgggaaggacccacataccagaggcgaggatcacttcagctttggcagtttttggtagcttcttctggatgacccttnaaattctcatttcattgcctggactggacgaggcatggaatttaacngattgagcctgaagaggtggcccggcgttggggcattcagaagaacaggccagctatgaactatgacaaacttagccgttctctccgatattactatgagaagggaatcatgcaaaaggtggctggagagaggtatgtctacaaattcgtctgtgacccggaagctcttttctccatggcctttccggataaccagcgcccactgctgaagacggacatggaacgccacatcaacgaggaggacacggtgcctctgtctcactttgatgagagcatggcgtacatgccagaagggggctgctgcaacccccacccctacaacgaaggctacgtgtactaaaaccagtgacagtcaagcagggcaccccgtgcttcgcctttcttttttttttttatttttaagtaataatacaaaagggggcttttcctgttgcattattctatggtctgccatggactgcgcactttatttgagggtgggtgggagtaatctagacattcattctgtgtaacaggaagatggtgggtgaatgggcagagggaactaggaattcatttgtacttaggcttgggatggggtcctacgggttttctgtatgatgaagctatatcatgtttgttctatttcataataacgtaagataattttctcggtatctacggtacatttgatttgatattgtgtaaatatctacttggagaccatttgccttgagcatttccccaccattactgacgttttcgcaggtgtacaaaaaatatctactgtaaatggcagtttaatgttagaaatgactgtttttgcacctcttagtaaaaaaaaagtatttagcaattgcatttgttgttctttctattccatttcgctttacagatgacttgtaaaggataagaataattgtgggcagttctctgaattttgagtaatcaccacgactgtaaatgaggggcacaattttggactctggctcccgttgagtcataggccagtagcattacatgtatctggtgccatcttgctgtttcagtacaaatactgtcttttgaatatgtcaatgcccatttcagttagataatgacatgtcatgatcctttggaatcttcatttaagttgttaaatctgggatcaacaatgaagacaaaaaaaaaaaaaag

SEQ ID NO: 2299 - DNA, 1983 bp, Cricetulus griseus
gagaggacttccacagcggggcggttgctgtaatgacatgtttgtgaatttcccagaccagcccgtggatggagagaaatcagtatcataacatcagcactgaggaacgattcgcaggataagcaaacccagtttttaaggagcttatttgaaactctcccgggccgggtccagtgtgaaatgctactggaaaggtgaacggaacaatgcttcaacacgttggaacgatcagagatgttgctgttgcttctgagacgcttccctgagacagtggttcaaccatgggggttggccttggggaagcgctgctagaagctgaaaccattgaagagcaggagtctcctgtaaactgcttccgaaaactatttgtttgcgatgtccttcctctaataattaacaaccatgatgttcgattgcctgccaatttgttatataaatacttgaacaaagcagctgaattttacatcaactatgtcactcgatccacacagttggaaaatcagcatcaaggtgcacaagatacatctgatttaatgtcgcccagcaaacgtaactctcagaagtacataatagaaggactgactgagaaatcatcccagattgtagacccttgggaaaggttgtttaagattctcaatgttgttggaatgagatgcgaatggcaggtggataaagggagacgaagctgcagtgacatactgcaccggatgaaggagctctgcaggtacatgagcagcttcgacagtgaggctcacgccaactataaaaaccaagtgctgtactccacgatgctggtcttcttcaagagtgcgttccagtacatcagcagcatacagccatctctcttccaaggtcctaacgccccgagccaggtcccactggttcttctggaagatgtggccaatgtgtatggtgatgtagaagttgatcgcagtaagcacatacacaagaagaggaaactagctgaggggagagaaaaaccatgagctcagatgatgaagactgttcagcaaaaggaagaaaccggcacattattgtcagtaaagctgagctcagcaactccatcgaagtgctggagagcttcaaactggccagggagagctgggagctgctctactccctggaattcctcgacaaagaatttacaagaatttgtttggcttggaagactgacacctggctgtggctaagaatcttcctcacagatatgatcatctaccagggtcaatataagaaggcgatagccagtctgcatcacttagcagctctccaaggatccctttcacagccacagatctcaggacaggggactttagaacaccagagggcactcatccagctggccacctgtcactttgcactgggggagtacagaatgacatgtgagaaagtcctggacctgatgtgctacatggtactacccatacaggatggggggaaaccacaagaagagccctccaaagtgaagcccaagtttagaaaaggtttggatctgaagcttctgccctgtaccagtaaggctcttatgccgtactgcctgcacttgatgctagcgtgctttaagctgagagcttttacagacaacagagatgacatggcattgggccatgtgattgtactgctccagcaggagtggccacggggagagaaccttttcctgaaagccatcagtaagatttgccagcaaggaaacttccagtatgagaacttcttcagctatgtgacaaacattgacatgctggaggaatttgcttacttgcgaacccaggaaggagggaagatccatctggaattactcccaaaccaaggcatgctcatcaagcaccacacagtcactcgaggcatcaccaaaggtgtgaaggaggacttccgcctggccatggaacgccaggtctcccgctgtggagagaacctgatggtggtactgcatcgcttctgcattaatgagaagatcttgctacttcagaccctgacctgatagac

SEQ ID NO: 2300 - DNA, 1983 bp, Cricetulus griseus
  modified_base (171)..(171): a, c, t, g, unknown or other
ctgcatgcccgtgagcacgaaggacaagggtcttgtcatgcagtgctcacatttggtcatgaggcctgtagcccttgaccagatggtggggcagccagacatcacacccctgctgcctgtggctgtcccacctgttcctggacctctggccttgcctgtttggcaaggggnggggctgtcacctcctctaccattactacagttgccactgaagcccctgtgctaccactcccaacctgatctataagtgtgccatgtgtgacacagttttcactcacaaccgctcctttcttcacacttcgaccagcacttgttgccccagcgtgtcagcgtctttaagtgtccatcttgtcctctgctttttgcccaaaaaaggaccatgctggaacatctcaagagcactcatcagtccggacgcctgggggaggaggcagttgggaaaggggctggaggtgcccttctgacccccaagactgagcctgaggagctggctgtgtctcgggcagaggcagcccctgctactgaggaatcttcctcatcctccgaagaggagctgcccagctcccctgagcctccccgcccaaccaaacgaccccgacgggacctgggaagcaaaggcatcaaaggtgggggtggggggcctgggggctggacctgtggcctttgtcattcctggtttcctgagcgcgatgattatgtggctcacatgaagaaagaacatggcaagtcagtgaaaaagttcccctgtcgcctgtgtgagcgttccttctgctctgcccccagcctgagacgccatgtgagggtcaaccatgagggaatcaagagagtttacccatgcaggtattgcacagagggaaagcgcaccttcagtagtcgtctgatcctggagaagcatgtccaagtccggcatggcttgccccttgggacccagtccccttctggcagaggaggcactctggtgcgaggctctggtggcagagcccaggggccaggacggaaacgccgccagtcttctgactcatgcagtgaggagcctgacagcacaacaccaccagccaagtccctgaggggtggccctgggtcaggaggccacggtcctcttcgatataggagcagtggctcagtggaacagagcattgtggtgggcctgagggtggatggtggcacgcagcagtgcctcgactgtggcttgtgctttgcatcccctggctccttgagccgccaccggttcattagccacaagaagagaagggcggggggtaaagccagtgctctggggatggcggatggggaagaagaagctcctccgttacgctctgacccagagggtggagattcacctttgcctgtttctggaggccctctgacttgcaaggtctgtggcaagagctgtgatagccctctgaatctcaagacccatttccgcacgcatggcatggcattcatcagggcccgacagggaggcagtggggacaactaggtcccaggcctaggattagccagttctcttcccaggaacttgggtctttcactgctgctgtcaactccctgggctgggaagtttaacacttattttgattctttttgctcccaagggaaaggcttttgaggattctagtgacttgcaccccactccctcttgggtttggtccctgggtcctacttaagtgggttctccttcctttctgaatccaacactaatgattgcttcctctgggctgggttctggcctagtattccctcctctaacactcattggcactaacaccccgccccaatccctgcagtgccttccatttgtcttttcccccagaaatctaggggtggggggttggtggggatgagtcctgtcaaatggggtccaggaagaggagaggacaggctctcaggaatcctttattcttgtagtaataatactaacagtgagagaaacaagagggagaaaaccagaccaattaaaactgcttgtaggtttaatcccca

SEQ ID NO: 2301 - DNA, 1983 bp, Cricetulus griseus
cctagccatcttcaagcgcctgcgctcggtgcctactaacaaggtatgttttgactgcggtgccaaaaaccccagctgggcaagcataacctacggggtgtttctgtgcatcgattgctcaggatcgcaccggtcacttggtgttcacttgagttttattcgatccacggagctggattcgaactagtcttggtttcagcttcgatgcatgcaagttggagggaactcgaatgcttcatccttcttccaccaacacgggtgtgccaccaatgacaccaacgccaagtacaacagccgtgcggctcagctttacagggagaaagtcaagtctactggcaacccaggccaccaggaagcacggcacagatctgtggcttgacagctgtgcagccccacctgtgtcccctcccccaaaggaagaggattttttcgctgctcatgcctctcaggaggtcagtggtgctgtgcaggtatcggcgaagccagaacccgctcccttaatgccgtgggcagtggaaaccactccagaaaaaatgaaggtggaccagagcaagggccaagtgtggaaggtctgaacgctccagggaaggctgcagtagaagtgtcatctattaaaaagaagacttgggagcccagaaactgacgaatgcatccttcactgagatcgaaaagcaagcacaggccgtggataaaaggaaggagcaggaaggcctggccagaggcgcaccgaaggaggagtccattgtttcctcattacgactggcctacaaggatcttgaaattcacacaaagaaagatgaaaaactgaacctgagcggccagaagaaggtggaagccgagagactgggcatgggctttggaagctccaggagtggcatctcccattccgtgacttcagacatgcagaccatcgagcaggagtcacccacactggcaaagccaaggaggaagtaccaggaggacccagaggagtcatacttcacctccagctccacagcaggtactttgatgaccctatggagttacgaggcaattccttctctagctgggatgacagtgctgattcctactggaagaaggacagcagcagagaccctgagcctgccatgaaaagcacaggctcctcagacaggtcaagtgctcgctggaagccagactatgagcctgttggcaatacggatgaagcccagaagaagtttggcaacgtcaaggccatttcctcagacatgtactttggaagacaagctcaggcagattttgagacccgggcacggctggagaggctctctaccagctcctccataagctctgcagatcttttcgatgagcagaggaaacaggcagcaggaaactacaacctctcgaatgtgctgcccaatgccccagatatggcgcagttcaagcaaggtgtgcgatctgttgctggaaaactctctgtctttgccaatggagtcatgacgtccattcaggatcgctacggctcttaatcctggtgtcaggctgtgtccgacctggtaaaactctacttcagatggacctgggaccacatctggctgcaccaaagccccggctgctgtgcaggcaggctctactgtttagcaaggcacctgcacactcctgatttttgtatttcctctgaggcatccccatttctctgtagtggagctttgctttcatttctggtttaggttagctccttgtgtcggcttcaggacacaactcagattcggggaaatggcgattataagtgggtggtttccttaatattttttatcttgaccttggtgttccaaaagttacaggatagatgtaaatcaataaagtcatttggctgtgttttagacagcaccagaatatattgttcagcacagtaaaatatatttgaaatttgatgaaccaaaaatatgatttcagatgaatattttgtgaatctttcttaaaagatccaatttgtagacttctaaatataatggacagcacagc

SEQ ID NO: 2302 - DNA, 1982 bp, Cricetulus griseus
  modified_base (352)..(352): a, c, t, g, unknown or other
gcactcacacgcatgcggctgttatggctcggagtcctaagccggcgttttcagcatgtccccctccgcgacacctgccgccaggcgtcccggggcgcgaaggccaacaaagcagggtgggaagaaaaggtggagaacagtgtgaagtggaggcagctggagcacaagggtccatacttcacccctgcctatgagcccctgcctgatggtgtacacttcttctacgatggaaagccagtgaagctgagcgtggcagcggaggaggtagccactttgtacgggaaatgctgcacctcgagtgtgcgaccaaggaagtcttccagaggaacttcttcagggactggcggaaggngatgacagctgaggagagaaagcttatcacacaccttgacaaatgcgactttgtggagatccacaagcacttcatggaaaaaactgaggcccgcaggactctgcccagggagaagaagcagaagctaaaagaagaggccgaaaagcttcagcaggagtttggctactgtattctcgatggccacagagaaaaaataggcaatttcaagacggagccacctggcttgtttcgtggccgaggtgaccatcccaagatggggatgttgaagaggagagtcatgccagaggatgtggtcatcaactgcagcagggattccaagatccccaagcccccagccggtcaccagtggaaagaggtgcgctcagataatacagtcatgtggctggctgcatggatggagaatatccagaataccttcaagtacatcatactgaaccccagctccaagctgaagggggagatggattggcacaagtatgaggttgcacgacgcttgaggggagttgtcaacaagatccgtgctcagtatcaagctgactggaaatccccagaaatgaagaaaaggcagctggccgtggccctctattttattgataagctggcactgcgaacaggaaatgagaaggaagagggtgagacggctgacactgtgggctgctgctcgctccgtgtggagcatgtccggctgcatggaaaggcagatggccaagagcatgttgtggagctggacttcttgggaaaggattccatccgctacaataaccgcgtgacagtggaaaaactggtgttccagaaccttcagcactttatggaggacaaagaccctggggacaacctctttgatgcactgactactgccagtctgaacaagcacttgcagagcttgatggaggggctgactgccagagtgttccggacctacaatgcctcagtcactctgcaggagcagctgcgggtgttgaccagggctgaagatagcctaacctccaaagtcttagcttacaaccgggcgaaccgggctgtggccatcctctgtaaccatcagagagcaatccccaagaccttcgagaagtcgatgcagaaactccagcaaaagattgagacaaagaaggcacaggtgactgaggcgcaggtggagctggaaaagttgaaggctgacctaagaactcgaggggggagcaagtccaaaagttttctgcggaagcagcagcggctgctgaagctggaggaacagctggcccgattgcacaaaaaggccacagacaaggaggagaacaagcaagtggccctgggcaccgctaagctcaattatctggaccccaggatcagcattgcctggtgtaaaaggttcggagtgccaatagagaaaatctaccacaagacccagagagagaggttcgcctgggccttcaaccgggcagacaaagactttgaattctaaacagccctttgccactgccactttctcactgtgaaacaatactgtagttttctataataaaatgtcggacgaaaaaaaaaaaaaaaaaaaaaaaaaaaaaaaaaaaaaaaaaaaaaaaaaaaaaaaaaaaaaaaaaaaaaaaaaaaaaaaaaaaaaaaaaaaaaaaaaaaaaaaaaaaaaaaaaaaaaa

SEQ ID NO: 2303 - DNA, 1982 bp, Cricetulus griseus
tttgacaactacatgcagcaggatgctcacgagtttttaaattatttgctaaacactattgcggacatcctgcaggaagagaagaaacaaggaaaacaaaacgggaaattaaaaaaatggcaacatgaacgaacctgcagagagtaataaaccagaactcacctgggtccacgagatttttcagggaacactcaccaacgaaacccgatgcttgaactgtgaaactgtgagtagcaaagatgaagattttcttgacctctctgttgatgtggagcagaacacctccatcacccactgcttgagagacttcagcaacacagaaacactgtgtagtgaacaaaaatattattgtgaaacgtgttgcagcaaacaagaggctcagaagaggatgagggtaaaaaagctgcccatgattttggccctgcacttaaagaggttcaagtacatggaacagctgcacaggtacaccaagctgtcttaccgggtggtcttccctctggagctccggctggcttctggctgttgtttgatgacgacaattgtagagaaaataagaattgctcaagctattgaagaattctatggtctgacatcagatatatcaaaaaattcagaatctggatatattttattctatcagtcgaagagaataacttagtggagcgtgggactaattcaagcggggaaattctcaaagcactatagccttgtttctctgcagactctcccctctccccaccacccgcggcccaaccgatgttatcactgatgcccactggtctggcagtgttaaacttccttcctttgtgtttttacatgcagcactactcctgggtttcttctggtctgaggtagagttaactgcagccagattctagtcagatttttatgaattaacttgttaatttgaagatggaggtgaatgtgttatagatgttcacccgtcaaggctgcaaccatagctttaaatttgtgcaagcgcaaatgtttaaaagtgagtgacgtcgatgccgaaatcatcctctgcattggaacagggtgaagcaaggctgttgatggtggccagcatttgcacccaacagtgcttacctagctggttgaatcccaggggctaagactgtggagctcagggcaggcaaagccaagaggaagatgtttttgtggctcagatccctagaatgcttgacaagacagtttcccgggagaacctcatctcactatttttcccttttgttatgtgtgtatttattagagcatttgaatattggtaccttttattaaaagggttgatttcatgttttactgttgagttaatcttagttttccttacaaatactatgagtcatagatcttggtttcctttgggatgtcagttgacttccatacactataatatactgtgaatgtgttatgttgtgacctaatacatcggcgaaggaacatgcaaactcttggcataatgtgaactaaaactgtaactgaaaacgtcagtggccattttgcagcaatgaagaggatagcactttatctaggcgaaaactggactttttatttttgaaatatcttgaactgtttatggctcagaacttaggcatgccgacacttcatttgttcatgcttgaagggagatgtttcactcttcactggagaagacggaacagggttatttcatgtaattgtcttatgcaagtggccaaaatggaccttgctttggttagaggcaaatggatatttattaataatactttgtctttttccccctccatgaagcatatttattgatcacttttaccttcgaggtgaacctttattctttaaagagaagcactttctaaatgaaagtgattgatggagggaaatgtttgtaccatatacagcccaaatattttgtgggttacaaaggttaaaaaaatggttactggtttctaatatatttggaactaatcatagagcaagaactattaaaattacctttgaaacaa

SEQ ID NO: 2304 - DNA, 1982 bp, Cricetulus griseus
aaaagaaggaaaagttaagaaagccaaaaagcattctgtgagtgtggactcggcagatgcacagagtggaggcatgcctgaagagacagtggggaactcaaaagttaaaaaattacctcaaaaacctaccactttaacaaatggtgaaacagcagcaacgccatctcctgattcagaaccaaaaaagaaaaagaagaaaaagaggaaaatgggaaatgatgcagggcctgacaccaaaaaatcgaaaacggaagaaaatgctggggctcacgaggaagcagaaagcagtgtggagaagccgaacgacagggaggtgcccagcctgcccctaggactgacaggcgcttttgaggacacttcatttgcttccttgtctaaccttgtcaatgaaaacactctgaaagctatagaagaaatgggcttcaagcgcatgactgagatccaacataaaagtatcaggccacttctggaaggcagggatcttctggcagctgcgaaaacaggcagtggcaaaacgcttgctttcctcatccccgtgatcgagctcattgtcaagttgaagttcatgcctaggaatggaacaggagtcctgattctctctcctaccagagaactggccatgcagactttcggcgttcttaaggaactgatgacacaccatgttcacacgtatggactgatcatgggtggcagtaacaggtctgctgaagcacagaagctcatcaatggcatcaacatcatcgtggccaccccaggccggctcctggaccacatgcagaatactccagggttcatgtacaagaacctccagtgtctggttattgatgaggctgatcgtatcttggatgttgggtttgaagaagaattaaagcaaattattaaacttttgccagtccgcaggcaaaccatgctcttttctgccacacaaactcgaaaagttgaagacctggcaagaatttctctgaaaaaagagccattgtatgtgggtgtagatgacgataaagaggttgccactgtggatgggcttgagcagggctatgtcgtgtgtccctctgagaagaggttccttctgctcttcacattccttaagaagaaccggaagaagaaagtgatggtcttcttttcatcgtgtatgtctgtgaagtaccactatgagctactgaactacattgacctgcctgtcttggccatccatgggaagcaaaagcaaaataagcgaacaaccacgttcttccaattctgcaatgcagattcggggatactgctgtgcacagatgtggcagccagagggctggacatccctgaagtggactggattgttcagtatgaccctcccgatgaccccaaggaatatattcatcgtgtgggtagaacagccagaggtctgaatggaagagggcatgccctgctcatcctgcgtcctgaagagttgggtttccttcgttacttgaagcaatccaaggttccattgaatcaatttgacttttcctggtctaaagtttctgatattcagtctcagctggaaaagctgatcgaaaagaactattttctccataagtccgcacaggaagcatacaagtcctacatacgagcatatgactcccactcgctcaagcagatcttcaatgtcaacaacttaaatttgcctcaggttgccctgtcttttggtttaaggtccctccttttgttgatctgaatgtgagcagccatgatggcaagcttaaaaagagaggaggtggcggtggattcggctaccagaaatcaaagaaagcggagaagtccaagatctttaaacacatcagcaagaagtcagcagaccgcaggcagttctctcactgaagggaatggctttccacctggactgattttgccctaacttcccccctttctctttaaacaggaacttttttatcacctttaggatctttttgtctttactatgatgataatgttttatttttaaatattcccataaaacaaat

SEQ ID NO: 2305 - DNA, 1982 bp, Cricetulus griseus
gtgaatgctgaggacagaagagtttgatgccacagcactgaagttctttgtttggagtacacgttatgaaccctttgtggagcatgtctgcaagctctgtgcgcaaacgagctgaaggtgaagagaagacattagcaggggatgtgaaaaacagccctccacgaactgcaccaaaaaagcagctgccatctattcccaaaaacgctctgcccataacgaagcctacatctccagccccagcagcacagtcaacaaatggcacccatgcttcttacggacccttctacctggaatattcacttcttgcagaatttaccttggtagtgaagcagaagctaccaggcgtctatatacagccatcataccgctctgcattggtgtggtttggcgtaatattcatacgacacgggctatatcaggatggcgtgttcaagtttacagtgtatattcctgataactatccagatggcgactgtccacgcctgctgtttgacattcccgtctttcacccgctagttgattccaccacaggggaactggatgtgaagagagcatttgcaaagtggaggcggaaccataatcatatatggcaggtcttaatgtacgcaaggagagtcttctacaagatcgacacaacaagccccctaaacccagaggctgcagtactgtatgaaaaagacattcagctttttaagagtaaagtggttgacagtgttaaagtatgtactgctcgtttgtttgaccaaccgaaaatagaagacccctatgcaattagcttttctccatggaacccttctgtacatgatgaggccagagagaagatgctgactcagaaaaagcctgacgaacagcacaataaaagtgttcatgttgctggcctgtcatgggtaaagcctggctcagtacaacctttcagtaaagaagagaaaacagtagcaacctaagagatggtggatctggtgcaccacgcactttcctgctggactctggcctagttaaagctgactaatggcaaaggactgcctgaagagtaaacctcgtgaacagtgactggctatcagtgttgtgtatgcgtaggttctaacagcaggttgtggagacctctcattaagtaatgcgttacttctgtcagaagtgtcagggtggatctagttcagtactccaaattattggggaccttgaggcttaagtattttttctgaatatgttagaggtaagttgtgtttactttaactaacagagcagagagaaatgagcacaatgagcactgtgtagtagttggaagttggtggtctcagctgtacatacggtaggtaggtcatgaagaagggtgtagagaagagattccagagtgcagcactttcaagtagaagactggctttccggcttcagcctgctgacttgctgtaaacgtctatctcagagcattaggaaagtaggcagaaccaggatgcttgttcatagttgttttttttttttaattttttttttaagcaaattactgtatttttatggcaggaggaagaaaaaagtgttcaaacggtttctaatgaagtcaggtatttaaatggtgaatgactgttgtgttagtagagatgaaataaaccaataaatgattgattgtcatttatgcaggaaactaatgttctttttcaatataactaaacagagactaatttataagtgctttattggaaaatacacatattttcatataaaattacagtagtggtaccaagaggttttctaagtactctgcacagcactactcttgctttagagcagtatgaagttacctagtaactttgcttatatgatccaatttacaattgaattttctccttaggattattaatccaacttaaaaacaactggaacaataatgattaataaagatatgtgtagataatcaatagctgttaaataattttctaatttgtataaaatggtactacctactaataaaaacctaaattctccaa

SEQ ID NO: 2306 - DNA, 1982 bp, Cricetulus griseus
caaggcggttcttccgagcactcagcttttctgggcttctctgccacccaccccaatccaagctctgaccttgcccccagccatccgtgacaaactggacatcctaggagctgctgagacaggaagcgggaaaactcttggcttttgccatcccgatgattcatgccgtgctgcagtggcataagatgaaggtcccacccatcccaaatggcactggagtaccacttcgggagctcagggtgggagctgctgcccatcttgggtcacctcccagggaaggaactgagtctgcagtgttgcaggatgcggccagaattgagaatgaagcacatcccaagactagtgcctctgcctcagcccaggcactgctctcctgtgatggtggtgatgctggtgaaggaccttcttccttggttgaggacaagcttattcccaagcaagatgacgacagggaagaaaagcttgatgaagagcaggctgggaagttaaaacaggggctgtgtgaccgcattgctatctacagagttcacccaaggcgccccctgctgggactagtcctgactcccactcgagagctggcagtccaagtcagacaacacattgatgctgtggccaagtttacagggattaaaacggcaattttagttggtgggatgtccacacagaaacagcagaggatgctgaatcgccacccagagattgtgatcgctacccctggtcggctctgggagctagttaaagaaaaacatcctcacttaagcaaccttcggcagctcaggtgcctggttatagatgaggctgatcggatggttgagaaaggccattttgctgaactctctcagcttttagagatgctaaatgactcccagtacaaccccaatcgacaaacgcttgtttttctgccacactaaccctggtacaccaagttcctgctcgaatccttcataagaagcacgtgaagaaaatggataaaaccaccaaacttgaccttctcatgcagaagattggtatgcggggcaagccaaaagtcatcgacctcacaaggaatgagggtacagtggagacgctgacagagaccaagatccactgtgagacagatgagaaagactggtacctctactatttcctcatgcagtacccaggccgcagcctggtgtttgccaacagcatctcatgcatcaagcgcctctctgggctcctcaaggtcctggacatcatgccgctgaccctgcacgcctgcatgcaccagaaacagaggctcagaaacctggagcagtttgcccatctggaagactgtgttctcttggcaacagatgtggcagctcggggcctggatattcctaaagttcagcatgtcatccattaccaggtgccccgcacctcagagatctatatccaccggagtggccggactgcccgtgctaccagggaaggcctcagcttgatgctgattgggcctgaagatgtgatcaacttcaagaagatttacaaaactctcaagaaagacgaggacatccccctgttcccagtgcaggcaaagtacatggatgtggtcaaggagcggatccgtctagcgcggcaggttgaaaaggctgagtaccggaacttccaggcttgtctgcacaactcatggattgagcaggcggcggcagccctggagattgagctagaggaagacatgtacaaaggaggaaaagctgaccagcaggaagagcgacggcgacagaagcagataaaggtcctgaagcaggagctacgccatctgctctcccagccactcttccaggagaacctgaagaccaggtaccccacacagtctggcaggctgcctcagcccatggtggcccccaggaatggtgagtctgcactgagctgcctctctagacagaagaggaggaggaggaagaagccaaaagaacaccgggcacctccgcagtcaagtgcaagcacgagctaactgccctttgtcagtgtggtgactg

SEQ ID NO: 2307 - DNA, 1981 bp, Cricetulus griseus
ccatgttgttctgtaccttttgggcttcatatttggaaaccttggaggcaacagtgtacaagaggatttcgaggaaagcctgctgcttttttgcagacgctgaaggttactttgctgcttgcacaacagataccagtatgagtagttctttgagtgaaccactgtatgttcctgtgaagtttcatgatcttccaagtgagaagctcgagagtacaaacattgggactgaaaaaattcccaagaagtcccgtgtaaggttcagcaacatcatggagattcgccagcttccatcgagccatgcattagaggccaagttgtcccgaatgtcttatcctactgtgaaagatcaagaatccatactgaagactgtagggaaacttactgcaacccaagtagcaaaaatcaactttttcttttgctttgtgtggtttttggcaaatttgtcatatcaagaagcactttcagacacacaggttgccatagtgaatattttgtcttcaacttctggacttttactttaatccttgcagctgtgtttccgagtaacagtggagacagatttaccctctctaaactattagctgtaattttaagcattggaggtgtggtgctggtgaacctgtcggggtctgaaaaatctgctggaagagacacaataggttccatttggtcacttgctggagcaatgctctatgctgtctacattgtgatgatcaagaagaaaagtagacagagaagataattggatattccaatgttctttggttttgtaggtctgtttaatctgctgctcttatggccggggttctttttacttcattatactggctttgaggacttcgagtttccgaataaagtggtacttttgtgtatccttatcaacggcctcattggaacagttctttctgagtttctgtggttgtggggctgctttcttacctcatcgttgataggcacacttgcactaagccttacaatacctctctccatcatagccgacatgtgcatgcaaaaggtgcagttttcttggttattttttgcaggcgctatccctgtgtttttttcattttttattgttactctcctatgccattataataattgggatcctgtgatggtaggagtcagaagaatttttgcctttatatgtagaaaacatcgaatccagagagttccagaagacagtgaacagtgtgagagcctcattcctatgcacagtgtttcgcaggaggatggagctacttagctgctgttgtctgtagtccagtgtaatggaacattctacagtgaagagacaatctggcaagctccttgtagaagtgtttcagtgcctagtctgaacaataccagtttcagttctttgaaactctaaatacattttcctcatgtctgcttcatcatttcaaaatgaagaaggatgccacatagagtttgtgcagtccagttgctccaaaggaccaaaccgccttacgtatcagttctgttgatgaaatcactggaactaatcaaggaacaaaatctttctgggactcttaaacatgcttgttcagtgcctgctgtgggtgcagattctattttcgagttttgtagattgcaaaataaccacacagaagaaatgttagttaatggaacaagtatgttcatgcagagatggtggggctttagaggacaaatatttgagcaaagatctggtctgagtgcactcactgtgtgatctcttcctggtgtttggtgccttgtatcttaaaaaatgtgacaagctgtaacagttgtacagggaaagaattataaactggaaaatcatatatttctaaaggctgtgtggctataaattagttaagaaagctctgtttaatttagagttttaaagaaatattctgtcttcaattaaattttcataatggaatggtttaaattgaagtgataaagaatattattaggataaaatgtttgtatatgtatttgtgtattaaagatgtat

SEQ ID NO: 2308 - DNA, 1981 bp, Cricetulus griseus
gattaccgagaggatgggatggatctaggcagtgacgccggcagcagcagcagcagccgcgccagctcacagtccaactccaccaaagtgaccccttgctccgagtgcaaatcctcatcgtcgccggggggcagcctggacttggtgtctgctctggaggactatgaggagccctttccggtctaccagaagaaggtgattgatgagtgggctccggaggaggacggggaggaggaggaagaggaggacgatcgagggtatcgagatgaccgctgtccggcccgggagcccggggacctgagcgccaggatctgcaacagcggcggcgggggcaagagcgccaccaccaccatgccgtccccgatgcctaacggcaacctccacccgcacgaccctcaagacctcaggcacaatggcaacgtggttgtggccggccggccgagcgcttcccgggctccccgccgagccatccagaagacccagcctcccgggagccggcgcggaggccgaggccgggcagctggggggctctgcattcagcctccggacggcgggacgtgcgtcccggaagagccgccggtgcccccgatggactgggaggcattggagaagcatctggccgggctgcagttccgggagcaggaggtgcgaaaccagggtcaggcgaggaccaactccacctctgcacaaaaaatgagagagagtctatcagacagaagttggccctcggcagcttctttgacgatggtccagggatctataccagctgcagcaaaagtgggaagccaagcctttcctcaagactgcagagtgggatgaacctccagatatgttttgtcaatgacagtggcagtgacaaggacagcgatgcagatgacagtaagactgaaaccagcttggacacccccttgtctcccatgagcaagcagagttcttcctattctgatagagacacgactgaggaggaatcggaatccctggatgacatggacttcctcacaaggcaaaagaagttacaagccgaagccaaaatggcccttgccatggccaaaccaatggccaaaatgcaagtagaagtggaaaaacagaacaggaaaaagtctcccgtcgctgatcttctgccacacatgcctcacataagcgaatgtttgatgaaaagaagtttaaagcccactgatctgagagatatgactatcgggcagctccaagtgatcgtcaatgacctccactcccagattgaaagtttgaatgaagagttggtccagctgcttctcatccgagatgagctgcacacagaacaagatgccatgctggtggacatagaagacttgaccagacacgctgagagtcagcagaagcacatggcagagaaaatgcccgcgaagtgaaagggggtcatccacccctgaggaagagctagaatttattttgcttctgtggttgtgaaaaacgctgttgctaaaggtggctcaaaagcagacatcagtgttagtcattggtaacgtccgagcttactgtcccgtgactggccttcgcttcttaatttattttaaggttttttcttttttttactcgtgccacttaatatcaggccttttaataaaatattgttacaaggaatgtacagtacttacaccaccaacaaccgtggataagcagagggtagttttaactttatttttattgtttagagactttaagttggagcagtattttaccattgactactttcattcttcactgtagttttgaagaggaactgtaaatgacggtgctatacaagtcaaaatacatgcctgcctcgtagtgaagtcgtagctctccatactacgtatattttaatcagttttcaacattttgtgaatgttgactacctgaggttcattcttagatgtgctattaacattctgttggatccacttggttccttgaaagttttatgtataaatatgtaaaataaaaattaaaactttgtttcata

SEQ ID NO: 2309 - DNA, 1981 bp, Cricetulus griseus
gacctcaaaggaagacctcctgcaggctgattttgaaggcgctttgaaattcttcagagttcagcttccaaagagataccgggcagaggagaatgcaagaagattgatggagcaggcttgcaatattaaagtaccaaccaaaaagctgaagaaatatagaaaaaagaataatcaggcaatgcgagagaatcagctgcaaacaggaagacccaatggacagatacaagtgagtataaacagatatgttctcagttaagtaccaggctggaaaaacagcaagcagccagcaaggaggagctggaagcagtaaagggtaagatgatggcatgcaaacactgcagtgacattttcagcaaggaaggagctttaaagccagcagccgtaagtagagaggaccagggaattgaagccgatgatgagaaggactcacttaagaagcagctaagggagatggagctggaactgggcacaaactaaaactgcagctagtggaagccaagtgcaaaattcaggaactttgctaatgaattcaccaactgtgtgcatccaacactaagatggttgtctgtattttaggacgcctttaagtggacagaaagaacattttaaaaagacttagttatcttctaagaaagacacttagaaaatgattgtattacataacttattctttataatactctattgtgtgtgtgtgtgtgttgaaattttataggtatcctgtttcttttgtttatttagataccatgcaaccaaatacacattagatttcaagacatagtgatcaaaactggaagcccaggcagaagctctgtggcctgttttccatgaccaagcataaaactctgtctagtctttatgctgagggtcacactgagcattcttcctttcttatggtggcttatatgtaatacatgcaaggcactttatgttacctacttcctgaactttcaaactctgcaaatatgaggacccccatacagactatacctcaacaggtgatgctgatcttgaattataagacaagtagatgcatataggatttaagtgactagcagctgtcccatgtatcagtctcaatttcctcttaaaacaacaaaacaacaaaacctacagcttgagcttacctccaataaaacatgccacctgctataaaactgtctccatcaatatatccccctcattctgccctcatctctggtttatcattaagtgtatttgaaaagtttaagaaaagtgaatcattgagaagtaaatgaacattactttttattggcagttgattaacataagactccactaaactataactctgaattactatattacatatggaaaaagatcaaagaaactgatttgtgagattataaatgcatcaaaagactaatgtcatgaaagcccaagaataaagctagagatgatcccaggatacaacatgtcccaatagctttctacattggtttcgccattcatggcattttacataatgcatggattcttggttcaaattagggaaaaagcttctgtcattcccattcctttctttccaactcctgcctttgccttactgaagaggtagtacaaacctatgctgtttttatgagacatggttttacccagcatctacagtgaaaataggttagaataaaggagttgattagtctgggagtgctaattgactataaaatcaacattagccatcaatctcttcctctgtaaacagtgaccaattagttgtttccataatgccatgtattatgtatagtacactctattaatgtaaatgtgatgcttgttaagaaagtgcaatttattgtacattgtctcaataaatgtttacttttataatcgttacgaacttgaatcagattggtatctcgtgtagatgtgtgaatgaaaccttgtgaataaacaaatgtgaccaagaaagtaacaaggtggctgttttgtgtagccagtgatgttttgtattctttgtgtt

SEQ ID NO: 2310 - DNA, 1981 bp, Cricetulus griseus
gcgaagatggcggcagagagggagcctcctccactgggggacgtgaagcccaccgactttgaggagctggaggacggagaggacctgttcaccagcactgtctccaccctcgagtcaagtccatcatctcctgaaccagccagtcttcctgcagaagatattagtgcaaactccaatggctccaaacctgtagaagtcatgctagatgatgacagagaagatcttttcgcagaagccacagaagaagtttctttggacagtccagaaagagagcctatcctctcctctgagccttctcctgcagttactcctgtcacacctactgcactcattgctcctagaatcgaatcaaagagtatttctgctccagtgatctttgatagatccagagaagagattgaagaagaagcgaatggagatatttttgatatagaaattggtgtgtcagatccagaaaaagttggtgatggcatgaatgcttacatggcatatagagtaacaacaaagacttctctttccatgttcagtaagagtgaattttcagtcaaaagaagattcagtgactttcttggtttgcatagcaaattagcaagcaaatatttacatgttggttacattgtgccaccagctccagaaaagagtatagtaggtatgaccaaggtcaaagtaggtaaagaagactcatcgtccactgagtttgtagaaaaacgaagagcggcgctggagaggtatctgcagagaacagtaaagcatccgaccttgcttcaggaccccgacttaaggcagttcttggaaagctcagagctgccgagagcagttaatacacaggctctgagtggagcaggaatattgaggatggtgaacaaggctgccgacgctgtcaacaaaatgacaatcaagatgaatgaatcggatgcatggtttgaagaaaagcaacaacaatttgaaaatcttgaccagcaacttcggaaacttcatgccagtgttgaagccttggtctgccatagaaaagagctttcagccaacacagctgcctttgctaagagtgctgccatgctaggtaattctgaggaccacactgccctgtctagagccttgtctcagcttgcagaggttgaggagaagatagaccaattacatcaagaacaagcttttgctgacttttacatgttctcagaacttcttagtgattatattcggctcattgctgcagtgaaaggtgtgtttgaccatcggatgaaatgctggcagaaatgggaagatgctcaaatcactttgctcaaaaaacgtgaaactgaggcaaaaatgatggttgctaacaaaccagataaaattcaacaagctaaaaatgaaataagagagtgggaggcgaaagtacaacaaggagagagagattttgagcagatctctaaaacaattcgaaaagaagtgggaagatttgagaaagaaagagtgaaagattttaaatctgttatcatcaagtacttggagtcattagtacaaacacagcaacagctgataaagtactgggaggcattcctacctgaagccaaagccattgcctagcgataacgttatccttgttaaggagacattggattcctcagtgagatcatctagaaaccatctaaataaaccactatatattttatgaatcacatgtggtttttttatatataaaaacatatgcgctgacattttattacaagctgcatgtcctgaccctatttgaattaagtggactgtggcatgacattctgcaatattttgctgaattgaacactattgtgtcttaaataattgcactaaaaagtgcatcgcaaggccagaaaattttacaatcttttgtcttttatgttctgtagtatgtttaccctcattatgaagaatattagcaaatgcattgattaatgttcacttatacattcctgtacagaaattatgattttgtgattatagtaataaaatattacttgtgaaa

SEQ ID NO: 2311 - DNA, 1981 bp, Cricetulus griseus
cactggagtgtttgcttttataggcaaggatgtagctatacgacatgtacagaccatgtatgaggaggcatacagcgattaccttaaagacaggggaaggggaaatggcactctcattaccttccactcagcatttcagtgctgtgggaaagaaagttctgaacaagttcagccgacctgtccaaaggagcttcccgaccacaagaattgtatcgacacaattgaaaccataattagtgttaagctccagctcattggaatcgttggtattggaattgccggtctcacgatttttggcatgatcttcagcatggtgctttgctgtgcaataagaaactcacgagatgtgatttgaagatacttcatcatgaaaattgcaatcgagagttttcatgctaaatgtcacaagagcgatctcagctcatttttaatattcaggatattagaagctaaaataatttgctgttaactgtatatttgcacatgtatgtatgtctgactcattactgattttccccttgagtgaattaaaacctaggctatttaggtaaatagtgataatgggtccattctcagattttagccatgaaagttagatacataaagagaatgcagaatttcttattaatggaagcaataagctatgagaattgaggggtcacagatgctatacaaagacatgtagctgttgctttacccctcttctttcctgactctgctttgaatgctggaagcctcaccttcccaaaagggcttttatctcgcactcctctccagtgcctccccacagacgctgacacagacagcaagagctctgcagtgtgacggtgggagaaccctcctggcactgcacctttggaatacctcataacttgagtttacatgttttcttaatttttttgcatttttctaattttccacgtagagaattctttataaattaagaatacagttttcatcctttaaaataaataaatcccctgtaactcagatattatgttatgagtaccttggccaaaacaagataaacaccttatccaagatgtgtgcacacaacaaaggcaagttaatgaatcaagaatgcttttatgcatacagctacagcagatcatttttttttcagaaatccctatggattttctgaaatgtgcaggttctttggggacctgagtggttaatttaagtgggaaaacccagccacttctcaaccttttggctgcaagtgggaatcaacagtagggatctaaattggcatgtttgtcattaactgtgtgttgactactttacctaagcaaaagattattttttaaaaaatcacttcatgatttttgaccccaggagttgacaaatgcaaccttttaagcaaagaggtcaatctttcttataccattagtttctaaatctacctgaagacagaaaacaggctgaagcatgtactcaggttactccagctcagaattttttccctgctctgcagaagtgagtttcattctctatctgaatgaacaactttaaagaaaactacagtaactataagcagaagaatagaaataattttttaccgcagaggaataagtctagaaatctgtgtcatgtgtgattagtgtacctctttgtgggttaagctttccaaagaatgtgcggagtaaaaatagagaattccatctctgagtaaagatggatatatatctttatgtgaatagataaagctatatctatagagatatataatccctatgtctggaatctatacatatcttaaatacatatctctagaggatttatacatatgtaattttaatacatgtgtacctgtatgaaattatggagataaatgtttgtatgtatacacatgcacatgtgtatacattttcagttatttctgtatacctgaactaatttgaaatcaaacccaaacatttttaagttatttcaaaatttaaattttctatgtacttacaaacaaaaaaaagttaattaa

SEQ ID NO: 2312 - DNA, 1981 bp, Cricetulus griseus
tcggaactactagtgatgattctgatattgttacacttgaacctcctaagctggaagaaatggggaaccaggaagttattataaaagaagcgcccaactccgaagactttaacatgggttcttcctccagtagccagtacaccttctgccagccagaatccgtcttttcatctcagcctagtgatgaggaatccagtagcgatgacaccagccatgagcccagccctgtcccaagacgccgccgcaacaggaagaagactgtttctgtctcagagtctgaggagccaccacttgccgagccagaagatgaaccctccaaaggagccgagtaaacgccactttagtggtggtctcaacaagtgtgttatcctggctttggtgatagctgtcagcatgggatttggacatttctatggcacaattcagattcagaagcaccatcagttagtcagaaagatccacagagatgagctcactgatatgaaggactatctctcacaatgccagcaggaacaagagtcttttcttagattccaagtcactaaaagaaaaccttagagaggtgttggactgttaccgatgcagagaaggtcacctttgaaactcagaagaagaatcttgctgcagaaaaccagtatttaagaatctctctggagaaggaagagaaagccctgtcttcactgcaggaagagttacggcgactgagggagcagattagattgttggaggataaaggcacaagttcccagttagttaaggagaaccaggctcttcagcagaatttagaagtggaaaaagagaaaacaaacagtttccttaatgagagggagactctgttagaggaagcaaagatgctgaagagggacctggagagagaacggctcacagcgatggctctgcgggcagaacttgagcagttaggtccttgccaggcacaggaccacacagattctcccaatgtgcagactgaagagaaggaagtcgtgctgttacagcagagacttgccgagttggagcagaagttaacctttgagcagcagcgctctgacttgtgggaaagactgtatgttgaggcaaaggatcaaaatggaaagttggagaccgaagggaggaagagaggaagccgaggaaaccccagggctaagagcaagtcaaaggagacatttctgggcacagttaaggaaacatttgatgctatgaagaattctaccaaggagtttgtgagacatcataaagaaaaaatcaagcaggcgaaagaagcggtgaaggaaaatctgaagaagttctcagattcagtgaaatctactttccgacatttcaaagatactaccaagaatatctttgatgaaaaaggcagtaagagatttgggccttcaaaagaagcagcagctgaaaagccaagaacagcttatggttattcttcatactctctgcatgaggcattgaaccaaaagcagaattgcagaggcccttctgcacagagcaagggaggaagagaaaagcccagccacacagaagaaagtagaaaaaatgcaaattcagatacgcacaaggccaagtttgacttcagggacacccattctaccagaagggtttttccgggcatgtttgaatgtgctggacaagaatctggtagctctgttaatgcagcaagtcctgtcaggataaatgacttcagacagctgattcagtggtacttactgaatgaactggacacttttcaccactggaaagaactggatcagttcattagcccgtttttcccaaatggtgtctttagacatgaccagaagctcttcactgactttgtcgatgccgtgaaaggttaccttaagggcataaaggagtatcaagtagaggatgacagtttggagaagttggatcgatacatatatagacactttgggcacattttcgcccttccattcggacccaggtcggtttacataaaaccatgttactataatagcttctaacagtg

SEQ ID NO: 2313 - DNA, 1981 bp, Cricetulus griseus
tacaaggttcggcaccgacatcgggcaagtcatggtgctgaagatgaacaagctcccagtaaccgagcaacacgttaagggaggtgcagctgatgaaccggctccggcaccctaacatcctcaggttcatgggggtctgtgtgcaccaggggcagctgcacgctcttacggagtatatgaatgggggcacccttgaacagctgctcagctccccagaacccctatcctggccagtcaggctccacctagctctggacattgcccaaggcctacggtacctacatgccaaaggtgtgtttcaccgaagacctcacatccaagaactgtctggtccgaagggaagaccgaggcttcacagctgtcgtgggtgactttggactggctgaaaagattcctgtgtatagggaaggggcaaggaaggagccattggctgtggtgggctccccatactggatggctccagaggtgttgcgaggagagctgtatgatgagaaggctgacgtcttcgcctttgggattgttctctgtgaactcattgcccgagtacctgcggaccctgactacctaccccgtactgaggactttggcctggatgtgcctgcttttcaaaccctggtgggaaaggactgcccgctgcctttcctgcttctggctatccactgctgcagcatggaacccagcacccgtgccccctttactgaaatcaccaagcacctggaacagatcctggagcagctgcctgagcctgctcccctctccaagatgctccttgctgaggctcccttgccatacaatcgggggtctgttccaagaggaggtccctctgccacacttcccaggccagacccccggctctcccgcagccggtcagacctcttcctgccaccttcaccagaatcaccccccagttggggggacaatctaacacgagtcaaccctttctctctacgggaagacctcaggggtggcaagatcaaactcctggacacaccctgcaagccggccactccgctacccctggtactgccgtcgccactgacctctacccagctgcccttggtgaccactccagagaccctggtccagcctgagacgcctgcccgccgctgccgctctctaccttcatcccccgagctcccccgaaggatggagactgcactgccaggtcctggcccttcccccttgggcccctcagctgaagaaaagatggagtgtgagggcagcagccctgagccagaacccccagggctagctccccagctgcctctggctgtggccactgacaacttcatcagtacttgttcctcagcctctcaaccctggtctcccagatcaggacctcccctcaataataacccccctgctgtggtggtcagttccccacaaggatgggctggggagccctggaaccgagcacagcatagccttccccgggcagcagccctggagcggacagaaccctcgccacccccatcagctccccgggagcccgaggagggcctgccctgccctggctgctgccttggtcccttcagctttggcttcctatccatgtgtccccgccccaccccagctgttgcccgataccgcaacctgaactgtgaggcgggcagtcttctctgccaccgagggcaccatgctaagccacccacacccagcctgcagctgcctggggcacgctcttagcaaggcctgtgacctcaagcttccagccttggccttcaggatagcctgtaaggacagagcgcacttgctggacaaagccaaccccagatgggctgactggctcttctccccgtctaggggagcctcagcgtggtctcaaagacagagcacttcctatccgacccctgggtttgccttcccatggggatcactgaactagacacagcgttgctgacacacaagactaacacgtgcaaattatttaaaaatatttcaataaaactgcctggctggctccgggccatccatccactca

SEQ ID NO: 2314 - DNA, 1981 bp, Cricetulus griseus
caaggacctgttcccctatgattaagttgcaaggacaagtacgggaagcccaacaagaggaaaggcttcaatgaggggctctgggagatccagaacaacccccatgccagttacagtgcgcctccgccagtgagctcctctgacagtgaggctcctgaagccgacctggatggtggcatccatggggacaaggatgaagagacccggagggtcatgactgtgacagctgtgaccaccacagcaaccagtgacaggatggagagtgattccgactctgataagagcagtgaccacagtggcctaaagcggaagacaccagtcctgaagatgtcagtctctaaacgagctcggaaagcctccagtgacctggatcaggccagtgtgtccccgtcggaagaggattccgagagcccatctgagtcagagaagaccagcgaccaggactttaccccggagaagaaaacagtggcccgggcaccacggcggggtcctccaggaggacgaaaaagaagaaggtgccttcagcctcggattcagactccaaagctgactcagatggggccaaggaggagcctatggctgcagcacggccgtccccatcctcctcgtcctcttcatcctcctcctctgactcagatgtgtctgtcaaaaaaacccctcgaggcagaaagccagctgagaagccacctcccaagccccgagggcggagaccaaagccagaaaggccaccttccacctccagcagtgacagtgacagtgacagcggggaggtggaccgcatcagtgagtggaagaggcgcgatgaagagcggaggcgtgagctggaggcaaggaggcgacgggagcaggaggaggagctccggcgacttcgagagcaggagagggaggagaaggagcgccgcaaggagcgggcagagcgtgggggcagtagtggggaagagctggaagacaatgagcctgtgaagaagcgcagccgcaaggcccggggccggggcacaccatcttcctccgactcagaaccagagggggagcttgggaaagaggggaagaagttggctaagaagtcccaactgccaggctcagagtctgcaaggaagtctgggcagaaggagaagagagggcggccagacgagaagccacgagccaggcctgtgaaggcagagcgaacgcggaagcgatcagagggcatttcactggataggaaaggggagaagaagaaagaaccttctgtagaggagagactgcagaagctgcacagcgagatcaaatttgcactgaaagtcgacaacccagatgtgaggaggtgtctgactgccctggaagagctggggacactgcaggtgacctctcagatccttcagaagaacacagatgtggtagccacactgaagaagattcgccggtacaaggccaacaaggatgtgatggcgaaggcagcagaggtctacacccggctcaagtctcgggtcctggggccaaaggttgaggctctccagaaggtgaacaaggctggagccgagaaggatcgggttgatgtcgagaaggtggaggagcagcctggggagcaggctcccagagagctggtggaggatgagcccagcaccgatctctcagcgcctgtgaacggtgaggccacatcccagaagggggagagcacagaagatagagcacaggacgacgggcaggacttggaggatggcccacgggggtgctcctcggaagagctgcatgacagccctcgggacagctccgaccccgccaggcctgggagtgagcatcaggagcatgagagggtacggctggcctccgagtctgctgatgatgacgaggacagctgagctccagccaccatggccatggtgccatgtccgtccccagcctcccagggaagtgctgcactgtttgtatttgtagcctgggcctttctgcctagttctgtgatttcaattgacatgaaatggctataaaggattttgtaatg

SEQ ID NO: 2315 - DNA, 1980 bp, Cricetulus griseus
gccagctgatgtgtttcccaggcttttcaaggaatggaacatcactaagctttccattgagtatgactctgagccttttgggaaggaacgagatgcagctatcaagaaactggccactgaggctggagtggaagtcattgtgcgcatttcacatacactgtacgacctggacaagatcatagaactcaatggtggacagccacctctaacttataaaagatttcagactctcgtcagcaaaatggagccactggagatgccagcagagaccatcacttcagatgtgataggaaagtgcatgacccctctgtctgatgaccatgatgagaaatatggagtcccttccctggaagagctaggctttgatacagatggcttgtcttctgcagtgtggccaggaggagaaactgaagcacttacacgtttggaaagacatttggaaagaaaggcctgggtagcgaactttgaaagacctcgaatgaatgcaaattccttgcttgcaagcccaactggactcagcccttatctccgatttggttgtttgtcatgtcggctattttatttcaaactaacagatctctacaaaaaggtaaagaaaaatagttcccctccactctctctttatggtcaacttctgtggcgtgaatttttctatacagcagcaacaaacaacccacgctttgataaaatggaagggaaccccatctgtgttcagatcccatgggataagaatcctgaggctctggccaaatgggcagaaggccggacaggctttccatggattgatgccatcatgacacaacttcgtcaggagggctggattcaccatttagccagacatgcagttgcatgtttcctgacacgtggtgacctgtggatcagctgggaagaagggatgaaggtctttgaagaattactgcttgacgctgattggagcataaatgctggaagttggatgtggctgtcctgtagttcctttttccagcagtttttccactgctactgccctgttggttttggtaggaggacagatcccaatggagactatatcaggcgttatttgcctgtcctaagaggcttccctgcaaaatatatctacgatccttggaatgcaccagaaggtatccagaaggtagccaaatgtttaataggagtaaattaccctaaaccaatggtaaaccatgctgaggcaagccgtttgaatattgaaagaatgaagcagatttatcagcagctttcccggtacagagggctaggtcttcttgcatcagtcccttctaatcctaatgggaatggagggctcatgggctatactactggagaaaatctcccaagctgtagcagtggtattttacattatgctcatggagacagtcagcaagctcacctgctaaagcaaggaagaagctccatgggcaccagcctcagcagcgggaagcgccccagtcaggaagaggagacacggagtgttgatcccaaagtccagcggcagagcagtaactgacatggaaacacgaaggaggagttctggtgcagctgaagttggtgggccagtcaggactcttcatttaaattattaaaaatgtccttcattcacagaaaacagattttgaacatattatttctaataacatttctgtggtttttaactttttaatgaatatcacataggacaagtgctaatttgtatataaagaacttggcaaaaggtttgcttaatgtaaatatagtcacagttagtatagactcatcagtatatttttgataatttttcatgtatggtaaaagttaaagttaacagatattctgatataaaactcaagttttgagagtcattgcaggaaaatgggaagtttttagactttcttaaaagactttgttaaaattttaggacacatttttcttgacatcattgtttaaccaattctgcagtgtttgatagtaacactttagaaaacacctggaatcaaatgagtaggc

SEQ ID NO: 2316 - DNA, 1980 bp, Cricetulus griseus
aactgagacttcagtagaaaaacaaggaagaaaaaaagaaattaatttctagatgttcaaatactctcgactaaaggaaaagattcaggtgaagagctctgctgtggaggcactgcagaagtcacacattgagaacatcgctgccttcctggcctctcagaatgaggtcccggctgctcccctggaggagctgacctaccgacgctccctgcgagtagccctggatctcttgaatgagaggaccaatttgagtcctgaaagccatctgatgaaagacgagaccacattgtcccaaaaagagaagccacacgcagatatggcctcttggatccccagtgctccctctctatctttccacggtgaagatggtgaagacgtggctgctcagcgcacatccaagagtaggtgggaatatgtcccacaaagcctgtcagggttgtctgcatccgaagaggaccccaggtgcaaagtggaccgtaagacaggcctctcaaagaatggagtctcgggacgagttctgggtcacgactggaccgtggacaggaggacacaaccagtaagaggcggagggatttgggagagaaacctacccggcgccacaaaaccgagtctcgcctttctaagggagaaagtgttgtagagaacgagggacaggcaagcagctgtgtgaccccagcttcaccaaggttgctctcccaaacctgggaagaggacccctgtgctggggtgaaaggctttgaccgggttgtaccatcaggcagcagcaggctgctcccggcctctgagagaggcagacgacacccaacaaagaggccacgcttggatggaggccagaacccacaggccaggcagctgggaactggaactgtgggggcagtgccctcccttaggagctggtctggggaggctatggtactgcgcagtgctggtgacaatgacaaaccagaagaagatcctgtgtcatcagaagagtccacggggttcaagtccatccactccctgctagaggacgaggaggaggaagaggaggagccaccccggatccttctgtatcatgaaccacgatcgtttgaagtaggaatgctggtctggcttaaataccaaaatacccgttctggccagctgtggtcaagagcgtccggaggagagacaagaaagccagcgtgctcttcattgagggcaacatgaaccccaaaggccgaggaatcaccgtgtctcttcgaaggctcaagcactttgactgtaaggaaaagcacacattgctggagagagccaaggaggacttcgcccaggccatcggctggtgtgtctcgcttatcactgactaccgtgtgcggctgggctgcggctcctttgctggatctttcttggaatattacgctgctgatatcagccaccctgtgcgcaagtccatccaacaggatgtcctaggaaccaggtttcctcagctgggcaaaggggacgctgaggagcctgtgggggacagccggccaggacagtggcggccatgtaggaaggtgctgcccgaccgctccagggctgcgcgggacagagccaaccagaaactggtggagtacattgtgaaggccaagggtgcagagagccacctgcgggctatcctgcacagccgcaagccttcacgctggctgaaaacgttcctgagctctggccagtacgtgacatgtgtggagacatacctggaggatgaggcacaactggatgaggtggtagaatacctgcaaggcatctgccgagacatggatggtgaggtgcctgcacgcggcagtggggaccgcattcgcttcgtcctggacgtgctgctgcctgaggcaatcatctgtgccatctctgcagtggagtcagtggactacaagacagctgagcagaagtacatccgcggcccgacacttagctaccgggaaaaggaaatctttgacaatgaactcctggaggagaggaaccgccgccgtcgctaatgcc

SEQ ID NO: 2317 - DNA, 1979 bp, Cricetulus griseus
  modified_base (236)..(236): a, c, t, g, unknown or other
  modified_base (1238)..(1238): a, c, t, g, unknown or other
gatgactgtgccaagattcttgggaacaccattatgcgggagcttgccccacagttccagataccatggtccatccccacagaagccgaggacattcccattgtccctaccacttctggcaccatgatggaactccgctgtgtcattgccattatccgtcatggagatcgaaccccaaagcagaagatgaagatggaggtgacacactcgaggttttttgctctatttgaaaaacntggtggatataagacgggaaaattaaaacttaagcgacctgagcagctccaggaggtgctggacattacgcggctgctgttggctgaactggtgaaagaccaggcattgagattgaggaggaagacggggaaactggagcagctgaaatccgtgttggagatgtatggtcacttctcaggtatcaaccggaaggtgcagctgacttactatccccacggagtgaaaggcttcaaatgagggccaagatccgcagagagaagccctggcaccgtctctcttgctagtgctgaaatggggtggagagctgactcctgatggccgagttcaggccgaggagctgggtcgagcttttcgttgcatgtaccctggaggccagggtgactacgctggcttccctggctgtgggctgctacgtctccatagcactttccgtcatgacctcaagatctatgcctctgatgagggccgagtccagatgactgctgctgcctttgcaaagggcctcctggctctagaaggagagcttacacccattttggtgcaaatggtgaagagtgctaacatgaacgggctgctggacagtgacagtgactcgttgagcagctgccagcaccgtgtgaaggcacggctgcaccacattttgcagcaggatgcaccctttggcccagaggactatgatcagacatccttgagaaggttagccagcctaaccaggaagttcctgacatcagccagctgttcctgaagaaccatgacactgctaccaacacttgtcagccatgccagaaggctagccaactgtctcaggaagttttccaactttgtcaagataaccctgaggagagtaatcaggtgtgccaggaagttcctgtggagctgggcaggatggcccatggattctcagtaaacattgatagcatggtccaggaaacctttatagaaactggcagaccaactcaagagatctctgaagagatgggcccacattccaagagttcccngtggaggttggcatgctggctcaggaggtccctgccaacatcgagttgtctcaagacatcccagaccatatgtgcattcaaggaagctctagtcttcactatcacaggcaggcccaggatagctacctcaggtgtctgcaaaatagtgttcccttctcataaacagctgttgtggccgctcatggtttagactgggcttgtgggtgtttccttgtaattgccaagtgttccctctgccctagtcctgcccctctggacagtgactccagagaaaagtagatattagattgccatgcaacctcagagtgactacttagaacgctttggagatttggatcagtctatgaagctaggcctccggttgttgtgaggctgttgggctcagaaaatgctgtagtagagagaatcaagttctattttaagcaattagcagagatcaatgttgtacagacatgagcaaagatttaatatatatatatatatatatatatataaacatatatatttctgtagtttgccagggacagactggccaaagatcaaacactccagggtccccaagaggtgtgtccttatatcatgtgtctttaggaccgtatgtgattatgaagcttttcccaaagatccagggatgggagtgggcgtgggtaatgcagtcattgggagtcaggggccggaacatgacgagtgctcaataaatacaaaataatgagaaaaaaaaaaaaaaaaaaaaaaaaaaaa

SEQ ID NO: 2318 - DNA, 1979 bp, Cricetulus griseus
gctcgccagcctgcagctcgccagcgccaagcgagccgcccggagggtgtatttaccaggctgtttctgagtgtggattgtaccgttggtaagaaaatgtcgtccatcttgccattcactccgccagtggtgaagaggcttctgggatggaaaaaatcagccagtgggtctggaggagcaggtggtggagaacagaatggacaggaagaaaagtggtgtgagaaagcagtgaaaagtctggtagaaaaaagctacaaagaaaaacgggacgattagatgagcttgagaaagccatcaccacacagaactgcaatactaaatgtgtcaaccatcccaagcacttgctctgaaattggggactgagtacaccaaataccagcttctctgaacaaaccaggtctcttgatggtcgtcttcaggtttctcatcggaaagggttgccacatgttatatattgccggttatggcgctggccggaccttcacagtcatcatgagctcaaggcaattgaaaaacggtgcggaatatgcttttaatctgaaaaaagatgaagtatgtgtaaatccttaccactaccagagagttgagacaccagttttgcctccagtattagtgcctcggcatacagagatcctaacagaactgccgcctctggatgactatacccatccattccagggaattgagccacagagtaattacaatcccacgaaacaaccaccaacctggatatatcagtgaagatggagaaacaagtgatcaacagttgaaccaaagtatggacacaggctccccagctgagctgtctcctactactctctcgcctgtcaatcacagcttggatttgcagccagttacttactcggaacctgcattttggtgttcaatagcttattatgaactaaaccagagggttggagagaccttccatgcatcacagccctcacttactgtagacggctttacagatccttcaaactcagagaggttctgcttaggtttgctctccaatgtcaaccgaaatgctactgtagaaatgacaagaaggcatataggaaggggagtgcgcttgtattacataggtggggaagtttttgccgagtgcctaagtgatagtgcaatctttgtgcagagccccaattgtaaccagagatacggctggcaccctgcaacagtgtgtaaaattccaccaggctgcaacctgaagatcttcaacaaccaagaatttgctgctcttctggctcagtctgttaatcagggttttgaagccgtttatcagctaactcgaatgtgcaccataagaatgagttttgtgaaagggtggggagcagaataccggaggcagacagtaacaagtactccttgctggattgagcttcatctgaatggccctctgcagtggttggacaaagtattaactcagatgggatccccttcagtgcgatgctcaagcatgtcataaaaaagacttcatgtaacaactcttctgtcatagtatttgtgtatgatcccgtggactgtttgctatccaaaaattccagagtgaaaacagcacttgaggtctcatcagttaaagcaccttgtggaatctgtttcctatatttgaatattagatgggaaaattagtgtctagaagtgccctccccaaagtgggaagagaagacttaaagacttagtgatgtcttgttgggcataagacagagtcccaaaggttattaattacagtagtagttgtgtatacaggtaatgtatcaagacccagtattgcagtactctgctgtctgtatccattcttagtttccataactgaggtgtgtgtgctgcttcttggtctaaggcaagcctttataaattacagcttttttaatatataatatatatatatattaagattttcaaattatcatttagaagcagattttccttgtagaaactaatttttctgccttttaccaaaaataaacaaacttgggggaaga

SEQ ID NO: 2319 - DNA, 1979 bp, Cricetulus griseus
aatggctctgtctaagcgggagctggatgagctgaaaccatggatagagaagacagtgaagagagtgctgggtttctcatttgaggaagtagaagaggagccagaggtgatccctgggcctccatcagaaagccctggctaacaaagctccagatcaaacagatgatggaggcagcaacacgacaaattgaggaaaggaagaaacaactgagttttattagcccccctaacacctcagccaaagacaccttcttcttcccaaccagagcgacttccaattggcaacactattcagccctcccaggccgctacttttatgaatgatgctattgagaaggcaaggaaagcagctgaactacaagcccgaattcaagcccagctggctttgaagccagggcttattggcaatgccaacatggtgggcctggctaatctccatgccatgggtatagctccaccaaaagtagagttaaaagatcaaactaagcctacaccgctgatcctagatgaacaaggtcgaactgtagatgcaacaggcaaggagatcgagctgacacatcggatgcccaccctaaaggcaaatattcgagctgtaaagagggaacagttcaagcaacaactgaaagaaaaaccatctgaagacatggaatccaataccttttttgacccccgagtttcaattgccccttctcagcgccaaagacgtacttttaaattccatgacaagggcaaatttgaaaagattgctcaacgattacggacaaaggctcaattggagaagctgcaagcagagatttcacaggctgctagaaaaacaggcattcatacttcgactaggcttgccctcattgctcctaagaaggagctaaaggaaggcgatatccctgaaattgagtggtgggactcttacatcatacccaatggctttgaccttacagaggaaaatcccaagagagaagattattttggaatcacaaatcttgttgaacatccagcccagcttaaccctccagtcgacaatgatacaccagttacccttggggtatatcttacaaaaaaggaacagaagaagcttcggaggcaaacaaggagggaagcacaaaaggagctacaagagaaagtcaggctcggtctgatgcctcctcctgaacccaaagtgagaatctcaaatttaatgcgagtattaggaacagaagcggtccaagaccctacgaaggtagaagcccacgtcagagcccagatggcaaagagacagaaagcgcacgaagaggccaacgctgcccgaaaacttacagcagaacagagaaaggtcaagaaaattaaaaagcttaaagaagatatttcacagggggtgcacatatctgtgtatagagttcgaaatttgagcaacccagccaagaagttcaagattgaggccaatgctgggcagctgtacctgacaggggtggtggtactgcacaaggatgtcaacgtggtggtagtggaagggggccccaaggcccagaagaaatttaagcgtctcatgctacatcggataaagtgggatgaacagacttctaacacaaagggagatgatgatgaggaatctgatgaagaagctgtgaagaaaactaacaaatgtgtactagtatgggagggtacggccaaagaccggagctttggagagatgaagtttaaacagtgccctacagagaacatggctcgtgagcatttcaaaaagcatggggctgaacactactgggaccttgcactaagtgaatctgtgttggagtctactgactgagactactgctagccctgtgtctccttggccttttttcctctgccttctcactctactttccaacctgtccccccttgcgagtgtgatctcagaactgtgccaggcagtcattggggcaaagagactaccttgtttacccagtcagcctggtgctacccttcatcctgtatgtgcatatgattaaagagttaatttt

SEQ ID NO: 2320 - DNA, 1978 bp, Cricetulus griseus
gggaaggacggagctggggcgccgctgcctcgctcactcactccctcgcgcgctcgcccgcccccccggccccggccccggcccattcgctgcgcgctctccggctcgggaggatgtcgggctcttcgctccccagcgccctggccctctcgctcttgctggtctctggctcgctcctcccagggccaggtgctgctcagaacgagccaagaattgtcaccagtgaagaggtcattattcgagacagcctccttcctgtcaccctgcagtgtaacctcacttccagctctcatacccttatgcacagctactggacaaggaatggggtagaactcactgccactcgtaagaatgccagcaacatggaatacaggatcaataagccaagagctgaggattcgggcgaataccactgtgtatatcactttgtcagcgctcctaaggcgaatgccaccattgaagtgaaagcggctcctgacatcactggccataaacggagtgaaaacaaaaatgaagggcaggatgccatgatgtactgcaagtcagttggctacccccacccagaatggatatggcgcaagaaggagaatggtgtgtttcaggaaatttccaataactctggtcgattcttcatcatcaacaaggagaattacactgaattgactattatgaatctccagatcacagaagatcccggcgagtatgaatgtaatgccaccaactccattggctctgcctccgttttcaccgtcctcagggtacggagccaccttgccccactttggccttttttgggaattctggctgaaatcatcatccttgtggtgatcattgttgtgtatgagaagaggaagaggccagatgaggttcctgatgatgatgaaccagctggaccaatgaaaaccaactctaccaacaatcacaaagataaaaacttgcgccagagaaacacaaattaagtactgcttataatctctttaggttcctgaaaatggtggcaacacgacctgctaaattttctgcttggacctctttggtctctccctttcaagtgagcaacaccacaatgaccgtctaaagcatgccttatttagcctctcctataagggtgacctagccaggtacattttaaacaatgcttcagtgtagaaggtgtaaactattttgggcttgatgtgctgtgaatgttgcttcccttccctttgttaaaatatttaaatagaagtggaaaggtcctccaaggatcagatcatgcatgcgccattttttatgcagctgttaaattggcaaagctctaaatgcactgctgccatctagtgatcattttgtaaagtacagcaaaacatacagatatatacagtatataaatatatatatatttatatttttgggggtgggagaaatccaaaataaagtaaatgcttgtttcatttttaagctgctgatacccattccttattgtctgttgtcagatgaggaagctgcagttctgtctggtacataaagatgagagtataaacttaagtctgtcattctaagggcttaccctataatttttaagaacctggaacagtccactgaacgactataatgaattgcagtatatatgtatgattgctttttaagtgactatttttcttttgtcaaatcatgtaaattctgaaatcttttgcactgatgtgttgaaccttattcttgtatattcaatcaaggcaacttttataatttcccttttgtttccaatgaccctgaaatgttaatagcatggtgatattctatgcaactctagttacactttttggtttgacactgtatttttcacattgatttaatgattgatgatagattttataacctgactgggttctcatgcggtactaactgtagatgcatgtacttgtgtaattattgaagtgcaatggtgtaacaaaaaaaagtggattcacctgtttttaacaataaaacattgataaaaggt

SEQ ID NO: 2321 - DNA, 1978 bp, Cricetulus griseus
ggcccctccctgcggagcggcgggtgcgggcggggatgtgacggcgggcgccgcgggcctgcctggcgcgtcgtgtcggctcgcgtgtcctcgccccagcccgcaccatggcggggtccggctgcgcgtggggtgccgagccaccgcgcttcctggaggccttcgggcggctgtggcaggtacagagccgcctgggcagcggctcgtcggcctcggtgtatcgggtgcgctgctgcggcaccccgggctcgccccccggagccctcaagcagttcctgcctccgggaaccaccggggctgcggcctcggccgccgaatacggtttccgcaaagagagggcggcgctggagcagttgcagggtcacaggaacatcgtgactttatatggagtctttaccatacacttctctccaaatgtgccatcacgctgtctgttgcttgaactcctggatgtcagtgtttcggaattgctcttatattccagtcaccagggttgctccatgtggatgatacagcattgtgccagagatgttttggaggcccttgcttttcttcaccatgagggctatgtccacgcagacctcaaacctcgaaacatactgtggagtgctgagaatgaatgctttaagcttattgactttgggcttagcttcaaagaaggcaatcaggatgtaaagtatattcagacagacggttatcgagctccagaagcagaactacagaattgtttggcccaggctggcctgcagagtgatacagagtgtacctcagctgttgacctgtggagcctcggaatcattttactggaaatgttctcaggcatgaaactgaaacatacagtcagatctcaggaatggaaggcaaacagttctgctattattgatcatatatttgccagtaaagcagtggtgaatgccgcaattccagcctatcacctcagagaccttatcaaaagcatgcttcatgatgacccaagcagaaggatccctgctgagatggcattgtgcagcccattctttagcattccttttgcccctcatattgaagatctggtgatgcttcccacgccagtgcttagactcctcaatgtactggatgacgattaccttgaaaatgaggatgaatatgaagatgttgtagaagatgtaaaagaagagtgtcagaaatatggaccagtggtttctctgcttgttccaaaggaaaatcctggcagaggacaagtctttgttgagtacgcaaatgctggtgattccaaagctgctcagaaattgctgactgggaggatgtttgacggaaagtttgttgtggctacattctacccgctgagtgcctacaagaggggatacctgtatcaaaccttgctttaatcagtaacctaaggactatttcccgtttctcctcttccatttcttggattacctatattccacagctgaacgcaggagcacccctttacccatttgaaagggtaccttgtacatttatttaatcctactaatgtgcagccattgcccaaacagtgactgcattgcaaacattggcactgagtaggacaagacctctcagctatacattgagggggttagagcacccatgtgggcacccttcgtttgtgcagtagggcaggtgctgttctttagtatgtaacctaaaaagatgtcatttcatgtggtgatgaagcaaagatgagtaatttgtcatagtgaattttattaacaagtttgttaaggttggtgacatcacagattatttgtttgtattgtcaggtgtatctcattgttattctagctggcactggatgctctaataatgttaagtcattgtcaagcagcagttaccaaccatgttcttaacaatgagttgtgaatttttctaagggagtactgtaggacttaatattcctctgaagaaactgcagtgagcctatcaacatttttaaaattactattaggcttttaaatagaaagctgatgcttga

SEQ ID NO: 2322 - DNA, 1978 bp, Cricetulus griseus
  modified_base (226)..(226): a, c, t, g, unknown or other
tgggctgcagaagagggaaatatagatgatgagaccggagaagagatcaagctaccaactttagaggacaacatactcaattcttggttctggaaggaaaacgaaagaaaactgttgtaagaagctgccaacagagaggaatccaagccagaagctgaagaggaagacatcattggctcctggttttgggctggggatgagaacagatttcagccagcaactgagnttaatgaagagaacaagataacatccgaagaggaagatacagttggatcctggcctctggggcaaggaagaggccagtcttgaggcaatgagaaggggcacttttgagtccactcctggtattaaggagggaaaaattagtgggtcctggttctggaccgaagaagccaaagtaggggctgggtcgcagacaatcgaaactgggtcagaaactgaagaggaggcaatttttcagtctttgatctgggctgccaaaaaggacaatgtacgagcgggagtaaaccgtgtgtccaagccagaaaatgagttgaggttaggtcaagtgcaaaagatgaggtgattaacaaggctggcagtggagataactgtgaatctaatgcagaagctgaaaacatagtgggatcctggttctgggaaggagatgaagctagttttgaatcaaatcctactcctgtattcaaggccgtttgcaagcctaagtcttcagctgagcaggaacctgatccttccccgcagaaccccagagctgggatgaggtcactgttcaatttaagcctggtccatggggaaaggctggtttcccatccataagcccccttcaggtttccaaaagaagcagcatgtctgtttgctgaaatgtttgggggaaacctaagcaagaaggagaggaggaatcttcatgtcagtctgaaaacgagttcccatttcagtatgatccctcttaccgctcagtccaggaaattcgagagcatcttaaggccagggaaagtgcagaccctgagaactggtcctgtagctgcatacagtgtgagcttaaaattggctctgaagagtttgaagaactccttctactaatggacaaaaaccgagaccctttcatccatgaaatatctaaaattgcaatgggcatgagaaccgcttctcagtttacccgagatttcattagaaactcgggtgtcgtctcacttatcgaagccttacttaactatccgtccacccgagttaggacaaggtttttggaagatatggttagcatggctccaccttatccagatctaaatgtgattcagacatacgtgtgtcaggtttgtgaggatacctttgattatgacttggattcccccgagcagttgtctggattgtcaatgattacccacctcagtgctacttctgactaccacaaagtggttggcaagtatttggctgggttcttctacttactgaattcaggcaataccaaaacctgaaattgctactgaatttgtctgaaaatctcatcatgacaaaacgactgcttgctactgagtccatgtctgaatttatgaccctctttagtaaggaggactcaaatgacaacattcaaattgttcttgcgatatttgacaagattagcaaaaatatacagaaagaagccctgtttgctgatgatgatgatgaggaggaggaggtggtggtgaatcttgacccacttatttctgcattccatgagattgaaaactttgctaaaacactaaaacgcaaacctgacaattaaaaatcacccgaagcagaacaaaaccatttaatatgcttaaccatttgcctatgattgtccttgtgttcccaagtcataacgaccctcaagtaatgctttggtttcacagctgattccgtgtttcagtgtacctcttcaatgctggtgataattttacccaactctgtggaagctgtatcattttcctaatgccaaatgaatatacaactgagaacacat

SEQ ID NO: 2323 - DNA, 1978 bp, Cricetulus griseus
gaagacacactcagcacccacacagacctgacagacaatgagccatccatgtacgaggtccgaaagcagttcatgagacagatgagtaccatgtcttcagaaggggaaagccagaaccggcctggtgtccaagagacatatgaatccatcagagaaggagatgcaggtgacaaaggcaaaggagactggtgcacttatcaaagatgagacagcagagacaggcaatgtgaagatgagcgtgttctgggattatgccaagtctgtgggactctacaccactctagctatctgcctcctgtatgcgggccaaagtgcggcttccatcggagccaatgtgtggctcagtgcctgggccaatgatgcggtggtcaatggccgacagaacaacacctcccaaaggctaggtgtctatgctaccttaggaatactacaagggctcctggtgatgctgtcagccttcaccatggtggtcggaagtgtccaggctgcccgcctgctgcactcagctctgttgcacaacaagattcgttcgccacagtccttctttgacacaacgccctcaggccgcatcctcaaccgtttctctaaggacatatatgtcattgatgaggttctagcccccaccatcctcatgctgttcaattccttctacacatccatctccacccttgtggtcatcgtggccagcacgccgctcttcattgtggttgtcctgcctctggctgtgctctatggctttgtgcagcgcttctatgtggccacatcccggcagctgaagcggctggaatccatcagtcggtcacccatcttctcccacttttcggagacagtaacaggcaccagtgtcatcccggcctatggccgaattgaagattttaaggtccttagtgataagaaggtggacaacaaccagaagagctcatacccctacatcgcctccaaccgatggctgggtgtccacgtggagttcgtggggaactgcgtggtgctctttgccgcactgtttgcagtgattgggagaaacagcttgaatccaggggaagtgggtctttctgtgtcctatgccttacagataaccttggctttgaattggatgatacgaatgatgtcagacttggaatctaatatcatagctgtggagagagtcaaggagtactccaagaccgagactgaggccccctgggtggtggagggctcccgtgctccagaaggctggcccacgcatggggcagtggagttccggaactattcagtgaggtaccgcccgggccttgagttagtgctgaagaacctgactctgcgtgtgcagggtggagagaaggtaggcattgtgggccgcactggggctggcaagtcttccatgactctctgcctcttccgaatcctggaggcagcagagggtgagatctgcattgacggactcaacgtggcacacattggcctccacgacctgcgttctcagctgaccatcatccctcaggaccccatcctgttctcggggaccctgcgcatgaacctggacccctttggccgttactcagaggaggatatctggagggccctggagctgtcccacctgcactcatttgtgagcagtcagccagcaggcctggacttcgagtgctctgaaggcggagataatctcagtgttggccagaggcagctggtgtgcctggcccgagccctgctccgcaagagccgagtcctggttttagacgaggccaccgctgccattgacctggagactgatgacctcatccagggcaccatccgtacccagtttgacgactgcactgttctgaccatcgcccaccggctgaacacaatcatggactacgacagggtgctggtcttggacaaaggggtagtagctgaatttgattctccaaccaacctcattgcagctggaggcatcttttatgggatggccaaagatgcaggactcgcctaggatacattccaagggtttcttccttgt

SEQ ID NO: 2324 - DNA, 1978 bp, Cricetulus griseus
ggcgcagagccaggcttcaggctttttcctatccgccggcacacacagggatggatgggtgaagcccacctgggctgtggccctgcccagcagtcaccatctcactcaggccccttggtggcggcaggatgcacctctccgcggtgttcaatgccctcctggtgtctgtgctggccgcagtcctgtggaagcatgtgcgcctgcgggagcacgcggccaccctggaggaggagctggcccttggacagcagtccctggatccagtgtcgggcctaaggatcgactacctgaaggccctgcaggtcctcatggagggtggcacccacatggtgtgcacaggccgcacccacacagaccgcatctgtcgcttcaagtggctgtgctactccaatgaggccgaggaattcatctttttccatggcaactcctccgtgatgctgcccaacctgggctcccggcgcttccagccggccctcctggacctgtccacggtggaggaccacaacgcccagtacttcaatttcgtggagctgcccgccgcagccctgcgcttcatgccaaagccagtgttcgtgcccgacgtggccctcatcaccaaccgcttcaaccccgacaacctcatgcacgtcttccacgacgacctgctcccgctcttctacacgctgaggcagttccccggcctggcgcaggaggcccggctcttcttcatggagggctggggcgagggcgcccactttgacctctataagctgcttagccccaagcagccgctgctgcgagcgcaactcaagacgctgggccgcttgctctgcttttcccacgcgtttgtgggcctgtccaaggtcaccacctggtaccagtatggcttcgtccagccccagggcccgaaggccaacatcctcgtctctggcaacgagatccggcagtttgcccgcttcatgaccgaaaggctgaacgtgagccacgcaggggcgcccctgggcgaggagtacatcctggtcttcagccgcacccagaacagactcatcctgaacgaggcagagctgctgctggagctcgcgcaggagttccagatgaagacggtgaccgtgtccctggaggaccacagcttcgcagacgtggtgcggctggtcagcaacgcctccatgttagtcagcatgcacggggcccagctggtcaccgccctcttcctgccccgcggggccaccgtagtcgagctcttcccctacgctgtcaatcctgaccactacaccccctataagactctggccaccctgcctggcatggacctgcagtacgtggcctggcgaaacatgatccgggagaacacagtcacacaccctgagcggccctgggaccaagggggcatcacccacctggaccgggctgagcaggcccgcatccttcagagccgggaggtcccccggcacctctgttgccggaacccagagtggctcttccgaatctaccaggacacgagggtggacatcccgtccctcatgcaatccatccggcgcgtggtgaagggccgcccgggaccacggaggcagaggtgggcaatcagcctgtacccaggcaaggtgcgggaggcccggtgccaggcgtccgtgcagggtgccactgaggcccacctgtccgtgtcctggcagatcccatggaacctcaagtacctgaaagtccgggaggtaaagtacgaggtgtggctgcaggagcaaggggagaacacgtacgcgccttacatgctgaccctgcagaaccacactttcacggagaacatcaagcccttcaccacctacctggtgtgggtccgctgcatctttaacaagagcctcctgggaccgtttgcagatgtgctggtgtgcagcacgtagcctgtggccgggcctcaggaaggcggccttcgcagctcagcttcccaaggtccgcagtcctgctggcaactgtggtgatgacttatctatttattgagcaggcctgc

SEQ ID NO: 2325 - DNA, 1978 bp, Cricetulus griseus
agcccctcatgtgtccacaacaggagctgccagccaatcaacattccctcagtatgtgactgtgaaagggggtcacatgatagctgtgtcccctcaaaaacaggtcgtaagtgctggagaagggacaactcagtcaccaaagattccaccctccaaggttgttggcgtgcctgttggctctaccttaccttccacagtgaagcaggctgtggcaatcagtagtggccaaatccttgttgccaaggccagttcttctgtcaccaaagcagttggtccaaagcaagttgtgacccaaggagttgccaaagcaatcgtgagcggaggtggagggactattgttgctcagccagtacagaccttaaccaagactcaggtcacagctgctgggccacagaagagtggctcccagggctcagtaatggcaacattgcagctaccagccactaatttggccaacttggcaaacttgcctccgggcactaaactgtaccttaccacgaacagcaagaacccctcaggaaaagggaagctgctgctaattcctcaaggagccatcctgcgagctacaagaagattccattaattacttcaaaaggtgatgatgccagctgtttctctgcaaagtctatagagcagtattatggctggaacattgggaaaaggagggctgctgagtggcaaagggcaatgaccgtacgaaaagtgttacaagaaatcctggagaagaatccaagattccaccacctgacacccctaaaaaccaagaacatcgctcactggtgtcgctgccatggttacactccaccagaccctgagagcctgcgccatgatggggactctattgaggatgtactgactcggattgacagtgagccagagtgcctgtcatccttctccactgctgacgacctctgccggaagctggaggatctgcagcagtttcagaaaagggagccggagaatgaggaggaagtggatgtcctcagtctctcagaaccgctgaagacgaacattaaaaaggaacaggaagaaaaacaggaagagatgagattctacctgccgccaactctaggctcaggatttgttggtgacattacacagaagattgggatcaccttgcagcctgtggcactgcacaagaacacatacgcctcagtagtagaggatatgatcttaaaggccacggagcagctggtgagtgacatcctgagacaggcgctggcagttggataccagacagcatctcccaacagggttcccaaagaaatcacagtgagtaatattcaccaggcaatttgcaacattccttttctggattttctcacgaacaaatacatggggagactgaatgaggaccagtgaatacagtgaagatggttcccaaaaagcaggatgggaagctgtttctgaagtaaactgtggtgacccttgtgtttgaggaaaggtggtttctgtgcgttaaaatgccatggctatcataccattccttccatctaactgtgtgtcacagggcattgagtcccaggtgcagccctttaaagctgacttgtttcccagttctggaggaagctgaatggacacaactttgtcagcttgcgtgtctttacttcgtacaggctctgaagggtcttagcatgagataaggcaacaaagagaaacacaggctcaaaaaaacaaaaaaaaaaaaaaaagaatttggtctgtagacgacacagcaaattgataggcccacacacagatttgttcagaagtggacagagacctacatggtagaatatccaaatgagagcagattcatttactgtgataaaaacctaaagaaattgcttttggcttaagaaatatcaaatgatttaatagtctccatgtatgttaatgttttaagtgtttttctatcataatgtgtaacataattatgtatcattttgtctacaataaaacttttagtatttgcaacgaaaaaaaaaaaaaaaaaaaa

SEQ ID NO: 2326 - DNA, 1978 bp, Cricetulus griseus
tgctggattcagattcaggagcatcccagtctctcttagaggacaaagaccttgatgagtgcacggggcagctgctatatgaaggaacaacagatgtggaaaagtcattacccaaaagaggaggaatccacctgcgtggagacaaaattgcgtgtgtgtcagctgctgcctccgatgagtctgtggctggagacagtggggtctacgaagcttccatgaaacagcctggcgaaatggaggacgctacctatagtgaagaggacgtcaccgttgtggagactgcccaggtgcagataggactcagatatgatacaaaaagttcaagtttcatggtgattatagcacaactccgaaatcttcatgccttcttgatacctcattcttcaaaagtgtattttagggttgctgtgcttccctcctcggcagatgttagctgtctatttcgaacaaaagtccatccgcccacggaatctgtgctgtacaatgatgtgtccaggatggccatttctcaggcagccctgcagcagaagaccctgagagtcgatctttgctgtgtcagtaaacaccacagggaagaatgcctggctgggactcagatcagcctggcagatttaccattttccaatgagattttcatgctgtggtataatttacttccttccaagcaaacgccttgcaaaaagaatgaagaagaaaaatgaagagcctgtacttcaatccaacgagccagaactagattctatagacttggatgccgtgtcagccttacttgcaagaacttcagctgagctattgggctgtggaacaagaactggcccaggaggaggaggaggaactgaagccggaagaacaagcggggtccggggggaggagttggcttaacgatgctaagagaggcctctaatgaaactgtggctgcaaaagaggctgaagttcacttggtggagggcagtcgctgcccaggagacccaagttcatgcactggcgggcctgatgctgaagacccttgtcagccaccaactggaatccccacactggttgataaggagacgaatactgatgaagccgttgatggcaatatggcagttcgccccaaagaccgtagcagcctgagctctcgacagcatcccttcgtgagaaacagcgtgatagtgcgctcacaaaccttctccccaggcgagcggagccagtacatctgcaggttaaatcggagtgacagtgacagttcaaccttagccaaaaaatcattgttcgtgagaaactccaccgaacgacgaagtttgagggttaaaagggcagtctgccaacccaccctcaggaggactgctcaggaatgccccgtgcgcacatctctagacctggagctggacctgcaggcctcgctgactcgtcagagtcgcctcaacgatgagctgcaggccctgagggacttacggcagaagctggaggagctgaaagctcagggagagactgaccttcccccgggagtgctagaggatgagagattccagaagcttctgaaacaagcagagaagcaggctgagcagacaaaagaagagcagaagcaagacctgaatgcagagaagttgatgaggcaggtctccaaggatgtgtgccggctgcgggagcagagccggaaggtgcctcggcaggtgcagtccttcagggagaagatagcctacttcacacgagcaaagatcagcatcccgtccctgccagctgatgacgtgtgaccacacagcttaatgttacttctcgcctgctcactttccaagggagagtcaaagactgaacatttactggttttgtttttttggggcttttgtttcctgtaatataactgtcaaccctttgtaagaacttttccattccacaccagtttcatcaggttcatctgtaaagtgtgttgaatgtaactcttacatgctttgagaagaaaaaaaaaattcacagaacaaaagtggggtagtctggtcca

SEQ ID NO: 2327 - DNA, 1978 bp, Cricetulus griseus
cgctctgctggcgcgcaggacctggcttggctagagggcacccctgaccttgatctctccctggttccagatctgcgcgaagaccatgggcgccgcgctggtcactaggccgcggctggcctccctgccacgcatggcctgcggcaccctccggcgccaggcaccttttcgttccggcccagggctgccactccaagtcaggcccgcctcgctccgtgcccctgaagaagcgaggatacgatgtcaccaggaaccctcatctcaacaaggcatggcctttacacttgaagaaagactgcagcttggcatccacggcctgatccctccctgcttcctcagccaggatgtccagctcctccgcatcatgagatactatgagaaacaaccaagcgacctggacaagtacatcattctcatgactctccaagaccgaaatgagaagctcttctaccgggtgctgacctcagatgtggagaagttcatgcccattgtatacacacccacagtgggcctggcctgtcagcaatacggtctgaccttccgacgacctcgtgggctgtttatcaccattcatgacaagggccaccttgcaacaatgctgaattcttggccagaggacaatattaaggcggtggtggtgactgatggagagcgcatactgggtttgggagacctgggctgctacggcatgggcatccctgtgggcaagctggccctgtacacagcatgcggaggggtgaatccacagcagtgccttcctgtcctgctagatgtcggcaccaacaatgaggagcttctcagagaccctctgtacatcggcctgaaacaccagcgtgtccgtgggaaggagtatgatgaactactcgatgagttcatgcaggctgtgacagataagttcggaataaattgcctcatccagtttgaagactttgccaatgccaatgccttccgtctgctcaacaaataccgcaacaagtactgcatgttcaacgatgatatccaaggaacagcctctgtagctgtggcagggatcctggctgctctgagaatcaccaagaacaggctctccaatcatgtgtttgttttccagggtgcgggtgaggctgccatgggcatcgcccacctccttgttatggccctggaaaaggaaggcatacccaaggcagaagccataaggaagatctggatggtggactccagtggtctcattgtcaagggaaggagccacctaaaccatgagaaggagatgtttgcccaagaccatcctgaagtcaactccctggaggaggtagtaaggctggtgaagcccacagcaattataggtgttgctgccatcgcaggagccttcaccgagcagattctgagggacatggcctccttccatgagcgcccaatcatctttgccctgagcaaccccaccagcaaggctgagtgcacagctgagaagtgctaccgggtcactgagggccgagcgatctttgccagtggaagtccttttaagagtgtgactctcgaagatggcaggacattcattcctggtcagggaaacaacgcctatgtgtttcctggggtagcactgggtgtcatcgccggtgggatccgacacatcccagatgagattttcctcctgactgcagagaatattgcccaagaagtctctgaacagcacctgtcccaggggagactgtacccaccactcagcaccatccgagacgtgtctctgagaattgcaatcaaagtcctcgactatgcatataaaaacaacttggcctcctactatccagagcccaaggacaaggaggcttttgtaaggtctctgatctacactccagactatgattcgttcacactagacacctacagttggccaaaggaagctatgagtgttcagaaggtctgatgcactctctggggtgtttgggctggatgaagaatacaatataaatgtgttaccaaaatggaaaaaaaaaagttaata

SEQ ID NO: 2328 - DNA, 1977 bp, Cricetulus griseus
cgggtactgctggtctgtgtgttctgagggagggtcgcgccgccagccaccgcgggaggagcccctcgggccgttgtaagcatcaataatgtctttcatctttgagtggatctataatggcttcagcagtgtgcttcagttcctaggactctacaagaaatctggaaaacttgtattcttgggtttggacaatgcaggcaaaaccactcttcttcacatgctaaaagatgacagactaggccagcacgtaccaacactacatcccacctcagaagaactgacaattgctggaatgacttttactacttttgatcttggtggacatgagcaagcacgtcgggtttggaagaattatctcccagcgattaatgggatagtttttctggtggactgtgcggatcattctcgtctcatggaatccaaagttgagcttaatgctttaatgactgatgaaacaatatccaatgtgccaattcttatcttgggaaacaaaattgacaggacagatgcaatcagtgaagaaaaactccgtgaaatatttgggctctatggacagaccacaggaaagggaaatgtgtctctgaaagagctgaacgcccgccccatggaagtattcatgtgcagtgtgctcaagaggcaaggctacggcgagggtttccgctggctctcccagtatattgactgatgtttggacagtgaaaataaagagtttttcttctggactgatcctattcacagcttcctcatggacttttctaatagaacaaggagagctctccaaccatgtctggcgttgagaagccatgcatctctgtctacgctcatcgcccagtggtgacatgtgctcttctccacactgcctgtctgctgatgcaggtcagtgtgcagggactggggctggcaggatttgccaggaaaagctgggtgccatcatgggacacctggaaagaaaaacacgtctcaccactggttgatttcaaaagaaagtgattctattttttaaagaaagtgttgttaatgtaattggtatcccttctctaactttttgagttcacaatttacttggtccaaattttctattctttttttttaactagtaaatgaaatttagatacttcataaaattatgaacagatagcgcagctccgctgtctaactgccttgttggaggtggcgccgaagcacaagtgctaggagaggatggagccttggccttacccggggcagtctccattgtggtaagaggagtccctcatctggagtgggaaagtgtcattgttacattgccagctttacttgcagttaacagtttctgcaggctttgcttttatactgttgtggactttcatctctctgtgtagcaccttccttttttcactgtagatataaaaagtgacttttgcctcatgaaagagttcttatctcttatgtagaccccatactgagtgtcttaagcctctgaacggattctagagggatgtatgggttctgaacaggaggacacaggtcacaatcaacagcttaaggctctgacttctgttgagtgaactagggtaggttctggtatgcttttcattacttttggctaaaggtttcccatgtggtctctgtcacatgacacatgacaggtgtgattgcctcagtgttggtttccttatttgtctttctcatttgtccctaatcaccctgtagcgagctagaggactggactctgcccagggcggctctttgtgaaagtggtttattttggccactggagaaagagatgactgaaaagtggcaccagtctgattcctgccccgcagacaccatcctaaataaagtggccaaaagaagctgccgcagggggctcagatgaatggaaactccattctgtttatcagagtgcacatgtgtcctatttcagcaaaagtaaaactgtcatttacaaaaaggtcagtctgtagcctaagcattttaataaaaagctaaaatgaa

SEQ ID NO: 2329 - DNA, 1977 bp, Cricetulus griseus
gccggggcgggcgcctcagccatggccctgcgaaaggagctgctcaagtccatctggtatgccttcaccgcactggacgtggagaagagcggcaaggtctccaagtcccaactcaaggtgctgtcccataacctgtacacggtcctgcacatcccccatgacccagtggccctggaggagcacttccgggatgatgacgatggccccgtgtccagtcaaggctacatgccctacctcaacaagtacatcctagacaaggtggaggagggagctttcgttaaagaacacttcgatgagctgtgctggacgctgacggccaagaagaactatccggcagacagcaatggaaacagcctgctctccaatcaggatgccttccgtctctggtgcctcttcaacttcttgtctgaggacaagtacccactaatcatggttcccgacgaggttgagtatctgctgaagaagcttctgggcagcatgagcttggagatgggcttgggtgagctggaggagctgatggctcaggaggctcaaactgcccagacctctgggggactcagtgtctggcagttcctagagctcttcaactctggccgctgcctgcggggcgtgggtcgggagtccctcagcatggccatccaagaagtctaccaggagctcatccaagatgtcctgaaacagggctatctgtggaagagagggcacctgaggaggaactgggcggagcgctggttccagttgcagcccagctgcctctgctactttgggagtgaagagtgcaaggagaaaagaggcaccatcctgctggatgctcagtgctgtgtggaggtgcttcaggaccgcgaaggaaagcgctgcgtgttttgtgtgaagacagcgagccgcacgtacgagatgagcgcctcagacacgcgccagcgccaggagtggacggccgccatccagaccgcaatccggctgcaggccgaggggaagacgtcgctgcacaaggacctgaagcagaaacggcgggagcagagggagcagcgcgagcggcgccgggcagccaaggaggaggagctgctgcggctgcagcagctgcaggaggagaaggagaggaagctgcaggagctggagctgctgcaggaggcgcaacggcaggccgagcggctgctgcaggaggaggaagagcgccgccgcagccagcaccgggagctgcagcaggcgctggagggccagctgcgggaggcggagcaggcccgggcctctatgcaggctgagatggagttgaagaaggaagaggctgcccggcaacggcagcgcatcgccgagctggaggagatgcaggagcggctgcaggaagccctgcagctggaggtgaaagccaggcgggatgaggaggccgtgcgcctcgcccagaccagactgctggaggaggaggaggacaagctgaggcagctgatgcacctgaaggaggagcaggagcgctacatcgagcgagcgcagcaggagaagcaggagctgcagcaggagatggcgctgcagagccgctccctgcagcacgcccagctgcagctggaggaggtgcggcagcaccggcagagggcggacgaggacgtggaggctgctcagaggaagttgcgccaggccagcaccaacgtgaaacactggaatgtccagatgaacaggctcatgcatccgattgagccaggagacaagcgaccaaccaccagcagctccttcaccggcttccaaccctctccacttgcccgccgggactcctctttaaaacgcctgacccactggggttcccaaggcagcagaacccttgcagccaacagcagtgaacggaagtctctcaatggtggggatgagactcctatcctggcttctgcctctcaggaagataaactggatccagcaccagaaaattaacctctgatgaccccttgttcttctgacactgtgtctactaggacctggctacagcgggcctgt

SEQ ID NO: 2330 - DNA, 1977 bp, Cricetulus griseus
ccgggattgatcgtggaggaacatggcgttgctggtgcgagtccttaggaaccagactaacatctctcagtgggttccaatagccaactggtatcggtgtctcctactcaaagacagtgggacaggactctctccagcacttcccagaggccacagatgaaccagtctcgagtatgggtggaattagaacaaagtgttgggatggacacacagcagaataggaaataccacaccacaagtaagcttcctactatccaagatttcccaaagcctgttgaggagaaggtcggtcccttcacgaagataatagaagccatgggattcactggacctttgaaatacagtaaatggaagattaagatcgcagccctacgcatgtacacgagctgtgtggagaaaactgactttgaggaattctttcagaggtgtcagatgcccgatacattcaactcatggtttcttataactctgcttcatgtctggatgtgtctagtccgaatgaagcaggaaggccggtctggaaaatacatgtgccggatcatagtccattttatgtgggaagacgtggagcagcgaggcagagttatgggggttaattcctatatcctaaagaagaacatggcctacatgacaaacagtttctatgcgtcaatcttgggatatgatgaggggatcctttctgatgatcgtggactggctgctgccctctggagaaccttcttcaaccagaaatgtgaagaccctcggcagcttgaattgctggtggagtatgtgaggaaacagatgcaatacctggactccatgaatggtgaggatctgcttctgacaggagaagtgagatggcgccctctggtggaaaagaatccacagagcatcttgaagcctcgtactcctacttacaatgatgagggtctttgagagactggcccgactgactgctcagctggctggctggctatgaggaacccccatggaagaagtgcctgtttatctaggactctgaagaaggtggcctgaactgacttttgaacagcacctgttgaatactcgggtcctttgtgttgagtttcttcttggtgatcgggaggtcatctcgctctcccgacatgttccctccctcaagagaagccccaagcacactttccaagtccctccagcagcacatgtgactgagagcttttcccaaaggctgaggaagggatgggtaggttagaaaggggcccctcacccagggccccctgtgcctaggagaagtttctaatgtgtcaagatggataaccatatactgtcccccagctatgagccatggggttgaagtagccattaaaaaaaagatgtatttctgccatggttcttctttgttccagggtcttttagaaacctaggtaaagccggtccttgtggcacgtctttaatcccagcgcttgggagacagaggcaaggggatctctgagttcgaggccagcctggtctacagagcaagtgccaggacagccaaggctatacagagaaaccttcctgtctcaaaaaaacaatctgagctcttaaggggcctgttcttcctctcagagagtttgggtcatctcttggaaggtttttctgaaattgaggaaagggggtgggaacagtcttgccctccctcccccatccagctttcttcattgaacttgttataaaatgagtcatataaagaaactctataccgtgaggtagacgccacttctgtgaaaacattacaaatcaagccgccttctcttgctttatttgcgatgctttggttgcaagcggggctctggagtgaagcgtcctctgtgagtgcgagataataacaccttgtaactcattacatctgggcactatttacataaaccagaagcgagccaggcaggaatttgctgattaatttatttttaatggagtgaagtatgccatgcaccaaaataaactttactgtgtgtaacctaaaaaaaaaaaaaa

SEQ ID NO: 2331 - DNA, 1977 bp, Cricetulus griseus
cccgggagtcggtggttggagaagaggaaggcaagagactggaacactttaccaagttacggcccaagcggaacaagaagcagcagcctacacaggcagcgatctgtaccaccagcatcgtcccccatgatggagaacagaacggactcatgggcagagtggatgaaggtgtagatgaatttttcaccaagaaagtgactaaaatggatggcaagaggtcatccacacgctgctcggatgcccacgatctgggtgaaggagatgagaagaaaaacgggaattctaggagaagtggctttctcaacctaatcaaatcgcgctccagaactgagcggccacccacggtcctgatgccagaagagttctcatccccaaaaggggcaattcggagtccgccagtggacaccaccaggaaggacataaaagcagctgaacacaatggtgctgccgaacgcacagaagagatgaagactccagaatccctggaggagggtctgtcagaggaagcaagcagggttgagcgcagtgacagcaggggtagcccacagagtggccggcgctatgtgcaggtgatgggcagtgggctgctggctgagatgaaggccaagcaggagcggagagccgcgaatgcacagaagaagattgtcaatgacgccatctcccaggattcctccagcccagtcttgagcaacacagagcggtcagatgcgggcggaacagtgcccaaactgcacccaggtgctccagaggcccgctttggtttgggaacaccagaaaagaatgccaaagcagaacccagagtggatgggggctacaggtctcgaagctcctccagcgtgcccaccagtccgaagcccctcctgcagtcccccaagcccagcccaggagcccggccctccatccctcagaagccaagaactgcctcccgacctgaagacaccccagactctccatctggtcctagttcccctaaagttgctcttcttccacccatcctcaaaaaagtcccctcggacaaggagcgtgatggccagagcagcccccaggccagtcccaggaccttttcccaggaagtctcaaggagaagctggggtccacaggctcaggagtatcaagaacaaaaacaacagtcctctggcaaagatggtcaccaagggagcaaatccagtgactctggagaagaggcagaaaaagagtttattttgtgtaacggtgcccaccccaagccttcccatgcagggtgctctcctcagccctcagagaggagccacgggcagtgcgtcttctcccttctctggtgctttcttctttctctcgtttcttatgccttcacaaaaagccagcaattattccacgggccctacttgaatttctctgaggcagctacacattgccctgcatggtattttttggaaattaatgaagtaactggactcacacctaagcaactatccaggaaaccctgggggcactgcagggtgtatttgtgtcagacctacacatgactcgatatagcaatttattcttgatgtatgcaattgcacattgtaatattaacagagcacactaataaataatttgtataaattatatatattagatcttgggcattgttcttcatgcttctgtaggggcacttccttccccatggaaaattgtacatttaaagcttggttggtaaccttcgaagaccatcagcaagcacagctaagaacacagtgtgagaagcccggattcgtgtatatagtcgattggaatgaggtcttagaatattcatgtttttgaaggcctttaatttctgtctgcttattagctattaatgtgtggtttttaagagaaaattttggcacctgtaaaaaagaaaagatgtctaaatactactctttataaaacatctcacagatattcacttacgttacaggctgaaagtattttattcatatgtatatttataccaataaaatgattttccaagtg

SEQ ID NO: 2332 - DNA, 1976 bp, Cricetulus griseus
attgatcttcctagaaagaggatctctaatttcactagtaagaacatgaaggaggttaagaaatctccaaaacagttggctgcttacataagtagaacagttggacaagctgtgaaaagcccagataaactgcgcaaggtgctctatcacagaaagctagttcgtcatccctttccaaatccttgttacagaactaagcagtcccctaaaagtgggggctgtgacatggcaaataaagaaaatgaactggcttgtgcaggccatctgccggaaaatttacgccatgatagtcgaacatttgtagttaatgccagtgattctggttcttcacagacaagaaagcccatcgtcaaaatatagtggtttctcaggaccacgagacaatggcccaagttctgttcagcaggaatttgagattgaatgtagctttgactttctggagaaagagaagtataagtgaacttgtagcttatttagtgaggatagaagaccttggagttgtggtagattgccttcctgttctaaccaatagtttacaggaagaaaagcagtatatctcacttggctgctgtgtagacttactgcctctagtaaagtctttacttcaaagcaaaatttgaagaatatgtaatagttggcttaaactggcttcaagcagtaataaaaaggtggtggtcagaactctcatctaaatcagaaattacaagtgatggaaatattaaagattctaaaagcaaacagttgaatggattatgggaacaggaaaaccaattcttactttggttccaggatatactggtaatatagctaaggacgtagatgcttatttattaacagttgcattgaaagatttcatcttctaaattgggctattcaaacagcgctggattatatgatttccaaaagtagatctctcctgagaactgtgaactgtggaagaaataaaaccaatgtttcttttaaaaagccacataataaaaccactaatgaaatcctaacaatctacttcacattgaagtggaaatatccagaaggagcagcttcagcttcaatgaggtgaaagtgcactatgaagactgttcgactttgctgcatgtagaatctttatggccgtttggtagcattgtttaagaactgctgggtcttaactcaatcctgcataagaatatcacttatagtatgcaaaacaagacagaacttatttccaggaactataaagaccaatcattaatttttattgtgttttatgaagaaacacttaaatgtgtgcagctattttcttctgttgaaaagacttcaaaagtttaaaacatcatagtaagtaatattaaattttttttgttccacactgataccatgtacaaatgccttaattattgataagccaatgtgttataacaccaatatctcttttaaaaaattaaaagcaaccatgcttctggcatgataaaatcatggaattaaatcaggggtttacattcatgtagaatgttgttaaaatatatcctataccatatttttaaacttgagaaaattttagcatctctgttattttttccagaatcttcatgttatgtgtgtatgtttgtgttatccttatataaaaagaaaaggtgaatatgtatttgtatgaatgtttaactggaaatgttcttggagtttggctaatttatattcactttttattgtatatagatttctaatatttttcatttctgtaacattttaacttcatttgagtaaatttactaaatatttctattttttgcttttttcaattctaattttatatgaaatctagttctttttcactacatgtgttctgaaaaattcgtacatgtttcagaattgtttacagttaatgctgacattgtacttttaagttccaacacattgcatctctacctcctctaatggttagtatgaaatcccagcaaactatatgccagcagttttcttttgttgttgttattgtt

SEQ ID NO: 2333 - DNA, 1976 bp, Cricetulus griseus
gacgcaggtgaaggagaagatcctggaagccttctgcaagaatgtaccctactcacagtggcctcgggcagaggatgtggacctcgaatggtttgcctcaagcacccagagctatgtcctgcgggacctggatgacacatcagtggtggaggacggccgtaagaaactgaacacgctagcccactacaagattcctgagggtgcctccctagccatgagcctcacagacaagaaggacaacaccctgggccgagtaaaagacttggacacagaaaagtatttccatttggtgctgcctacagatgagctggtggagcctaagaagtcccaccggcagagccaccgcaagaaggtgttgccagagatctacttgacccgcctgctgtcaacaaagggtacactgcagaagttcctggatgacctgttcaaggctatcctgagcatccgagaggacaagcccccgctggctgtcaagtatttctttgacttcctagaggagcaggcagagaaaagaggcatctctgaccctgacaccctgcacatctggaagaccaacagccttcccctccgcttctgggtgaacatcttaaagaacccccagtttgtcttcgacatagagaagacagaccacattgatgcctgcctgtctgtcatcgcacaggccttcatcgatgcctgctctatctctgacctgcagctgggcaaggactctcccaccaacaagcttctgtatgcaaaggagatccccgagtaccggaagattgtacagcgctattacaaacagatccaggacatgactcctctcagtgaacaggaaatgaacgcacacctggcggaggagtctcggaaataccagaatgagttcaatacaaacgtggccatggctgagatctataaatatgctaagaggtatcgcccacagatcatggctgccctggaggccaaccccactgcccgcaggacccagctacagcacaagtttgagcaagtggtggctctgatggagaacaatatctatgagtgttacagcgaggcctgagggagaagagtgaccaggagctcctgcagggagacagtgcacaggccacttgggcctccgtttggtctcttccccacacctcttaacttgggcagggaactggcaaagaggagcctgctggggtaggaaggaggacactggcctcttagtgccagctgcagagctctcagtcttctctcccctgggggatctctgtcccctccgcttgcccgagacctgactggaacaagggctttgaacattgcttccagtccccaacaaggctttccctgccaaccaggacagcctggactgtgcctgcctgctcgctctgttccaggctgctcagcacacattgggagaggtggccatatcccagaacactacctcatccacctggcagagtggaatttctgcttcagccaccaagaagtcatctgtgtccctcacagagggggccctggacaccaacagttccaagcagggtcattttttttttgttccgtcggccatcggcagcatgggcagtgcccattgcccatagaatgatgaagagaaggagacaggttgggggttcctggtcccccagaaagggagaaagtcgaggatgcggggctgtagctggactacccaatcttcctggaagtgtttctaaagagcacctacttttttttggttttttttaaatcttttatatattaaaaaaaaaaaccttatcacgcaccaactgtgaatagctgccgcttgtgcagagacccttgggtccccagaggctcctgctgtgacactgaatgttaccgagacagaaaacagtaatctctcaccagcacagcacaggccaccctccatagctgctgggactggctcagagcctgaggaggctgggctggaacgggaggctgggactctctggaacattctttaataataaaagcctgccggggaaaaaacaaaaaaa

SEQ ID NO: 2334 - DNA, 1975 bp, Cricetulus griseus
aggtggtaggagcttcaggctccggagcaaagatggcggcacgagtgctgctcgcgcgaggaggcctgctgcggccagccgcccctggcagcttcctgcccgggctccggagagtgacatcctcaagtcacagaggctcgggaagacagctggctcaagtccttatttgtccgaaaggtggatcccaggaaagatgcacactccaacctccctggccaagaaggagacgagcagtctgtacaagttacagtttcacaacgttaaagccggaatgtctagacgcatacaacaaaatttgtcaagaagtgttaccaaagatccacgaaggcaagcagtacccttgtaccttggtggggacatggaacacgtggtatggcgagcaggatcaagccgtccacctctggagatatgaaggaggctacccagccctcacagaggtcatgaataaactcaaagaaaaccaggaatttgtaaatttccgtaaagccagaagtgacatgcttctctccaggaggaatcagctgttgttggagttcagtttctggaatgagccggtgccaagatcaggacccaatatatacgaacttaggtcctaccaacttcgtccaggaacaatgattgaatggggcaattactgggcccgtgccattcgctttagacaggacaataatgaggcagttgggggattcttctctcaaattgggcagctatatatggtgcatcatctttgggcttataaagatcttcagaccagggaagacatacggaacgcagcatggcacaagcatggctgggaggaactggtgtactacacggtcccgctcatccaggaaatggagtccagaatcatgatcccgctcaagacctcacccctccagtgaagcttccatgtgcctacacggatttctgtgacgaatatatgtcatgaattcatttcagtcactcatcaagtgaaaaaagaaactgaggtgtaagctgctgtacatagcttataagatctcttttctttaaaatttaaaaccaccaagggaaatccggggattgaactacgtagggcatcgatctgcctcatctctgcttaccaaacattacttaagcctctagcccttcaggaaaacatgataattcaaagccgggtgtggtagcttagcactcagggagctgaggcaggagaattacagtaagtcctaggttagtctgggctacatagagagtttcatcttggacccctaggcttgcatagtgagaccctgtctcaaaaaccaaaattaaaatttgaatcatctgagtgaaattccagctctgaaaagaattagctattgctttctatttttaaaaaatctgttttacgtttacagattacacattttcttccttcaggaagaaatgcaaatcacgtcatgtttcccaagcagtttttctgtgtctcagactaggaacaaattttgagtgtacccaatggctgggaatactctgattttgtgacttctggtcagtcagcagggctgagcagtgcttcaccctgagctgaaagggtggtcacagtgccccgaccagaaatgcaggctccatccacgaggcactgtgtcctaaagggttggtatgaaccagtgcaccacacgagatttgggaataaacacctcaaatagctctaattttgtttgtaatatttttctataaaacaagtagctcttggaaaagaggttttattttgtaagccaccgtttgtgacctctgacctctggttctattttggtaagctcacagaagacacttccatgacctcgtatgaagggcagtgcacgctgggtctgagttggcatagtgcttcatattttgtctgtctccgtttggttttgtttttaatattagtgtgccaatttgtgagtgtcatcatgtgggagtccccttgacctgaagaattatgtctgccctgcaaattgatacatgtaaaataaagtatgactaaatctcc

SEQ ID NO: 2335 - DNA, 1975 bp, Cricetulus griseus
gcagcggacaggcgagcagggggcgggcggacatcttgggatccgagagtggcccgccggccttgtggaggctgctgactccaggtctgttctcagagcaatgggtcacagagactgagctgccaccatgattggaggtttattcatctataatcacaagggggaggtgctcatctcccgggtgtacagagatgacatcgggaggaatgcagtggatgcctttcgggtcaatgtgattcatgcacggcagcaggtgcgcagccctgtcacaaacatcgctcgcaccagcttcttccatgttaagcggtccaacatctggcttgcagcagtcaccaagcagaatgtcaatgctgccatggtcttcgaattcctctataagatgtgtgatgtaatggctgcttactttggcaagatcagtgaggaaaacatcaagaacaattttgtgctcatatacgagctgctggatgagattctggactttggctacccacagaactcagagacaggtgcactgaaaaccttcatcacccagcagggcatcaagagtcagcatcagacaaaagaagaacagtcccagatcaccagccaggtgactgggcagattggctggcgccgggaaggcatcaagtatcgccgaaatgaactctttttagatgttctggagagtgtaaatctgctaatgtccccacaggggcaggtgctgagtgcccatgtgtcaggccgggtggtgatgaagagttacctgagtggcatgcctgagtgcaagtttggaatgaatgacaagattgtcattgaaaagcagggcaaaggcacagccgatgaaacaggcaagagcggtaagcaatcaattgccattgatgactgcaccttccaccagtgtgtgcgactcagcaagtttgactctgaacgaagcatcagcttcatcccacctgatggagagtttgaactcatgagatatcgtaccaccaaggacatcatccttcctttccgggtgatcccattagttcgggaagtgggacgcaccaaactggaggtcaaggtggtcatcaagtccaacttcaagccctcacttctggcccagaagattgaggtgaggatcccaaccccactgaacacaagcggggtgcaggtgatctgcatgaaggggaaggccaagtacaaggccagcgagaacgccattgtatggaagatcaagcgcatggcaggcatgaaggaatcacagatcagcgcagagattgaacttctgcccactaatgacaagaagaagtgggctcgaccccccatctccatgaactttgaggtgccattcgcgccttctggcctcaaggtgcgctacttgaaggtatttgaaccgaagctgaactacagtgaccatgatgtcatcaaatgggtgcgatacattggccgaagtggcatttatgaaacccgctgctagctgcctagtggcagctggcccacctccccacccacccttttccacaggttcaagtaccccagtgaccactcgtcagtgtctttcctccctcctgctttgctgcctttcctttactctagcccctgagtataggtctgaaccagccacagtgggactgctgaggcggtccccagcttcctgggcagggtggtttttgaggcttctcttccatctatctgtcctggcttagtaccaggccctgagttttgtgaccaaagtcaggtggccccctctctacccttgtggccacacctctgcagtaggatggttgacaacccctcacctcagagctcccctaaaggccagtaacagatccccagcccttaacccctactctgctttgggatagtatgctttgttttgtacacatgtgacttcgtccagttataaacccaataaactgtagagtaggagttgttggctagtgttaatggggctgtcggggagggtctggtgggcctgttaactctgtgtagccctggctgtcgtggaactgtgtgt

SEQ ID NO: 2336 - DNA, 1975 bp, Cricetulus griseus
tctgggtcattgatcaaggtctgaaaaagattctggaggtggggaggctccctgcagaatgcagctggggagctcacagtgacagccaacagccgcatgagtgcctccatcctcctcagcaagctgttcgatgacctgaagtgtgatgccgagagggaaaatttccaccggctctgtgagaactacatcaggagctggtttgagggccaagggctggccgggaagctgcgagccatccagacagtgtcctgccttctgcagggcccatgtgatgcaggcaaccgggccttggagctgagtggtgtcatggagagtgtgatcgctctgtgtgcctctgagcaggaggaagaacagctggtggcagtggaggcgctgatccatgcagccggcaaagccaagcgggcctcgttcatcactgccaatggtgtctccctgctcaaggacctatacaagtgcagcgagagggacagcatccgcatcagagcgctagtgggactctgtaagcttggatcagctggagggactgactttagcatgaagcagtttgctgaaggctctactctcaaactggccaagcagtgccgaaagtggctatgcaatgaccagattgatgcaagcactcggcgctgggcagtggaaggcttggcttacctcacctttgatgcagacgtaaaggaagaatttgtggaggatgaggctgctctgaaggccctgttccagctcagcaggtccgaagagaggtcagtgctcttcgcagtagcctcggcactggtcaactgcaccaacagctacgactatgaagagcctgaccccaagatggtagagctcgccaagtatgccaagcagcatgttcctgagcagcatcctaaggacaaaccaagctttgtgcgggctcgtgtgaagaagctactgacagcaggggtggtgtcagccatgacgtgtatggtgaaaacagagagtcccgtgctgacaaactcctgtagggagctactctccagggtcttcctggctttggtggaagaggtggaggatcgaggtaccgtggttgcccagggagggggtaaggctctgctcccgctggccctggaaggcactgatgttgggcagacaaaggcagcccaggctcttgccaaacttaccatcacctctaacccggagatgacctttcctggtgagcggatctacgaagtggtccggccccttgtctctctgttgcacctcaactgctcaggactacagaactttgaggctctcatggccctaacgaacctggcagggatcagtgagaggctcagacagaagatcctgaaggagaaggctgtgcccatgattgagggctacatgttcgaggagcatgaaatgatccgccgggcagccacagagtgcatgtgtaacttggccatgagcaaagaggtgcaggatctctttgaagcccagggcaacgaccggttgaagctgctggtgctatacagtggagaggacgatgagctactgcggagggctgctgctggtggcctggctatgctcacctccatgcggccctcactctgcagccgcatcccacaagtgaccacacactggctggagatcttgcaggccctgcttctaagccccaaccaagagctccaacaccgaggcagtgtggtggtgttgaacatggtggaggcctcaaaggagattgccagcaccctgatggagagtgaggtgctggagattctgtcagtgttggccaagggtgaagagagcccagtcaccagggccgctgcagcctgcctggggaaggcagtggaatacggcctcatccaacccaaccagaatggggagtgagcattggccctgggcccacagctcatgcatccgccaccacagccctgctctgccagcactcaggagggcccctatgtctgtagtgagctggggatggcagagcctgccagcaggttcatccctccaataaatcgtgtgggaactgaaa

SEQ ID NO: 2337 - DNA, 1975 bp, Cricetulus griseus
gccgggcggtgagcaagatggcgcagactcagggcaccaagaggaaagtctgttattactacgacggtgatgttggaaactactattatggacaaggccacccaatgaagcctcaccgaatccgcatgactcacaatttgctgctcaactatggtctctaccgaaaaatggaaatctatcgtcctcacaaagccaatgctgaggagatgactaagtaccacagtgatgactacattaagttcttgcgttccattcgcccagacaatatgtctgagtacagcaagcagatgcagagattcaacgttggtgaggactgtccagtatttgatggcttgtttgagttctgtcagctgtctactggtggctctgtggcaagtgctgtgaaacttaataagcagcagacggacattgctgtgaactgggctgggggtctgcatcatgcaaagaagtctgaagcatccggtttctgttacgtcaatgatatcgtcttggccatcctggaactgctaaagtatcaccagagggtgctgtatattgacattgatattcatcatggcgatggtgtggaagaggccttctataccacagaccgggtcatgactgtgtcctttcataaatatggagagtacttcccaggaactggggaccttcgggatattggggctggcaaaggcaagtactatgctgttaactaccctctccgagatgggattgatgatgagtcctatgaagccattttcaagccagtcatgtccaaagtgatggagatgttccagcctagtgcagtagtcttacagtgtggctcagattccttatctggagaccggttaggttgcttcaatctgaccatcaaagggcatgccaagtgtgtggagtttgtcaagagtttcaacttgcctatgctaatgctgggaggaggtggatataccatccgtaatgttgctcggtgctggacttacgaaacagctgtggccctggacacggagatccctaatgagctaccgtacaatgactactttgaatactttggaccagacttcaagcttcatatcagcccttccaatatgaccaaccagaacactaacgaatacctggagaaaatcaagcagaggctctttgagaacttgagaatgctgccccatgcgcctggcgtccaaatgcaggcaatacctgaggatgccatcccagaggagagtggtgatgaggatgaagaagaccctgacaaacgcatctccatctgttcttctgacaaacgaattgcctgtgaggaagaattctctgattcagatgaggagggagaaggtggtcgcaagaattcttctaatttcaaaaaagccaaaagagtcaaaacagaggatgaaaaagaaaaagatccagaagagaaaaaagaagtcatcgaagaggagaagaccaaggaggagaagccagaagccaaaggggtgaaagaagaggtcaagctagcctgagtaagatctacggctgtggcctcgccccaagttccccacttctcagattttatattttctattcctctgtgtatttatataaaatatattaaatataatgtccccagggactagagctcagtgtagtggtgctgggggaacttttcccaaagccaccttgtccatcctgcgtcttagttttcaaacatgtagggtggaaagaaaacaaccggaagacaaaatcctgaactgccaagtgcctgctttaggagctctgttacgatgcccttattaagctttctagaaggggtaactgggtcttcttggaccccttattttcaggcttaggtaatatcaaccatttttagattggttctgtttataccttcccactggactcaggcaagcagaaaaactcccattgccctgtcttcccccaactctgcaggtggaggtgttagcctagcttcctttttgagatattccattttgtgaaactttataataaaacaacacatttctataccctc

SEQ ID NO: 2338 - DNA, 1975 bp, Cricetulus griseus
gaaagagaagaagggccgcggcgcggaaaagacggccgccaagatggagaagaaggtgtccaagcgctctcggaaggaggaggaagacctggaggccctcatagcccatttccagaccctggatgcaaaaaaagacccaggtcacagagacgccatgttctccgcccaccccacggttaattccctgtctgctcatcctgagaaagatgaattaatccttttcggaggtgaatatttcaatggccaaaaaaccttcatgtataatgaactctacatctacagtatcagaaaggatacctggacaaaagttgacatccctgggcccacctccaaggcgctgtgctcatcaggctgtggtggtgccccaggggtggagggcagctgtgggtctttggtggagagtttgcatctcctgatggtgagcagttctaccattacaaggacctctgggtcctgcacttggctaccaagacctgggaacagattcggtcaacagggggtccttcaggtcgtagtggacatcggatggtggcctggaagcgacagttaattctttttggtggcttccatgaaagcacaagggactacatctactacagtgatgtgtacaccttcagcctggataccttcctgtggagcaagctgtccccttcaggccctgggcccacacccaggtcaggctgcctgatggctgtcaccccccagggcagcattgccatctatgggggttactcaaagcagagagtcaagaaggacgtggacaaaggcacccagcactcagacatgttcctgctaaaacctgaggaagcaggagaaggcaaatggacttggacccggattaatccttcaggggtcaagcctactccaaggtctggcttttctgtggccatggctccaaatcatcagatactgttctttgggggtgtgtgtgatgaggaggaggaggagagcctggagggctcgttctttaatgacctgtatgtctatgatgctgccaggagtcgctggttcacagcacagctgaagggacccaagtcggacaagaagaaacggaggcggggcaaagtagaggaacaagaaggtgccactgaacaggagaatggggcaactggtgccccagagccgctggaggtgataaaagaggtggtggctgaagatgggacagtgatcaccatcaaacaagtgcttgctccctctgggctggtgccacaagccccacctaagcctgaagacagtgctgtggaggccagcagcgctgggcaggagccgtgtccacgttcaaatgccatgctggctgtcaagcatggactactctatgtctatggtggcatgtttgaagctggtgaccgccaggtgacccttagtgacctctactgccttgatcttcacaagatggaagaatggagaaccttggtagagatggatccaaaatctcaggagtggctggaggagacggactcagaagaagacagcagctctgatgaagagggtgcagaggggggtgacaaggaccaggaggacagtgctgaggagggagcagatccacagcacccagaggtagctcctggggagcagtacgaagagtacctgtcccgcactgaacagtactggctgaagcttgcccggaaccacatgggccccgatgcaaaggagaagaaagtgctgaaagtagcccaagccatggcaaaagcattcatcgatgatgcagttcaagacattgcacaggccaaacattagactgagtgatggcttcaacatcactggtgtccttaagccaggcatgaggaggcccctgcagaggttgtcttctgtgcagccttaggccacctgatgaggaattcactgtcttcacagcagcttgagtccactctgagagaaggttagagtgagatgtgaatgtgtgggacctgtaggatatgtgttcttgtcctaataaaactggctgtgtgctctaaggtcttcctccttctacaga

SEQ ID NO: 2339 - DNA, 1975 bp, Cricetulus griseus
  modified_base (593)..(593): a, c, t, g, unknown or other
gccggccgtctgcaggcggcagagcagagggagcggagccgccgcgcagggcccgtggtaaccggggccgaggtcgggtgtgggcgagctcccggcgcagccccggaactgcttcccgcagggaccgcggtgcagaatctgggacagttgacctctcaacagatgaagaggaagaagcacatccctcgtcggaaagtaaggatgatcagagtccagcctcccatagctctagttctctggaagaaaaagaagtttcacccatagttaagatccctgatgcagcttttatccaggaagcacgcagaaaacgtgagttggccaggaccccctggtgactacatttcactggatgtaaaccatccctctaccacgtgtgacaataagagaagcaatgaagaggacccagagagtgaccctgatgactatgaaaagagaatactgtttgccccaaagcctcaaacactcagacaaagaatggctgaagaaacatcattcagaaatgaagaagagagcgaagacagtcaggaagatagaaaatcaaagacatttagggaacaacgaacaaaatgaaggaaagacagtaaattaaaaanaaaaagttaattaatttatgtggaaaatataatcgattgtctaaatgaaaagattgtcataattgaggaactagagtcatccacgtacacgttgctttttaaacaatcagaagcacttttgaaacgcaggcaagacgagttaaaatgtgaatcatcctatttgcaacagttatcacgcaaagctgagacatcagtaaatggaagcttggctccagatgaaaaggatcaacggattttagaggagattgaagctcgaaggatgcagagaagacaagcaagggcgctctctggcaactgtgaccatcaggaggggacttctagtgacgatgagctagctcctgctgagatgaccaacttccaaaaacgccaaggtgacattttacaagattgtaagagagtttttgaagatgtgcatgatgatttttgtaacgtccagaatattttattgaaatttcagcagtggcgagaaaagtttcctgattcctactacgaagccttcgttggtttctgcttaccaaagcttttaagtcccctgatacgagttcagttgcttgattggaatcctctgaagttggactccatggctctaaaccagatgccctggttcacatccatcacagagtttatggatggcagctcagaagacccaagggaggaggatggttccgataaaaaaaaatgttgtctgctgtcatcaacaagacagttgttcctcgccttgcagattttgtagagtttatttgggatccaatgtcaacctcacagacaagaagtttaactgtgcactgcagactgctttttgaacagttggcttctgaaaatgaagttagtaaaagcaaaacaggatttgcttaaatctgttgttggaagaattaagaaatcaatagaagatgatgtttttattcctctatatccaaagagttctgaagaaggaaaaatgtcaccacattcaaagttccaagaaagacagttctggggcgctttaaagctcttccgcaatatccttctttggaatgggcttctctcagatgataccttgcaagatctaggactggggaagctgctgaatcgctatcttattattgctcttacgaatgccatccctggaccagatgctgttaaaaagtgcagccagatagcagcttgtctaccagaaaaatggtttgagaactctgctatgaggacatccattccccaactagaaaacttcattcagtttttgttgcagtctgcacataaattgtccacaggtgaattcaggaatgaagtcaatgaaataattcttatcctggttaaggtaaaagctttgaatcaagcggagtccctcagagaggagcatcacctggagccccccatatccccaatttcaggcgtttgagtgc

SEQ ID NO: 2340 - DNA, 1974 bp, Cricetulus griseus
  modified_base (1869)..(1869): a, c, t, g, unknown or other
tagctgcgtctcggacggtctttcgatttctcgagatgccttatagtgaaattgaagctaagtttttgggacctggaaaagaactcacaaaggaaccatgctataaaaaattgaagtcagctgcagatgattgtgttttgccccatcaaagtggttctgatagtcacagactccaagagaaaaccagaaataataggacccctgtagccaccattaacttcagaagacggaattgtcctcaggaagacaaaaccagaactacagatgtgttgaagcctttgtgcaaggagacgcctggtaataaagtagatggtgctgaatctgttagttctcaagctttgcaggatggaaagtcttcatcgctatctagggatgatgaaatctatagcacaagtaaagcattcataggccccatttacaagcctcctgaaaaaaagaaatgccgagaaaggaagagtgagacaggcacttccagtggtgtagatgacaaaagaagacgagaagaaaaacagaaatttaactccaaaaaattggagattgacacagaattatcccagttttacaaagaaattgaagagctggaaaatgaaaatgatgcttcacagggcagttgtaaggtatcagagccttcccaggaacaaatgattccttacgaccagaccaatgataccttaaaatctgaggaagaaaacaaagatcccagcactgctcttcagacacgttgtggttacctgcagtacttggaggatgaaccaggcaaatatccctgtgatgaacaagtgatacctacattttgtgattcttcatttccttccttcaggcctgaatggcagtcagtacatccgtttgtcataccccacggtcctcctcttcccagttttgattatcactttaatattcaaagattcgcccgctaagtctaccaccaaacattttccatggcaagatgactgtcagatgcagaatggatgttagttatgtggatagctggaactgtttgcttttgatcagaatgatgagtattctaactatggtttgagtagcagtaatgttcaatccctttagaaatggctacagtgtacaagatgaaagtgtgaataatggtttctgtgaaatcagagagtgctggagagatccttccatggaggaaacacaatagaacagacaggtttgtgaaccagtggtctcaagaagagaagctaaataaattgcagaaattacttattcttttgcgaggcctccctggttctggaaaaacaacattgtctcgaattctgcttggtcagagccgagatggcatcgtgttcagcactgatgactattttcatcatcaagatgggtacaggtacaatgttaatcagcttggtgatgcccatgactggaaccagagcagagcaaaacaagctatcgatcagggaagatctccagttataatagacaacactaatacacaagcctgggaaatgaaaccatatgtggaaatggccataggaaaaggatacagagtagagtttcatgaaccggaaacttggtggaagtttgatcctgaagaattagaaaagaggaataaacatggtgtgtctcggaagaagattgctcagatgttggatcgttacgaatttcaaatgtccatctctattgtgatgaattcagtggaaccatcacagaaaagcatacagagacccctccctctcccgggggagccgaggtggggaggctctctagactcacacagtcaagcacctgtcacagatagctcttaagttggctgggttagctggcatgctgattactttgagaacaaagtagtgagcctgtcttaactttgagtagctgcaaataaaaaccatctattgtctcacaagggtnttccttacagttgtttagatcctaaagtacccaggctagactccaactcatagagatccgcctgcctctgcctccggagtgctgggattaaaggcgtgcaccacc

SEQ ID NO: 2341 - DNA, 1974 bp, Cricetulus griseus
tagtaaaacctcagaatgtcacagtgaggctgtcttcaaaggaaccaaatcaaaaagatgatggagtttttaaggctcctgcaccaccactcaaaagtgcctagatctcatgattcgactcttggaactggaacaagatgcttcttcagctaagctactgaatgaaaaagacatgaacaagatcaaagaaaaaatccgaagactctgtgaaactgtgcacaataagcatcttgatctagaaaatataacgactggtcatttagctatggagacattgctgtccctcacttccaaacgagcaggagattggtttaaagaagagctccggcttttgggtggtctggatcatattgtagataaagtaaaagagtgtgtggatcatttaagtagagatgaggatgaagagaaactagtagcctctttatggggagcagagagatgtttgcgagttttggagagtgtaacagtacataatccggagaatcaaagctacttgatagcctataaggattcacaactcatcatttcatcagctaaagcattacagcattgtgaagaactgattcaacagtacaaccgcgctgagaacagcatatgcatagcagacagtaaacctcagccttaccagaatgtaactaaccatgtgggcaaagcagtggaggactgcatgagggctatcattggggtattgctcaatttaactaatgataatgagtggggcagtacaaagacaggagaacaagatggactcataggcacagcaatgaactgtgtccttcaggttccaaagtacctacctcaggagcagagattcgatattcgagtgctgggattgggtctactgataaatctagtggaatatagtgcccggaatcgacactgccttgtcaacatggaaacatcttgttcttttgattcctcctctagtggagaaggagatcagagtttaaggatggctggacaagttcatgctgttcaggcattagtacagctatttcttgaacgagagcgagcagcccagttggcagaaagtaaaacagatgagttaatcaaagatgctcccaccactcagcatgataagagtggagagtggcaagaaacaagtggagaaatacaatgggtgtcaactgaaaagactgatggtacagaggagaaacataaaaaggaggaggatgatgaagaacttgacctcaataaagcccttcaacatgctggcaaacacatggaggattgcatcgtggcctcctacacagccctgcttcttgggtgtctctgccaggaaagtcctatcaatgtaactacagtgagggaataccttccagaaggagatttctccataatgacagagatgcttaaaaaattcttaagcttcatgaatcttacctgtgctgttggaacaacaggccagaagtctatctctagagtgattgaatatttggaacattgctagctgctttacctttgcttcaggtgcttggtaatgctggagctatccttagacaaagaaaagtcatgaaagaagtccttgaagatataccaagaacattcatcaatatcattcgtgtttggatttttatgaccacccgatttcttcatcatgcattctgcatttgctaaatgacagttactacatcaatctgcagctatcaaaaatgagggaaaaggttcaggctgttaacaatcccatgcagtatttaaatacacttacttggcaaagtctataccctccctttgtttccttgctttattttaggcaaggtttaaagggggaaatttgtgctgctgttagtgcaactgctgtgtatgttgagccactgttgtcatgccagtcaggtgcaaaggcagcttagctactgaggtattgaatgttctgaggacattctagacaacagcttagttcctttttcaggctcatttgcttttgctttttgttgaatgattccaatcgtaaataaagcttttaataattttgtg

SEQ ID NO: 2342 - DNA, 1974 bp, Cricetulus griseus
aaatggaccagatccggtgctgctaagaggctgcctgcctggtggctgcggcatatgctctgaaaaccctctatcccatcattggcaagcgtttaaagcagtctggccacaggaaggaagaagcagccgcttacccgcctgcagagaacagagaaatactgcattgcacagagatcggctgtaaaaagcctgcgcctggactgaatgcagaatttttcaaacagctactagaacttcggaaaatcctctttccgaaacttgtgaccactgaaacggcgtggctctgcctccactcggtggctctaatctcaagaacatttctttctatctatgtggctggtctggatgggaaaatcgtgaaaagcatcgtggaaaagaagcctcggagtttcatcatcaaattaatcaagtggcttatgattgccatccctgccacctttgtcaacagtgctatcaggggctttggccttcagtaacttcgcttagtagaccatgcctatgaaacctactttgcaaatcagacttattataaggtgataaatatggatgggaggctggccaacccggaccagtcccttactgaagacattatgatgttctcacaatctgtggctcacttgtattccaaccttaccaaacctattttagatgtaatcctaacttcctatactctcatccggactgctacatccagaggagcaagcccaatagggcccaccctgttagccggacttgtggtgtatgccactgctaaagtgctgaaagcttgctctcccaaatttggtacactgggtggccgaggaagctcataggaaaggctaatctgcggtatgttcactccagaatcatagccaatgtggaagaaattgccttcgtttgtggtacatcatgatagaacagttcttgatgaaatatgtgtggagcagctgtggactaattatggtggctatacctattatcactgcaacaggctttgcagattggtgatctggaggatggcccaaagcaggctatggttagcgatcggacagaagcctttaccactgcccgaaatttattggcctctggagctgatgctattgaaagaattatgtcttcatacaaagagatcactgaactagcaggctatactgctagagtatacaatatgttctgggtctttgatgaagtgaaacgaggcatttataagagaaatgtcactcaggagcctgaaaagcatggcaagagtgaggatgacatggatctacccctcagtgacaccctggcaattaaaggaacagtaatagatgtggaccatggaatcatatgtgaaaatgtgcccataattacaaaagctctctcttcaggatcttaagtgggctatggcctgtgtatgaaggcatcctctataaaccacctcccaacacatgttctatattccacagaggccatacatgtcccttggaagtctacgtgatcaagtcatttatcctgattcagtggatgacatgcatgaaaaaggttatactgaccaagacctagaaggcattctgcacagtgtccacctctaccacattgtgcaaagagaaggaggatgggatgctgttatggactggaaagatgtcttatcaggaggagaaaagcagagaatgggtatggcacggatgttttatcataaacccaagtatgcattgctggatgaatgtaccagtgccgtgagcattgacgttgaaggaaagatatttcaggctgctctaggggctgggatttccttgctgtccataacacacagaccttctctgtggaaataccacactcatttattacaatttgatggcgaaggaggctggcgctttgaacagttggacactgctatccgcttaacattaagtgaagaaaaacaaaagcttgagtactttttaaacaaacaaaaaaaaaaagcaaggagtggtgatacacaccttataatcccagcactcaggaggcagaggcagg

SEQ ID NO: 2343 - DNA, 1973 bp, Cricetulus griseus
cgaagcggcggccgggatggtgctgctgggcttgctgcagtcgggcggctcggtgctgggccaggcgatggagcaggtgacaggcggcaacctgctctccacgcttctcatcgcctgcgccttcacgctcagcctggtctacctgttccgcctcgccgtgggccacatggtccagctgcccgccggcgcgaaaagtccgccatacattttctctccaattccattccttggtcatgcaatagcatttgggaaaagtccaattgagttcctggaaaatgcatatgagaagtatggacccgtgtttagcttcaccatggtgggcaagacatttacctatcttctggggagtgatgcagctgcactgcttttcaatagcaaaaacgaagatctgaacgcggaggatgtctacagtcggctgaccacacccgtatttgggaagggcgttgcatacgatgtgccaaatgcagtgtttttggaacagaagaaaatgttaaaaagcggccttaacatagcgcactttaagcagtatgtttctataattgaaaaagaaacagtggaatacttccagaattggggagaaagtggagaaaggaatgtgtttgaggcgctttctgagctcataattttaacagctagccattgtttacacggaaaggaaattagaagtcaactcaatgagaaggtggcccagctgtatgcagatttggatggaggttttagccatgctgcctggctgttgccaggttggctgcctctgcctagcttcagacgcagggacagagcccatcgggaaatcaagaatattttctacaaagccatcaagaaacgcaggcagtcagaagaaaaagttgatgacattctccaaacgttactagactccacatacaaggatgggaaccctctgacagatgacgaaatagcagggatgctcatcggcctgctactcgcagggcagcacacctcctccaccaccagtgcctggatgggcttcttcttggccagagataaaccacttcaagaaaagtgcttcttagaacagaaagcagtgtgtggcgaggacctgcctcccttaacttatgagcagctgaaggatctgaatttacttgatcgatgcataaaagaaacattaagactgagacctccaataatgaccatgatgagaatggccaggacccctcagactgtggcagggtacactattcctccaggacatcaggtgtgtgtttctcctactgtcaatcaaagactgaaagactcctgggtagaacgtttggactttaatcctgaccgatacttacaggataacccagcatcaggagagaagtttgcctatgtaccctttggagctggacgtcatcgttgtattggagaaaattttgcatatgttcaaattaagacaatttggtctactatgcttcgtttatatgaatttgacctcatcaatggatattttcccagtgtgaattatacaaccatgattcacacccctgaaaacccagtaatccgttacaaaagaagatcaaaatgaaaaaggatcaaggaaccagtttgggtttatgactgcaagctgcagctgagagaatgaagcttatgaaacagctttcattgtgtactgttttttgagtgtgtaattctgaattccagtttgtttttaaggctatattaacacagtgatttttatcaaatctaatggtatttgaaacagtttataataattttgataggattcgtgtatgtgggccacttctgtgcgtaaagatgtcagagggtaaggaataagctcactgccaaagctttaggtgaaattaaatgctaagtagatggagtgatgtgtcctttgaaattttaacttgaagcactgctacaggaagatggcagagaccacagaccatgacttgataaccatattcctaaaattaataaacactaaagggtgcttgtggatgttactggtcccacatggtcatgttttg

SEQ ID NO: 2344 - DNA, 1973 bp, Cricetulus griseus
attggcccaggatgacagctggagaatggagtcagttatgtccaagtatgagaaccagattactattttcactgactacctagaagaattcccggatacagatgagctggtatggatcttggggaagcagcatcttcttagaacagaaaaatctaagctgttgtctgatataagtgctcgtctatggtttacatacagaaggaaattttcaccgattgggggaacaggcccttcatctgatgctggctggggatgtatgctgcgctgtggacagatgatgctggcccaagcccttatctgtagacacttgggaagggattggaactgggagaaacaaaaagaacaacccaaagaataccaaaggatactgcagtgtttcctagatagaaaagactgttgctattcaatccatcaaatggcacaaatgggtgtaggagaagggaaatcaattggcgaatggtttggaccaaatacagttgcacaggtgttaaaaaaactcgctttatttgatgaatggaattccttggctgtttatgtttcaatggataacacggtggtcattgaagatatcaagaaaatgtgctgtgttcttcctgtgggtgctcacacagctgatgagagccctccagattctctgcctgcttccagtcagggtaaaggtccctctgccacatgcccagcctggaaacccctgctgctcattgtgccccttcgcctgggcataaaccaaatcaatcctgtgtatattgaagcattcaaagagtgttttaagatgccacagtctttaggggctttaggaggaaagccaaataacgcctattatttcataggattcttaggtgatgagctgattttcttggaccctcacacaacccagacctttgttgacactgaggagagtggaatagtagacgatgagactttccactgtctgcagtctccacagcgaatgagtatcctgaacttggatccttctgtggccttgggatttttctgcaaagaagagaaagactttgataattggtgtagccttgttcagaaggaaattctgaaggagaatttgaggatgtttgaattagttcagaaacacccatcgcattggcctccttttgtacctccagccaagccggaagtgacaaccacaggcgcagaattcatagactccactgagcacctggaggactttgacctggaggaagattttgagattctgagtgtgtaagatagtgagaactcaacatgaaggtcttctgccttccatctggctccacaagaacttgttacataaaacttttctggtcagcaagtgcctgatatgccaacagcatacgaactcaatagcaattatgactgagccaattatgattctttagaaaaaaatcagtggcaccaaatcactggcaccaaccataccctaaacagaaaaagaaaaaccatggaatctaggagaagaaagattaggaatccattgctcccagcttctcttacatggggacagtaagtctttagcagctgggatggggagcatttagaagacagacagcagcttccatcttgctgcaagtaccagcagatgagagatggttgtacttggggacaagtactaagaagaagtctgttttcttgatcaaataataaaataagtgaatcagggagaaatactcttgttaaattatttgaatatgtagtttacataattataatttttatcaaaatatttgtcaaagaaatgatgtcaaacgtacacctcttaattgtcttctggtttggaggaacctattcaatagttcacagtctccacccttactgatggatgtcaccatatccttaagtcaaaccatgatcacttgaatcagaggtgagcaaactttttctgtaaaggagtaggtagataatattttaggctttgtaggccatgtggtctttgttgtaactattctgtgctataaaagcagccctacatagtatgcatg

SEQ ID NO: 2345 - DNA, 1973 bp, Cricetulus griseus
atcaagtccatgttttaatttctgaagagattcactacgtcattaaacagctttccaggggagtcccttagatctgttgataccctccgagaggaagccagttcgatcctggaggaaatgagccacaaactgcgggtgggagccattcgattctttgcctttgtcctgagcaaaatttttaagcagattttctcaaaggtgtgtgtgaacgaagacggcattcaaaagctacaacgagctgtccaggagcaccctgtagtcctgctgcccagtcatcggagctacattgacttcctcatgctgtcttttgttctgtacaactatgatctacctgtgccagttattgcggcaggaatggacttcctaggaatgaaattggttggtgagctactcagaatgtctggggccttcttcatgcggcgcacctttggcggaaataaactgtactgggctgtattctctgaatatgtgaagaccatgctacggaatggttatgctcctgttgaatttttcctcgaagggacaaggagtcgctctgccaagaccttgattcctaaatttggtctcctgaatattgtgatggaaccattttttaaaagagtaagtgtttgatacctactttgtcccaattagcatcagttatgataaaatattagaagaaactctttatgcctatgagctgctaggaattcctaagccaaaggaatccaccactgggttgttgaaagctagacggattctctctgagaactttggaagcatccatgtatactttggagaccctgtgtcactgcgctctctagcgtcagggcggctctgtcggaacccatataacttggtgccaagatacatccctcagaagcagtcagaggatgttcactcctttgtcactgaagtcgcctataggatccagcttctgcagattgaaaacctggctctgaacccatggcttctggtagttgccattctacttcaaaaccagttatccatggacttggacactctggtggagaagactctgtggctcaagggcttaactcaggcatttggaggattcctgctttggcctgataaccagcttcctgaggaagtggtccaatccagcatcttgctgcactccaacctggccagccttgtcaatgacagggtggttctgaaagtggaatctggatgctcagaaatggtcaaaggaattgtgctccgacacatcaacctccttatgtgctcagcctacaggaaccagctgctcaatatttttgtccgtccttccttagtagctgtagccttgcacatgacacctgggcttagaaaagaggatgtcttcagttgcttttcctttctacgcaacgtgttttcagatgagttcatcttccttccaggaaacacactcagggacttcgaggaaggctgttacttgctgtgtaaaactgaggctatacagatgactgggaaggccatcatcatcacaaataaagggaatgctgtgttagaatttctcatagggctctttaaaccttttgtagaatcataccagatagtttccaaatacctcttacatgaagaagaagactgcttcactgagaaacagtacttggttgcagttaggaagttcaccagtcagcttctagatcaaggcgcctctcagtgttttgatgcactgtcttctgacctgcagaaaaatgccttagcagcttttgtgagactcggagtggtagaaaggaagaaggtagataataactacgtgtttagtgtgaatgagcctgctacaagcaaattacaagaaatgctcggatgcaagacatcaataggaaaaccagccactgcaaaactgtaataatcatgaagcagttgtagaaaacacatttccatagtgacagtcacaaaggacctactttgccacaaatgggcatcgagaggaggatgtgtcttctgtctccctgagacctgagccatgcttctgccaagaggaggag

SEQ ID NO: 2346 - DNA, 1973 bp, Cricetulus griseus
tgctgcagctgctgccgccgccagagtaacctcgagctccggacacccggtgcctcgccatggctgaccagctgaccgaagaacagattgcagagttcaaggaagccttctccctcttcgacaaggatggagatggcaccatcaccaccaaggagctgggcactgtgatgagatcgctggggcagaaccctactgaggctgagctgcaggacatgatcaatgaagtggatgctgatgggaatgggaccattgacttcccagagttcctgaccatgatggccagaaagatgaaggatacagacagtgaggaggagatccgagaggccttccgtgtgtttgacaaggatgggaatggctatatcagtgccgccgagctgcgccacgtcatgacgaacctgggggagaagctgacggatgaggaggtggatgagatgatccgggaggctgacattgacggcgatggccaggtcaattatgaagagtttgtacagatgatgaccgcgaagtgaaggcccgggcagctggccatgcccgttctcctggtctcttctctcgctctcctctcttcaacactcccctgcgtacccggttctagcaaacaccaactgattgactgagaatttgataaagcaacaaaagatttgtcccaagctgcatgactgctcttcccttccccctgactgcccgccctccatgcccctcatgcttccttggcctccccgcgcccgttcccattttccaggcctgatgcattcatacataaggtgaaccccttgtcctggggagcctctgccctcctcctcctctggcccggatggctctcctccgtttttggtttgtttcctcctgttggcccttcttagggtgccggggtggcctccagccctgtgcctgcccagtggggaggggagcgaggcctttgccaagtggaagagcatgtcctctgcctctgtggcttgcaccccagccctgtgattctgtgtacaaacccagcagctagggggcggggtgccaagaggggagggtgggaaaggggcaggaaggccttggaaactaacatgctttcactactgagggggacggacggacggacggacgcactcgggtctcgctggcgctgttctgaaaccatctggctggctttctgaggtcaggctgggcgggggctgtcattggccgcgctgccgatcacactggccctcatccctccagcgatctcgcgctgttctgtaaattcctggtgctaacatcccatgccgctcccccgtggcccccccagccgcctgcccagtccagggctggtccaagaatgacgtgggggatggcctctgtgtaatgcgctggtgattttttccttcccctttatgccccttaaaattttaatttttgccccaaacatgccgggccaactaaagggtggggagagggagttgagtcccaccatgcccacaagaaccaacctgcaataaacacttctgtgggccgccgcgcagagcacgccgcgggcacctcctgcccctctgtggtgacttggcatcgctttctgccctcgccctgcctgccccactaccccacccttgcttttgactctagcctctgggacatacgtcactcaacgtggggcagttacagtctgggttcccccccagggcaatcacgttgcttttgctgggacctgcccagctttgagactctcttctctaccccttggcaccagccttgagggagggagggacagggcatatcgggagacccagccaagagctgagggtaagggcaggtaggcatgaagctgtggactttgccgaattgtttctaagttttgttttgttttattttgttttttcttgtttatttttttttttaaaccaaccgggcaatattgtgttcagttcaagctgtgaaaaaatatatatatcaatgttttccaataaaatacagtgactaccaaaaaaaaaaaaaaaaaaaaaaaa

SEQ ID NO: 2347 - DNA, 1973 bp, Cricetulus griseus
tggagaatcaccacatcagctctgtttttcgaatgatgcaggatgatgagatgaacatttttatcaatctcaccaaggatgagtttgtagaacttcgggccttggttattgagatggtgttggccacagacatgtcctgccatttccagcaagtgaagtctatgaagacagccctgcagcagctggaaaggattgacaagtccaaggccctatctcttctgcttcatgctgctgacatcagccatccaaccaagcagtggtcagtccacagccgttggaccaaggccctaatggaagagttcttccgccagggtgacaaggaagcagagctggggctgcccttctctccactctgtgatcgcacctccacattggtggcccagtcccagataggtttcattgacttcattgtggagcccaccttctctgtgctgactgatgtggcagagaagagtgtccagcccttggcagatgatgattccaagtctaaaagtcagcctagcttccagtggcgccagccttctttagatgtagatgtaggagaccccaaccctgatgtaatcagtttccgctccacctggaccaagtacattcaggagaataaacagaagtggaaggaacgggcagcaagtggcatcaccaaccagatgtccattgatgagctatccccatgtgaggaagaggccccgccctcccctgcagaagacgagcacaaccagaatggcaatctggattagagaactgggcgctggccaggtcctcactgagtccaacgtcttcgatgtcattagcaccatccatcaggactggttcccccatctgctccaagggagtgtgttggttgtgggagagatagcccacctgaaagccaaatgctggagctggtggggtgagggaaggtccctccccacccacaggtccccaatggtcactgtgcccaccccttgcctctggactcccttcctggtcaggtggctacttgggaggggcgagcttcctgcaggcttcctatggcctggaggggagggtcagagatgccagcccccttggctctccccatccttcttgcctccaagtttctaagcaatacattttgggggttccctcagcccccaccccagatcttagctggcaggtctgggtttcccttactgtttcccaaggaagggccagaacaggataggaagctggcagttttcaaagccctgcatgggaagggcaggtgtcccttcaggtaccttcctaggatgaggtgagggacatcctcttgaccccagacttgcactgctttagccccactcccttgcaaactccctctctcctatgcccagacagtggctgggagaggagaggagccattgggattatgtctgtgggaagactttcctagggtcctcaagaatttggggctggtctgggctcgagaagcttgtcacttgctctacctgggtctctggcccttcgcctcctttctgtccctggggactaggaggctctcatccgaccaatgtctgtaaatgctttgaggtcttccttcaggatgtatcttacgagcaaaggaaggagagtacagctggccctggtgcaagtggggtgaggtattacccaggaatccatgttgtcacagaatgggttcttcctgcctcccttctcccagaattggcccaccaagagattcccgtccctgggcccctggtggatggaaggcagatggggaggggctcagggctgttttgtctgtagcacgcagagcaagtgcagccaggcagagcctcttcctgtcctcaggctccttgccccacctcacccaagaaaggccgagtccaggtgactgcctcctcctttcttgtaataccccagccatgcatttgtacagtgggccctgctctcgtgaagtccatcttcatggtcgttagacctatcactctgaaccgcatgtgactcccccatgcttttggtctccctggcccctg

SEQ ID NO: 2348 - DNA, 1971 bp, Cricetulus griseus
gggctcgagctcagatttcacactcggatctcacggcagagtcaccgtggagaggccagggtaccacaaacttatggatttgacaagaaaggagggaagggggagttggaggagggccggagaatgtccaagactggcaccagccggagcagccacggcgtccgcggctcggggaccagctcaggggtcctgatggtgggccccaacttccgagtcggtaagaagataggctgtgggaacttcggagagcttcgcctaggaaagaacctgtatacaaacgagtacgtggctatcaagctggagcccatcaagtcccgggccccgcagctgcatctggagtaccgcttctacaagcaacttagcaccgcagagggcgtccctcaggtctactacttcggcccgtgcggaaagtacaatgccatggtgctggagctgctgggccccagcctggaggacctgttcgacctgtgcgaccgcaccttcacactgaagacagtgctgatgatcgccatccagctgatcacgcgcatggagtatgtgcatacgaagagtctcatctaccgcgatgtgaagcccgagaacttcctggtcgggcggccgggcagcaaacgtcagcatgccatccacatcatcgacttcgggctggccaaggagtacatcgaccccgagaccaagaagcacatcccgtaccgcgagcacaagagcctgacgggcacggcgcgctacatgagcatcaacacacacctgggcaaggagcagagccgcagggacgacctggaggcgctgggccacatgttcatgtacttcctgcgcggcagcctgccttggcaagggctcaaggccgacacgctgaaggagcgctaccagaagatcggtgacaccaagcgcgccacgcccattgaggcactgtgtgagagctttccggaggagatggccacctatttgcgctatgtacggcgcctggacttcttcgagaagccagactatgactacctgaggaagctcttcaccgacctcttcgaccgcagcggctatgtgttcgactacgagtacgactgggccgggaagcccctgccgactccaatcggcaccgtccacactgatgtgccctcccaggcaccacatcgagacaaagcccagccccactgcaaaaaccaggcactgaactccactaatggagagctgaacacagatgaccccaccgctggccactccaacgcccccattgcggcccctgcagaagtagaggtggcagatgaaaccaagtgctgctgcttcttcaagaggagaaagagaaaatccctgcagcggcacaagtgacaagtgacggggaaggtccccaggcgggcgtcccggaggctggcagtgtcctcgggggcgtggggctccttggcccaacttcaggcaccatcttccaggacttggggtcacttccttcacacaggactttggcggaaatctctaagcccctgtctcgtcccctttgagagcattaactatttaaaaccaggacagaaacgtcccgccgtccccgctgcgcccctgttagctcataaagtccagcttgtcccctcgatccaaaggccattttctcgaggggggcaggcccggggcatgggtgtcacatgggaaggccccagccaccaaaggggaggcctgtgccataccacagtgctgcaccaaagccggggcggagcgcgggatgctcaccgcgggatgctcaccacagagccagggcgcccgtgacccatgcgtgtccctgtgtgctaggcccatgggatagaatcgccttaatgcccgacctggggcagtggaaaggcggtccccacgggagggccaggctgtggtctcgggagccgagttcttgctttacaacatgtacagaaatgaacttatgtttctccggcgcttccttgaagccatagagtttagaggctttttttaaaaaaaaaaaaaaaataaaaaataaaa

SEQ ID NO: 2349 - DNA, 1971 bp, Cricetulus griseus
cagggctcgtcagaagagagatcgtctcagtgaagtgtctccacctggagcggtgctgcactctaaattgaatcgctcagaggaagaaggtgctgtgagtcccagcgcctctggagaggtccgcaaagcggtcacagttcccagtcccctcaccactgaccacactacacagacttctgattggccaaagaatgtgtccgtccattctgaaccaccggagcttaccagccctacatccagtactcagcaagtaaaaagcactgagcatagtccaactgatctccctcatccagtcggccccctcctacaactacgccacccctacgccccaggccctcttcccagagccacctcagcaccacatccagttgtaaaggaactggtggtttctgctgggaagagtgtccagatcaccctgcctaagaatgaagttcagttaaacgcctacgttcttccagaaccagaaccaggcccgtaagaaccagcctcctgttgctattgtgtcacccaagtcccaggagatctcgctgccaaccacttcaaccatcatcgatggcagccagagcactgacgacgataaaattgtccagtaccactgggaggagctcaaggggcctctgagagaagtgaagatctctgaagacacagccatactaaaactaagtaagctcatccccgggaactacactttcagcctgacagtcgtcgactctgatggggctaccaactccaccaccgcaagtctgacagtgaacaaagctgtggattatcctcctgtggccaatgcaggccccaaccaagtgatcaccctgcctcagaactccatcaccctctttggaaaccagagtactgatgaccatggcatcactagctatgagtggtcactcagcccaagcagcaaagggaggtggtggagatgccagagccggaggctctgtgaatgtcattgtcaaagaagaaataaacaaaccgccagtagccaagatcacagggaacgtggtggttaccctgcccacgagcacagcagagttggacggctccaggtcctcagatgacaaggggatagtcagctacctatggactcgagacgagacgagcccagccgcaggggaggttctgaatcactctgaccatcaccctgtcctcttcctgtccaacctggttgagggaacctacacgtttcatctgaaagtaacggatgcaaagggcgagagtgacacagaccggaccacggtggaagtgaagcctgatcccaggaaaaacaacctggtggagatcatcttggatgttaacgtcagccagctgacagagaggctgaagggaatgttcatccgccagatcggggtcctcctgggggtgttggattccgacatcattgtgcagaagattcagccatacacagagcagagcaccaagatgttaatttttgttcagaatgagcctcctcaccagctcttcaaaggccatgaggtggcagccatgctcaagagcgagctgcggaagcagaaggctgacttcctgatattcagagccctggaaatcaacactgtcacatgtcagctgaactgttctgaccatggccactgtgactcattcaccaagcgctgtgtctgcgacccgttttggatggagaatttcatcaaggtgcagctgagggatggagacagcaactgtgaatggagtgtactgtatgttattattgccacctttgtcattgttgttgccttgggaatcctgtcttggactactatctgttgttgcaagaggcaaaaaggaaaacccaagaggaaaagcagatacaagatcctggatgctacggaccaggaaagcctggagctgaagccgacctcccgagcaggcagcaaacagaaaggccccatgctgagcagcagtttgatgcactcggagtcggagctggacagcgatgatgcaatcttcacatggccagaccgggagaaaggcaaactcctg

SEQ ID NO: 2350 - DNA, 1971 bp, Cricetulus griseus
aacgcgatagaggagatagagaacgggagagggagaaagaaaaggaaaagaattgagagcttccaccaacgctatgcttatcagtgctggattgcctcctctaaaagcttctcattcagctcactcaacccactcggctcattcaacacattctacacattctgcccattcaacacacactgggcacgcaggacacacatcacttccacagtgcattaatccgtttactaacctgccccatacgcctcgatattatgatattctaaagaaacggcttcagctccctgtttgggaatacaaggataggtttacagatattcttgttagacatcagtcatttgtactggttggtgagactgggtctggtaagacaacacagataccacagtggtgtgtggagtatatgcgatcattgccaggacccaaaagaggagttgcctgtacacagcccagaagagtggctgcaatgagtgtggctcaaagagtcgctgatgagatggatgtaatgttaggccaggaagttggatactccattcgatttgaagactgcagtagtgcaaaaaccattcttaagtatatgactgacggtatgctgctgcgtgaagctatgaacgatccccttctggagcgttatggtgtaataattcttgatgaggctcatgaaagaacattggctacagatattctcatgggtgttttgaaggaagttgtaagacagagatcagatttaaaggttatagttatgagtgctaccctagatgctgggaaattccagatttactttgataattgccctctcttaactattcctggccgaacacatcctgttgagattttttatactccagaaccagagagagattatcttgaagcagccattcgaactgttatccagatacatatgtgtgaagaggaagaaggagaccttctcctttttttgactggtcaagaggaaattgatgaggcctgtaagagaataaagcgtgaggttgatgatttgggccctgaagttggagatattaaaatcattccattgtattctacacttccaccccagcagcagcaacgcatttttgagcctccacctccaaaaaaacagaatggagcaattggaagaaaggtggttgtgtcaactaacattgcagagacctctttgacaatagatggtgtggtgtttgtgattgaccctggatttgcaaagcaaaaggtatataatcctagaatcagagttgagtctcttttggtgacagcaattagtaaagcttcagctcagcaaagagctgggcgagctggacgtaccagacccgggaaatgcttccggctttacacagagaaagcttacaaaacagaaatgcaggataatacctatcctgagattttacgctctaatttaggatcggttgtattgcaattgaagaagcttggtattgacgatttggtacattttgattttatggacccaccagctcctgaaactctgatgagagctctagaacttttgaattatttggctgctttaaatgatgatggagacctgactgaattgggatccatgatggcagagtttcctctagatccacagctcgctaaaatggttattgcaagttgtgactacaactgttctaatgaggtcctatctattactgctatgttgtcagtcccacagtgttttgttcgccccacggaggccaagaaagctgcagatgaggccaagatgagatttgcccacatagatggagatcatctgacactgctgaatgtctaccatgcttttaaacaaaatcatgaatctgttcagtggtgttatgacaacttcattaactaccggtccctgatgtctgcagacaatgtacgccagcagctatcaagaattatggacagatttcatttgcctcgtcgaagtactgatttcacaagcagggactattatattaatataagaaaagcattggttactgggtattttatgca

SEQ ID NO: 2351 - DNA, 1970 bp, Cricetulus griseus
ggagcccgcgtggacgtggtgcccgccttctgtccctttggctcgctcacctgctgcaaagtgagcaaaccaacatgtcagggtgggaatcctactacaaaaccgagggtgaggaagaggaagaagaggaggagagccctgacccaggtggagaatataaatattcaggaagagatagtttgatttttctggttgatgcctccagggctatgtttgactctcagggtgaagatgaagttacaccttttgatatgagcatccagtgtatccagagtgtgtacaccagtaagatcataagcagcaaccgagatctcttgggagtggtgttctatggtaccgagaaagacaaaaactcagtgaatttcaaaaatatttatgtcttacaagagttggataacccaggtgctaaacgtgtgctagagcttgaccagtttaagggacaacagggaaaaaaacatttccaagacacaattggccatggatctgattactccttaagtgaagtgctctgggtctgtgccaacctcttcagtgacgtccaggtcaagatgagtcacaagaggatcatgctcttcacaaatgaagatgatccacatggcaatgacagtgccaaagccagccgggccaggaccaaagctaatgatctccgtgacactgggatcttccttgacttgatgcatctgaagagacgagggggctttgacatatccttgttctacagagacatcatcagcatagctgaggatgaggatctcggggttcactttgaggaatcaagcaagctggaagacctgctaaggaaggttcgcgccaaggaaaccaaaaagcgagtactgtccaggttaaggtttaagcttggtaaagacgtagcactcatggtgggcatctataacttgatccagaaagctaacaagccttttccagtgaggctctatcgagaaacaaatgaaccagtgaaaaccaagactaggacttttaatgtaaacacgggcagtctgctcctgcctagtgataccaaacggtctcagacctatgggagtcgtcaaattgtgctagagaaagaggaaacagaggagctgaagcggtttgatgagccgggtttgatccttatgggctttaagcccttggtaatgctgaagaagcaccactacctgaggccttccctgtttgtgtacccagaggagtccctggtaaacgggagctcaaccttgttcagtgctctgctcaccaagtgtctggagaaggaggtcatggcagtgtgtagatacacatcccgaaagaacgtgcccccttattttgtggctttggtgccacaggaagaggaactggatgatcagaatattcaggtgacgccagcaggcttccagcttgtcttcctcccctatgctgatgacaagcggaaggtgccctttactgagaaagtgatggccaaccccgagcagatagacaagatgaaagctattgttcataagcttcgctttacatacaggagtgacagttttgagaatccagtgctgcagcagcacttccggaacctggaggcccttgctttggatatgatggagtctgagcaagtggtagatctgacactgcccaaggctgaagccataaagaaaagactgggctccctggctgatgagtttaaagagcttgtctacccccctgggtataatcctgagggaaaagctaccaagagaaaacaagatgatgaaggttctgcaagtaaaaagcccaaggtagagttatcagaagaagagctgaaggcccattttgccaagggcacactgggcaagctaactgtgcctacactaaaggaggtctgtaaggcctatgggcttaagagtggaccgaagaagcaggaactgctagatgctctcaccagacacttccagaagaactgactgaaggtcacaccccagctacttcccacactgcagccagaccacctacttatgttctcaccaagttag

SEQ ID NO: 2352 - DNA, 1970 bp, Cricetulus griseus
agatgacagagacacagtttgtgctatcctttgttcaccgtttcgtagagggccggggagccaccaccttcttcgccttctgctaccccttctcctacagtgactgccaggatttgctaaaccagctagaccagcgctttccagaaaatcactctacccatagcagtgacctggactgagacagagttagcagaagacaagactgacactgtgtggattctgtcacaacggtcacctgaactggaagagccagcccctgaaaccatccccccgaaagagagtggtgttgcttactatgtggacttgcatggacatgcttccaaaaggggctgtttcatgtatggaaacagctttaatgacgagagcacccaggtggaaaacatgctatatccaaagctcatatccttgaattcagcccactttgacttccagggctgcaatttctcagagaagaacatgtatgcccgagaccgtagagatggccagtccaaagagggaagcggccgtgttgcaatctacaaagcctcagggataatacacagctacacacttgaatgcaactacaacactgggcgctcagtgaacagcatcccagctgcctgccatgacaatgggcgtgccacgcccccctccccgccggctttcccctccagatacactgtggagctatttgagcaggtgggacgagctatggccatcgcagctctggatatggcagaatgtaatccgtggccccgaacttgtgctgtcagaacacaacagcctcactaacctgcgggcctggatgctaaagcatgtgcgcaacagcagaggtctgaccagtactgtgaacatggctgcgagcaagaagagagcatctcgaacccctcccaaaagtaacaatggactgcccatttcctcgctcctgaaaatgccttgagccgggctcgaagttttagcactggcacaagtggtggtggtagcagcagcagccaacaaaattctccacagatgaagaactctcccagctttccttttcatggcagtcggcctggagggctgccaggcctgggctctagcacccaaaaggtcagccatcgggtgctaggccctgtcagagagcctcgatgccaagacagaagacggcggcagcagccactgaaccaccgccctaccacaggcagcctggccccatccccaactccttggtagttctggcccagcctcctcacgaaacctgggctcctgcctactgcccaattcactgagcttatcagggagcagctgctcattctcttcttcaggggacaagccagaggctgtcatggtgattgggaaaagtctgctaggggctggtgctcggatcccctgcattaggactcgtttgcagacttgcccgaggagagtttccgccaggaggggtcccggattccccaggctaggcccaggttgggccggagctcaccgccgactcgcagagggatgagaggctcttcaagccccacatcccctatcccccagaccagagaaagcagtgagctggagccgggaccccactctgctacaccagggctgcctcaggccggccccccacggccccgctctgcccctgccttttctcctattccctgtactctatctgagtccccaacccggattttttacagcaaggggcccctgaaccaatgtgaggtttgttttgtccctaaatctccatcatccactatttctcccagggtctgacaatgtctttacctccacgcccaggatagagccctaaggtgtgggaacacagtgaaaccatatgttagtcccgacgtccagctgctgatatcatgtgacaaccataactccttgggatgtgggccacactgtccgaggccttgcagaacaccaccttgagacagaacaaagcagggacctgccaccccttcctccctccacagcacaagattttgggaccacaaaaaatatatgtctatattttatat

SEQ ID NO: 2353 - DNA, 1970 bp, Cricetulus griseus
  modified_base (1926)..(1926): a, c, t, g, unknown or other
  modified_base (1935)..(1935): a, c, t, g, unknown or other
acagatgggatgctggtcagggagatgatggttgatccattgttaacaaaatatagtgtcatcatgctggatgaagcccacgagaggaccttgtacacggacattgccattggcttgctgaagaagattcagaaaaagcgaggggatcttcgcttgattgttgcctcagccactctggatgcagagaaatttcgggatttctttaaccagaatgaaaccagtgacccagccagggacacctgtgtgacccttacagtggaagggcggacatttccagtggatatattttacctacaaaagtcctgttccagattatatcaaggcaactgtggacactgtggtgaaaattcatcagacagagggagatggagatatactagccttccttactggccaggaagaagtagaaactgttgtatctatgctgattgagcaggcgttccacttcatgtctcccccgccagcacagtcaatggttcaagccttggagttactctacgctcttggaggcctggacaaagactgtcgcctaactgagccactcggcatgagaatcgcagagtttcctctgaaccccatgtttgccaagatgctgttggaatcagggaactttggctgttctcaggaggtcctgagcatcgctgccatgatgcagatccagaatgtctttgtgttcccctcaaaaccagaagtctcaggcaactcgagtgcaccggaaatttgctgtggaggagggtgatcatcttaccatgcttaatgtgtacgaagcatttatcaaacacaacaagagctcacagtggtgtcaggagcatttcctgaattacaagggtcttgtcagagctgccactgtgagagaacagttgaaaaagctcctcgtcaagttccaggtacccaagatgtccagtgaaggtgatccggatcctgtcctgaggtgcatcgtgtcgggattcttcgcgaacgcagcgcggtttcactcctctggagcatatgggttatttacaatgaagttatacagacctccaagtattacatgcgagatgtgactgccatagagtcggcttggctgctggagctggctccgcacttttatcaacaaggaatgcacctgtccctgaaagccaaaagggccaaggtccaggaccagtgagtggcgctcagcaggtggctgcagggatggtttggcatccttcctgccttcgagttgtttctggaaccagctcaggtggaacaggcagtcactgtggtgtgggctgcatcctgggcattaaccctctcttcctgctcccatcagcatttgccatcatcactgggaccctggaggagtctgaacatggccagtgttccgctgcactgcaggcacgggacccccaaaccaagcagcttcttcctttcctctgtccatgtccctgcttagctgcagcaggagacttagtgccatgatggtgggccatgcaggactcaaagcccccatcattcttagccacttcctttgcaagtgggcttagcattctctcagagcaccatgacacattctggtgccagtatctgggcgccagataaagttcatcaaccttgaccccacgggactcctctttaacaggaattcactacagtttagatgccctaaacttgtgtagctcaggaatataactcttgtatatttatctttatttgtttgcttgcattcttgcaagaacacgggcagctcccccaggcactgttcacactgcacctgggccgctttgctgcgagagtgatggcacttcagcacacggcaagacagactcctccccttactgttttaatgatgtttatttaaaagcgtagcttaaaggtttatttttgtacttggttttagtttgaatgtgcctacttttggcgccaaacctatgtctatattttatttccattttataaatgtgaggngaaaaaaanaaaaaaaaaaaaaaaaaaaaaaaaaaaaaaaaaaa

SEQ ID NO: 2354 - DNA, 1970 bp, Cricetulus griseus
ggggcgagatggccatcgaggtgtttgaactagcagagaatgaagacgcacttcccctgtggagatggaaccagagaagctggtgcacaaattcaaggagctccagatcaagcatgctgtcactgaagcggaaatccagcagctgaaacggaagttgcagagtctggagcaggaaaaagggcgctggcgggccgagaaggcccagctggagcagagtgtagaggagaataaggagagaatggagaagctggagggctactgggggtgaggcccagagcctgtgccaggctgtggatgaacacctgcgggagactcaggcccagtatcaggccctggaacgcaagtacagcaaggccaaacgactcatcaaggactaccagcaaaaggagatcgagttcctgaaaaaagagactgcccagcgtcgggtactggaagagtcggagctagctaggaaggaggaaatggacaagcttctggataagatctcagaactggaaggaaacctgcagaccctgaggaattccaattctacttaacaggatcgctccttgactggacaataataatcccctcccattatcttcacccctgtcctcaatccccgccccgctcctaccagcctggggacaggtgccccgacttcccccctcctccaccccacctcccccagcttcagggaccagagggcccatattacaggccgctttagggtggcccccggggcagacaatggtagctggaagagtggcctccttgttctatggggctgaggtacaagagaaactgaaagcggacctgggtggtggatggacacaaggacctgcagaccaaactgccagactttacaacctccagcctgtgtctctggaccggagtggagctggggctctcccagcatctcaccacgtggaggctgctccctgcccacagggtccttgtggcccctgggcctcttgacttgagattctctttcctcctccctatcattgttctgtctgttgcattctggcctcctgcttggaggggttgcctcaacatctcccacccctgcttcccatcccaggagggatagagcccacccttgagcctcaggctgggcttggtcctgcactgatttcccctttcctaggaagggcaatggccctcaacttctccttgtgcctcccctctcccaggtgccaaatagccatagcctcctcctggaactgtcctgaggccactctggggttcaggtttccttggtctagcctaggcttgccaggagggaggaaggtcagcttagatggtgtgcctgcagagctctccctggggagctaggccctgcccagggccacacctggaagccttgtattaccatcaaacagattcagccacccctcaccccacccccactgttttccaatgttttcactggaggggaaaaattttactaagctttttggagaccagggctgcttgatgtcagcctgctttctaagtgaaattgactcagtttccccactttaaccccaaattggggcttggaccaagggaggtgagaccccctcaggtaccctcccctttaaaaatccatctcattttgccacctccacaatccctttcccaagcctaggtttctgttcggtttttttttttttttttaaacaaccctgttctatcctttttggcttctcctagacccctgtaaatagaccataccatcaatcagtatttcttgcccctctcttccgcccccagcgtttcccactccccagaaagagctggctgtcacagtgcccggctcctgcacttcacctaggcagatggagggggcggagccgggtgggtgggtcttcgatgtacttccggttctgaccggcagtgctcttgccccgcccttggaggaccccgtctctgtatataatatatatatgtatgtattgttcctggttttgtacggaccataccctctgtcaggtcgtccccataaa

SEQ ID NO: 2355 - DNA, 1969 bp, Cricetulus griseus
caaggatgggaagcccttacagcctgtggttcacatctgggactcagagacactcctaaagctgcaggagattggactgggtgcctttgagcgtggtgtgggggccttggcttttttcagcagtggaccagggtgcttttctttgtgtggtggatgattccaatgagcacatgctgtcagtgtgggattgcagccggggagtgaagcttgctgagatcaagagtacaaaatgactcagtcctggctgttggcttcagccctcgtgacagcagctgtattgtcaccagtggaaaatctcatgttcacttttggaactggagtggtggagcaggggttcctgggaatgggaccctcacccggaaacagggtgtttttgggaaatacaagaaacccaagtttattccttgctttgtgttcctccctgatggggacattctcacgggagactccgaggggaacattctcacttgggggcggagtgtctctgattccaagaccccaggcaggggtgggaccaaagagacctacacaatcgtggcccaggcccatgctcatgaagggtccatctttgccctgtgtctccgacgggatgggaccgtgcttagtggtggtgggagggaccgacggctggtacagtgggggcctgggttggtggccctccaggaggctgagattccagaacactttggggctgtgagggccattgctgaagggcttggctccgagcttctggtgggaaccacgaagaatgcattactgagaggagatctggctcagggcttctctccagttattcagggccacactgatgagctgtggggactgtgtacacatccctcccagaaccgcttcctcacctgtggccatgaccggcagctctgcctgtgggatggggaaggccacgcactggcctggagtatggacttaaaggagacgggtctgtgtgctgacttccatccaagtggggcagttgtggttgtaggactgaacacagggaggtggttggttttggacacagaaaccagagagattgtgtctgatgtcactgatggcaatgaacagctctcagttgtccggtacagcccagatgggttgtacctggctattggttcccatgacaacatgatctacatctatagcgtctccagttgtggtactaagtctagccgctttggcagatgtatgggacactccagttttatcactcaccttgactggtccaaggatgggaatttcatcatgtccaattctggggactatgagattctttactgggacgtggctggaggctgcaagcttctaaggaatcgctatgagagcagagaccgggagtgggctacctacacctgtgtgctaggcttccacgtgtatggtgtgtggcctgatggctctgatgggacagacatcaactccctttgccgctcccacaatgaacgtgtggtggctgtagcagacgacttctgcaaagtacaccttttccagtatccgtgcgctcgagccaaggcgccaagccgtatgtactcaggccacggcagtcacgtgactagcgtccggttcacgcatgacgactcatacctcgtctccctaggtggcaaggacgccagtatctttcagtggcgagtgttgggcgctgggggctctgggccctctcctgtcacgccttctagaactccctctctgtcccctgcctcctccctggacgtgtgatgaatgctggatggttttgtccctctggtactgtggccttgccccgccctggccaaaacccctaggaccaagtgcagcccttttcctgggctggcttttctttgatttcagtacattcccagttgcgcattttcctggaggggcgaaccgccccattgcacacacgataacgactcgctggctgaaccaggcaaccccagctctgactccctttgcctggtgaggggcaataaaaagaaagaaagtacaaaaaaaaaaaaaa

SEQ ID NO: 2356 - DNA, 1969 bp, Cricetulus griseus
ttgccgttgcttagttgctcctgtcttactgcctcatcatgttggtgcacttatttcgggtcggaattcggggtagtccgtttccaggctgggtcgctgcaatcccctgcgctcccagacgttctcggccgccaggtcctcagatgaccggctcggctcaagcttcctccaggcggtggcccagctgcgatcacagctccgggctcaccttggggaatttcatgtctgagtctcataggctcagtacaacagctgcttcttctctacggtgttcagggattgatgacctttggatacctagtgctgctgtcccacattggtgagcgcatggccatggacatgcggaaagccctcttcagctccctgctccggcaagacattgctttttttgatgccaaaaagacagggcagctagtgagccgcttgactaccgatgtacaagaattcaagtcatccttcaagcttgtcatttcccagggactgcgcagctgcacacaggtgattggtagtctggtgtccctgtctatgctgtccccacgcctcacgctgctgctggctgtcgccacacctgccctcatgggagtgggcaccctgatgggctcaggtctccgaaagttgtctcgccagtgtcaggagcagattgccagggcaacaggagtagcagacgaggccctaggcaatgttcggacggtgcgggcctttgctatggagcagagggaagaggaacgctatcaagaagagctggaatcatgctgctgcaaggcagaagagctgggcagaggcatcgccttgttccaagggctctccaacatcgctttcaactgtatggtcttgggcaccctattcatcggggctcccttgtggctggacagcagctgaaagggggagacctcatgtccttcctggtggcttcccagacggtacaaaggtctatggccagcctctctgtcctgtttggtcaggtggtccgtggactgagtgcaggtgcccgtgtctttgagtacatggccctgagcccctgcatcccattgacaggcggctgctgcatccctagcaaggaccttcgtggctccatcaccttccaaaatgtcagcttcagctacccctgccgccctggcttcgaggtgctgaaggacttcaccctgacactgccacctggcaagattgtggcccttgtgggccagtctgggggaggaaagaccacggtggcttccctgctggaacgcttctatgaccccacagctggcatggtgacattggatgggcatgacctgcgcactctcaacccctcctggctccggggccaggtcataggtttcatcagccaggagccagtcctatttggaacaaccatcatggagaatatccgattcgggaaactggaagcttctgatgaagaggtgtatacagctgcccgagaagccaatgcccatgagttcatctgcagcttccctgagggctacaataccgtggttggtgaacggggcacagccttgtccggtggccagaagcagcgcctagccatcgcacgtgccctcatcaagcagcccacagtgttgatcctggatgaggccaccagtgcactagatgcagagtctgagagggtagtacaggaggcactggacagggccagcgctggtcgcaccgtgttaatcattgcccaccggctcagtactgtccgagcagcccactgcatcgtcgtcatggccaatggccaagtctgtgagactgggacccacaaagaactccttaaaaaaggtgggctgtatgcagagcttatccggagacaagccctggatgccccactgacttcggccccacctgcagagaagcctaaagacaccaggagccaccagtggaaagcctgagagacccccgggggtcaggtcactgccaagcatcagtctggggctggagctccacaggcgacagagcccttgaaacttttcaaatagaaaaaaaaaaaaaa

SEQ ID NO: 2357 - DNA, 1968 bp, Cricetulus griseus
aatcaattggcaaaatcaattgaagaacgaacatttcagtaccagggttctcttccgtcattgcctgttccttcacttaaggaatcattaaaaaataccttgaatcagtaaaccatttgcaaatgaagaagaatataagaaaactgaagaaatagttcaaaagtttgaaaatggagttggtgagaaattgcatcagaaattacttgaaagggctaaaggaaaaagaaactggctggaagagtggtggcttaatgtcgcctacctggatgtgcgtattccatcacagctgtatgtgaactttgtgggcccaagtccccattttgaacactgctggcctgcaatggaaggcactcagttagaaagaggaagtataattctttggcacaacttgaactactggcagctgctaagaagagaaaagttgcctgtacataaatctggaaatactcctctggacatgaaccagttccgaatgttgttttctacctgcaagattccaggaattgctagagattcgattatgaatcattttaggactgagagtgaagggcattgtccaacccacattgccgtgctgtgtcgaggcagagctttcgtctttgatgtagtgcatgaaggatgtttgatcaccccaccagagcttctcagacaactgacatatatctacaagaaatgctcaagtgaacctgtgggagccggtgtagcagcattaactagtgaggagcgaactcgatgggcaaaggctagggaatatctgattggtcttgatccagagaacttgactttactagaaaaattcaaaccagtttatttgtgtattccatggaagacaccagcccacatgtaacctcagaagattattctgagatcttcgaaatgcttcttgctggagatccagcagtacgatggggtgacaaatcctacaatttgatttcctttgctaatggattatttggctgctgttgtgatcatgctccctttgatgcgatggttatggtgaacattgcccattatgttgatgagagagtcttggagactgaaggaaggtggaagggctcggagaaagtccgggatataccactccctgaggagctggttttcactgtggatgagaaagtactaaatgacatctaccaagccaaagcccaacacctcaaaggggcatctgatctacagatcgcagcatatacgttcacatcttttggcaaaaaggtcaccaagaaggaggcgttgcaccctgacacctttattcagcttgcacttcagctcgcatattacagacttcatggacgccctggttgctgctatgaaacagctatgacaagatacttttaccatggccggacagagactgttcgctcatgtacagtggaggcaatcagctggtgccagtccatgcagaatccctctaccagtcttctggaacggcaccaaaagatgttacaagcttttgagaagcataataagatgatgaaagaatgttcaaatggaaaagggtttgaccgtcaccttctaggtcttttgctcatagcaaaagaggaaggtctgcctgtcccagagctgtttgaggacccacttttctccagaagtggaggaggcgggaattttatcctctcaacaagtctggttggttacttacgagtccagggagtcgtggttcccatggtacacaatggatatggatttttctaccatatcagagatgacaggtttgtggtggcatgttcggcctggaggtcatgtccggagactgattcaaaaaagctagttcagatgacttttcatgctttccatgatatgctgcagttgatgaacaccgctcatctttagagactcagagccacacagatcaacttggtacagagagtagatggtaatatgacatggaaggaatgttgacttataggagacttgttaagtgtggtgattagcagagccatgctctctagatttactttactttagaag

SEQ ID NO: 2358 - DNA, 1968 bp, Cricetulus griseus
  modified_base (208)..(208): a, c, t, g, unknown or other
attatttccgaggctatgagtggtggttaatgaaggaagccaagaagaggaaccctgatattatactcatggggttgccgtggtcattccctggatggctgggcaaaggtttcagttggccttatgtaaaatcttcagctgactgcctactatattgtaagatggatttttgggcgccaagcactatcatgacctggacattgattanattgggatttggaatgaaggccatttgacatagcaagcgataatctctgggagcctatttcttcttccatgctgtttgaccgtgatctctggaaggccgttgatgtcataggagctcattatcctggaacccatacagtgtggaacgcaaggatgacagggaagaagctttggtcgtcagaagatttcagcactgtcaacaatgatgatggtgcaggctgctgggggcgcatattgaatcagaattatatcaatggcaatatgacctccacaattgcttggaatttggtggctagttactatgaagacttgccttatgggcgaagtggattgatgacagcccaggagccatggagtgggcattatgtagtagaagctcctatctggatatcagctcatacaactcagtttactcaaccaggctggtattacctgaagacagttggccatcttgagaaaggaggaagctatgtagctctgactgacggcttagggaacctcaccatcattgtcgaaaccatgagccataaacattctatgtgtattcggccatatctaccatattataatgtctcaaaccagttggctaccttcaactctaaagggatctttgagggaaatccaagagctacaagtgtggtataccaagcttggaggaccgtcggagagacttcatttcaaacaactggattctctatggctccttgaaagcagtggaagttttgcaatggagctgcaggaggatgagctggtcacactaaccactctcaccacagggcgcaaaggcaactaccctccttccccgaagtcgcagcccttcccaagaagctacaaggatgatttcaatgttgatttcccatattttagtgaagctccaaattttgctgatcagactggcgtatttgagtactacacaaataacgaagaccccggacagcatcgctacacactgcgccaagttctcaatcaacgacctattacctgggctgcggatgcttccagcaccatcagcattataggcgattaccactggaccaacatgactatacagtgtgatgtgtatatagagacccctcagagagggggcttgttcatcgccgggagagtgaataaaggtggaattttggtgagaaccgctacaggaattttcttctggatttacgccagtggatctttcagagttacagcggacctgggtggatggatcacatacacctcaggacacgctgacatcaaagcaaaaagatggtatacactcaccttaagcattaagggttatttcgcctctggcatgttgaacggcaagatcctgtgggaaaatgtccccgtgaagtacccagggaacggctgggccgccatcggaacgcacaccttcgagtttgcgcagtttgacaactttcaagtggaagcggctcgttagtactcacagggcatcgagacactatttggattttctatttttgattttgattcagggccagttttgatggacctgtatgtagcctttgaggctaacgatatgaagagtagatagggaacatggtacatgtttgccagagcatatgaaagatttaattagagctatttccgggagaagtgcagatgtctttggcattgcctgtggtagtccttatgatccaccatttgttggtcccatcccttctggagttggtttgggtggttcctgtcttgcagcctttccactgactgctaatttaaagaaaaataaaaaccaagtcacactaacaaaaaaaaaaaaaa

SEQ ID NO: 2359 - DNA, 1968 bp, Cricetulus griseus
ctgtcggcggggtgcagctgtgcggggattggcgtggccgcccgagagctccgcacgcgtctgggatccggcctcggaggcccgcccgctccggagcggagaagccgagcgagcgcgccgggctccgctagagctcggctccgtgctcatgccctgcggcccagtgggcccgcgccatggcctccgggagcgtggccgagtgcctgcagcaggagaccacctgccccgtgtgtcttcagtacttcgtggagcccatgatgctcgactgcggccacaacatctgttgcgcttgcctggcccgctgctggggtgccgcggagactaacgtgtcgtgcccgcagtgccgggagaccttcccgcagcgccacatgcggcccaaccggcacctggccaacgtgacccagctggtgaagcagctgcgcacggagcggccgtcggggcccggcggcgagatgggcgtgtgcgagaagcaccgcgagcctctgaagctgtactgtgagcaggaccagatgcccatctgcgtggtgtgcgaccgctcgcgggagcaccgtggccacagcgtgctgccgctggaggaggcggtggagggctttaaggaacaaatccagaatcggctggaccatctaagaagagtgaaagacttgaagaagagacgccgggcacagggggagcaagccagagctgagctcttgagcctgacccagatggagagggaaaaaattgtttgggagtttgagcagctgtatcactccttaaaggaacatgaatatcgcttgttagctcgccttgaggagctagacttggccatctacaacagtatcaacggtgccatcactcagttctcctgcaacatctctcacctcagtggcctgattgcccaactggaagagaagcagcagcagcccaccagggaactcttacaggacattggagacacactgagcagggctgaaagaatcaggatccctgagccctggatcacacctccagatctacaagagaaaatccacatttttgcccaaaaatgtctgtttttgacagaaagtctgaagcagtttacagaaaaaatgcagtcagatatggagaaaatccaagaattgagagaggctcagttatactcagttgatgtgaccttggacccagacacagcctaccccagcctgatcctttctgataatcttcgccaagtacggtacagttacctccagcaggacctgccagacaaccctgaacggttcaatctgttcccctgtgtcttgggctctccgtgtttcatcgctgggagacattactgggaggtagaggtgggagataaagccaagtggaccataggtgtctgtgaagactcagtgtgcagaaaaggtggggtgacctcagcaccccagaatggattctgggcagtgtcgttgtggtatgggaaagaatattgggctcttacctccccaatgactgccctcccccttcggacccctcttcagcgggtagggattttcttggactatgatgctggtgaggtctccttctacaatgtgacagagagatgtcatacctttactttctctcacgctaccttctgtgggccagtccggccctacttcagcctaagttactcgggagggaagagtgcagctcctttgataatctgccctatgagtgggattgatgggttttctggccatgttgggaatcacggtcattccatggagacctccccttaaggaagtgaacttagaccacaagtgctgttggctataatcctaccccaggtcaagggatcttgttgtcttgtcgatttctgtccatcaaagctggatacccttaccgttttccatgcccttacagtgagagacaagatgttcatggtctctactacactttcccttcccttgcagattgtgagatgtaatgagaagtattgctatttcccagaaataaaaaagattcctcctaaaaaaaaaaaaaaaaaaa

SEQ ID NO: 2360 - DNA, 1967 bp, Cricetulus griseus
ttgctaaaaaggctggtgcacattcagtatacgcctgtgaattatccaagaccatgtatgaacttgcctgtgatgtagtggctgcaaacaagatggaagatgggattaagctcctacatatgaagtcacttgatatagaaaattccaaaaacacattcctgaaagagtgtccctagttgtaacagaaactgtcgatgcaggtgtgtttggagaaggaattgtggagagtttaattcatgcatgggagcgatttacttctgcaacctaagacaaaggagaaaatggaaattgtggacagtatgggaaagttataccagcaagtgttgttatatttgggatggcagtagagtgtgcagagatacgaagacatcatagggtgagcactaaggacattgctggtgtccatttgccagcaaatgtgacatttcagagcccggcctactcttgtgtagacactggagaagcagttgagccttacacaactgaaaagatgagtaggatccctggagggtacttgcctctgacagagtgctttgaaattatgaaagtggattttaacagtcttcaggaattaaagagtcttgcagctaaagagccttgtcctcttagtgttcctgctgttaaagaaggcatgctggatgctgtcatggtgtggtttgttctccagctggatgatgaacacagtctgtccacaagtcctggggaggaaacctgctgggaacaggccgtttatccagtgcaggcccttgcagactactggataaagcctggagaccgagtgacaatggaagcatcttgtcaagattgttacctaagaatccagagtgtcaatatcttgcatttggaacatgaaatggaagttataaagaattttaccaagagtaaagacttgctctctctaggaaatgaggctgagctctgtagtgccctggctaatcttcagaccagtagagcagatgctctggagcagacctgtgttttagaacctacagaaattgctttgctcaataacatcccatatcatgaaggctttaagatagcaatgaggaaggtattgtcttcactggccccagagaagttgtgccagcccgtggatactcactgtcaggatattgagatgagctctggaagtgaacagagtggtactgcaccgagcacctctgaccctttctatgtgttggatgtgtctgaaggcttctctctcttgcctataattgctggaacacttggtgatgttaagccctacagttctgtggagaaagaccagcattgtatcacttttggacctcatatctgaagccaatcacttccctaaggaaacacttgagttttggctgagacatatagaggatgaatctgctgtgttgcaaaggcccaaatcagacaaattgtggagcataattatattagatgttccattgagccatctggactcattcagcaggaaataatggaaaaagctgcaatatccaggtgtttattgcaatctggaggcaagatcttcccccagtatgtgttgatgtttgggatgctcgtggagtcacagacactggtagaagagagcgctgttcaaggaacagaacacactcttgggttaaacatagcaccttttattaaccagtttcaggtgcctatccgtgtgtttttggatttatcttcattgccatgtgtccctttaagccagccagtggaactcttaaggttagatctgatgactccatatttgaacacttccgatagagaagtaaaggtccgcatttgtagatctggacgagtgactgctgtcccattttggtttcatttgtgccttgatgatgaggtcaggttggacacctcaggtgaaggctcccattggaaacaagctgctgtggttctggatagtcccatccgggtacaagcgggagaggagctcctgctcagtgttcagcatcacaaaagcaatgtcagcatcacagtgaagcagtgag

SEQ ID NO: 2361 - DNA, 1967 bp, Cricetulus griseus
  modified_base (912)..(912): a, c, t, g, unknown or other
  modified_base (1928)..(1928): a, c, t, g, unknown or other
tagggctcttccactgaggactttctcttcttaccagctgctttctgaaattagtgaagcaactggtggatggttctgtagccttccaaaggtagtaacaaatgatttgaattattgattctttctgagcctcaccagactatttcttgcaaaactgattgcaatttattcatgaataagaagcaagtcacatagaaaacactgtaatcatacctggaacgtgttgagaaacaagcgctacacggtgattcttctcctgcacgaggaaaatgggctgtgatcggaactgtgggctcattgccggagctgtcattggtgcagtcctggctgtgtttgggggtattctcatgccagttggagacatgcttgttgagaagacaatcaaaaaggaagttgtccttgaagaaggaacaattgctttcaaaaactgggttaaaaacaggtaccactgtgtacagacagttttggatctttgatgtacaaaacccagatgaagtggtagtgaacagtagcaaaatcaaagttaaacagagaggtccttacacatacagagttcgctatctagaccaaggagaatataactcaggacccggtggacagcactgtctcttttgtacagcccaatggagcaatctttgagccttccctgtctgttggaactgagaatgacaccttcacaattctcaatttggctgtggcagctgcaccacatatatacacaaatttcctttgttcaagttgtgctcaattcacttatcaaaaagtccaagtcttctatgttccaaacaagaactttgagagaattgttgtggggttacaaggatccattcttgagtttggttccatatcctattcctactacagttggtgttgttttatccttacactgcagatggagtttataaagttttnaatggaaaggatgacataaacaaagttgcaataattgattcctataaaggaaaaaggaatttgtcctattgggaaagttattgtgacatgattaatggcacagatgcagcctctttcccaccttttgttgagaagtctcgggtactgcggtttttttcctccgacatttgcagatccatctacgctgtgtttggatctgatattgaacttaaaggaatcccagtgtacagatttattcttccagccaaggcctttgcatcaccagtccagaacccagacaatcactgtttctgcactgaaaaggtcatctctaataactgtacatcatatggtgtgctagacatcagcaaatgcaaacaaggaaggcctgtgtacatttcccttccacattttctacatgcaagtcctgacatctcagaacctattgaaggcttaaatccaaatgaagaagaacataggacatacttggatgtggagcctataactggattcactttacaatttgcaaaacgacttcaggtgaacatcctggtcaagccagccagaaaaattgaagcattaaagaatctgaagagaaattatattgtacctatactttggcttaatgagactggaactattggcgatgagaaagcagaaatgttcagaaatcaagtgactggaaaagtaaagcttcttggtctggtagaaatggtcttgcttgggcttggagtcgtgatgtttgttgcttttatgatttcatactgtgcttgcagatccaagaatagaaaataagtaatatatatatattcactaagccaaagcatatttcaaaatgattaatttgacactgtagcctatatttttataaaatccagtactttgtaaagtccgtcatttgtaaccttgagtggacttcaatttctttagaaccaatttttcttgtttggttctgatttattgttgcactccatgatggcaaatttcaaaagtgtacattctgagcaatttttcttttcttcatttgtgggaaaacnccatcatgtatggggtgtcacctttcatttactgcaaat

SEQ ID NO: 2362 - DNA, 1967 bp, Cricetulus griseus
tgcagtatgatcggacttgtgagtggacaggacttaagttcagcaatgatggcaaactcatactcatttccaccaacggcagcttcattcgtcttattgatgcattcaagggtgtggtgatgcacacatttggggttatgctaacagcaaagactgttacactcgaggcttcatttactccagattcacaatttattatgattggttcagaagatggcaaaatccatgtctggaatggagagagtggtataaaagtagcagtattggatggtaaacacacgggtccaattacctgtttgcagttcaaccccaagtttgactggactggagaacacctttccacatggccttcccagggatgtgctgtccatcttctctaaagaattactttgctgagcgccttccaaaggactcttggtgctgcagattcagttggcactcagcctttccagctctcactgcaccaagctcttcagaggtgactgcttaggattaggttacagtgggcccttgagcccctcccaattttgaatatatttgctgctgaagagccagtgaagtcaccagtttcctcacatccttctcccaccccagagatgcatgggaagccacagttgtggattggagatgctagggcagctcagcaccccttgccctccccctgcatgtcttgttactgggtctccctttgtaattgtggcattgtttcacaaccatcatgtttcttaggtgccaaacatttacaaaaataagtcttcatataccttggggtcaaagaatgggacaaatacagaaggaccttgcttgccaggaggctttacagtattcgtattcctgtgtaggtgggtgaggcaggtcttgggcttggatgttggctagcaaaaggcccaagagtctgaaagggagggaagggggtagcaggtaaattctgagagctgaaaggtttagcagcctggtgcaattcccccgtcaagacagtcccacagtctttttgtgggggtcctaccgagcttggcttgaacaaaagcaaggtagtagtttatttttgtacctgagtcacatcacgttttcctgtgggccagtattgtggaacgagtctgagttgtttacactgatgccttccttccctgcccaccagaaattgtgtacatagtcagcagatgagaccccacttccccagctcttacccaggagctggctctaggcctgtgttatatgttatatttagcctttttatatatgacccttgatctgtttgtatttgagcacagtgtgcgtgtccacttaaatgcatttgtgcaacatgcacattaagtatgtgtatatgcctggagagggaaccctgcagctaagaaagactatttgtgggtagtgtttgccacaagtgttagtcttctctgttaaccttagggagacaacgtgaagcagagcttctagtgtttgctgttttcatggcagctaagtaagagccttgaggtgactccttgtgctcttcaatcaagccacacttaggggccctctctacagtattagaatcttatttgcctgattatgccctgtctgcatctatatatgtgtgacagtcactttttgcatggcttctgtgcctggcttgtggcatttggggacagggtgctagaaccacagtgtttttgtttgtcagaactttctgtatgtgacagctgacactgcactgttcaaccaccagccactgggatattttttaataaattattccccgttgtaactgacaattactgcttatgaaggaaaatttggggatttttaagaaccagtttgccacccaaatggtaccactgttaatcttgatgttaaatgttcctctagatatctctgtgcatagactttggtgtgtttacatagttgttatcctactgtacatacaattttatgtcccttttgtacttaacaaattaaatttttttgccatgttaccagtacttaaa

SEQ ID NO: 2363 - DNA, 1967 bp, Cricetulus griseus
gtttgtcccctccattgatgtgctgaaccaaagcccgcttcgcatcaaggagacagcacaggctctggcccagctttccaggtgggatcgaggaacaaatcacctgctgttcaacatgttgcctggaggtcccccagattataacactgccctggatgtccccagagacagggcgttgttggcaggtggcggcttttctacttggacttaccggcagggctatgatgtcagcattcctgtcttcagcccgctgtcaaccgaggtggctctcccagagaaagcaccaggtccccggcggtacttcctgctgtcctctcagatggccatccatcccgagtacagagaggacctggaagccctccaggccaaacacagagagtcggtgttggtcctagacaagtgcaccaatctctcggagggtgtcctttctgtccgcaagcgctgccaccaacaccaagtctttgattaccctcaagtgctacaggaggctactttttgtgtggtccttcgaggagctcggctggggcaggcagtgctgagtgatgtgttacaggctggctgtgtcccggttgtcattgcagactcctatattctgcccttctctgaagttcttgactggaagagggcgtccgtggtggtcccggaggaaaagatgtcagacatgtacagcatcctgcagaacatcccacaaaggcagattgaagagatgcagagacaggcacgatggttctgggaagcatacttccagtccattaaagccattgccctggctaccctgcagatcatcaatgacaggatctatccatatgcagccatctcctatgaagagtggaatgatcctcctaccgtgaagtggactagtgtgagcaaccctctcttcctcccgctgattccaccacagtcacaaggcttcaccgccatcgtcctcacctatgaccgtgtggagagcctcttccgggtcatcaccgaggtgtccaaggtgcccagtctgtccaagcttctggtggtgtggaacaatcagaataaaaatcccccagaagaatctctctggcccaaaattcgtgttcccttgaaagttgtaaggactgcagaaaacaagctgagtaatcgtttcttcccgtatgatgaaattgagacagaggctgtcctggccatcgatgatgacatcatcatgctgacctccgatgagctgcagtttggttatgaggtctggcgggagtttcctgaccggctagtgggctacccaggccgcctgcatctctgggaccatgagatgaacaagtggaagtatgagtctgagtggaccaatgaggtgtccatggtgctcacgggtgcagctttctatcacaagtattttaattacctgtatacctacaaaatgcctggggacatcaagaactgggtggatgctcacatgaactgtgaagatattgccatgaatttcctggtggccaacgttacagggaaagctgtcattaaggtaactccaagaaagaagttcaagtgtccagagtgcacagccatcgatgggctctcactagaccagactcacatggtagaaaggtctgaatgcatcaataagtttgcttccgtcttcgggaccatgcccctcaaggtggtggagcaccgagctgatccagtgctctacaaagatgacttccctgagaaactgaagagctttcccaacatcggcagcttatgaagcttgcctgtccagttttagatccagaagtcacagcagaggcattcggtcattctgcatcagcagactctggaggaacagccaagcctaaaacgtgctacagatctcaatacctctgagggttagaactgtgcttggacccgagtcacaatcctgggtacatagcagaagaacacaggctgccaagatgcgtcctgacagtccctgaacaactctttgttttggcgttttgatattattaaaattattttttactcttttaaaa

SEQ ID NO: 2364 - DNA, 1967 bp, Cricetulus griseus
tcggcagcaggtctgcccgggccagacgtgcgagcgcaggcagcggctgcagattgcgggcgctcctttctcaatcccccggccccgaccctccgaccgcccccgccgtgtctcgccgccatgcgcttcagccgcctagcgctgctcccgggcgtggcgctgctgctcgcctcggcccgcctcgccgccgcctctgacgtgctggaactcacggacgaaaacttcgagagtcgcgtctccgacacgggctctgcgggcctcatgctagtcgagttcttcgccccttggtgtggacattgcaagaggcttgcccctgagtatgaagctgcagcaactagattgaaaggaatagtcccattagcaaaggttgattgcactgccaacacaaacacctgtaataagtatggagtcagtggctacccaacccttaaaatatttagagatggtgaagaagcaggtgcttatgatgggcctaggactgccgatggaattgtcagccacttgaagaaacaagcaggaccagcttcggttcctctcaggtctgaggaagaatttaagaagttcattagtgataaagatgcttcggtggtgggctttttcagggatttattcagtgacggtcactctgaattcctaaaagcagccagcaacttgagagataactacagatttgcacacaccaacgttgagtctctggtgaaggagtatgatgataatggagaggggatcactttatttcgtccttcacatcttgctaacaagtttgaagacaaaactgtggtatatactgaacagaaaatgaccagtggcaagataaaaaggtttatccaggaaagcatttttggtatctgtcctcatatgacagaagacaataaagatttgatacagagcaaggacttacttacagcctactatgatgttgactatgaaaagaatgctaaaggttccaactattggagaaacagagtgatgatggtggcaaaaaaattcctggatgctggacacaaactcaactttgctgtagctagccgtaaaacctttagccatgagctgtccgactttggcttagaaagcactactggagaggttcctgttgtagcaatcagaactgctaaaggagagaagtttgtcatgcaggaagagttctcgagggacgggaaggctctggagcggttcctgcaggattactttgatggcaacctgaagagatacctcaagtctgaacctatcccagagaccaacgatgggcctgtcaaggttgtggtagcagaaaattttgatgacatagtgaataatgaagataaggatgtgctgattgaattttatgccccttggtgtggtcactgtaagaatctggagcccaaatataaagaactgggagagaaactcagcaaagacccaaatattgttatagccaagatggatgccacagctaatgatgtgccttctccatatgaagtcaaaggttttcctaccatctacttttcaccagccaacaagaagctaaatccaaagaagtatgaaggtggccgtgaattaaatgattttattaactatctacaacgagaagctacaaccccccctataattcaagaagaaaaacccaagaagaagaagaaggcacaagaggacctctaaagcaacagccaaatgcgccactttgtaaaaggactcttacaccagagatggcaaaaccatcagaggacagaatggatatactctgaatcctgttaaattttctctaaactgtttcttagctgcactgtttatgaaaataccaggaccagtttatgtttgtggtttggggaaaaaattatttgtgttgggaagaatgttgtggggtgggggaattgagttgggggttattttctaattttttttgtacatttggaacagtgacaataaatgtgaccccctttatactgtcgtgttttccctcgtggaatggagagtcagggtctttaaac

SEQ ID NO: 2365 - DNA, 1966 bp, Cricetulus griseus
  modified_base (1954)..(1954): a, c, t, g, unknown or other
ggatccacaggaatctcggggtacatatatccagggtaaaatcagtgaacctcgaccagtggactcaagaacagatccagtgcatgcaagagatgggaaacggaaaggcaaaccgtctctatgaagcctagttgaaggatttattcgaagataaatatgagaagaagaaatatatggaccgaagtctggatatcaatgccttaggaaagagaaggacgataagtggaaacgagggagtgaacccgttccagagaagaagatggaacctgttgtttttgagaaagtgaaaatgccacagaaaaaagaagacgcacagctacctcggaaaagctccccgaaatctgcagcccctgtcatggacttgttgggccttgacgcccctgtggcctgctcaattgcaaacagtaagaccagcaacaccctagaaaaggatctagatctcttggcgtctgttccatccccttcttcagtttccagaaaggctgtgggttccatgccaactgcagggagtgctggttctgtccctgagaacctgaacctgtttcctgagccagggagcaaatcagaagaaacaggcaagaaacagctctccaaggactccatcctctcactgtatggatcccagacgcctcaaatgcctgcccaagcaatgttcatggctcctgctcagatggcatatcccacagcttaccccagtttccctggggttacaccacctaacagtatcatggggagcatgatgccaccaccagtaggcatggtagctcaaccaggagcctctggaatggtggcccccatggccatgcctgcaggctacatggggggcatgcaggcttccatgatgggtgtgcccaacgggatgatgactcaacaggccagctacatggcaagcatggcagctatgccccagactatgtatggggttcagccagctcagcagctacagtggaaccttactcagatgacccagcagatggctgggatgaacttctacggagccaatggcatgatgaactatggacagtcaatgggcagtggaaatggccaggcagccaatcagactctcagtcctcagatgtggaaataaaagcaaagctcctatatggctgccactctcatcagcccttgctttcccttttctcttctttcctagccctctcctcttcttcttcctatctctctctgtttggtttagaagttgcacataagtcatctgggatttggcatcctgcccaacccagccccttccccaactcatagacctctctgttgctttgtgttggtcacatcccaactgtcctgatttcctccccacccctacctcaccctctcctggcaccagcaccttagaaattattggcagaagagggtacatgaactgccccttcctgtgaagatgagcaaaaatatcactctgcttgactctgagagcttcaggacccttgcccaccttctgcctgcctggagcaggatccggccctgcagctgaacgaccagcccttatgaggaaatgtagagcttagcgtgtgcaccgctgtatgtgtggatgtgtgggtcccacctgccacctccccatctgctctggctgttttgtttttctagttctaggtttacaacagagaggaattaatttctcaacagtctaaaactgttgccaggttatcttacagtttaaaacttgccatctcattgatagttccctcctcctttccttttcccatccaccatctctgatgccctcgtgtctgagtgctgtttgcccaccttttccaggtgtaagaggcagagagcctggacagctttctctcggccattgttcaccccacttgaaaactcaaacaagaaaactttgcttcaaagatctcatgtgtgggaaccacagcgcctggttgcctttctcctgtgtatgtataaattccttaataaatattgcagggaaagaaaaaaaaaaaanaaaaaaaaaaaa

SEQ ID NO: 2366 - DNA, 1966 bp, Cricetulus griseus
agcgagaagtgccgaatagatactgagatcctgccctccttgttcatgcggtgcaccaccgaccccaaccgaaaggacaggttccccgccatcacacacctcaagttcctggcccgagacatgtctgagcaggtgctcctatgtgcctccagccagaccagcagcctggtggagtgctggtccctgcggaaggagggcctgcctgtgaacaacatcttccagcagatctctcctgtggttggcgacaaacagcccatgatcctcaagtggcggatcctgtcagccaccaatgacctggaccgtgtatcagctgtggcactgcccaaacttcccatctcactcaccaacacagacctcaaggtggccagtgaaacccagttctatcctggcctcggcttggtgctggccttccaggatggcagcgtgcaaatggtacatcgactgtcactgcagactatggcggctttctacagttcaaccccacgctcactggatgagcccgccctgaagcgtccacgcaccacaggcccagctgtacacttcaaagctatgcagctgtcctggacatcactggccctggtgggcattgacaaccatgggaagctcagcatgctgcgaatctctccatccctgggccacccactggagcccaagctggctctacagcacctgctgttcctgctggagtactgcatggtgaccggctatgactggtgggacatcctgttgcatgtgcagcccggcatggtgcagagcctggtggagcggctgcatgaggaatacactcgccagaagcccgccctgcagcaggtactctccacccggatcctggccatgaaggcctcactatgcaaactgtcaccctgcactgtggcgcgtgtatgtgactaccacaccaagctgttcctcatggccattacatctaccctcaagtcactactgcgcccacacttcctcaacacccctgacaagagccctggagaccgcctggccgagatctgtgccaagatcaccgatgttgacattgacaaggtcatgatcaacctgaagacagaagagtttgttctggacatgaacactctgcaggcactgcaacagctgctgcagtgggtgggggacttcgtgctgtacctcctggtcagcctgcccaaccagggctccccactgaggccaggacacagcttcctgcgagatggtacctctctgggcacgctgcgagagttgatggttgtcatccgtatctggggcctactgaagcccagctgcctgcctgtctacacagccacctcggacactcaggacagcatgtctctgctcttccggctactcacaaagctgtggatctgctgccgtgatgagggcccagccagtgaacccgatgagggcttggtggatgagtgctgtttgctgcccagccagctgctggtgcccagcctggactggcttcctgccagcgacggcctggtcagccgcctgcaacccaaacagcccctgcgcctgcgcttcggcagggcacctactctgccaagcaacacctccactctgcagctggatggccttgccagggcccctggccagccaaagatcgaccacctccggaggctgcacctgggcgcttacccaactgaggagtgtaaagcctgcaccaggtgtggctgtgtcaccatgctgaagtcacccaacaaggcaacagccgtgaagcagtgggaacaacggtggatcaagaactgcctgtgtggggggctgtggcggagagtgcccctcagctgtccctgagttacagccaaaagatcactctgggccgggtgtggtggcgcacgcctttaatcccagcactcgggaggcagaggcaggtggatctctgtgagttcgaggccagcctggtctacagagcgagtgccaggataggctccaaagctacacagagaaaccctgtctcgaaaaaaccaaaaaaaaaaaaaaaaag

SEQ ID NO: 2367 - DNA, 1966 bp, Cricetulus griseus
gcctccgagcctgagaagatggcccagtccaagaccgactgccgctcacctgtcggtctcgactgctgcaactgctgtctggacctggccaaccggagcaatctccagaaagacagcagcgggagaacaaaccgggcagcccgaccgtgagcaactttcggcagctgcaggagaagctgatcttcgagaacctcaacactgacaagctcaacaccataatgaggcaggattccttggagccccgtgctgcgggacccctgctacctaatcaacgagggcatttgcaaccgcaacatcgaccagaccatgctttccattctgctcttcttccacagtgcctccggagccagcgtggtggccctagacaacaagattgagcaggccatggatctagtgaagaatcatctgatgtacgctgtgagagaggaggtggagatcctaaaggagcagatccgtgagctggtagagaagaactcccagctggagcgtgagaataccctcctgaagaccctggcaagcccggagcagctggaaaagttccagtcccggctgagccctgaagagccagcacctgaagccccagaaaccccagaagcccctcggtcggctctgcagtgtaagtggctctgtcctcagggtgggcgagaggccacaacttgttctacctacgttctttccgtagttgttttttggtctccccaagcgtcatctcatgtggagaactttacacctaacatagctggtgccaagagatgtaccaaggacatggccatctgggtccactccagtgacagacccctgacagagagcaggtctctggaaactgagttgcatgggtctagtaaccccaagccaatgagcctctcatgctacagggtctgggggcttccagggcctgggcaacttagttacagctgacaaaggagaaagtagtttgagacgtaatgccagtgtgctccagaaagtataaggggtctgtttttcatttccatggacatcttccaccgcttcatctgacgactgttgtatgaagaagccatttgtgttttaagcagaggcaacctctctcttctcctctgtcttgccgaggcaggagcagagatgggagagattgagccaagtcagccttctattggtttatatggtataatgcatggctttgtgcacagcccagtgtgggattacagctttgggatgaccgcttacaaagttctgtttggttagtattggcatagtttttctatatagccataaatgcatatatatacccatagggctagatctatatcttagtgtagtgatgtatacatatacacatacacctacatgttgaaaggcctaatcagctttgggagtactgactggtcccttatctcttaaagctaattttttgactgtgctaatttaccaaattgatccactttgtcatgtagtttaactaagactcaagatatgagggagggagagggggaccagcctcacaatgcggccacggatgccttgctgctgcaaccctccctcatctgtccactgaagacacgtgaagtcctcttttgaatgccaaacccaccattcattggtgctgactacatagaatggggttgaaagatgatcagcttggacttcacatttttgaagaagttttttgtttgtttttgttactgtttttgttttgtttgtgggtttgtttgtttttgttttttatttttttttttttatttttgtgggaaactttgggattaatcaaaggatggagtcttgtggtggacaagaggaataagtagttttgatcccttggggggctgggagatgcacccagcaagtttgtgtaaggtggttctgtgacagtgaacactttccactttctgacaccttatcctgctatatgtcttcaggatttggattttgatttttcagatgtagcttcaaatttcaataaactttgctactttttttaaaaactaaa

SEQ ID NO: 2368 - DNA, 1966 bp, Cricetulus griseus
gagccggggagcgggccagcggaccagcgtcgccgccacggtcggctcggggaagcgggaggcagcggcccgagagccaagcggagcctgcgggggcggaggtggcggtggcagccgcggcgctgggcgcaggaacaggatcaagctttccataccagggaccaggctaaaaccagactaccactgcccctacctaggccccattgacctcagaaggcagccactggaatcatgggcaatatctttggaaaccttctgaagagcctaattgggaagaaggagatgcgcatcctgatggtgggcctggacgctgcagggaagaccaccatcctgtacaagctgaagctgggggagattgtcaccaccatccccaccattgggtttaatgtggaaacagtggaatataagaatatcagcttcacagtatgggacgtaggtggccaggacaagattcgacccctctggagacactacttccagaacacccaaggcttgatatttgtggttgacagcaatgaccgggaacgagtaaatgaggcccgagaggagctgatgaggatgctggcagaggacgagctccgggatgctgtgctgctcgtgtttgcaaacaaacaggatttgccgaatgctatgaacgctgccgaaatcacagacaagctggggctgcattctctgcgtcaccgcaattggtacattcaggccacctgtgctaccagcggggacgggctgtatgaaggcttggactggctggccaatcagctcaaaaacaagaagtgagagccaggcagccctatctgactaccccacccactcctgacacatacctgttgtctccctcccccagtttacccctatcccttcctcttgaaagtgtggtcgaggtcctgggtgtcatgtctacatgcccagaaagagccttgccctcctgtgcctcccttcctccctcctccctcgtcctctgacacgatcacgtccccaaccgcctgtcctgatgatgagtcattccaatttactctgggacagtgatcttcagggccctgcctccatcctgcacaggttgttcaggtgctgctgggggtttgcagggggtgcttgttcctgaggctctgacctggatcctgatatagtcattgcagtgaagctgtggctgctctgtgagctcctgtgtgtgctggctgcgccctgagctcccaaccatcagccataacctctctgccaaggtcaggaccctgggccctctccagcatggctgacgggaccccttccagggctgttctgagctccactctggccaggcttcctgccagctttgtgtacagcaggcaagtcagttccccagccctaccgtgtgaatgtgtgtgagtgtgtgtgtgtgttgtgtgtgtgtgtgtgtgtgtgtgagtgtgtgtgtgtgtgtgtgtgtgccttcttagatgctagttccaaataggtttcgtatattgcaggtttccttccactcttccacccactcccctagcatcttgtttttctcagcctcctgggaccaacctgaggctgagcagggtgaagcagccttggatgttgccttggtgctgctccagagatgtccagcagggggcagtaacatcttggtatcatctctacttcctggggaggggagcactttctatattcccattcacctaacaggtctttgggggttggaagttccattccatttctgtaaatcccctctcctgcttttctcaagttggtttaatttttgatcttccttgttccagctttctggggattcccccttccctccgcctccaaagtttgtgatgttatagtggtatctgcagttatgaagtgggtttttctttttcctttctctggaatgtagactgtatatgtttaataactcaccttctcttccttgctcaaaaatgtgggataatgcaatgactgtgaccctggttggcaattaaacttgtcttatgca

SEQ ID NO: 2369 - DNA, 1965 bp, Cricetulus griseus
cgtcattccggctataagcgcgcgaccttaagtattcagcttcgctcttgccgggccgccgctaccatgcagaccctcggcatcttgctgctcgctgtcggccttctggccgcgtctgcctccgctgttatcagaatccccctgcgcaagttcacgtctatccgtcggaccatgacagaagtgggcggctctgtggaagacctgatccttaagggtcccataaccaagtactccaatcagtcacctgctgagaccaaggggccagtgtcagagttgctcaaaaactacctggatgcccagtactatggtgagatcggcatcgggacccccccacagtgttttacagtggtcttcgatactggctcctctaacctgtgggtcccctccattcattgcaagctgctggacatagcctgctggattcaccacaagtacaacagcggcaagtccagcacttttgtgaagaatggcacatcctttgacatccactatggctcaggtagcctctctgggtacctgagtcaggacactgtatcggtgccatgtaagtccgagcaaccaggaggtctcaaggtggagaaacagatctttggggaagccatcaagcagcctggaatcacattcatcgcagccaagtttgatggcatcttgggcatgggatatccaagtatctctgtcaataatgtggttccagtctttgacaacctgatgcaacagaagctggtggaaaagaacatcttctccttcttcctgaacagggaccccaccgggcaacctggaggggagcttatgcttggcggaattgactccaagtactatgagggggagctgtcttatttgaatgtcacccgaaaggcctactggcaggtgcacatggaccagttggatgtggccaatggcctgaccctgtgcaagggaggctgtgaggctatcgtagacacaggaacgtctcttctggtggggcctgtggatgaggtgaaggagttgcagaaagccattggagcagtgcctctcatccagggggagtacatgatcccttgtgagaaggtgtccagtctgccctctgtcactctgaagctaggaggcaaagactatgaactatctccaagcaaatatgtactcaaggtgtcgcagggtggaaagacgatctgcctgagtggcttcatggggatggacatacccccacccagtgggccactctggatcctgggtgatgtcttcattggcacctactacactgtgtttgatagagacaacaatagggtcggctttgccaaggctgccacgctctagtttgtcccttgcccaccagcagggaaatggatcagagtccagtagaggaagccagccagccccacccttccacctgccccactcacacacatgcacactcacggcattactgagcccttgggaggcctggctggagctggtccagttgttctgttctgtggttctgtccttgggttcagattgctaccctcttcctgtctgaaggaggccaaggcccacccagtgcaagggctgccttgaaaggaccctactggtttggtagcttgccttgtcctgcttccctttgctgcagagggcagcattccaaagcaggcatatgggtcttgggatccctcctagaaaccttatctgacctatgtccctcacccagcctggggaagacaccaggctccactgtcccacggtctgtatcctggcctgacagaggtctgaagatgagcaggaaggagcaagaggacagaagcaaagctatgaacctagtgtgttacttggggcctggccccacccacctgggaaagcatgccttagcctggggcagaagcaggatggctgtctgactggttttggctggcctctgctgccctcatcctgggctatgccgctgggagccaaagttggtatacaaatacagttgttttgggcctaaaaaaaaaaaaaaaaaaaaaaaaaaaa

SEQ ID NO: 2370 - DNA, 1965 bp, Cricetulus griseus
ctcgctctcactccgtcgctcgctctctcgggcaacatggcgggcgtggaggaggcagcgtcctttgggagccacctgaatggcgacctcgatccggacgacagggaggaggggacgtccagcacggctgaggaagctgccaagaagaagagacggaagaagaagaagggcaaaggggctgtgtcagcagtgcaacaagaacctgataaagagtcaggcgcctcagtggatgagatagcaggacagttggaaagacaagcactggatgagaaagagagagatgatgatgatgaagatggagatggtgatggtgacggtgcagctgggaagaagaagaaaaagaagaagaagaagagaggaccaaaggttcaaacagaccctccctcagttccaatatgtgacctgtatcctaatggtgtgtttcccaaaggacaagagtgtgaatacccacccacacaagatgggcgaacagctgcttggagaactacaagtgaagaaaagaaagcattagatcaggctagtgaagagatttggaatgacttccgagaagccgcagaagcacatcgacaagttagaaaatatgttatgagctggatcaagcctgggatgacaatgatagagatctgtgagaagttggaagactgttctcgaaaactaataaaagagaatgggttaaatgcaggcctggcgtttcccactgggtgttctctcaacaactgtgctgcacattacacgcccaatgctggagacacaacagtcttacagtatgatgacatctgcaagatagactttggaacacacataagtggtagaataattgattgtgcttttactgtcacttttaatcccaaatatgatatattattaaaagctgtaaaagatgctactaatactggaataaagtgtgctgggattgatgttcgcctttgtgatgttggtgaagccattcaagaagttatggaatcctacgaagtagaaatagatgggaagacttaccaagtgaaacccatccgtaatctaaatggacattcgattgggccttataggatccacgctggaaaaacagtgcccattgtgaaaggaggggaggctacaagaatggaggaaggagaggtgtatgccattgaaacctttggtagcacaggaaaaggtgtcgttcatgacgacatggaatgctcacactacatgaaaaacttcgatgtgggacatgtgccaataaggcttccaagaacaaaacacttgttaaatgtcatcaatgaaaactttggcacccttgccttctgccgcagatggcttgatcgcttgggagaaagtaaatacttaatggctctgaagaatctgtgtgacttgggcatagtagacccatatccaccactgtgtgacattaaaggatcatacacggcacagtttgaacataccattctgttgcgtccaacctgtaaagaagtcgtcagcagaggagatgactattaaactagtccaaagccaactccacgtctttattttctaagctttgttggaatacattataccacaagtaatttgcaacatgttgtctgttttaacagtggacctgtgtaatacctttatccatgtttcaaggagtttgatcaaaggcaaactgtctccatgtaattaaccaaggaaaaggctttcaggactttaatgttaagtgtctctcccgtctaggaactgctgcactgttcactagttaagaattccttacacattttgttctgaagacctaagagatgcttttggatatttatattgccatgttcttccttgaatgctctgaatgactacatccagttctgcacctgcgccctctggtgttgctttttaaccttcctggagtccattttctaaataaagacattttcagatcggagagctacatcttcatgtctgtggttgtaattctaagcagagagtcgctaaagtatagatagtgttctttatctg

SEQ ID NO: 2371 - DNA, 1965 bp, Cricetulus griseus
gccagattaccctgttggagtgtgttgggaagggccggtatggagaggtgtggaggggcagctggcaaggcgaaaatgttgctgtaaagatcttctcctccagagatgagaagtcatggttcagggaaacagaattgtacaacactgtgatgctgaggcatgaaaatattttaggtttcattgcttcagatatgacatctagacactccagtacccagctgtggctaatcacacattaccatgaaatgggatcgttgtacgattaccttcagctcaccacgctggatacagttagctgccttcggatagtgctgtccatagctagcggtcttgcacatttgcacatagagatatttgggactcaagggaagtcggccattgcccaccgagatctaaagagcaaaaacatcctggtgaagaagaacggacagtgctgcatagcagatttgggcctagcagtcatgcattcccagagcaccaaccagcttgacgtgggaaacaacccccgtgtggggaccaagcgctacatggctcctgaagttctagatgaaaccatccaagtggattgctttgattcttacaagagggtcgagtatttgggcctttggccttgtcctgtgggaagtggccaggcggatggtgagcaatggtatagtggaagattacaagccaccattctatgatgttgttcccaatgatccaagttttgaagatatgaggaaagttgtctgtgtggatcaacagaggccaaacatacccaacagatggttctcagacccgacattaacttccctggcgaagcttatgaaagaatgctggtatcagaacccatctgcaagactcacagctctgcgtatcaaaaagactttgaccaaaattgataattccctagacaaattaaaaactgactgttgacattttcacggtgtcaagaaggaagagtcaacactgtcgttgtccagctgggacctaatgctggcctgaccagtagtcagaacagaatgttccagggagacaccgaaatcaccctaacctcgctcaaaaactgtgacctgggcacttggtgaaatgttcccaccacagagactaatggtgggcagatacggttgcaaagggaggggactggaggaacacagagagatcctgcaagagatctgggcattaagacagtggctttgcatatctttcacgggtctcctagacactccccacgggaaactcaaggaggtggtgaattcttaatcagcaatattggctgcactactcttctttgttgcactaggaattctgtgcattccttacttgcactgttacccttaattttaaagacccaacttgccaaaacatcggctgcgtactccactggtctatctttggataataggaattcaatttggcaaaacaaaaaatgtaatgttagactctgctgcattttacacacgtgctgatgtttacaacgatgcgaacattaggaattgtttatacacaactttgcaaattatttattacttgtgcacttagcagtttttacaaaactgcttcatgcatatgttaaagcttatttttatgtggtcttatgattttattaccgaaatgtttttaacactagactctgaaatggacattttcttttattatcagttaaattcacattttaagtgcttcacatttttttttttatgtgtgtagactgtaactttcttttcagttcgtatgcagaacgtatttagtcattacccatacgacaccacccaatatattactgatttagaagcaaagatttcagtagaattttagtcccaaacgctgtgggggaaaaaatgcatcttcttcagaattatccattatgtgcatttaaactctgccagaaaaaaaaataactattttgttttaatctactttttgtatttcgtagttatttgtataaattaaataaactgttttcaagtcaaaaaaaaaaaaaaa

SEQ ID NO: 2372 - DNA, 1964 bp, Cricetulus griseus
caggtcctctgtggtgcacacagcccacctcccagccatgcgttctctccttctggcctccttctgcctcttggcagtggccctggcagccgaggtgaagaaacctgtagaggcagcagcccctggtactgcagagaagctgagttccaaggcgaccaccctggcagagcgcagcacaggcctggcctttagcctgtatcaggctatggccaaagaccaggcggtggagaacatcctcctgtcacccttggtggtggcctcatccctgggtcttgtgtcattgggaggtaaagccaccacagcatcgcaggcaaaggctgtgctaagcgccgagaagctgcgggatgaggaggtgcacacagggctgggtgagctcctgcgctccctcagtaactctactgctcgcaatgtgacctggaagctgggcagccgcctgtatgggcccagctccgtgaacttcgctgaagacttcgtgcatagcagtaaacagcactacaactgcgaacactccaaaatcaacttccgagacaagcgcagtgccctgcagtccatcaacgagtgggcctctcagaccactgacggcaagctaccagaggtcaccaaggatgtggagcgcacagacggggcactgcttgtaaacgccatgttctttaagccacactgggatgagaaatttcatcacaagatggtggataaccgtggcttcatggtgactcgctcctatactgtgggtgttacaatgatgcaccggacaggtctctacaactactatgatgatgagaaggagaagctgcagatcttggagatgcccctggcgcacaagctctccagcctcatcatcctcatgccccaccatgtggagccccttgagcgcctggagaagttgctgaccaaagagcagctgaaggcctggatggggaagatgcagaagaaggctgttgccatctctctgcccaagggagtggtggaggtcacccatgacctgcagaaacatctggctggactgggcctgacggaggccattgacaagaacaaggcagatttatcacgcatgtctggcaagaaggacctgtacctagccagtgtgttccatgccactgcctttgagtgggacacggatggcaacccctttgatcaagacatctacgggcgtgaggagctgcgaagccccaagctgttctatgctgaccaccccttcatcttcctggtgcgagataatcagagcggctcgttgctgttcattgggcgcctggtccggcccaagggagacaagatgcgagatgagttgtagagcccctgagtgggcatggcatggcaggaagtggccaaaggttcctgagacacatgggtgctattgtggggggaggggtacaaccttggatattccatggggtggggggttggcaatgcagatcagaattcccgtatatctgagtggacatttctagataaattccagccgtactaggatatggggcccagatactctgatgccaaattcaggggtgtctcagtcatcctgccctgccctccaagttgtagattcaatctgcctcacagtcaatcagtgttcatatttatggccaagtcctttcttatctgtgagacagtcgagttgtgggcagggcagccctctttgtcaccagcccctcagccttccccacttctcctgctcagctcccaactccctttatctacaaaactaggtgctgcagccccaggactggccacccttaaaatgacccttgcctagcaatgggagctgggagacagcataggagggttccctggcaaaccctgctctagagccactaccttgggcattgcaggggtgaacttctgtttttctccttttttagttttttcaaagagggaaggaagggacatgagcctttgttgctttcaaaatgaggacttaatttgtacaatttttttttttgaataaaacttttccaataaaatgt

SEQ ID NO: 2373 - DNA, 1964 bp, Cricetulus griseus
gcgacccgcgccggggaggacaggagccacgcgtcgcccgcggccccggcagccgcactttcgtctggcctgctagtcgagcgggagagcagatcccgattcgggtcgtgcccaacctcccgcgaggactggcccttcggaaggctctctcagcagcaggagcaggccggccaccatgaccgagaactccacgtccacccctgcggcgaagcccaaacgggccaaggcctccaagaagtccaccgaccaccccaagtattcagatatgatcgtggctgccatccaggcagagaagaaccgcgccggctcctcgcgccagtccatccaaaagtatatcaagagccactacaaggtgggtgagaacgctgactcccagatcaagttgtccatcaagcgcctggtgaccaccggtgttctcaagcaaaccaaaggggtaggtgcctcggggtctttcaggctggccaagggtgatgagcccaagaggtcggtggctttcaagaagaccaagaaggaagtcaagaaagtggccactccgaagaaggcagccaagcccaagaaggctgccgccaaagccccaagcaagaaacccaaagccacccctgtcaagaaggccaagaagaagccggctgccacgcccaagaaagccaaaaagcccaagattgtcaaagccaagccggtcaagacaaccaaacccaagaaggccaaacctgtgaagcccaaagccaagtccagtgccaagagggccagcaagaagaagtgacaatgaaggctttgcttgtgacactccttcctccctcctgttttctgtaaatacatttctctcttgatctcatctgcaaccctttgcccattttattctgactttacagaaaggacagagtttggattcctcagacagacattgtggagcgattcccttttccttaacccattgtgcaaggaaagcctcagacctcatctttgtaatgatgaagatgtacttttttcttaatttgatatttaaccttatggggttagggttgggggtgggtttttgttgggaggtttgtttactgtgaaggcaaatggaactggtaaagttctggctagatgaggggacctaggaaatgaagtttgtcctttttaaggctgtaagttgctcatccatcccttctgagagcttcaaaacctttggtgcaaagcagaggatgacactccacctagctggccagggaggggaaaatcgctcggctgccctcagcggtggtgagcagttggggacctggggtttcttttcacatatgccctagtgcctccccattgtctaaaaggggaaaggggtccaagtgacagctggttagagaaaccattgcttctcacaatcaggatctagccattggggaaggggggggtctttttcagcagtctcttgttaaatgggagtggacttaggggagggtggggagtcagccaagtgcctcagtgtgcctgtggaaacttgggttttttccacacgattgttgagagctgtgtcctaggagaacatttttcttcttttcttttccttcctgtataagatgtggctttgcttggtgctgcttcagttttaccagctgccacgtaaaacccctccaactgcttttacttttaaatcttttctaagtagcctaggagggggagaggcggggagtggactgtaagacaatacagttgattttagtttgctaggtagctttagagagccaggattgtgtgcatgtgtgtatatgtatatatccatatctaagactagtacttagtctcacttcgggagctgggagaaaaaaacctgtacagttgtctttctcttattttaataaaataggaaactcgcgtcccttcccccccctttttaaacaagtgttataattgctgggaaaagttgctgtggttgtaattttaaacttttaaaaataaaactggtaaaataaaaaaaaaaaaaaaaa

SEQ ID NO: 2374 - DNA, 1964 bp, Cricetulus griseus
  modified_base (55)..(55): a, c, t, g, unknown or other
gagagaaccctttaggatgtgatcagtgcagcatgaagttattcagaagtaccanatggagagacacaagaggacacatagtggagaaagccatataagtgtgacacttgccaacagattttttccaggactgacagattgttgaagcacaggcgcacatgtggtgaagccatagcaaaaggagccgctagtgcagaacctgggtcatcaaaccataataatatgggtaatctggctgtgttgtctcagggaaatacaagttcttcaaggagaaaatcgaagtcaaaaagcatagctattgaaaataaggaacacaagactggcaaaacaaatgaattctactaaatgtcaaacaatataaacatgcagagttactcagttgaaatgcctactgtgtctaccagtggaggcataattggcactggaatagatgaactacagaaaagggtgccaaaattgatctttaagaaagggcagcagaaagaatacagataaaagctaccttaattttgtgtcaccattaccagatgtagttgggcagaagtccttgtctggtaaaccaagtggctcacttggcatagtatcaaataatagtgtggagaccattggtcttctccaaagtacaagtggcaaacaaggtcagataagtagtaattatgacgatgccatgcagttttcaaagaagagaagatacttaccaactgccagcagcaaacagtgccttttactataaatgtaggacacatggtctcccaacagtcagtcattcagtctgcaggtgtcagtgttttggacaatgaggcgccattgtcacttattgactcctcaactctaaatgctgaaattaagtcttgtcacgaacagaaccacgagtggatttacacgcctcagaacactcagaattggttcaagaagaaaatttgagcccaggcacccaaacaccttcaaatgataaaacaagcatgttacaagaatactccaaatacctccaacaggcttttgaaaatccactaacgcaggttttactcttggacacggtttccagtttgtcagtttgtcttcacctctccacaaccacactttgtttccagaaaaacagatatacactacatctcctttggagtgtggttttggccaatctgttacctcagtgttgccatcttcattgccaaagcctccttttgggatgttgtttggatctcaaccaggtctttatttatctgctttggatgctacacatcagcagttgacaccttcccaggagctggatgatctgatagattctcagaagaacttagagacatcgtcagccttccagtccacatctcagaaattgactagccagaaggaacaacagaaaaatttagagtcctcaacaagctttcagattccatctcaggagttagctagccagatcgatcctcagaaagacatagagcctagaacaacgtaccagattgagaactttgcacaagcattcggttctcagtttaagtcgggcagcagggtgccaatgacctttatcactaactctaatggagaagtggaccatagagtaaggacttcagtgtcagatttctcagggtatacaaatatgatgtctgatgtaagtgagccatgtagtacaaggagtaaagacacccacagccagagttacaggtaaggtctacgaagagtgaccaggcgtgggagtcttctaatgttaattttcttttatttttaagaataatgtaatgccctttcaatgcaacttttcatatttagtttattttgttagtgtgattttagctgtttgtattatgattttttaatcaaaatcaatagattaaaaatagtttgacattcaaagtgacaatgtttagcaatcaaatttacatgtatagattgtcagggaatagacccaaaagttttaaatgaacaaaaaaaaacaaaaaaacaaaaactaacaagaaaaaaaaaaaaag

SEQ ID NO: 2375 - DNA, 1964 bp, Cricetulus griseus
caagctttaccaacagggacgcttatgtcaactgggcagtgaattctgtgaattggaagtttttgctaaagtcttgagagctttggataaaagacatttgcttcatcattgttttcaggctttgatggatcatggtgttaaagttgcttctgtcttggcctactcattcagtagacggtgctcttacatagcagaatcagatgctgcggacaaaggagaaggccatccaggttggctttgtattaggtggctttctttccgatgcaggctggtacagtgatgccgagaaggtttttctgtcttgtcttcagttgtgtactctgcatgatgagatgcttcactggtttcgagcagtggagtgttgtgtgaggttgctccatgtgcgaaatggaaattgcaaatatcatttaggtgaagaaacatttaagttagctcagacatacatggataagttatcaaaacatggccaacaagcaaacagagctgctctctatggagaactgtgtgcactcctgtttgcaaaaagccactatgatgaggcatataaatggtgtgttgaggcgatgaaggaaattacggcaggcttaccagtcaaagttgtggtggatgttttaagacaagcttctaaggcttgtgtagttaaacgtgaatttaagaaggcagaacagttaattaaacatgcagtgtacttggcacgagatcattttggatccaaacacccaaaatactctgacacgctgctagattatgggttctacttactcaatgtagataatatctgtcagtctgttgcaatttatcaggcagcgctcgacattcgacagtcagtgtttggaggcaaaaatatccatgtagcaacggctcatgaagatctggcttactcttcctacgttcaccagtacagctctgggaaatttgacaatgcactatttcatgcagaaagagccattggtatcattacccacatcctacctgaagatcatcttcttttggcttcttcaaagagggtgaaagcacttattttagaggagatcgcgattgactgtcataacaaagagacagaacagaggctgcttcaggaagcacatgacttgcacttgtcttcactccagctagctaagaaagctttcggggagtttaatgtacagactgcaaaacactatggcaaccttggaagactttatcagtcaatgagaaaatttaaggaagctgaagaaatgcacataaaagcaattcagattaaagagcagcttcttggtcaagaagattatgaagtagccctttcggtgggacatttggcatctttatataattatgacatgaatcaatatgaaaatgctgaaaaactatatttgcgatctatagcaattgggaagaaactgtttggtgaaggctacagtggactagaatatgattaccgaggcctcattaaactttacaactcaattggaaattacgaaaaagtgtttgagtatcacaatgttctgtctaactggaaccggttgcgagatcgacagtattcagtgaccgatgcccttgaagacgtcaacagcagcccccagtccaccgaagaagtggtgcagtccttcctgatgtctcagaatgttgagggaccaagctgctgagggacagcctcagctaacaattaccttttcccagattccggggaattcatactgtgaaatcaaaaccatgttgttttggggctggtatttgcattgaaacactggtccagtccattgaagaccctatttcgggtagtcctgtattgcagttcctgtagaataagcatatattgagttatatcagcatgtgccgcgtgtgtaagtagtcccacattctcatcccattagaacaacaggaaacctttcccccacctttttaaaaaataattcatttttcagaaagcctgaaagaaaaaaaaaaaaagaacccctaaaataaaactatttaagagtttaaaa

SEQ ID NO: 2376 - DNA, 1964 bp, Cricetulus griseus
ggccagcgagacctttgtgtccaaggatggcaagatcctctgcaacaagtgtgccactcgggaggactcccccaggtgcaaagggtgcttcaaggccattgtggcaggagaccagaacgtggagtacaagggcaccatctggcataaagattgcttcacctgcagcaactgcaagcaagtcattgggaccggaagcttcttccctaaaggggaggacttctactgtgtgacttgccatgagaccaagtttgccaagcattgcgtgaaatgcaacaaggccatcacatctggaggaatcacttaccaggatcagccctggcatgccgagtgctttgtgtgtgttacctgctctaagaagctggctgggcagcgtttcaccgctgtggaggaccagtattactgcgtggattgctacaagaactttgtggccaagaagtgtgctggatgcaagaaccccatcactggggggtttggtaaaggctccagtgtggtggcctatgaaggacaatcctggcacgactactgcttccactgcaaaaaatgctccgtgaatctggccaacaagcgctttgtgtttcataatgagcaggtgtactgccccgactgtgccaaaaagctgtaacgtgacaggggctcctgtcctgtaaaatggtgtttgaaccatgcttttgtgtcctttgctcactccctctgtaccatccataggggaagagtgggttttcacctctaaagttgctctttctctcttttctcccattttacagtattaatcaaccaagggcacgcagtgatcatattaagatttagcaaagaacaaccttgcagcaaaaataatttctctcttgctgcaatggaaataaacaaaaacttagattgactcttctgcatgtttctcatagagcagaaaagtgctaaccatgtagccacttcatgatgtaaacaagaagcataggcgataaggctcccactgagatgccattcagggctcatctgagacccattgtgcagtcacgtgactgatgtgcaagagttgtagcggctgctccaactcactgctcaccatcttctgtgagcagtaaaagaacttgccagaatgcatggtttaacttcatcagagctctaatcttccttctgttcttttgtgctttcacacgactaacacaaatttcccaagaattaacgttgtgaacttagctgtaactatccactgactttacccccatactaacgtttgactcccccacatggcatgttctctgagcgttcctactttaaagcatggaacacacaggtgatttggaaagtgcaagcacatctgagaaaacgagcctgtttcagagcagcatcgtcacagtgattacttctggaagcttaacaaaactaaccctcctgtcctttttaatttttaaaaaattttgttttaattaatagtaaaaatagtttatgggtttggaaacttgcatgacaatatttgagcctcctcagacgttcctgcagttttgagattcatcctatagaagagacaaaaactctagagaggcaactgagcaggcacagggctgtcatcaaagacaagtggaatcccttgtaacatagttgtctgctctttgtctgtgttcaagaagactgcaatgtctctttccttgtgattcttagaatttccctcaagagtttagctgggtctcggggcttttgggggtggccagcatccttcacaggcagggctggttttccacctcctgctcctctgaaatgcaggatacctgtgtaactgtattctccattatgatattacatatataacgagacaatatcaaagtaaacatgtaatgaaaatacatactcatatattactgtagcagtggttgtagatgccaacacctcatttccacattttgtcattagctgtttccatctaacgtttcagtgtatccttacaaaaataaagctgcatagaaagagca

SEQ ID NO: 2377 - DNA, 1964 bp, Cricetulus griseus
ggttcctagccggctgctttttggcgtcgggtcctcagcatggctgcctccagggttgagagctggggagctgccacaccctcgttttgctgactgttcctggagtctgtgttcttcttgtctttcctgggctaccctagcagacatgttcgctaaggcctttcgggtcaagtccaacacggccatcaaggggtcggacaggagaaaacttcgggccgatgtgaccgctgctttccccacccttggaacagatcaggcctctgagttgatacctgggaaggaagagctaaacgtggtgaagttgtatgctcacaaaggggacgcagtgactgtgtacatgagtggagggaaccccatcctgtttgaactggagaaaaatttgtatccaacagtgtacacactgtggtcatatcctgatcttctgccagcctttacaacatggcctctggtacttgataagctggtcgggggagcagatttgatgctgccaggggtagtggtgccccctactggtctgcctgaggtacagcaaggcgacctctgtgccattgccttggtggggaacagagctcctgtagcaatcggagtggctgccatgtccacagctcagatgctggcatcaggcctgaaggggaagggcttctctgtgctccacacttatcaggaccacttgtggaaatctggagacaagtcctctccacctgccattgccccattggcagtgaatcccacagatagcaatgaagagaaggtggaccttagtctgcaaggaaacctgagctgccttaccctggagggagaggaggagaacaggaaggttcatcacccagaagcatctgaagacaccagctccggggcccagagccaggactgtgtggatggcaagccccttcaagaacaaatggatgagctgttacaccagtgcttcctgcatgccttgaagagtcgagtcaaaaaagctgacctccctttgctcactagtactctccttggcagtcacatgttctcctgctgccccaaaggacagcaactggacataaagaagtcaagctataaaaagctctcaaagttcctgcagcatatgcagcaggagcagattgttcagatcaaggagctgagcaaaggagtggaaagcattgtggctgtggactggaggcacccgaggatcacatcttttgtcatccccgagccttccctgacttcccagactgtccaggagggtagcagggaacagccctatcaccctccagatataaaatccctctactgtgtcccagccaacatgacccagctcttccaggagtctggccacaagaaggggaacgcgcttgagggcagtgaggtacgcaggatcatcattgactatgccaagaagaacaacctggtggatgcagacaacagaaatctggtgaaattggatcctatcttatgtgactgcatcttagagaaaaatgaacagcacgtggtcatgaagctgccatgggactgcctcctgaccaggtgtttgcaaaatatgcagcctgcctaccaagtgacgtttcctggacaggaacccattctgaagaaaggaaaactctgtccaattgacatcacccttgcacagaaggcttgtaataaaaaggtgactgtggtccggaacttggagacctatggtcttgacccatgctcagtggctgccgctctccagctgcgatgtcaggccagcaccatcgtctctcctgcccctggggccaaagacagtctacaggtgcagatccaaggaaaccagatccaccaccttggccagctattgcttgaagagtatcggctccctggaaaatacatccaaggcctagaaaaggcccccaaacctggcaagaagtgacagactcattttatgcagtggatcccatgggaacccaggttctgagctggtaattgatatgagtattttcaacttttacaaataaaaactgtaattcttt

SEQ ID NO: 2378 - DNA, 1963 bp, Cricetulus griseus
atccctggtattcctgttggatcaacttggagattcagagttcaggtgagcgaagcaggtgttcataggcctcatgttggtggcattcatggtcgcagcaatgatggggcttattctcttgtcctggctggaggatttgcagatgaagttgaccgaggtgatgagttcacgtacactggaagtggtggtaaaaatcttgctggtaataaaagaatcggtgcaccatcggctgatcagacactgacaaacatgaacagggcattggccctaaactgtgatgctccattggatgataaaattggagcagaatctcggaattggagagctggtaagccagtcagagtgatacgcagttttaaaggaggaagatcagcaaatatgctccagaagaaggcaacagatatgatggcatttataaggtagtgaaatactggccagagatttcatccagccatggcttcttggtttggcgttatcttttaagaagagatgatgttgaacctgctccttggacctcagaaggaatagaacgatcaaggagactgtgtctgcgattgcagtatccagcaggttacccatcagataaggaagggaagaagacaaagggacagtcaaagaagcagaccaatgaagccaccaagaggccagcttcagatgatgagtgtccaagtgcctccaaagtgttgaagacatcggagtcaccagaggcagtagaggctttccaactcagccctcagcagcagcgcctagtaagagaagactctcagaaccggaagctatgggatgaagtgcttgcgtctcttgtagaaggaccgaattttctgaaaaaactggaacagtcttttatgtgtgtgtgctgccaggagctggtgtatcagcctgtcacaacagagtgctttcacaatgtctgcaaggattgcttacagcgctcctttaaggcccaggttttctcctgccctgcttgccggcatgatctcggccaggattatgtcatgattccaaatgagactctgcaggctctacttgaccttttcttccctggctacagcaaagggcggtgatctgtgtttgtgttgttcctggtggcttcttggacagtatcaagtctcaaatgagtggggagggttaaagcaatgctggaccatgtctctcatccggaagcagctgctcctctttcccacagccatcctcctttgtgtgtagtaagaggcccattctcaactgtcttttagatatgaaaaggtagttcttctcgtaacaactcattttaatgaatgaagcgtcaaagcctccactgtagttgatacccaatttatgatttattttgcaactacctcaggacagaaaagatttatggggattttaaaaattgactaattagttaaatgagattttagctacacactgcctcccaaatattagttgtgcctgtttcttgtaatttgctttcccagtaaagaagacagatgagattatcagaatgaacacagcttctgttatatgcataatactttttaaatgtgtctatttccatcacattgtgtgttttacaagaacaggttcactttttaactcatttgtgatctccattgtggtttttttctggtgttttatgcaaattgactactaatgactaatgagaacaatatgaatgcattgttgctacattagtgtaatgtggtgtgattttgcaatgacagaggtgtctgaagctctagttgtaaatgttcacgaaaagccacttctgtcaaagtctggctgcttttagtagttcttactagttgttttccatctgcagattatgagggctgtgctgacttttgagaagattgaaattgcttcacattgtgaccctaaattttatattcactatattccttaagagtattccttaataaatattttatgatcagaaaaaaaaaaaaaaaaaaaaaaaaaaaaaaaaaaaaaaaaaaaaaaaaaa

SEQ ID NO: 2379 - DNA, 1963 bp, Cricetulus griseus
agaaagctctgattcaccttcgggaaatatgggaattaattgggattccagaggaacagagattacaaagaaccgaggttgtgaagaagcatatcaaggatctagaggagagcctgagggaacggcttctcaaaagcatatccttctgtcagaaggagctgagtaccctgtgcaatgagttacaagtgaagccatttcaggaagaaaaagagacaactgtcttgcaactagaaaaagatttgcgcactcaagtagaattgttgagaaaacagaaaaaggagagaaagcaggaacttaatctactccaagaacaagatcaagaactctgtgaaattctttgtatgcctacgtatgatgtggacagcacctctgtccccaccttagaagagctgaacctgttccgacaacatgtggcaactttgagggaaacaaaggaatctaggcacgagcagtttgtcagcattaagaaacaaatcatattgtgtatggaagaattagagcacactcctgatacaagctttgaaaaagatatagtgtgtgaagatgaaagtgccttttgtttatcattggagaacattgcaacactacagaagttactacagcagctggaaattaaaaaatcaaaaaatgaagcagagtgcgaagggctccgtgctcagatccaagagctctgggataggttacaaatacctgaagaagagagagaacctgtggctgcaattatgactgggtcaaaagccaaagtcaggaatgcgctgcaattagaagtggatcgcttagaagaactgaaaatgcaaaacataaagcaagtgattgagacaattcgagtggagctggctcagttctgggaccagtgtttttatagcaaagaacagagacaggcttttgccccttactattctgaggactacacagaaaacctgcttcatcttcatgacgctgagattatacggttaagaaactattatgaagttcataaagaactatttgaaggtgtccagaagtgggaagagagctggaaactcttcctggagtttgagagaaaagcttcagatccaagtcggtttacaaaccgtgggggaaatcttctaaaagaagaaaaagaacgagcaaagctccagaaaacactccctaagctggaagaggagttgaaagcaagaattgaaaagtgggaacaagagcagtcaatggcatttatggtgaatgggcagaaattcatggagtatgttacagaacaatgggaattacatcggttggagaaagaaaaagcaaaacaggaaagacaactaaagaacaagagacagacagaggcagagatgctctatggcagtgctccccggacacctagcaagagaccaggactgactcccaacaagcctggcaaagtacgcaagatgaacactaccaccatgtccagtgctacacccaatagcagcattcggcctgcctttggtggaaccatgtatcgttcccctgtatcccgactacctccttctggcagcaagtcagtaatcacttctatgtgttctggaaagaaaacacctagagctgcccgcctcagggccaacaaggagaacatggagctcaatggcagcatgctgagcggtgggtactctggctcgacccccctccagcacaactgcagcattaagtctattgccagcacctattctgagttttcgcgagaactttcaaaggcttccagagctgatgctacttctcgaatcctcaattcaaccaacatccagtcctgagactccttgaccagttagccagctgtggcttcttgtgcctagactggactgacttatacaggggtgattttatagtttttcttcagtttaaatatgtttgaaacaactttgggcaggttctgttaccacgggcctaacttaagacatgagtactacagacacaaccatctataatgagacatggtgccctcttctggtgtgcagatata

SEQ ID NO: 2380 - DNA, 1963 bp, Cricetulus griseus
aggaggagggcgctcccggccaccgcgctgcagacgccattatcctctgtttccccgctgcacggacgtcgccgaccgtcgtgctcgtctcgcgcccgggtgcggcctgcagattggtgtatccatttaattcaagaaaatggagaccgaacagccagaagaaaccttccccaacaccgaaaccaatggtgaatttggaaaacgccctgcagaagacatggaggaggagcaagcctttaaaagatctagaaatacagatgagatggttgaactgcgcattttgcttcagagcaagaatgctggggctgtgattggaaaaggaggcaagaatattaaggctctccgtacagactacaatgccagtgtttcagtcccagacagcagtggccccgagcgcatactgagtatcagtgctgatattgaaacgattggagagattctgaagaaaatcatccctaccttggaagagggcctgcagttgccatcacccactgcaaccagccagctcccgctcgaatctgatgctgtggaatgcttaaattaccaacactataaaggaagtgactttgactgcgagttgagactgttgattcatcaaagtttggcaggaggaattattggtgtcaaaggtgctaaaattaaagaacttcgagaaaacactcagacaacaatcaagcttttccaggaatgctgcccccactccactgacagagtcgttcttattggagggaagcctgacagggttgtagagtgcatcaagatcatccttgacctgatatctgagtctcccatcaaaggacgtgcacaaccttatgatcccaacttttatgatgaaacctatgattatggtggttttacaatgatgtttgatgaccgccgtggacgtcctgtgggatttcccatgagaggaagaggtggttttgacagaatgcctcctggtcgggctgggcgtcccatgcctcctgctagaagagattatgatgatatgagccctcgtcgaggaccaccaccaccacctcctggccggggtggccggggtggcagcagagctaggaatcttcctcttcctccaccgccaccacctagagggggagatctaatggcttacgatagaagaggaagacctggggaccgctatgatggcatggttgggttcagtgctgatgaaacttgggactcggcaattgacacatggagcccatcagaatggcagatggcttatgaaccacagggtggttctggatatgattattcctatgcagggggtcgtggctcatacggtgatcttggtggacctattattactacacaagtaactatccccaaagatttggctggatccattattggcaaaggtggtcagaggatcaaacaaatccgtcatgagtcaggagcatcaatcaaaattgatgagcctttagaaggatcggaagatcggatcattaccattacaggaacacaggaccagatacagaacgcacagtatttgctgcagaacagtgtgaagcagtattctggaaagtttttctaagactagtgaagaactgaaggagtcctgcatctttttttttatctgcttctgtttaaaaagccaacattcctctgcttcataggtgttctgcatttgaggtgtagtgaaatctttgctgttcaccagatgtaatgttttagttccttacaaacagggttggggggagggcatgcaaaaactaacattgaaattttgaaacagcagcagagtgagtgaattttatttttgttcattgttggtggttttaaaaaaaattccccccgtgtaattattgtgaacaccttgctttgtggtcactgtaacattggggggtgggacagggaggaaagtaatagtccacatgtccctggcatttgttcagagcagtgtgcagaatgtaacgctcttttgtaagaaacgttttatgatttttaaaataaatttagtgaatct

SEQ ID NO: 2381 - DNA, 1963 bp, Cricetulus griseus
tcaagaagagtctgaacaccaaggttgtacaagccctcttggggatgagctctaccactgtcttgaaggagatcacaaaaaacagctgtcaggggaatctgcaagaagtagtgaagatagtttaagattttcagatgctgcttcaaagacacctcccaaagaatttactgctcgggtctcatctcctgtatttggagctacctctactataaaaagtcatttgggtttgaatacaagtttctcaccttctcttttagacattgggaaaagaaacctcctgaagacagctccttttagcaacatttctgtatctagatcagagaaagctaggtcaaaatcagaggacaatgctcttttcacacatcataatcttgggtctgaagtaagcaaggtcattagccagtcatttcctaataagcagatacttatgaataaaaatgtaagtgaatccgtagatgagcagggcagtagtgatcatattaaagacattatttctgataaatacttggtgcctttgaaatcactgggaggcaaagcatgcaaaaggaagaagactgaggaagagagtgaacatgcagtacactgctcccaaacctgttttgataaggaaaattctcttccttttccaatgatgaatggagaccatgtgatggataagcccctggacctgtcagatcggtttgcagttacccaacgtcaagagaagagccacggaaatgaaacttgtaaagacaagtttaaacaagtgactatttatgaggttttgaagcccattcccaggggctcttcctcaggtcgtaaagccttgagcggggcctgcttattagccaaagattcttcagaggtgtcctgtttacagcagtgtgtcctccagtcctgtagcaaagcctctccagatcataaaataccactgcagataaaagaagaacctgtcttcaaaacccctctgtgctcacaggaaagtgccgagacagaggatctctttagtgacatgaaggatactggttctcttgtgccaacaaaaggaaaaagcagaccagtccatggaggatgtgagcttgcatcagttcttcagttaaatccctgtagagttgctaaaacaaagtccctgccaaacaaccaagatgtgccctttgacaatatccagtggagtgtagacccgggagccgatctttctcagtataaaatggatgttactgtaatagatacaaaggataacagtcattcacgattaggagaaacagtggacatggactgtacattggtcagtgaaactgtgcttttaaaaatgaagaaacaagagcaaaaagaaaaaagtccaaatggagacataacaataaatgatagcttggaagaaatgtttgatcggacaacacatgaagaatatgaatcttgtttggcagatagcttcccccaggtaccaaatgaagaattgtctgctgccacaaagaaaccaaacatacatggtgataaacaagatagagtcaagcagaaagcacttgtggagccatattttaaagataaagagagagaaagtaacatacagaattttcctcatattgaggtagttcggaaaaaagaagagagaaggaaattgcttgggcacacatgtaaggaatgtgaaatttactatgcagatatgccagcggaagaaagagaaaagaagttggcttcctgctcacgacaccgatttcgctatattccacccagcacaccagagaatttctgggaagttggttttccttctactcagacatgtctggaaaggggttacatcaaggaagatcttgatctttgccctcgtcccaaaagacggcacccttacaatgtagtgttttctccaaaaggcaaggaacagaggacctagatgttggagtaaaaccagggcagaagtaccttttttttccattttagttatttatagttaaagttgtaataaacattgatctttggtttgtgtttt

SEQ ID NO: 2382 - DNA, 1963 bp, Cricetulus griseus
atagcggggacccgcttcctcggccgctttcctcacgctcgtgacctcccggcaccatttgctccgcgcggggctgtggaagaccttccccgcccacgctacacgcctgtcactcagagcgcgcgcccgccccgggagccaatcagcgaccgccgtaggggaccatgtcagagtctgggcacagtcagcctgggctctatgggatagagcggcggcgacgatggaaggagccaggctccagtggcccccagaacctctctgggcctggaggtcgggagagagactacattgcaccctgggaaagggagagacgggatggcagcgaagaccccagcactaacgtcatgcagaaaactcccatcatcctctcaaagcccccagcagagcggtcaaagcagccgccaccaaccacagcccctgctgcaccgccagccccagccccgctggagaaacccattgtgctcatgaagccacgcgaggaggggaaggggcctgtggctggagcaggggctgccacccctgagggtactgccccaccaccccccacagcccctgcgccacccaaaggagagaaggaggggcagagacccacgcagccggtgtaccagatccagaaccgaggcatgggcacggctgccccaactgccatggaccctgtggtgggccaggccaagctcctgcccccggaacgcatgaagcacagcatcaaactggtggatgaccagatgaactggtgtgacagtgccatcgagtacctgctggatcagactgacgtgttagtggtcggtgtcctcggcctccaggggacaggcaagtccatggtcatgtcacttctgtcggcaaacactcccgaggaagaccagagggcgtatgtcttccgggctcagagtgctgagatgaaggaacgagggggcaaccagaccagcggcatcgacttcttcattacccaggagcgcatcgtcttcctagacacgcagcccatcctgagcccatccatcttggaccaccttatcaacaatgaccgcaaactgcctcccgagtacaacctccctcacacctatgtggagatgcagtctctgcagatagctgccttcctcttcaccgtctgccacgtggtgattgtcgtgcaggactggttcacggacctcagtctgtacaggttcctgcaaacagcagagatggtgaagccgtctaccccgtcccccagccatgagtccagcagctctgcgggctcagatgagggcactgagtactacccacaccttgtcttcctgcagaacaaggcgcgcagagaggacttctgtccccggaagttacgacagatgcacctgatgattgaccagctcatggcacactcccacctgcgctacaaggggacgctgtccatgctgcagtgcaacatcttcccggggctgccgcccgactttctggactctgaggtcaacttgttcctggtgcccttcatggacagtgacgctgagagtgagaccccacctcgagcagggcctggctccagccccctcttctccctgctgcctgggtaccgaggccaccccagcttccagtccttggtgagcaagctccgcagccaggtgatgtccatggctcggccccagctgtcccacacaatcctcaccgagaagaactggttccactatgctgcccgcatctgggatggggtgaagaagtcctcggccctggcagagtacagccgccttctggcctgaggctgagggagggagcacacagagaccctgtcctgtggacagaaagggcaaacagccctcccccagcacagaggaaagaaaagcaaagccacagagcctctgccaaggaatcagggatcatggcttcccgcccagaagagatgtgaggtgtctgaggccagtcccgtcctcaaatggggacctgctccgggggtgaccaagagatcccaccccagccggggatgagcagcccttcc

SEQ ID NO: 2383 - DNA, 1963 bp, Cricetulus griseus
aaaggaccttgttaagaagtactctgaccgcctcgagtgctgtgaagatgaagtggagaaacgcaatagaagagatccgctgcaaagcaagtgagcgcggcacagggaatgagcactaccgagcaaccgggattgccacaatcgaggtgttcctgcctcccagactcaggagggacaagaaaagtttattggagacccgcttacatgtcactggtagagacctgaggtctaaaatagccgaaacttttggatttcaagaaaattacatcaagatcgtaataaataagaaacaacttcaactagggaaaacccttgaagaacaaggagtgactcacaacgtaaaggcgatggtgctagagttgaagcagtctgaagaggatgtgaggaaaagctcccaggtggaggaagaggagcagaatgaggctgagctgaaggagaaacgcattcagaggaccaaaagggggttggagatcctggcagagagagcggagatggtggatccggaaacgatgccttacttagacattgcaaaccagacgggcaggtccatcagaattccccctgccgaaaggaaagcccttatgctagctatgggataccatgagaagggcagagcttttctgaagagaaaagagtacggcatagccttgccatgccttctggatgctgacaggtatttctgtgagtgcaaggagcttctggacactgtggacaactacgcggttctccagctggatatcgtgtggtgctacttccgcctggaacaactggaatgcctcgatgatgcagagaagaagctgaacttggcccagaaatgctttaaaaactgttatggagagaatcaccagagactggtccacataaaaggaaattgtgggaaagagaaggtactgtttttaagactctacttgcttcaggggattcgaaactatcacagtggaaatggagaggaagctcgggagtatctcaacaaggcgcgccagctctttaaagagctgtacatcgatccatcaaaagttcacaacttgctgcagttggggttcaccgcccaggaagcccggcttggcctgcgggcttgtgatgggaacgtggaccatgcagccacacatatttccaaccgcagagaggaattggctcaaataaagaaggaggagaaggagaagaggaaacgccgcctggaaagtatcaacactttgagaggaatgggctactccacacatgcggccaaacaggcccttcaccaggccagaggcaacgtggacgacgccctgacgattctcctcagcaacccccacatgtggtggttacaagattcagaccctgaaaacaacagccgacaagcaagcccttcccaggaaagcatcgaccaactggtgtacatgggttttgacacagtggtggctgaagccgcactaagggtgtttggaggcaatgtccagttggccgctcagacgcttgcgcaccatggaggaagccttcctcccgacctgcagttgtcaggagaggactcctcctccactccatccacatccccgtctgactctgcagggacctctagtgcctcaacagatgaagacatggagacagaggccgtgaatgagatcctggaggacatcccggagcacgaggaggactacctggactccactctggaggatgaggaagtcattattgccgagtacttgtcctacgtagaaagtataaggtctgccgcaaagaacaactgaacagaaataagtgctacatttctgcctataaattctgtcgttgtgaacggtcgaatgcagctcttctttgcgttcctcttgcttttcaacgattttgctccaagtaggcttcttcctcaggtacagggacccggcatagtgaagagaggctttctttgttgggaagaggacagtggaggacagggaattcccaggctctgctgtttcccttctgcctccaggtctgcacccctgac

SEQ ID NO: 2384 - DNA, 1962 bp, Cricetulus griseus
gccggagggggcgcgcggaaggcggcggccccgcatgaggcccccaggacgcggcctcgtgcgccgagacaaagcgggcgtccggccgcattgtctgacgtgcttctcccctcgctcctttttgtcctcgccggcgccgccccgccccgcccctggcggttctcaggaggactccggatccggctcggcgctcgccctcgcttcgccatggagaagaccgagctgatccagaaggccaagctggccgagcaggccgagcgctacgacgacatggccacctgcatgaaagccgtgacggagcagggcgccgagctgtccaacgaggagcgcaacctgctgtcggtggcctacaagaacgtggtcgggggccgcaggtccgcctggagggtcatctcgagcatcgagcagaagaccgacacctccgacaagaagttgcagctgatcaaggactatcgggagaaagtggagtcggagctgaggtccatctgcaccacggtcctggaattgttggataagtatttaatagccaatgcaactaatccagagagtaaggtcttctatctgaagatgaagggagattatttccggtatcttgctgaagtagcatgtggcgacgatcgaaagcaaacaatagataattcccaaggagcctaccaagaggcatttgatataagcaagaaagagatgcaacctacacatccaatccgcctggggctggctcttaacttttctgtattttactatgagatccttaataatcccgagcttgcctgtacactggccaaaacggcttttgatgaggccatcgcagagcttgatacactgaatgaagattcctataaagacagcaccctcatcatgcagttgcttagagacaacttaacattatggacatcagacagtgcaggagaagaatgcgatgcagcggagggggccgaaaactaaaggtgtccagggtgccgtcctccatcccctcaagaaaacctttttacatctccattccttattccacttggatttcctctagcaaggaagcccattcatgtgtatgggatcaactgtttatagtcttttcacactgcagctttgggaaactccatcccttgatttgtgttgtctcggccttcctggtgtgcagttactgctgtagaaaagtatcaatagcttcatttcatataaacacgagtaacttccagacacttgtgtagaggactgacagtgcatttggtatttaagtaatctgaaccagttcttcaagtggctgtgttttgtattactgtgaagatatggaaatgtagtacattacaatttaaaataattgtaataataacttcctgatttctacattccctctctgaccctcctcgggggtttcctttcagaagcaacttttccatactcgtactgcatattcctttttagtaggaatccagaagtgttagattaaatgggaaagctcttaatgcatccagtcttgggtcacagatcaaaatgtctcctatgtcacatattctggaggttacgtctgtctgtgacaacagggaatttcctttatgcattcttcatttgctgctgtttgagttgacaacttccttcccaataaaaattcacttacacctcctgcctttgtagctctggtattcactttaccttgtaatagaagtagcatgttgctgccagaaaacaagcattgctttgggcaaattaaaatgcatgtcctttcttgatacactagaaagggaaaataaagtacacaagtccaggtctaaatcagtacttttccatgcagattcgtgcacatgtgagagggtgtccagtttgtccagtgattgttctttagagagagggacccactatattgtgtttgctaatcattgactgtagtcccaaaaaagccttgtgaaaatcttatgccctatgtaacagcagagtaacataaaataaaactacattttataaaac

SEQ ID NO: 2385 - DNA, 1962 bp, Cricetulus griseus
ccggaggtgcggggcgcagcgggccaggacggggcgccatgaacagcgcgggcgccgacgagatcgggaagctcttcgtgggtggcctggactggagcaccactcaagagactctgcgcagctacttttcccagtatggcgaagttgtggattgtgtcatcatgaaagataaaaccaccaaccagtcccgaggctttgggtttgtcaaatttaaagaccccaattgtgtggggaccgtgctggccagcagaccacacaccctggatggccggaatattgacccgaagccatgcacacctcgagggatgcagccagagagaactcggcccaaagaaggctggaaaggacccaggagcgacagcagcaaatccaacaagatctttgtggggggcattccccacaactgcggcgagacggagctcagggagtacttcaagaagttcggagtggtcaccgaggtggtcatgatctatgatgcagagaagcagcggcctcgaggttttggatttattactttcgaggacgaacaatcagtggaccaggctgtcaacatgcattttcacgacatcatgggcaaaaaagtggaggttaaacgggctgaacctcgggacagcaaaaaccaagcaccaggacaggcaggagccagccagtggggcagccgcgtggcacccagtgcagccaacggctgggcaggccagcccccgcccacatggcagcaaggatatggcccacaaggaatgtgggtgccagcaggacaggccattggtggctacggcccaccccctgcaggcagaggagccccgcccccacccccgcccttcacatcctacattgtatctacaccacctggaggcttccccccaccgcagggcttcccacagggctatggtgccccaccacaattcagttttggctatgggcccccgcctccacctcctgatcaattcgcccctccaggggttcctcctccacctgccaccccaggggctgccccactggccttcccgccacctccgtctcaggctgcccctgacatgagcaaacccccaacagcccagccggatttcccctatggtcagtatggttacgggcaggacttgagcggcttcggccagggcttctcagaccccagccagcagcctccctcctacgggggcccttcagtgccaggctcggggggtccccccgctggtggcagcggcttcggacgcgggcagaaccacaacgtgcagggcttccatccctaccggcgctagccagggggatggcgccagggcaggattcgggactggtgaactcgtgacaatcacacacttgggacaaaataaacgaccactcgacctgggggggggggcagtggaggccacgtctggactgaggttttaaatatatttcttttctctgacccatcagcacaataaaaacacgtcactggttcaacaacagggtttaaaaaacgccttcagctttaattcagaatttcaggtttctttttcttctttcttttttttcctttttttgagattattttcctgagccttttgttttaccgtatattgtaaacttttatgttaaaaagaaatatacatttacaaattgtgagatttttaagagaaattttctacgatgtatactggcttattttttaatttaaagcagggttcgtgtgctggaagcggggcccttgctcccgccggcgcaggctggggcacaggtggagactactgcgtgcatttggttttttgttcattccttgctttgagcggcttgtgtggctgtgggtgccacagggcccctggcccgggtggcaatgctgacgtcacaggtggcctgggcccccacacaggtggcaggccaggccttgctggaggctcctcagcaaggctcaggttcccattgaccagtttgacccggtttgaataaagcagcgtgtttggatcagaaaaagaaaaaaaaaaaaaa

SEQ ID NO: 2386 - DNA, 1962 bp, Cricetulus griseus
gccagggcctgaggacacagggaaggcctgtggtgtggactacgaagtcaaagccttctgtgccgagaacctggaggagaagatccacaaaaggaattctgtgcggctagtcatccggaaggttcagtatgccccagagaggcctggccctcagcccacggccgagactaccagacagttccttatgtcggacaagcccttgcaccttgaggcatctctggataaggagatctattaccatggagaacccatcagcgtcaatgtccatgtcaccaacaacactaacaagactgtgaagaagatcaaaatctcggtacgccagtatgcagacatctgtctcttcaacacagctcagtacaagtgcccagtggccatggaggaggccgatgacactgtggcacccagctcaacgttctgcaaggtctacacactgactcccttctggccaacaaccgagaaaagcgggtaatgcaccccaagccgaaagaggagcccccacatcgggaagttccagagagcgagactccagtagacaccaatctcatagagcttgacaccaatgatgacgacattgtatttgaggactttgcccgccagaggctgaaaggcatgaaggatgacaaagatgaagaggatgatggcaccggctctccacacctcaacaacagatagactggggccagccctcgccctggcagctccaggttcacctttgcacttggatctttctcgtctccttcccattctggttcccccccctcctgttcttccactttctaccaagggcccagtgtcttccaagtctcggtgataagcctctgaggttccaggtactatccagtggtattggcttttcctgtgcttagggactgggacttgtgccaccaaacagcccacactgggactttccagtaaaccaaagggcacatgttgatgccaatctgggcaggaagagcatgctttggtaaaagctcatgaatagagggtgattgaacttgctcagtgccccagccaagagaagaattcagttcccagaaagataaagggctgagttgcctggctggaccccatggctatttcagtctttagagcccagatggctcctgccagagggtggctgaactcacctcctagagtccacaaaagtcaggagacctgggctctgaccacaggtcagagaactgaatccaccatcatgccacccaagaaatccaagggtgagaggaaatagatgttgcctcttctaagtataaggtccctccaggatcaacagaagcaccacagctccttggagacctttggggatgttcagccctcttgctctgagagctgggccctagctgatcccctcatagtagcttccatatcccagaggcagctctctctcctaccaatggctaaagcctgtgtgtgtctcccatccaccagaaagggacaagattccaagcttgagctcccaggaaaacgggtgggcgcctgttctgatatttactctttaaacttaaggaccaaaccagggagggcatttttgaggctggattctccagagacattttaagcatgtcttcctcgagcgaatctcctaggattccacttccacacctatggatgtccatgtgcacagcaggaggcttttgtatccaaagaggttggttcccccttctgcagtccaccagtgtccctccatgctggtctgtactgtcatgggaattaacttgcaggacagctcattgtggaggctagcctttggcagtgtcctggggtgtggtggggcagcctcaggcctgtgaccctctgtgaagtgatgatttgtggcacattcattcctggaccacatccaggtcaacctgtcgtacctgtggctgcccttgttctgtgaagtcattatagttttattcaactccaacaggacagatgagcaaaagaaccttgaacgagaggccattaaaggccttttgtgat

SEQ ID NO: 2387 - DNA, 1962 bp, Cricetulus griseus
ctttatacagcaggcaaacagctcatcattaaaacctcttcaaccaaaatgctaaagttttacagtggaaagcccatgaaggcattattttaaaagtcgattggaactcagtcaatgatcttattttatctgctggtgaagactgtaagtataaggtttgggatagttatggccgtgtactgtacagttctcagcctcatgaacaccctatgacctcagttgcctgggctccagatggagagttgtttgctgttggatcatttcataccttacgcttgtgtgataaaactgggtggtcatatgctttagaaaaacccaacactggcagcatatttaatatcacgtggtcaattgatggcacgcagatcgtggaaacgggcatgttgtctttgcacatgtggtggagcagcgctggggagtggaaaaattttcaagtaacactaacgaagagaaggactatgcaggttcggaatgtcctcaatgatgctgtggatttactggagttccgagacagagtcattaaagcgtctttgaaccatggacacttggttgtttcaacgtctcttcagtgctacgtcttctctacgaagaactggaatacaccacttatatttgatctcaaagaaggaactgttagcttaattctccaggcagaaagacattttcttcttgtagatggtggtggtatctacttgcattcttattgaagggcgcttcatttcttctccgaagtttcctggaatgaggacagatattttgaatgcacagactgtatccctgagtaaatgatactatagcaataaaagacaaagctgatgaaaagataatcttcctctttgaagcatcaactggaaaacccttaggggatgggaaacttctttctcataagaatgaaatctcagaaattgctctggatcaaaaaggacttaccaatgacagaaaaattgctttcattgataaaaatagagacctctacatcacctcagtgaaacgatttgggaaagaagagcagattattaaacttggaaccatggtgcatacattggcatggtgtgattcatgcaatatcctttgtggacttcaagatacccgattcacagtgtggtattaccccaataccatttatgtggacagagaaattttgccgaaaacattgtacgaaagagatgcaagtgaatacagtaaaaacccccacatagtgagttttgttggaaatcaggtgactataagaagagctgatggctccctggtacacgtcagcatatccccataccctgccatcctccatgagtatgtgagcagctcaaaatgggaagatgctgtaaggctctgccgatttgttaaggagcaaagcatgtgggcttgcctagcagctatggcagttgctaatcgagatatgattactgccgaaatagcttatgctgcaattggtgaaattgataaagttcgatacatcaatgctataaaagatcttccatctaaagagtcaaaaatggcccacatattaatgtttagtgggaacatacaagaggctgagacagtacttctccagggtggcctcatttatcaagcaatccagatcaacattaatctctataactgggaaagggcactggagttggctgtgaaatacaaaacccatgttgatacagttcttgcttatcgtcaaaaatttttggagacatttggtaaacaggaaactaataaacgatatttgcaatatgcagaaggtctccaaatagactgggagaaaatcaaagaccaaaattgagataggaaattaactaaagaacgtgaccgatcaaccagcagccagtccaccaaagctttttaacagtgacacggacatccctctaaagtgtctctgcacctgttcttccagtcgatgcattatggagctcacgcacactcaacctggaaacattgcctcttcccctccattgtaatttctcatgtaggttt

SEQ ID NO: 2388 - DNA, 1962 bp, Cricetulus griseus
tcagaatcaggatgaaaatatgccaagtcagtaccttgcacagttggcagctaagcctttcttctgtgagcttcaaggatgcaaatacgaatttgtgaccagagaggctttactaatgcattaccttaaaaagcataattattctaaaagagaaggtccttcagttaaccatgtttcaacaccggtattccccattccggtgtcacatctgccaaaggtcatttacaagaaaaacacaccttaggattcattataaaacaaacatcaaaattggcagtgacagggcaactcacagactgttagaaagtgagaaatgtgatcatgaagggccatgctcagtagacagattgaaaggtgactgctctgcagagcttggtccattcggattatgaaatccattgtactctcaatggctgtggccagattttcagccatcgaagtaattacttccagtctactaccgacataaggacagttatgacaacctgttcagcaaccaaaaagtaagcaaatgagcgactcttaaggagtgaaaaggtgtgtcagacagctgaggcacaggagcagacgcagacagagggacagacgcagggacaggagcaggagcagcaaactgccaaaaggccatttaatactaaagctaaaaaatgtggcttactcaaagataagaaagctccgattagctttaaatgtgcgttgagcattctgaacacacgcaatacccatgcatggttcagggatgcatgtctgtggtgaagctggagagcagcatcgtgaggcattacaaacgtacccatcagatgaatagtgcctatttagagcagcagctagagaaccttgtggtttgtgttaagtacggtaccaaaattaaggaggagcctccttctgaagtagagccctgtgtaaagaaagaggaaaacaccagctgtgagtcagtacacacagagcactccccaggggacagcagcgtgcccctccagaacgctgattccacttgcccagctcaacaggatggcgatcagaaagggtgtgtggaaagaaactcagttcttgatgcagacactctgctctacaggggaactttgaaatgcaaccatacttcagaaaccacttctttggaacagtgtgatacagttcagtctcctccctgtaaaatagaaagccccatacctaatcccagtgggacagaaagtagtacttacttcacagacttccagctgcctttatcaaggatcaaaagaagaacctgggcagcatagttcagggcaagaaaacactgtcaaaagtgcaacccaggtcccaaaagacaatatgaggaagcatcctcagcccagatcatttgatctgaagacttacaaacctatgggatttgaatcttcctttctgaaatttattcaggaaagtgaagagaaagatgacgattttgatgactgggagccttcagagcacttaccattgaataactcctctcagcctgctaatgacttgacagggaatgttgtggcaaataccgtagtgaatgacagcgaccctcaagttgacatacctcattcttccattaaccctccagttgcagagaatctgactgcagtcccaccattagtagtcgctgaagcagcggcagtcccttccttggaaaacttgagggtcgtactggacaaagcattaacagactgtggagagcttgccttaaagcagcttcattatcttcgcccagtggttgtccttgaaagatctaagttctccacaccaattttagacttgtttccaactaagaagacagacgagctttgtgtaggaagttcctaaatcactgttttgtttttgaagcagctagctccagcactgcaacgtggggacacttgccaacgtgaacaaaggctgagcaccagccacacttgcttagggtagaataggctgtgtatttacatgaatgtacaatatctatgtcagcagtattgg

SEQ ID NO: 2389 - DNA, 1961 bp, Cricetulus griseus
ccgacacatttcccggcaggaggtcaggattcactccggccacccagtttcatcattatgtggaaggctttctgctgcatgggctcctgccagcccatgtcattcggttgctgcttaagcctcatgtccaggctcagcaggacttgcagctcctactggagctgttggagaagatgggactctgttactgtctcaataaacccaaaggcaagcctttgaatggctctacagcttggtacaagttcccatgctacgtacagaatgaggtgccccacgcagaggcctggatcaatgggaccaacctagctgggcagtcttttgtggccgaacagttgcagatcgaatatagttttccctttacgtttccacctggattgtttgcacgctacagtgtccagatcaacagccacgtggtgcacaggtcggatgggaaatttcagatctttgcatatagagggaaagttcctgtggtggtgagttaccgacccgccaagggggtcctgcagccagacaccctgtccattgctagccatgcatcattaccaaatatatggaccgcatggcaagccatcacccctttggtagaggaactgaatgtcctacttcaggagtggcctggactacactacactgtgcacatcctctgttctaagtgccttaagagagggtcccccaatccacacgctttcccaggggagttgctgagtcagcccaggccagaaggggtggcagagatcatctgccccaaaaatggcagcgagcgagtgaatgtggccttggtttacccacctacaccgactgtgatcagcccctgttccaagaagaacgttggtgaaaagcacagaaaccagtgacatctcccaagggtctttggggcccagggtgaaaccaccgcaccaggtgcctgcagaggacccttggaggggttggagggggctgggaagatggggagccaacatggagcaaatgtttcacaacctgaacctcagaactgtgatcctccaaggagagagctacttgaagaaaagaaaaaaaaaatagttgaaatggcttctcagggatttgtttccatgtacacataagccatagtccagtccgggtggcagttcttagaactctccaataatcaccaggaacattcagcccattgagacagagtcccctcccatcttttcatcacaccccactgcctgttagtcactgggcatggtaggagaatgaatctctgctctccctacacatcaccactactaggggcagagggagtcatttctaggggccaaatgggatgaggaatctgaaatcctgagtcttggaacaacttgagataatctgaggtcaattctcaatcatgcagcaattctactgttatgatgactttgggcttactccccagagggccatattaaattaaaaataaggccccttgggggagcataccctgcaaatggttgctattttcataaacacagatgtccatgttctgaatatctgatactttttgacaagtgatgttttgtgttgtcatctgaaccctagagaagcagtgtagttgagggagccttggttgtcacgtgtgttgtggccagggtcgacttggtcagagggtcatgtgcctgaacaagctccagcaaagcctgagaatttgcctcagtgtcaggggaaggttggagatacagaagccactccgatcaagaggaatttcatcatctacacaggaaattctgtttcctcctttcaacacctggaaagactcggtgaccagcagctgaggggccgtccgtccactaagcacaagaggagtgcactggactctttcgaatgaataaagaggaagggcttgatgtgattccaatggagtgtgtgtttttcatgctgcagtctgtgaattgtagttgtggtttcccggttcattgtcctaacagagcagaaaatttaaaaaaaaatcaataaaaatacaa

SEQ ID NO: 2390 - DNA, 1961 bp, Cricetulus griseus
ccgggatgcacgctgtcattgatgtcaatgccttcccaggctatgagggtgtgagcgaattctttactgacctcctgaaccacattgccacagtcctgcaaggccagagcacaggtggagctgccacagaggaaatggccccgctgaagcacagcaggcttctggcggaacaggcgggcagcctggctggtgagcggacgtgcagtgccagccctggctgctgcagcagcatgaagggccaggacacgccctggaagactgagaccgaagcaggcaacatgggcgctggtggctctggcaaactgccacatcagagacttggctgcaccactggtgtgtcacccagcttccagcagcattgtgtagcctccctggccaccaaggcctcctcacagtagccacagagcccaggacccagaggggcagcacagagcgtggaacacacccactgggccagcagctccaaacgggaacactactaagaattcccggtgatctgatgcttctctgttttaattttttacctgattttctgatgttatgatcggaatgagggggggagacggagcagaacaccgagtggtccagcctcaaggatgccgcctgactcctgctgtgcagatctcctcactgagtttacacacgcttgtgttctcaacactaggtctgaatgtgaagtggggtgtgtgcatgtatgtggttgtcatgcaagtgtgtatgtgtgtgtgtatgtgtgtgtgtgcatgtgcgtgcatgtctgtctgtcttcatggctgctgtgggccaggcttccaggtaccctgggaggaggcccatatctggccaggctgttgcagctcagcaggcgaaaggacgaatgttttccccattccccctgtctccacatctgcccacacccagacctcactgtcccccatttcccagatgtggtcttctccaaagctaacccttgcccctgtacagcttgactctccaaggccaggaaagcagttgaccccttgggagctctgtactgcgggtctgggttgtgggaaggggaaagacacttcctgtgggcagagccaaagccccctagctattgccagccttcactggctacatggaatacaccaggccactgagctctccaccctgtctctgttgctcactgggacccaggggggaggccacctggctaggagtccaggagtcttgtcaggatccagaatttgtgctgggacattgaacaaatcattccatgagttttcaggcctccacctcctcatctcttcagggtggctcctaagacagagaactgaagagctgacctagtgttccagcccacaaggatgcctgcttctccgtgccattatctgggtccctcttttcaggtgagaggaggctgccaataggtctgctcctgtgcacacacaccagcccctcccggtacagcaaggcccagtgcagccctgctgtgctcatggcaagtcccttgcaccaagcactagacaagccctcaagggagctgtgccccacttcagactcactctgtccccacagcagctgatggaccacccactggccccaaagcccatagggaaggacacctgtggagccctggatgagcagcccaggacccccaagggtgatcttgtgtcttaagatatcagctcactttgcaaagagaactaggcctcttgattgcccttagttccagtaagatggaggacacttgaggacgcaccagcagccctggggagactactaagtagggccgtggtgaggcatcctttgggcaaggaggggctggttggctttcttggaaacagaaccccaggactaaccacgtttacaggacctgagtgttgaacctgataatgtctgtatgtcaccttcccaagcctgcccctgaatacagggggcgggaagtgtggccagctctcacactgctttgtctccagaataaactactgagatcaaac

SEQ ID NO: 2391 - DNA, 1961 bp, Cricetulus griseus
gtgaaagtggctgtgaagatgctgaaagctgacatcattgcctcaagcgacatagaagagttcctcagagaagcagcttgcatgaaggagtttgaccatccacacgtggccaagcttgttggggtgagcctccggagcagggctaaaggtcgcctccccattccccatggtcatcctgcccttcatgaagcacggagacttgcatgccttttctgctcgcctcccgaattggggagaaccctttttaacctgcccctccagactctggtccggttcatggtggacattgcctgtgggagagcttggctgacaacttgtatactgtacacagcgatgtgtgggctcggggtggaccatgtgggagatcatgactcgtgggcagacgccatatgctggcatcgaaaatgctgagatttacaactacctcatcggcgggaaccgcctgaaacagcctccggagtgtatggaggaagtgtatgatctcatgtaccagtgctggagcgcagacccaaagcagcgcccaagcttcacatgcctgcgaatggaactggagaacattctgggccacctgtctgtgttgtccaccagccaggaccccttgtacattaacattgagagagctgagcagcctactgagagaggcagccctgagctgccctgtggagagcagcttagcagcgaggcaggggatggcagtggtggtgggggcaggtaggtggcatccccagtgactgtcgatacatcttcagccctggagatctggctgagtcacctgggcagtcggagcagcagccagaaagccccctcaacgagacccagaggctgctgctgctgcagcaagggctactgcctcacagcagctgttagcccacaggcaaaggacagctggggccatccatctggctctgctggccactgtgctggctgactaagcccagcctgatcacagcccaggcagcaaggtatggaggctcctgtggtagccctcccaagctgtgctggcacctggactgaccaaattgcccaatcccagttcttcctgacgccactctggccagcctggcatcagttcaggccttggcttagaggaggtgagctagagctggttgcctgaatgcaggcagctggcaggaggaggggtggctatgtttccatgggtaccatgggtgtggatggcaataggggagggtagcaacagccctgtgggcccctactctcctgactgagctgctcctacttccagtgcatgcttggagctgcccacaggctggaggcacatcagtgcccaccacacttgggtttaaatgccaggtttacccctccaagtcacaaagagatgtccttgtattgttcacttttaggtgacaggaagggattggcacactcgggtcccaaagccctgtggcgggagaaggtgggatattctcaggtctgaatcctcatcaccttcctgattctccaccctgtcaaggcctggaactggctgggcacctctgaggcatgcaggaggacaaaaggctacagagtcctgtcttctaaaggcaggactctgagtctggcagatggagggatgctgaggggcttgcccggaagtgagcgaagcagttcaggacccctccaagcttcccacagtctgtctgagcatgctaccaagtccccagatatcccccaaactaacagaggcagttttgtctaagcccagcccttccacatggtgacccttacgtccaccctcctctctaaatggacctcctcttttgtcccaagtctccagagagaaataagcctgatggctgataaagtgggtgaaagaagtgtgtctggagccacggccggggtctaggctccaggaacctcctggaatgcatggggtagactcttgctgttaggaacatttctaagctattaagttgctgtttcaaaacaaataaaatgaaaactaaagaataaaaaaaaaaaaa

SEQ ID NO: 2392 - DNA, 1961 bp, Cricetulus griseus
gagaagcagaagaaaaatagcagcccatgtacctgaaggactatgagaggaaggtcatcttagagaaagaaggcaaatacgttgacgaggacaactctgatggggagacttttgaccacaggctcaaggaaacatccatgaaaagttacgtagaagaacagaggcagctgaaggaaagcttccgagctttcgtggaagacagcagtgatgaggacagtgctgcggaaggtggctctgggctgctgcggaaacacaccaagagtggggaagaaaaggcccaggaggaagtagactatcttgaatggctaaaaggacaaaaggagattcacagctctgagtccttgaaagaactgacacacctcaaggaatactggaacagcccagaactggatgagggggaacaattcctgagggattatattctcaacaaacgatatgaagaggaggaagaggaggaggacatggaggaggagggggttccagggccccacagtccagctggcagtggatgactcctcagatgaaggggagctattcctgaagaagcaggaagactttgaacacaagtacaacttccgcttcgaggagcctgactcagcctcagtcaagacatacccacgtagcattgcatcgtctgtgcgccggaaggatgaacgcaggaaggagaagagggaagagacgagggagcggaaaaagagggagaaggccaagaagcaggaggagctgaaacagttgaagaacctaaagaggaaggagattctggctaagctggagaagctgcggcaggttactggcaatgagacactgggcctcgaggagcaggacctggagggtgattttgaccctgcccagcacgatcagctcatgcagaaatgccttggagatggcttctatggcactgcggaggaagagaagccacactttgaggaagaggaagggctcgaagatgactggaactgggacacatggagcggacctaagcaagatggagcctggagccagcaggagccgcactgtgaggaccccgactttaacatggacgcagactatgaccccagccaacctcagaagaagcttcgtgaggcgccctcctcagggaagaagaagcgcaagtctccctttgcagctgcagtgggacagcagaagcccatgtttgaccctgaggacaagacctttgaggagtacctggatgagtactaccggctggactatgaggatatcatcgacgacctgccctgtcgattcaaataccgtactgtggtgccctgtgacttcgggctcagcaccgaggagatccttgcagctgatgacaaggaactgaaccgttggtgttccctgaagaagacctgcatgtacaggtcagagcaggaagagatgcaggagaagcgggcatacagccagaaggcccagaacttgtggaagaagaggcagatcttcaaatctctgtgcggggaagagatggaaatgcccacagaagccacagggaagtcacagggcaaggccagcccacaggcacagcttcctgtgccaaatggagcctgtgggaagaggcctcagtctgagacccatgtggccaaggaagaagagttggcacacacatcctacccagagaagccaacttcccagaggcagaagagcaagaaggccaggctgctgggtcccacggtgacacttggaggtcacaagttcagccgacagagattgcaggcatttggtctcaaccccaaaaggctgcacttccgccagttgggtcgccaaaggaggaaacagcagagcaacccttgagggccacagggagccaggctacctccacaaccaagctgagctggggcctagccaggtctggctgtattggggaggatgggggacatgaggacagggatccagcactgccattggagttccagatcccatacctgacacgacataaataaaaaaataaatagtacaaaaaaaaaaaa

SEQ ID NO: 2393 - DNA, 1960 bp, Cricetulus griseus
accaagtgcaacgatatgcagcagtcgggtagctgtccccgaggacctttctgcgcttttgcccacatagaaccgccacctttaaatgatgacatgcagccttcctcagctgtatccagtcctacccagccgggtcctgttttgtacatgccatctgctgccggagactcggtccctgtgagcccctccagcccgcatgcccctgacctcagcgccctcctctgtaggaacagtggcctgggcagcccatctcacctctgcagctccccaccaggccccagcaggaaaacctcaaacctggagggcctggtctttcccggggagtctagccttgctcctggcagctacaagaaagctcctggcttcgagagggaggaccaggtgggagccgagtacctgaagaatctcaagtgccaggctaaaactaaaatcccattcgctagagcccaggagtcaagagcagcctctgcttcaacccaaacaggacgtgctgggcccaccccacgcaacgtcacaatcggtggcaatctgttgcagagctctgcacctgtgaacattcctggctccttaggcagctcagcctccttccactctgcttctccatcccctcccgtccagcctctcctcacatttcctgcaacaaccccagggccacttgagtcagtcagaaaacacatttctggggacctcagcgtcacatggatctttaggtctgaacgggatgaacagcagcatctgggagcattttgcctctggaagcttctccccaggcacttcccctgccttcctatcagggccaggggctgctgagctggcccggcttcggcaagagctagatgaagctaacggcaccatcaagcagtgggaggagtcctggaagcaggccaagcaggcttgtgatgcctggaagaaggaagcagaggaggccggtgagcgagccagtgccgccggagcagagtgtgagctggcccgggagcagcgagatgccctggagctgcgggtgaagaagctgcaggaggagctggagcggctgcacacgggcccagaagccctgccagctggccctgagctggaggcactctccctctccaccctgtacctccctccagaagcagctgcgggtccactgaacagtggacaaggccgtgttccacatgcagtcgtggtgccagcgtgtgcacagtgtctgtgtgtatatctggacgtagatatagacacacactttaaacagacttaccaagcactttttaaagaaaagactattttgcagtcctctcctgtccatccccagcctccctgctcaaatacaaagtccctcttttcccactggccttttggcagtgaatatgtttttgtctctttttttatgtaagaactatttttaacttcttcgtggggccagagcagggaaggctgggaggctgaaagggcaggccccgttcaccctgcattccaggctggggtctgtgttgcagtgtggactcaggtccccagttgccagctgtgagggcttcagggaggccttgagactcttaaaccagcctagctcctgggtttaccaaatatgtattttacccgggggacagccacagagctgacaggccaaagctgcaggctagcccactcccacccctgggcccttgaagctcctcaagggggaggagttgatgcattccttggtgctctcgagtgcagctgccgtactgccattctgggcagacgcctgtgtgcatgtgtgtgcgtgcctgtccaatgtacattgtgtttagcttcaattttaaaaatggttatgtacagagatgcagtgggatggaaagcagagtgggcagagggaggcagccctgctccggcattgggtgtccagtgggccctagagggctacaaaaacaacctgccccagcccaggcccctccttgggctcagcacgaaaggctttcaatgaattaagtgaaaactttct

SEQ ID NO: 2394 - DNA, 1960 bp, Cricetulus griseus
caggccgaagcggcagccgaagcccgcctcggatgagggctactgggactgcagcgtctgcaccttccggaacagcgccgaggccttcaagtgcatgatgtgcgatgtgcggaagggcacctccacccggaaacctcgacctgtctcccagctggtcgcacagcaggttactcaacagtttgtgccccctacccagtcaaagaaagagaagaaagataaagtagaaaaggaaaaagtgaaaaggaagcaactagcaaaaagaactgtcataaaaaaccagaccaagattaaaaaatgtggatcggagtagcgctcagcatttggaagtcactgttggagatctaacagtcattattacagactttaaggagaaagcaaagtcagcgccagcatccagtgctgctgctggggatcagcacagccagagcagctgcagctcagacaacacggagcggggcgtgtccaggtcctcctcgcctcgaggagaagcctcatccctgaacggagagtctcactaaacattctcgctccacttagtcatacctgtcctccatggaaatacagattatgccaagaactaccacattttcatgacagacacattcatacataacctataatttgagttttacatgaactatgaatttgccaggatttattagatcttatcgcagtgtaagctaccaaacgtttccagacgtaacattttggtctctgctgttaatgccatgaaaatgtggttgacttattcattatgcagtgttattggtaagtctattttcacttatagtttagtgaattctaacacataattattgaattctctactattggcatgtgatgagtttaaattttttattacatagtgcaagctgcctaaatatgtattatttgagaattgtgaaacaaatagttatatgtatgcaagtcagagatcaacttaatcaactattgctgcaacaggattttcttaatggttatcctcttaatgcacctgctggtacttggtgtggttaaataggaaagttgttattaaataaagaatttgtatgaaacttcgccaatgtttttgacatgtttttactaaattattgtttctgagttatgttctatccattttgcaatttatgtttgttagtttgcttatttttcaaagcatcaatttattgtaatgtttactagcagaattgtaaacaataaaacatggattgtttagctttctaattcaggtttagtgctattgtcattgaacactggttttccctgtattctctaagacataagaaggataagcatctggcagaaacagaaaagaatttgccatccatggcaaagctgtaacttaatgatagtgtatcactgtttccttgttccaaacctatccagggtcatagacatgtgaacctaattagcataaccatggtgactattgcacagagctgagaggttaatcttaaatcagtttcattggccttttaccaaataccagatacagccttcaatttatgcatttatcaatatcatgaaataaaagtattcgaagccccactcacttatgtacaattaccaataaaatatttttatgacttcacagattttgcattctgtttacaactaaatgaagtgcgttatgttgtatttgaaaaatccatcttagaaaccacatgctacatcttaaattctactaaatctcctgttttctccagccatttgcttaatatacatctacctataggggacttctgaaatgtaaatcagcctaaagacaaaacccaagttgaatataaactatcacataaaagatgccatgataacatagaaggaaaaataaaactgtggaccctgaaatttgatttggtattttggtttctcatggtaatgttaactgttcaattgcagtaacttttttattggcacagtgttactcttgtaacttgctagttatgaatacagtttattg

SEQ ID NO: 2395 - DNA, 1960 bp, Cricetulus griseus
  modified_base (815)..(815): a, c, t, g, unknown or other
ttaagaaatgtaataatgacacttcatggacaactttggccagcaacgtctcaaatatcatcacagagttccatcgccgaggcaggagtactgtagagggacgagtgtcctttgccaaagtggaagagaccattgcagttcgatgcctggcaaagaatgaccttggcactgggaaaccgagagctgaagctggtggctcctaccctgcgttctgaactcacggtggcggctgcagtgttggtactgttggtgattgtcatcgtttctctcattgtcctggttgtcatttggaagcagaagccacgctatgaaattcgctggagggtcattgagtctatcagccccgatggacacgaatatatttatgtggatccaatgcagctgccttacgactccagatgggaattcccgagggatggactagtgcttggtcggatcttaggatctggtgcatttgggaaagtggttgaaggcacagcctatggattaagccggtcccagcctgttatgaaggtggcagtaaagatgcttaaacctacagcaagatccagtgaaaagcaagctctcatgtctgagctgaagataatgacccacttgggaccacacttgaacatcgtgaacttgctgggagcctgcaccaagtcaggtcccatttacatcattactgagtactgcttctatggtgatttggtcaactatttgcataagaatcgagatagcttcatgagccggcacccagagaagccaaaagaaagagctggacatctttggattgaatcctgccgacgacagtacaaggagttatgtgattttancttttgaaaacaatggtgactacatggacatgaagcaaaaaagttttctgatttggggggtttaggtgggaagatattacagccatccaaactgtcaaactggttatcgttcattggcattctctgcaatatgcctaattgctgactcggtatgaatgaaacatgggctgtgattactgcaatcactgtatatgcttccagcaggtgatgctttggaagccacagaagcaatagctgggtacttgactccctaccggtataatctcaatgcaaaccccaactttcccttttcacagtaagtgtgaagactgagccagattggccaattaaaaacaaaaacctgactagattctttagggccaattagacttgaaacacattcgtgtttctagaattacagctcaaacattctgtttgtcacccattcacacagccttgtttttttgttgtttttactttgatgttgctttgggccttgcatgacaccatgaggttggatgatgctggaattacaagcatgcactgccacactcagcaagaatacattttttatttttaaacagtgttttgagtgtatccccgatttatttcctttttggcctcctgcagagtctccagaagaaaatttgccaatcattcctgctttcttttttatgatgacaatcaaagctggcccgaggaacacaatttgtggctttttaaatgatcagtgatgcccttataatgtggtctgccaacctgtacaaaatggtcctatatttgtgaagagggatgtaagataaaatgatgttatacatcaatatgtatatatgtgttgctatgtagacttggagaatactgccaaaacatatatgacaagctgtatcactgcctttgtttatatttttttaactgtgatattccccacaggcacattaactgttgcacttttgaatgtccaaatttatattttagaagtaataaagagaaaaaatacttacatgttcccaaaatggtggtgtggtgaatgcgtgagagcaactaactccgtagggaagggtctgccgatgcaagatggcttccaaatacccctgttcattgttttagttaaaaaactgtaaatggagattctttatatttcaaataaatgtatttattatatatga

SEQ ID NO: 2396 - DNA, 1960 bp, Cricetulus griseus
cttgctgaacgccggcagttcctgccgttgccgccgccctcggctattgccgaggccttccaaagacgccatgtccgccagcgccgtctacgtactggacctgaaaggcaaggtactcatctgccggaactaccgcggggatgtggatatggcagaggtggagcacttcatgcccatcctgatggagaaggaggaggagggcatgctgtcacctatcctggcccatggtggcgttcgtttcatgtggattaagcacaacaacctgtacctggtcgccacttcaaaaaagaatgcttgtgtgtcgctggtattctccttcctctataaggtggtgcaggtcttctccgagtactttaaggagctggaggaggagagcatccgggacaacttcgtcatcatctacgagctgctggacgagctcatggactttggctacccccagaccacggacagcaagatcctgcaggagtacatcactcaggaaggccacaagctggaaaccggggcccctcgccccccggccactgtcaccaatgctgtgtcctggcgctcggagggcatcaagtaccggaagaacgaagtgttcctggacgtcattgaggcggttaacctcttggtcagtgccaacggtaacgtgctgcgcagtgagattgtgggctccatcaagatgcgggtcttcctctcaggcatgcccgagctgcgcctgggcctcaatgacaaggtcctcttcgacaacacaggccgagggaagagcaagtcggtggaattggaggacgtgaagtttcaccagtgtgtgcggctgtcacgctttgagaacgaccgcaccatctcgttcatcccacccgatggagagttcgaactcatgtcctaccgcctcaacacccatgtgaagcctttgatctggatcgagtctgtgattgagaagcattcccacagccgaatcgagtacatgatcaaggccaagagccagttcaagcggcggtcaacagccaacaacgtagagattcacataccagtccccaacgacgctgactcgcccaagttcaagactacagtggggagtgtcaagtgggtccccgagaacagcgagatcgtgtggtccatcaagtcctttccgggtggcaaggagtacctgatgcgggcccactttggtcttcccagtgtggaagccgaagacaaggagggcaagcctcccatcagtgtcaagttcgagatcccctatttcactacctctggcatccaggtgcgctacctgaagatcattgagaagagtggctaccaggccctcccctgggtgcgctacatcacacagaacggagattaccagctccggactcagtgagggacctctgcaaccacccccgcccacccggcctcaggacacacctgccacacgcatcgaaaccgcagctgaggggtggctctggacaggagccaccctcctgtcaaccctgcgcacccacgcagaaccattccctggtcccgttctggtccagggtgggaagggagagcctgccagcctcccccagggacaagccagattgagcctcggctcccggtgccacatgcctggccactcaccaccctgtggactccatcctcaccaccaccagggtctccttttgttgccattttgttgagcatattgatcattgtcattgtcatttgctgctgtcccatcaccttcctacatgtgtcctgtgcagtcaccatgcagcacttcgtgagggcagctgtcccctctccaccctggtccatgtccaggatagttgtctggctgggctggctatgcttcccatgccagcccttggccacatcagtgtttccccaagagggtgcatggcctcagcctttgcccccgagggtacctgggcaggcatgggctactgtcactgtacaaagccaccttgctctccacccctgggtgtgtgtgacagttacattaaagtccatttgttac

SEQ ID NO: 2397 - DNA, 1959 bp, Cricetulus griseus
tgcactgtgggaagaagcttgtcgctgttgttttgtagaggagattttcacgattgccggctttgagagaccgcggccaaaatgccagagcgagatagtgagcccttttctaaccctttggctccagatggccacgatgtggatgatcctcattccttccaccaatcaaaacttaccaatgaagacttcaggaaacttctcatgaccccaagggctgcacctacatctgcaccaccttctaagtcacgtcaccatgagatgccaagagagtacaatgaggatgaagacccagctgcacgaaggaggaaaaagaaaagttattatgccaagctacgccaacaagaaattgagagagagagagaacttgcagagaaataccgggaccgtgccaaggaacggagagatggtgtgaataaggattatgaggaaactgagctgatcagtaccacagccaactatcgggctgtgggccccactgcagaggcggacaaatcagctgcagagaagaggagacagttgattcaggaatccaaattcttgggtggtgatatggaacacacccatttggtgaaaggcttggattttgctttgcttcaaaaggtacgtgctgagattgccagcaaagagaaggaggaagaagaactcatggaaaagccccaaaaggaaaccaagaaagatgaggaccctgaaaacaaaattgagtttaaaacacgacttggccgcaatgtgtatcgaatgcttttcaagagtaaatcatatgagcgaaatgagttgttcttaccaggccgtatggcctatgtggtagacctggatgatgagtatgcagacacggatatccccaccactcttatacgcagcaaggctgattgccccacaatggaggctcagactacactaactacaaatgacatcgttatcagcaagcttacccagattttgtcatacctgaggcagggtacccgaaacaagaagctcaagaagaaggataaagggaaattggaagaaaagaaacctcctgaggcagacatgaacatttttgaagacattggggattatgttccttctacaaccaaaacaccccgggacaaggagcgggaaagataccgggaacgggaacgtgatcgggaacgggacagagaccgggagcgggagcgagaccgggaacgagatcgggagcgggaacgcgatcgggagcgggagcgagaggaagaaaagaaaaggcacagctactttgagaagccaaaagtggatgatgagcccatggatgttgacaaaggacctggatctgccaaagagttgatcaagtccatcaatgaaaaatttgctgggtctgctggttgggaaggcactgaatcgttgaagaagccagaagacaagaagcagctgggtgatttctttggcatgtccaatagttatgcagaatgctatccagccacgatggatgacatggctgtagatagtgatgaagaggtagattatagcaaaatggaccagggtaacaagaagggtcccttaggccgctgggactttgatactcaagaggaatatagcgaatatatgaacaataaagaggctttgcctaaggctgcattccagtatggtatcaagatgtctgaaggacggaaaaccagacgcttcaaagaaaccaatgataaggcagagcttgatcgccagtggaagaaaataagtgcgatcattgagaagaggaagaagatggaagctgatggggttgaagtgaaaagaccaaagtactaatccctagttcaaccatcaccacatggctgttcttttagttgtttgttctacaattcctagaaaggttgcaaactatttttgtttgtgaatgtttataaatgtttattgtataactatttgtttatagatctgcctcccaagtgctaagattaatggcatgcagcaccatgcccaacatgttccattaaaattagttaaacctgc

SEQ ID NO: 2398 - DNA, 1959 bp, Cricetulus griseus
  modified_base (1953)..(1953): a, c, t, g, unknown or other
tgaagggcacggcctgggactcttgattcctcaaggatcggcctagcaacagagtaaacgtagtaggaaaaaaaatgaagccaacaggtacagatccaaggatcttgtctttagctgctgaagtagcaaaaagtcctgaacagaatgtccctgttatattgttgaagttaaaagaaataataaacagcactcctttgggaagctcagagttgaagaaagtcaaacaagatatatattgttatgacctcattcagtattgtctattggtcctcagtcaagattgttctcgaatccagggtggttggactacaatttcccagcttacacagatactaagtcattgctgtgtgggcttagagccaggagaagatggagaggagttttacaaggaattacttccatcagctgccgaaaattttcttgtcttggggagacgattacaaacatgtttcatcaatgcagctaagggtgaagagaaagataaattactacattttttccaaattgtgactgattctctcttctggcttttgggagggcatattcaactcatacagaatgtactgcagatgatcatttcttacacttactgcaaacttgacaatgttcaaataggagctacagtcatgtctctgctacagaatatactgcagatcaacagtggtgatttactcaaaatagaggggaaaaccctgcattctattttagatgaaattcttttcaagcttttatcaactcctagtccagtcataagaagtattgctacaaagctcctgctagtgctagctgaatcccatcaggaaattttgattttactgagactgagtgcctgctataaaggacttacaagtctgctaaataagcaggaaactatgactgaatttagtcgagaacttagacagcttgttgatcttttaaccccaaagatccatcaggaagtagaagaacagaaactacataaagcagcttgcttgattcaagcttattggaaaggtttccagaccagaaagagattaaagaagcttccgtctgctgtgattgctttgcagaggagtttcagatctaaacgcacaaagaccttgttggagctaaacaggcagaaggaggaagaagaactcagactaagattgcagcttcaaaaacagagagccatgaggctttcccgagagtcacgcttaagtatgcttgaaatagttcatccaggtcaagtggagaagtacaatagggaaatggaagagaaatcagcattgattatccagaaacattggcgagggtacagggaaaggaagaatttccgccaacagaagccgtctctcacagagtataaagcagctgttatacttcaaagagccgttcttaaattcctagccaagtgccgtaagaaaaataatctatttacctcttggcatggactccaagaactcagtgatgcacgcagagttgaactgaagcaacaagtggatgactatgtcagaagacacccgggctctcagatgtcagatgtggccagcagagagctccacgcccaaacacaggaacgacttcaacactattttatgggaagggccatagaagaaagagcccagcaacacagagaagctttgatggctcagatcagcaccaatattgaacagttgatgaaggcaccaagtctgaaggaggcagaaggaaaggaacctgagcacttcctaagtcgatctaggcctgtggcagccaaggctaaacaggcccatctcaccaccctgaagcacatacaagcaccttggtggaagaagcttgaagaactgggcgatgaaattgatgttccaaaggatgagcttagtatagaattaggaactttatttattggtggaaccaaacctccctagaggcaactgtgaaggccagcaatcttacattttaggagattgttgtttttgcctctggaataaatagtggtcgaaagaaaaaaanaaaaaa

SEQ ID NO: 2399 - DNA, 1959 bp, Cricetulus griseus
aggatcttggattccagttgcagcctttctcatcaccacagatgccttctacaggggggaaaaacttgtgaacctgaaggagctggctgatgagtccttggagaagtgccgagagaagggtttcccagtaagatgctgcattgtggtcaaacatgtggggcgggcagagctgggcatgaatgactctcccagccagtctcccccagttaagaggcagtgtccagatgtccagatctcctggaatgaaggggttgacctgtggtggcatgaactcatgcaagaagcaggggatgagtttgagcctgaatggtgtgatgctgaggacccactcttcatcttgtataccagtggctccacaggcaaacccaagggtgtggtacacacaattggaggctacatgctctatgtggctacaactttcaagtatgtgtttgatttccacccggaggatgtgttctggtgtacagcagacattggctggatcactggtcattcctatgtcacctatgggccactggccaatggtgccaccagtgttttgtttgaggggatccccacatacccagatgagagccgcttgtggagcattgtggacaaatacaaggtgaccaagttctacacggcaccaacagcaattcggatgctcatgaagtttggagatgagcctgtcaccaagcatagccgggcatccttgcaggtgctgggcacagtaggtgaacccatcaaccctgaagcctggctatggtaccaccgggtagtaggttcccagcattgccccattgtagacaccttctggcaaacagaaacgggtggccatatgctgacccctctccctggtgccacacccatgaaacctggttctgcttctttcccattctttggtgtagcacctgcaatcctgaatgagtctggggaagagctggaaggtgaagctgaaggttatctggtgttcaagcagccctggccagggatcatgcgcacaatttatgggaaccacacacgttttgagaccacgtactttaagaagttccctggctactatgtgacaggagatggctgccggcgggatcaggatggctattactggatcactggcaggattgatgacatgctcaatgtatctggacatcttctgagtacagcagaggtggaatcagcacttgtagaacatgaggctgttgcagaggcagctgtggtgggccaccctcatcctgtgaagggcgaatgcctctactgctttgtcactctgtgtgatggccacaccttcagctccaccctcactgaagaactcaagaagcagattagagaaaagattggtcccattgccacaccagactatatccagaatgcacctggcttgcctaaaacacgctcaggcaaaatcatgaggcgagtactccggaagattgctcagaatgaccatgacctgggggacacgtctacagtggctgacccatccgtcatcaatcatctcttcagtcaccgctgcctgaccacccagtgatcacgattcttgtccaggatttccctgtgtgtggctctccaaacttctgcccatccaccctgcacgctgccccggagtacaagggccaatgctggtttacactttgtttgaaactagggagacagtttcctagactgccaggtagaagggacagggcacaggtcaacctcagactgatatgctcctggactacagagaggtctccaagcccagaacagatacttaacaccatgtcctcaaccacagttagctagtcagagtgtaaatgagggccgagacagaagcagggcagtagctctaaccctttcagctttctaaagagcaccagttcttatcttggtcaaacccaagcctttcgaaatgacagcttgtgagtctatgaatgattattttttaaaattctttattgcttctgttctgagtctgaattctttgccagatggtagcacttgtct

SEQ ID NO: 2400 - DNA, 1959 bp, Cricetulus griseus
gctgcagaattcccacggaaaactagtgtatgccaactgaaccatatcctcgtctctgatgaccaactccccgacgaatatcattctcgtcaacacctctgactggcagggacagttcctctcagatgtcctgcagaagcacacacttcctgtggtgtgcacgtgttctgctgctgatgtgcaggccgccttcagcaccattgtctctcggatacagcgctactgtaactgcaattctcagccaccaactcctgtgaagatcgcagtggccggagcacagcattacctcagcgccatcctgcggctcttcgtggagcagctgtcccacaagacgcccgactggcttggctacatgcgcttcctcatcatcccgctgggctcccaccctgtggccaggtacctgggctctgtggactaccgctacaacaacttcttccaggatctggcctggagagacctgttcaacaagctggaagcccagagcagtgtgcaggacacgcccgacatcgtgtcgcgcatcacgcagtacatctcgggggccaactgtgctcaccagctccccatcgcagaggccatgctgacctacaagcagaagagccctgatgaagaatcctctcagagattcattccctttgttggggttgtgaaggttggcattgtggaaccgtcttcagccacatcaggagactcggacgacgcagccccctcaggctccagtgttctctcttctaccccaccgtctgtgtctacatctcccgcagccaaggaggcttcacccaccccaccctcctccccttcagtgagtggaggtctgtcctctcccagccagggcatcggcgctgagctcatggggctgcaggtggactactggacagcagcacagcctgcagacaggaagagagatgccgagaagaaggacctgcccaccaccaaaaacacgctcaagtgcactttccggtccctccaggtcagcaggctgcccagcagtggcgagactgcaaccacacctaccatgtccatgaccgtggtcaccaaggagaagaacaagaaggtgatgtttttgcccaagaaaaccaaggataaggatgtggagtctaaaagccagtgcatcgaaggcatcagccgtctgatctgcacagctaagcaccagcagaacatgcttcgggtcctcatcgatggcgtggagtgcagcgacgtcaagttctttcagctggctgcccagtggtcttcccacgtgaaacacttccctatctgcatctttggacactccaaggccaccttctagccccacccgtggaagggctgacacaggacagggagtccagtggccaaaagctgagggtgaagggcgtgttggtctcctagcatgggatcgttgacccctggcacccccaggtgtggttcccaataaactccagcctcatggcggtagcttttatagtagcagatcttttctaattgctctcaaatacgtttgacgacgcagctgccaagcagatgttgctcttgtgaagtccccttgggtggggcagagccagcaggagcagcatccccacccctgtccctctggctccagttccagaggcacggctaggcttctgcgtgtgtgtgtgtgtgtgtgtgtgtgtgtgtgtgtgtgtgtgtgtgtgtgtgtgtgtgtgtgagagagagagagagagagacagtgccaggtgcagaccgagaagcagtcaatccctgtgcctcagtttccccattggttaaagagagatggtccatttttccttgcctacctcatggagctgtgatgaggactcatagagaagtactttggccccttttttttaatgggaagcaggattcatgtaaatagcttttccgggagcagatgctgatctgtcccatgcgaccatgtggacgatttcaaggtgctgaagcgacactaataaactgacggcgctcaggccgcccacggctgtg

SEQ ID NO: 2401 - DNA, 1959 bp, Cricetulus griseus
ggatcggcaggtgggttcaggtgccagcctggcccaggcctggctgtgggaccgactctctcggtgagcgaccgaagaggctcccaagggtctggagaccgcagggcggattctggaatccgagcccatcgccctggcctggggtcgtcccctgtaccaaacccagttccccattcccctcccgagcctgggcagttagccacgtcggccccaactcttggaaccatgtttgcagacttagactatgacatcgaggaggataaattaggcatccccactgtgcctgggaaggtcaccctgcagaaggatgctcagaacctgattgggatcagcattggaggaggggcccagtactgtccctgtctctatattgtccaggtatttgacaacacacctgcagccttggatggcaccgtggcagctggtgatgagatcaccggggtcaatggcaggtcaatcaaagggaaaaccaaagtagaggtggcaaagatgatccaggaggtgaagggggaggtgaccatccattacaacaagctgcaggcggaccctaagcagggcatgtccctggacattgtgttgaagaaagtcaaacaccggctggtggagaacatgagttcaggtacagctgatgccctgggcctgagccgtgccatcctgtgcaatgatgggctggtaaagcgactggaggagctggaacgcactgctgagctgtacaaagggatgacggaacataccaagaatctcttacgggccttttatgagctgtcgcagacgcaccgggcctttggggacgtgttctctgtagattgggtacgggagccgcagccagcagcaagtgaggccttcgtgaagtttgctgatgcacaccgcagtattgagaagtttggcattcggctactgaaaaccatcaaaccgatgctgacggacctgaacacgtacctcaataaagccatccctgatacgcgtctcaccatcaagaaatacctggatgtgaagttcgagtacctgtcctactgtctaaaggtgaaggagatggacgacgaggaatacagctgcattgccctaggagagcccttataccgagtgagcacaggcaactatgaataccgcctgatcctgcgctgccgccaggaggctcgagcccgcttctcccagatgcgcaaggatgtgctggagaagatggagctgctcgaccagaagcatgtccaggacatcgtcttccagctgcagcgcttcgtgtctaccatgtccaagtactacaatgactgttacgcggtgcttcgggatgccgacgtctttcccattgaggtggacctggcacacaccactctagcctatggccctaaccagggtggcttcactgatggagaggatgaggacgaggatgaggaggatggggcagctagggaagtgtccaaggatgcacgtggggccactgggcccatggacaagggcggaagctggtgtgactcctgagtgccccctcaagtggacctggggggcagggcagcgggaggaccgcgtcgggaacggggcggggccactgtaggacagtgaaggcgtgtagtggcgcataaaggcctgctggctcggggcgcctgcctccctgctcctctgtcctcgcacagtgaacccaggctgcagcctgggacctggactctggcccccgtccttcattcccacctcccagctggagggagagctgggccttggacagaaaagaggaggggctggagcaggcagagtgcaggacctgtcctgtgagtacctcggtggtgccaagcctgcagggaatgggagccgggtggacatccgaggctggggccagtgtaccaggccggccccccgagtccacatgcacaccttggcagcctatatttatttgtttctggcttagcctcaagggctggatgctgggcctgtattgaataaacagaaacccagaaaaaaaaaaaaaaa

SEQ ID NO: 2402 - DNA, 1959 bp, Cricetulus griseus
aacagtagcagcagtagcaactcaggatgggatcagctgagcaagacaaacctctacatccgaggcctgccccccaacaccactgatcaagacctggtgaagctctgtcaaccatatgggaaaatcgtctccacgaaggcaattttggataagacgaccaacaagtgcaagggttattggttttgttgacttcgacagtcctgcagcagcccagaaagctgtctctgctctgaaggctagtggagtccaagctcagatggcaaagcaacaggaacaagatcctaccaacctgtacatttctaacctgccactgtccatggatgagcaagaacttgaaaatatgctcaaaccctttggacaagttatttctacaagagtcctgcgtgattccagtggtaccagccgtggtgttggctttgccaggatggaatcaacagaaaaatgcgaagctgtaattggtcattttaatggaaaattcattaagaccccaccaggagtttccgctcctacagaaccattactgtgcaagtttgcggatggaggccagaagaagagacagaacccaaacaagtacatccctaatggacggccatggcacagagaaggagaggctggaatgacactcacttatgacccgactacagctgctctacataacggattttacccttcaccatacagtattgccacaaaccgaatgatcagtcaaacttctcttacaccctatattgcatctcctgtgtctacctaccaggtgcaaagtccttcttggatgcagcctcaaccatacatcctacagcatcctggtgccgtgttaactccctcaatggaacacaccatgtcactacagcccgcttctatgatcagccctctggcccagcaaatgagtcatctgtcactaggcagcaccggaacatacatgcctgcaacgtcagccatgcaaggagcctacttgccacagtatacacacatgcagacagcggcagttcctgttgaggaagcaagtggccagcagcaggtggctgtggagacatctaatgaccattctccatatacctttcaacccaataagtaactgtgagatgtaccgaagggagttcttacatgaagaagggtgtgaaggctgaacaatcatggatttttctgatcaattgtgctttaggaaattattgacagttttgcacaggttcttgaaaaacgttatttataatgaaatcaactaaaactatttttgctataagttctataaggtgcataaaaaaaaacccttaaattcatctagtagctgttcccctgaacaggtttattttagtaaaaaacaaaaacaaaaaaaaaaaaaaaaaaaaaaacaaaaaaaatcaaagatttttatcaaatataatgatgcaaaaaaagaaaaagaaaaaaagagagaaaaagaaaacttacaattttctgggtatgcacaaagaccacgaagacttatccaagtgcatgaccggatttttgcggtttttgttcattttgtgtttaatttgtcttttttttttcagctgtatggaatgggctttctgaagtttcaattgtctgacttcacccatggtgttctgtgcttgccgtacgagtgtcgctgtaactcagtgttgccctcgatgtcttttcttagctttccatttttctttcgacgtagtgtgaagtgtcttatccttttctatgaattccaatttgccttaactcttttgatgctgtagctgtttcagtaaagttagttcaaactaatgatgtagaatgctttgaccaaatgggctggtctattacgccttgtaaaacagcagcatagggcttttaaaaggtagtcaataaaagttgctgaaaattttggctttttaaatatgtagtaggtgttttaatgtattttttctacataaatgtgtaaggtaagtgaagtgcaagaaagggagaaactgttttgttgtgaaa

SEQ ID NO: 2403 - DNA, 1958 bp, Cricetulus griseus
gtgccagttcatgagcgtgcgcgttctcgccgccgccggtgctgcttccgccgtcctctgccgctgctaccgctgtcgccgccccggatcctcaggccgagctgtaggacggccggctgcccatcagcgccggtacggagagcggagccgcgggaccggtggacaggcgggcaggccgacagattaatctaacatggctgaccagaggcagcgctcactgtctacctccggggaatcattatatcatgttcttgggctggacaagaatgcaacctcggatgacattaaaaagtcctatcggaagctggccctgaaatatcaccctgacaagaaccctgataacccagaggctgcagacaagtttaaggagattaacaacgcccacgccatcctgacagatgccacgaaaagaaacatttatgacaagtacggctccctgggggctctatgtggccgagcaatttggggaggagaacgtcaacacctacttcgtactctccagctggtgggccaaggccctgttcgttgtctgtggcctcctcacgtgctgctactgctgctgctgtttgtgctgttgctttaactgctgctgtggaaagtgcaagcccaaggcacccctgtgcttgccagagctccatccatcccccacttgccttcgcttccacttgtcatcatcatgcctctgccagagctgaagtgttgggttcctggggtaggtgactggtccctggtgaccctggatcagaagggttggctactagggaagctatggtaacagtcactcggcctgagatgccaactgcaggccacagaatttctttgtgaacctctctctagtcagtatttcagtcttggtcacagggtaccatggtgggtggagttggaaaacatggttaccagggatttggaaccaccccacccttttacagttagctggattagctacaccagactccaatgagccaggttcctccagagccttcctgctggctgctgctgaccatctgcatttccagtacagatgaagaaggagaaggcccatgtggtggctcagtggctcagacaaaccaccatgtgtttccgaaacccaccctgtccacctcctgaccacagctcaccagggccttcagggaccagatcaggctgacaggaagttgcaagaagaggcagcaaacctggcagtgtttgtgggtacctgtcccaggtcccgggaaacaatgatgccaggattcctagctgaccctataggagaactatatgagccaatctggtagcatgtccctcctgcatgtggctctgtggcctttccctcacatcctagtgagccaggtcctgaactgggacttgtgctgttaggtgagagcacagaagttgaacctagtgtcttttggaacttgtaaagctaaataaatcatgttgaacttgaaaccatcaatatgtcgaacagtttcaaggtgataatagtgattgccaaggccagtgaactccctgacctatccctgtatgcagactcccttcagggtttttactgtgttgatctaaggtctccttgattttatttgccctgacctaagcataactggtgagtctcaggatcagcctaactattcctgaccaaatactattaaatataaagacacacacacactccccaaactcctatactggtgggcaatgtagatggtgctgtggtgtattgccaagggagtgctggagtctgtgcatggaacttcatccagtgcagtggatatcccttcaggaccagaaactgaccacatctgagagaccctggggacccatctcaccaaggctagaatgtagatttctgtttgttcccaatgatgtggtctttccttgtcttccttttgactgtatttttaaattactttagataattctgtgcaatgtttataacccttcctagtcttctgatgtttggttagcacagctagcaccca

SEQ ID NO: 2404 - DNA, 1958 bp, Cricetulus griseus
tcctgcgggcggtgcacgcgggctgtggaaacgcagttcgagactgcctcccggacgatgcctgaaataagagtcactcccttgggggctggccaggatgtgggccgcagctgcatcctggtctccatttcgggcaagaatgtcatgttggactgtgggatgcacatgggctacaatgatgacaggcgctttccagacttttcctacatcacccagagtggccggctgactgactttctggactgtgtaatcatcagccatttccacctggaccactgtggggcactcccttacttcagtgaaatggtgggctacgatgggcctatctacatgacccaccccacccaggccatctgccccatcctgttggaagactaccgcaagatcgcagtggacaagaagggagaggcaaacttcttcacttctcagatgatcaaagactgtatgaagaaggtggtggctgttcacctgcaccagacggttcaggtggatgatgaactggaaatcaaggcatactatgcaggccatgtgctgggggcagctatgttccagattaaagtcggctcagagtctgtggtctacacgggtgattataacatgaccccagaccggcatttgggggctgcatggattgacaagtgtcgccccaacttgcttatcacagaatccacatatgccacaaccattcgagactctaaacgctgcagagaacgagatttccttaagaaagttcatgagactgtggagcgtggtgggaaggtgctgatccctgtatttgcgctgggccgggcacaagagctctgcatcctgctggagaccttctgggaacgcatgaacctgaaggtgcccatctacttctctacgggcctgacagagaaggccaaccactactataagctcttcatcacctggaccaaccagaagatccgcaagacatttgtccagaggaacatgtttgagttcaagcacatcaaagcctttgaccggacatttgctgacaacccaggtcccatggttgtgtttgccacacctggaatgcttcatgctggccaatctctgcagatcttccgaaagtgggcaggaaacgagaagaacatggtcatcatgcctggctactgtgtgcaaggcactgtgggccacaagatccttagtgggcaacggaagctggagatggaggggcgtcaggtgctggaggtaaagatgcaagtggaatacatgtcatttagtgcccatgctgatgccaagggcatcatgcaactggtgggacaagcagagccggagagtgtgctgctggtgcatggcgaggccaagaagatggagttcttgaggcagaagatcgaacaggaattccgggtcagctgctacatgccagccaatggtgagacagtgacgctgcccaccagccccagcatccctgtgggcatctccctggggctgctgaagcgggagatggtgcagggactgctccctgaggccaaaaaacctcggctcttgcatggcacactggttatgaaagacagtagtttccggctggtatcctcagagcaagcccttaaggagttgggcctggctgagcatcaactgcgtttcacctgtcgggtgcacctgcaggacacacgcaaggagcaagaaacagccctccgtgtgtacagccacctcaaaagtaccctcaaggaccactgtgtacagcatctccctgatggctctgtgactgtggagtccattcttatccaggctgctgcccactcggaggaccctggtactaaggtactactggtctcctggacctaccaggatgaagagctgggaagctttctcacagcactgctcaaaaatggccttccccaggcacccagctgacatgtaaccaccagcaacccaccactctgtctcttgctgtttgctcagcagaaggatcaggattttggctttgggaggtgggtgccctgagtaaatgg

SEQ ID NO: 2405 - DNA, 1958 bp, Cricetulus griseus
gtgccggacactcctggcttatcttcgagggtcacagaaggttccaagcaggagaacaagaagattattggataaaagtaagacgttgcacataacctgtggcataactatctgtgttttttcaggtgtgcatgtggctgcccacttgatgaatgccctcaacttctcagtgaactatagtgaaaatttccttgaattgaatgcagcaagataccaaaatgaggatcctagaaagcttctcttcaccactgttccgggtctgacgggtgtctgcatggtggtggtactgttcctcatggttacagcttctacctatgcaataagagtttctaattatgatatcttctggtatactcacaacctcttctttgtcttctacatgctgctgactgttacatgtttcaatttagatacccaccctcctggctgcatcagtcttaaccagaccaggatcaggacatttactcaccagaagacttctcagaacattttcatggacctttgcctgaaggattttcaaaaccagaagctcgtaaccagaaaacacttgtgaagatttgcctggaagagcctaagttccaagctcattttccacagacgtggatttggatttctggacctttgtgcctatactgtgctgagagactttaccgctgcatccggagcaacaaacctgtcaccatcatctcagtaatcaatcatccctcagatgtcatggaactcagaatggtcaaagaaaactttaaagcaagaccaggccagtatattattctacattgtcccagtgtatcagcattagaaaaccacccatttactctcacgatgtgtcctactgaaaaccaaagcaacatttggtgtccactttaaagtagtgggagactggacagaacgattccgagatttactactgcctccatctagccaagactctgaaattctgcccttcattcagtctagaaattatcccaagttgtacattgatggtccttttggaagtccatttgaggagtcactgaactatgaagttagcctctgtgtggctggaggcattggggtcactccatttgcatcgatactaaacactttgctggatgactggaaaccatacaagctaagaagactgtactttatctgggtatgcagagacattcgatcattccaatggtttgcagacttgctctgtatgttgcataacaagttttggcaagaaaacagacctgactatgtgaacatccagctgtacctcagtcaaacagatgggatacagaagataattggagaaaaatatcacacactgaattctagactttttattggacgtcctcgttggaagcttttatttgatgaaatagcaaaatgtaaccgagggaaaacagttggagttttctgctgtggaccaagttcgatttccaagactcttcataatttgagtaaccagagcaactcatatgggacaaaatttgaatacaataaagaatccttcagctaaaatcttaggagactaatcttttgaggactctaaagaaggaacagtgcaatttctacaacttggaaacttacctgaatcaaacaactgtgctatgccaaagaatatcaaggtttccttatttatgatcaccttaaaagtgagaattcaaagaatgtggcaaaatgacatgtttaatcctgaaaataaagaggccctgaagaatatttgttggtgattcacattttgatgggcaattaaaagaatgctgttagatgcacactgctgatttttatggaaattccaaaaactctcttgtgaggaacttatctcacttgctctgaagctgatagctgcaatcctctttaaattgtttttggttgaacagattcaggattgaacaaaattaaaaattcattgaaacttagactccattttctatgttgtacataagtggagtagctttaatttgtaaaggatccagacaaacact

SEQ ID NO: 2406 - DNA, 1957 bp, Cricetulus griseus
acctcagcgaatccgggagcttgtcccagagtctcaggcgtacatggacctcttggcttttgagaggaagctggaccagaccatcgctcgcaagcggatggagatccaagaggccatcaagaagcccctgacgcaaaagcgaaaacttcggatctatatttccaatacattcagccccagcaagacagacggcgataacgcaggaactgcaggaacccctgggggaactccagcagcagacaaggtggcttcctgggagcttcgagtggaaggcaaacttctggatgatcctagcaaacagaagaggaagttttcatctttctttaagagccttgtcattgagctggacaaggagctgtatgggcctgacaaccacctggtggagtggcatcggatgcccaccacccaagaaacagatggcttccaggtcaaacgaccaggagatctcaatgtcaagtgcaccctcctgctcatgctggatcaccagccgcctcagtataaactggacccccggctggcacggttgctgggagtgcacacacagacgagggctgccatcatgcaggcgctgtggctttacatcaaacacaaccagctgcaggacgggcatgagcgggagtacatcaattgcaatcgctacttccgccagatcttcagttgtggccgactccgtttctctgagattcccatgaagctggctggattgttgcagcatccagaccccattgttatcaatcatgtcattagtgtggacccgaatgaccagaagaagacagcctgctatgacattgatgtggaggtggatgacccactgaaggcccagatgagcaactttctggcctctaccaccaaccagcaggagattgcctctcttgatgtcaagatccacgagactattgagtccatcaaccagctgaagacccagagggatttcatgcttagctttagcactgacccccaggacttcattcaggaatggctccgttcccaacgccgagacctcaagatcatcacggatgtgattgggaaccctgaggaggagagacgagctgctttctaccaccagccctgggctcaggaagcagttgggaggcacatctttgccaaggtgcagcagcgaaggcaggaactggaacaggtgctgggaattcgcctgacctaactgctcagggattgcttccttccttcccagccccggaacctggcgggagaccatcctcttggttttggctggggctgcagacctccatgtaggatggagtgaggtgtgtctcctatcaccctctactccccagctagtttcataaatgtagtgttaggattccttattgcttggtccccaaagccttattacttaccttttagcattggctttaatcgggctctaaggtgccgcctcagccccctgcaggcaggcccacggactgctggaggttgtgctttaatttcgtaacagacatttctgaaccaaaggctgctgggtttgcatgtttacaggctccaccctagggccagtgtcagctggttttggggagctgggcaaggaagaggaggcccagcctggactcttcctggcctttctcaaccaaagttctttgccattcctacaagcccagccttgctgctggtttgtccttttctttgggtatttgcactatttagggagcaggtttttctatgtgggagtcacttttttgtacagaggtaactggggtttttcagggagccctacttggtgcctccttccttattttcttttttgatctatgcaagcggctgcagccgccatcatctcctgggatgccatggggctgcccacccccagctgcttgggtggggggaggtggagtctcccagagggagggaatgtaccagttctctaacccaggaaggctgggaggactgttgttaccttttgcagttggtcttagagagggtaggcctaaggcttggcaaa

SEQ ID NO: 2407 - DNA, 1957 bp, Cricetulus griseus
gtgggccgggcgcagggctgcttcccggtgagggaacgtgcagctgcttctggagggtggcacgagaacctgagtccttgcagccatgtctgagctcagcgatgaagccagcgagccggagctcctgaaccgcagcttgtcaatgtggtatgggcttggtgcacaggtcagccgagaggagctggatgtacctttggatcttcacacagctgcctccattggccagtatgaggtggtgaaggaatgtgtacagcggagagagttagatttgaataagaagaatggtggtggttggacccactgatgtatgcttcctacattggacacgataccattgtccacctactgctcgaggcgaggggtgagtgtgaatgtgccgacccggaaggcagactccactgatgctggcctccagctggtggcaacgagagcatcgccgttcctcagcgccacgaggccctgtcgaaagaagggcctcagcatccatgaggggccacgtgccctggccaagatcacagctattggacttggaggcaagccccagaccagctatgagcaagttcctccacggggctatgtgaccttcaccagcagtgatgagaacaccttggaagttgagggcctctgctaccgagacgtcacctcccccattaatgagcgggatgtggagagcagcagcagcagcagccgggaggaacccactttctgtgccagtcctgggcctgtgtggaggagcagcagcagcgatggcctggcaagaagagctcaggggctcagcagtgaagcctccatagaaagcgatgaggattctgatcatacccgcaaaagcttggttcgcagacaaaccaagagttatctgaagagtaagagtcgttacagcaacagtgacaatcagtggccttccagcacagggacgacatgcactccagggtttgaaccccaagctgagaagtccccctactcaggtcctcaggaccttgccacactgctggagcagattggatgtctaaagtacctgcaagtgttcgaggagcaggatgtggaccttcgtatcttcctgaccctcactgaaagcgacctgaaggaaattggcatcacgttgtttggtcctaaaaggaagatgacctctgccattgcccgctggcacagcagtgcccgcccccctagtgatgccctggagctggcctatgctgaccggctagaggctgagatgcaggaactcgccatccagctgcacaaatgctgtgaggaggcagaggcccttcgtggccaggtgtcccaagagcaggaattgcgggctgtagtagagagctgcctcctggagcaggatagtgcccgaaaggacatccatgcccagctgcaggaggcccagagcctggccaaggatgctgcccttgtcctggaccagctgcgggcttgtcaggctgagctgtcagctcgagtgaggcaggaccagtcccctagtgaagctaccctaagcccaccctttctctcagcagattccaaaggctggcctagtcccctgcaggctttgagcctccctgagttgtcaggggccctggaagactgtgtccatgagatggggcaggcattatgctctgtaacacagagcctggagaagctacagacgctgaatgggaagaaatggcgggaaccgtagccaggagggatgattctgacgttgggtgatggatccaccctgaagttatatgtgccatgcaagacagggcagtgagcagatggctgcagccgcccaagatatggaaaaccagcccagggagcagcttgtggacaggaggacaggacttcagtccctgtctgggcagcttgggccagccctgaggcaggatgaaagggcccggcctcccaggtccctggtgaaaacggcccaagcgagtaggcagctctggcccagtcggaactgtgaagagtgtgtgtccctgcacatgcaggtgcc

SEQ ID NO: 2408 - DNA, 1957 bp, Cricetulus griseus
tgtcagtcctgaggaggcagcgttttcttagctgctcttctctccagaagcttctgccggttcccccagctctgggtactcggctctgcgtcgtgccgccatgatgggccaccgtccagtgctcgtgctcagtcagaatacaaagcgtgaatctggaagaaaagttcaatctggaaatatcaatgctgctaagacaattgcagacatcatccggacatgtttgggacctaagtctatgatgaagatgcttttggacccaatgggaggcattgtgatgaccaatgatggcaatgccattcttcgagagattcaagtccaacatccagcagccaagtccatgattgaaattagcagaacccaggatgaagaagttggagatgggaccacatcagtaattattcttgcgggagaaatgctgtctgtggctgagcactttctagagcagcagatgcacccaacagtggtgattggtgcttaccgcatggcactggatgatatgatcagcactctgaagaaaatcagtacacctgttgatgtcaataaccgtgatatgatgctgaacatcatcaatagctctattactacaaaagtcatcagtcggtggtcttctttggcatgcaatattgccctggatgctgtcaagactgtgcagtttgaagagaatggccgaaaggaaattgacatcaagaagtatgcaagggtggaaaagatccctgggggcatcattgaagactcatgtgtcttacgtggagtcatgattaacaaggatgtgacccatcctcgaatgcgccgttatatcaagaaccctcgaattgtgctactggattcttctctggagtacaagaaaggagaaagccagaccgacattgagattacacgagaggaggattttacccgaatcctgcaaatggaagaagaatatatccagcagttgtgtgaggacattatccagctgaagcccgacgtggtcatcacagagaagggcatctcagatttagctcagcactacctcatgcgggccaacgtcacagctattcgaagagtccggaagacagacaataatcgcattgctagagcctgtggggcacggatagtcagccgaccagaggagctgagagaagatgatgttggtacaggtgcaggcctattggaaatcaagaagattggagatgagtacttcactttcatcactgagtgcaaagacccaaaggcctgcaccattcttcttagaggagccagcaaggagattctgtcggaagtagaacgcaacctccaggatgccatgcaagtgtgccgaaacgttctcctggaccctcagttggtgcctggtggtggagcctcggagatggctgtggcccatgccttgacagaaaaatctaaggccatgactggtgtggaacaatggccatatagagctgtggcccaagctttagaggtcatccctcgtaccttgatccagaactgtggggcgagtaccattcgtctgcttacctcccttcgggccaagcacacccaggagaattgtgagacctggggtgtgaatggtgagactggtaccttggtggacatgaaagagctgggaatatgggagccgttggctgtgaagctacaaacatacaaaacagcagtggagactgcagttctacttctgcggattgatgacattgtctctggccacaagaagaaaggtgatgaccagagccggcaaagcagtgctccagatggtggccaggagtgagtggtgagcaaggtgacttcaacgtgcagaaccagcagtctcccctttcctgagccagagttccaggaacactgtggacatctttgtttgcaaaggatcaagttgaggggcagccccagtctgtcccatctcagtttgcaaaaagcactgacatgtatctcttctctattgtaagctttccatttagtttgcttccaatgattaaatctaagtcatttg

SEQ ID NO: 2409 - DNA, 1957 bp, Cricetulus griseus
  modified_base (1932)..(1932): a, c, t, g, unknown or other
cacctttccagtcacctgagactttccctcactactctgtcctgatgccctaagtggtgccacaatcatctaccagcaaggagctgaggagtccactgcgatggccactcagacagccttggatctgctgctgaacatgagctcccagcgggagctaggggccacagccctgcaggtggctgtggtgaagtcagagggcatggaggcggagttgacatctactggtaggcagccttcccctgaagataccacgccacaggtggtgacacttcatgtgggagagccagggagcagcttggcagccgagagccagctacgggcccctctcgacctacagcagattgccttgccatctggatcatttggtggggccagctacagtgtcatcacagcaccccctctggaagagaggacctcagctcctggcacatcgtacaggccacatcgagttgactgcagatggctccatctccttcccaagtccacgatacccctggcctctggaacaaaatggcccctgctgcagtgtgaaagggccacccagaaatggtcctgaggttatatctccactgaagacccaccatgtggaaggcccccagggctctcccaccccaccccctgcaactagcaacactgtaggcctggtagtacccacttccccaccgtctgcagcagctttgtcagcaaagaagttctcctgcaaggtgtgctcagaggcctttgctggccgagcagagatggagagtcacaagcgggcccatgctgggcctgctgccttcaaatgccctgactgccccttccatgctcgccaatggcctgaggtccgggctcacatggcgcagcactcaagcctaaggcctcaccagtgtaatcaatgtagcttcgcctctaagaacaagaaggatctgaggcggcacatgctaacgcacaccaacgagaagcctttctcatgccacctctgtgggcagcgtttcaaccggaatgggcacctcaaatttcacatccagcggctacatagcagtgatggcagaaagactggagcttctacagcccgagccccagctcagaccatcatcctcaacagtgaggaggaaacactggccacactgcacactgccctccagtccagtcatggggtcctgggtccagagcggctacagcaggcactgagccaggaacacatctttgtggcccaggaacagacagtgaccaaccaggaggaagctgcctatatccaggaaatcaccacagcagatggccagacagtacagcacctagtgactaatgacaaccaggttcagtatatcatcgctcaggacggcgttcagcacctgctgcctcaggagtatgtcgtggtccctgatggccatcatatccaggtccaggaaggccagatcacacacatccagtatgagcaaggtaccccattcctgcaggagtcccagatccagtatgttcctgtgtccccaggccagcagcttgttacccaggctcagcttgaggctgcagcacattctgctgttacagcggtggccgatgctgccatggcccaagcccagggcctgtttggcactgaggaggcagtgcctgaacacatccaacagctgcaacaccagggcatcgagtacgacgtcattaccatcacggatgactgagccacaaaggcccaacgctgatcttggatatcggggccagctctcctggagactagggactttcttgtcctacttagggcctccagataccggacagtcagtatcccttgactccaaaggagccagacctgtgctcttgtggggcagccatgggccccagccaggacatgctgggtacttaagcctgctggcaggctttgggagagaagtttattttgttggatggacccactggctcctcagtctcaataaagggaccagagtacaaaaaaaaaanaaaaaaaaaaaaaaaaaaaaaaaaa

SEQ ID NO: 2410 - DNA, 1956 bp, Cricetulus griseus
gggggtcccgagtcggggagcccccggggaagtcattcatctgaacgtggggggcaagcggttcagcacctctcggcagacgctcacctggatcccggactccttcttctccagccttctgagcggacgcatctcaactctgaaagacgagaccggagctatcttcatcgacagggaccccaccgtctttgcccccatcctcaacttcctgcgcaccaaagagttagaccccaggggtatccacgggtccagcctcctccatgaagcccaattctatgggctcactccactggttcgccgcctgcaggtaagggaagagctggatcgatcctcctgcggaaatgtcctcttcaatggctatctacctcctccagtattcccagtgaaacggagaaaccggcacagcctggtggggccccagcaagtccggggacgtccagcccctgttcgacggagcaataccatgctggcagctagcattttccagcccacgcctggactggcctgtcgagcgcctggctctcacagctcgggtgcttggtggcgctctgggtgagcatgacaagatggtggctgcagccacgggtggcgagattcttctgtgggctctccaggcacaaggccgtggctctgagataggtgtcttccacctgggagtaccagttgaggccttgttctttgttgggaatcagctcattgccacaagccacacagggcgcattggagtgtggaacgctgtgaccaagcactggcaggtccaagaggtccagcctatcaccagttacgatgcagccggctccttcctcctcctgggctgtagcaatggctccatctattacgtagatgtacagaaatttccccttcggatgaaggacaacgacctccttgtcagtgagctctacagagacccagcagaagatggggtcactgcactcagtgtctacctcacccccaaaaccagtgacagtgggaactggattgagattgcctatggcaccagctcaggggttgtgcgggtcatcgtgcagcaccccgagaccgtgggctcgggaccccagctcttccagaccttcagcgtgcaccgcagccctgtcaccaagatcatgctgtcagagaaacacctcatctcagtctgtgccgacaacaaccatgtccggacgtggtccgtgacccgcttccgaggcatgatctccaccccagcccggttccacgccgctagcatccttcaagatcctggcgctggagtccgccgacgggcacggaggctgcagtgctggcaacgacatcggtccctacggtgagcgggatgaccagcaggtgttcatccagaaggtggtgcccaatgccagccagctctttgtgcgcctctcctccacggggcagcgggtgtgttctgtccgctcagtggatggctcgcccacgaccgccttcacagtgctggagtgtgagggttcaaggcggctgggctccaggccccgacgctacctgctcacgggccaggccaatggcagcctggccatgtgggacctgactactgccatggatggcctgggccaaacccctgcaggtggcctgacggaagaggagctgatgggccagctggagcagtgtgaactggctccactggctttccctcggggcactttccctagcccctcacccaggacctctcttaccagtctccactcagcctccagcaacacctccctgtccggccacagagggagccccagcccaccacagacagaggtccggcggcgcggggcaggaagcttcgtggatcggtgccaggagctggtgaggggtgtgccagagccccgacggccaccgacaccggctccgcggccctccacaggtcttgggactcccctgacaccccccaagaacactcttaacgaaacttccttttgaacctaaccaccgcagtgccttcttatggactggccccgggggact

SEQ ID NO: 2411 - DNA, 1956 bp, Cricetulus griseus
ctcccgccgcgctgcccgacgccccgacggtagccatccgcgtcgcagtcggctcggctcccgcgcctccgcgatgccccccaagaaacaggctcaggccgggggcagcaagaaggcggagcagaagaagaaggaaaagatcatcgaggacaaaaccttcggtctaaagaataagaaaggagcaaagcaacagaagtttattaaggctgtcactcatcaagtgaaatttggtcaacagaatccacgtcaggtagcacaaagtgaagctgaaaagaaactgaagaaagatgacaagaagaaagaactgcaagaactaaatgagttgttcaaacctgtagttgctgcacaaaaaataagtaaaggtgcagatcccaaatctgtggtgtgtgcattcttcaaacaaggacagtgtactaaaggagataaatgtaagttctctcatgacctcactttggagagaaaatgtgaaaaacgaagtgtttacattgatgcaagagatgaagaacttgaaaaagatactatggataattgggatgagaaaaagctggaagaagtagtaaacaagaagcacggtgaggcggaaaagaaaaaaccaaaaactcaaatagtgtgcagacacttccttgaagctattgaaaataacaagtatggctggttttgggtgtgtcctggaggtggcgacaattgcatgtatcgccatgcacttcctcctggatttgtgctgaagaaagacaaaaagaaagaagagaaggaagatgagatttcattagaagatctaattgaaagagagcgttctgccttaggtccaaatgttaccaaaatcactctagaatcttttctcgcatggaagaaaaggaaaagacaagaaaagatcgataaacttgagcaagatatggagagacgaaaagctgacttcaaagctgggaaagctctggtgatcagtggtcgtgaggtatttgaatttcgtcctgagctggtcaatgatgatgatgaggaagcagatgatactcgttacattcagggaacaggtagtgatgaggtggatgattctatgggtgtaaatgacatagatgtaagcctgtacatcccaagagatgtagaagagacgggtatcactgtagccagtcttgaaagattcagcacgtatgcttcagataaagatgataacaaattaagtgaagcttctggaggtcgagctgaaaatggtgaaagaagtgatttggacgaggacaacggaagtggagcacaagaaaatgggtccatcgatgctgttcctgttgatgaaaatctgttcactggggaagatctggatgaactagaagaagaattaaacacacttgatctagatgaatgaaggaagaaaattaggtcagctcaccgtgatcaacatgaactgaaattgacgttaattgttctaccacctagaatcaacaggatgtttacttccttccgatgattctggaggactactgtcctccaaaaaaggaatactctccctgcgtcctctcttctgactttgactacatctcatagtaagttcagagtagttgatgattaattgaaagtggccattacagaagatgattgttgttgtacctgtccactcctgtaggaagtgtaactgcttctccagcttttggttttcattgggcatgtgtaacttccaggaacaacaaattcatacttaaatactttctgtttgatgcagtttttaatgagtggtttcctttcctttgtatttatgttttaaagactgcctgaaaggtgagcactgtacttgataaaggaaactgcatatgcaggttcagtattgtacatctggacaattaggtggacactgagaatgagacttgttcaacctaacaaggtcaactacagtgccctgtgttaaagctgtttaaagttctccccctttttgccaataaagttgtaaataaaaaccgtcatacatccaaa

SEQ ID NO: 2412 - DNA, 1956 bp, Cricetulus griseus
  modified_base (1936)..(1936): a, c, t, g, unknown or other
gcgcagacttgcccagcacgagaggcggagcggaccgagtggccgcagacagactgggacgatgttagcctttgctgccaggaccgtggtaaagcccctgggcctcctcaagccctcctccctgatgaaggtttctggtcgcttcaaggcccaccaggatgcactgccaaggctgccccgtgcccccactccagcaatccctggatcattacctcaaggcactgcagcccatcgtgagtgaggaagagtgggcccacaccaaacaactggtagatgaatttcagaccccagggggtgtaggggaacgcctgcagaagggactggagcgcagagccaagaaaatggaaaactggctgtccgactggtggctcaagacagcctatctccagtaccgccagcctgtggtcattcactctagcccaggagtgatgctgcccaagcagaacttcgtggatcaacagggtaactgtggtgcacaactaccagttcttcgagctggatgtgtaccacagtgatgggacaccattcacctcggatcagatatttgtgcagctggagaaaatttggaactcatcactgcaaaccaacaaagagcccattggcatccttacctccaaccaccgcaacacctgggccaaggcctacaatacccggtcaagtcaaagacaaagtaaaccgggagtcagtgaactccattcagaagagcatcttcactgtgtgcctggacaaaccagtgcccagagtctccgacgacgtctaccgcaaccatgtagcaggccagatgctgcatggtggtggcagcaagctcaacagtggcaaccgctggttcgacaagacactgcagtttattgtggcagaagatggatcctgtgggctggtttatgagcatgcggctgcagaagggccccccatcgttgctcttgtggaccatgtcatggagtatacaaaaaagcctgagcttgtgcggtctcctatgttacccatgcccatgcccaagaagctgcggttcaacataacacctgagatcaagaatgacattgagaaagccaaacagaacatcagcatcatgatccaggacctggacatcacgatgctggtattccatcactttggaaaggacttccccaagtcagagaagctgagccctgacgccttcattcagatagccctgcagttggcatactacaggatctatggacaggcatgtgccacatatgagagcgcctctttgcgtatgtttcacctgggccgcactgacaccatccgctcatcctccatggactcactagcctttgtcaaaggcatggatgactccactgtgctggagcaccagaaggtggagctgcttcggaaggctgtgcaggcccaccgagcctacacggaccgagctatccgaggggaatcctttgaccggcacctgctgggtctgaagctgcaagccattgaggacctagtgagcatgcctgacatcttcatggatacctcctatgccatcgctatgcacttcaacctttctaccagtcaggtgcctgctaagacagactgcgtcatgttctttggacctgtggtcccggatggttatggcatctgctataaccccatggaggcccatatcaacttttccgtgtctgcctacaacagctgtgctgagactaacgctgcccgcatggctcactacttggagaaagctctgctggacatgcgcaccctactgcagaaccaccccaaggccaagctctgagcccaggccaaggcctgtcaggtacacaaccaaaccctttttgggatggatacctgccatggctcagagttccttggctcctgtgccctccaattggtggagccagggaaagtctctagcagggccccaaagttcaagccaagtgcctttcaggtcctgtcctcagcacttgccatagttcaagcaccagggttnagttcagaagctgaacaaga

SEQ ID NO: 2413 - DNA, 1956 bp, Cricetulus griseus
ggcagcgcccggcccctccgggtcatcatggccgtgtccacccagcagctggcggaggagctacagatcttcggcctggactgcgaggacgccctgatggagaaactggcagaactgtgtgttctttacagacagactgaggagggaatggtaagcgagcttattgccttctgcaccagcacagggaaagtgtgccttactgcagagatcctgaactcttttgaacatgaggttctgaacaaaaaattatccaaaagcctggcacaatgcctccaaagacagtggtcatgcaggagccagagacattgtttctatacaagagctgattgaagcagaggaagaagaggagacccttttgaactcttataccacaccctctaagggtccccataagcgatccagcagcaccccagagacccccctaacaaaaaggagtgtctctactcgtagcccacatcagcttctctcaccatccagtttctcccccaagtgctgccccctcccagaaatacagctccagaacccaaccgaggagaagtggtcaccacctttggttcagcacagggcgtgtcctggtccgggagaggaggctctgcaagtgtcagcctgaaggtcatagggtacccagagccactcacgagcagctacaagaccatgtttcagcagctctcagatgttcgtgaagttctaacctgtaagatagaagagcttggaagcgaactgaaggagcattacaagattgaggcttttactcctcttctagaaccagcacaagagcctgtcatcctgctgggccagattggctgtgacagcaatgggaagctgaacagcaagtcggtgattcttgagggagaccgggaacactcctcaggcacgcagattccggtggatttatctgacctcaaggaatattctctctttcctggacaggttgtaattatggaaggattcaacaccactggtaggagatttactgccaccaaactctatgagggtgtgccacttccattctatcagcccactgaagaggatgcagattttgagcaaactatggttttagttgcctgtgggccctataccacctctgacagcatcacatacgaccccctgcttgatctgatcaccatcatcaatcatgaccggccagatgtctgcatcctgtttggacctttcctggatgctaaacatgagcaggtagagaactgtcagctgacaagcccatttgaagatgttttcaagcagtgcctgagaacagttattgaaggaacaagaagctctggctcccaccttgtctttgtcccatcgctaagggacgtgcaacatgaaccggtatacccacagccaccttttaccttctctgagctgcctcgagaggacaaaaagcgagtgcagtttgtgtcagagccctgcagcctctccataaatggagtgatatttggcttgacatccacggacctgctgttccacatcggggccgaggagatctgtagctcttctgggactccagatagattcagccgaatcctgaagcatatcctgacacagagaagctactacccactctacccgccccacgaggacatgtccatagactatgagaacttctatacctatgcccagatgccagtcacccctgatgtcttcatagtaccgtcagagctgaggtacttcgtcaaggacatccttggctgtgtctgtatgaatcctgggcggctcaccaaaggacaggtgggtggcacctatggccgcctctacttcaggaggcaacccagggccatggacagtaagggcaggcagggcctgagtgtggctgcgcaggtggtcaggatctgagtcttcagcctaggtcacgtggcctcacaggcaccaagagcccaggtgtgaccctctagtgaccaaactgttgggacacttgacaaggatctggccatagggacagggctgtagagctgggcc

SEQ ID NO: 2414 - DNA, 1956 bp, Cricetulus griseus
  modified_base (988)..(988): a, c, t, g, unknown or other
  modified_base (1665)..(1665): a, c, t, g, unknown or other
atggcggagtggcacgggagtggctgtatttgttgtgccatgaaatgttgaatccgtattatggactcttccagtattccacggacaatatttacactctgcaaatcaacccagattcttctgtcaaccctgaccatctgtcttacttccactttgtgggtcgcatcatgggtctggctgtgttccatgggcactacataaatgggggcttcacagtcccattctacaagcagctcctgggaaaacccatccagctgtcggatctggagtcagtggacccagaactgcacaagagtttggtgtggattctagagaatgacatcacgaccagaaggaactggagctgataatagtgggctggataagatagacctgaatgactggaagtcaaacacacgcctgaagcattgtgtggccgacagcaacattgtgaggtggttctggcaggcagtggagaccttcgatgaggagaggagggccagactcctgcagttcgtgaccgggtccacacgagttcctctccaaggcttcaaggctctgcaaaggttctacaggcgcagcagggcctcgactcttcaccatccacctgatagatgccaacacagacaacttgcccaaggctcatacctgctttaaccggattgacatcccgccctatgagtcctatgagaagctctatgagaagctgctcacagctgtggaggagacctgtggctttgctgtggagtgaggagtggccagcagcagccttcactggaggcccagggtatttttcagggtatcctggttgaaaagatggttttgcacaagggggaacaatctttaaagtcccatttgctatgttctctacccagtttgaaattctcacatgtcatggagctaatcaaagaatggccaaaaccaggctcagatcccccccgggtccagctgactcctgtgccagggactggaggctcctgactgtcttgaaatgttaatggacttttanatggggattgctaagagctaaactaacagaacaattttgtcaccacagccactgggtgggacagcaggaggccgctgacctggggtcccctggatgtagcttcccagggttggtgctatgcacaaagcaggttgtgatggagcctgtggtgcttgcattgcctgtgggttcccccattgccagttctgagtgtcgcagcttcccccgggtgcatctgtctgcgcagcaccgtcctctgttggtaccgctgcacctccttgtctgtctaccatggttaggcccttctgaaacacctcaaaggacactgcgtggccggcccacggctaagctcctggttgccctactttgggtctggatgaagccctttcgtgtaagatctcgattgtcacccctcctggtggccccacatcacccagatgcttcaggagcccggctctccaggctaccctcaccagcggccagcagccacactcagggacgcagcaaacaccactctgcttcgcagcgcttcagaggaagcgcaggctgcagcaatgggatggcagcctgacacctacactggcttggccacatggtcaagttcaggataggcggaccctggactgaccttctagcagagaaaacaccccgcctactgcagccaggtggggccacatgacagccttctcaaacagtgngggtttttcaaatgtgttataatgtattctaatttattttgtaaggtcctgtttgaagtgctgctgctaccctagttgctctcccagtttttatcgcccatttacttgtgacagttgtacactaatgttctgttttatgtctgaattgaaagtatttaaagaaatgctagttctatttaatgcagttgtggaaccagctggaaaacacaaaacattgactgtagagcaggctggacccgggaggtcaggttcattttgttacatatgcaataaactcacaactttacattt

SEQ ID NO: 2415 - DNA, 1954 bp, Cricetulus griseus
cggcccagctggaaacagtccgtcgagaaagcgaggctgtcccagattccatactgagcagtctgaggggcgggtgaaggcccagagccgaaatccaggaggaacccagctcctcccaacccgcagccaactctcagcgaagatggcggggcccgagcttctgctcgactccaacatccgcctctgggtggtcctgcccatcgttatcatcactttcttcgtgggcatgatccgccactacgtatcaatcctgctgcagagcgacaagaagctcacccaggaacaagtgtctgacagtcaagtcctaattcgaagcagagtcctcagggaaaatggaaaatacattcccaaacagtctttcttgacacgaaaatattacttcaacaacccagaggatggatttttcaaaaaaactaaaaggaaggttgtgccaccttctcctatgacagatcccaccatgctcacagacatgatgaaagggaatgtaaccaacgtcctcccaatgattctgatcggtggatggatcaacatgacattttcaggctttgtcacaactaaagttccatttccattgacacttcgcttcaagcctatgctccagcaaggaatagagctgctcacactagatgcatcctgggtgagttctgcatcctggtacttcctcaatgtgtttgggctccggagcatttactctctaatcctgggccaagataatgctgcagaccaatctcgaatgatgcaggagcagatgacaggagcagccatggccatgcctgcagacaccaacaaagctttcaagacagagtgggaggctttggagctgacagatcaccagtgggcactcgatgacgtggaagaagaactcatgtccagagacctccactttgaaggaatgtttaagaaagaactgcagacgtccatcttctaaatgagagcggggtccgctgtgtcaggaacttgcagtagcacgtaaccttgtaacttccgtggagctggagcctctgagaataaaaaggagggtgcaggggctggcgggtgcatagcaaggctcgttcttgtctgagctgggttcccctttatgttggaaactagaggaaaaggagttctgggtgactgctgtcttagaagtttgtgagcattcttcaggtgactctagtaagggtgtcagagaaaggggagtgtcccaagctactgagaatatctcaaaacttagcaaaactccgtgtttgtaaggagaattgtcagttatagccagttactatattcagtcagcctgacttccagccacagtaaactcctgttttcttaggatccagacaccctacattttacctttaatttcttgtttgtatgttttaacgttctttacatgagtaatatacattttctctctaccaaaacttagaaactatggctgagcagcatagagctccctgcactgttgacttgaacctacaggatgatgcagagagctgggtgtcccgaccttactgaaacaaactctttccagagtggatttccagggccagggcatactcagcaaacttttcatatctcttcatctttagtccagtgaaaacaggtgaccctgaggcacagtcagactctcaagtgcctttgggctcatcagagatgggttacataagctaagttcttgattggaacttgagaaaacatcagctccattggccagtcagtggtgctgtactgtaagtggctactcatttgaacgagtgatctcatctcccagttcctctgggcaggagagaacttactactgtcagggcaagagggcagcttctggtggataggtagatcaaagtgcccaggagtcctctgtccagggaagtgacggggtgccatttctgtactaagaggtggatgtgattgcatgttaagcactgtagccaagaacaagcgactcttgactctcattaaacagccctgttttctc

SEQ ID NO: 2416 - DNA, 1954 bp, Cricetulus griseus
ggaagtgaagaggaactttgagctgaagacaaccctggtcaaggcctcttcccgcccgcccctttcagggagcaggctcaagaggggccctgaccagatgaaggaagccctagagcctgcaaagaaacggacacgaggcctgggtgcagtgaccaaaattgacacatcccgctccaaaggaccactcctgagctcactgtcgcagccgcagggccccactgcagctcagaaaggccctaagaagacaggacctcgtggttgcactgccgttggatcagtgctgaagaaccagaagctggctcccactgctcctgcggaagaggcctggtaagcgtcctgactgggacttaaagggtcagttgtgtgacctcactgaagagctgaaatgctaccgggagaagactcaaaagctggaccaggagaaccaagggcttcaggagcaacttaaagaagcccaggagcaggccgcagccctggggacagagcggaacaccctggaaggggagctggccagtgtgcggacgcaagcggagcagtgccagcagaaactggaggctctgtgtgcccgtgtcttggagctggaggaatggctgggcaccaaggaaaacctgattcaggagctccagaaagagcagctggaattgcaggaagagcggaaggcattggccacccgactggaagagcaagagaggaggttacaggcctcagaagccgctctgctaagcaacgaatcggaggtggtgtgtctgcggcagaagaccgcagcccaggtgaccttactggctgagcaaggtgaccggctccacgggctagagatggagcgccgccgactccacaaccagttgcaggaacttaagggcaatatccgggtattctgccgggtgcgccctgttcttgcaggggaacctactccatcgcctggctttctcctgtttccccatggccctgctggaccctctgaccccccaacccgccttagcctttcacggtctgatgatcggcgttcgaccctgaccagggcgcctgcacccactacgcgccacgatttctcctttgaccgggtgttcccaccaggaagcaaacaggaggaagtgtttgaggagatttccatgctggtccagtcggcactggacggctaccctgtgtgcatctttgcctacggacagaccggcagtggcaagaccttcactatggagggcaggcctgggggagacccccagttggaggggctgatccctcgggccatgcggcatctcttctctgtggctcaggagatgagtggccagggctggacctacagttttgtggcaagttacgtagagatctacaatgagaccgtccgagacctgctggccactgggacccggaaggggcaaggcgagtgtgagattcgtcgagcaagaccaggcagtgaggagcttactgtcaccaatgcacgctatgttcctgtttcctgtgagagagaggtggaggctctgctccatttggcccaccagaatcgagctgtggcccgcactgcccagaatgagagatcatctcgaagtcacagtgtgttccagctgcagatttctggagagcatgctgctcggggcctgcagtgtgtcgctccccttaaccttgtggacctggctgggagtgagcggctagaccctggtttaaccttaggccctggggaacgtgatcgccttcgggaaacacagtccattaatagcagtctgtctaccctgggactggtcataatggccctgagcaataaggagtcccacgtgccttaccgaaacagcaagcttacctacctgctgcagaactcgctgggtggcagtgccaagatgctcatgtttgtgaacatttcccctctggaagagaatgtctctgagtctctcaattcactacgttttgcttccaaggtgaaccagtgtgttatcggtactgctcaggctaataagaagtgaag

SEQ ID NO: 2417 - DNA, 1954 bp, Cricetulus griseus
gggccatctcgccgtgtccgtaggcatccgcagggtttccaacgactcggcgcctcctgtggttcccgccgccccgcggcccgaggtggacaacctaacgctgcggtaccggtcgctggtgtaccaactgaactttgatcagatgctgaggaatgtccgtgatgacggcacctggcgccccggggagctggtgctggtggtccaggtgcataaccggccggaatacctcaggctgctgctagactcgcttcgaaaagcccagggcattaacgaagtcctagtcatcttcagccatgacttctggtccgcagagatcaaccatatgatagctagcgtgaacttctgcccggttctgcaagtgttctttccattcagcattcagctgtacccgagtgagtttccgggtagtgaccccagagactgccccagagacctaaagaagaatgcagctctgaagttggggtgcatcaatgccgaataccctgactcctttggccattacagagaggccaaattctcgcaaaccaaacatcattggtggtggaagctgcactttgtgtgggagagagtcagagttcttcaggattacactggccttatacttttcctggaagaggaccactacttagccccagacttttaccatgtcttcaaaaagatgtggaagttgaagcagcaggagtgtcctgggtgtgatgtcctctccctagggacctacactgccagtcggagtttctatggcattgctgacaaggtagatgtgaaaacttggaaatccacagagcacaatatggggttagccttgacccgagatgcctatcagaagttgatcgagtgcacagacactttctgtacttatgatgattataactgggactggactcttcaatatttgactgtatcttgtcttcctaaattctggaaagtcttagttcctcaagctccgaggatttttcatgctggagactgtggtatgcatcacaagaaaacatgtaggccatccacccagagtgcccagatcgagtcattcttaaataataaccaacagtacatgtttccagaaactctagttatcagtgagaaattttctatggcagccatttccccacctaggaaaaatggtgggtggggagatattagggaccatgaactctgtaaaagttatagaagactgcagtgaaaacaaaaatcacaattgcaaaagatgacagtcttctgttttttatatttctttcaatgggatatacaattgaataaagggtataggaactggtttctgctttaatacacagatttcttgtaacaggtgtccaaatatatagtaatcctattcagttagtctgattaaaatttcaaactgaaattttcattttgggtcttgggttttaaaattcagtctatctgcttaagggtaatgatttgataattattgattagaaaaggaaattttatttaaatcgcatctgttaatctttctatctaaaactttgtatacttttccactttcagaacttattttaagtacagcaagacttatttaaaactgtcacaacagtaaaaagtattacaagactattagagtattgatgggacaaacccagtgtcactattgacttttatttggaggaattgtctgaccggtttaatcactcagaagttccgtttgttaaacgccctgtcagaagagtcatttcagtattgctgattcctgtgctattgtgttaagatttgcctgtgctttcagccttcatactacatgatttatgttggaatgtatttggttaataagaaagtttaaacactgttttcacctcaatgtagaaatacagtggttttgtttgtttttttatttttagtgctgccaaaataaaatactcattttttcataaaaagttccctaatcattttgcaaaatgttctatttgtaccaataaaggcattctagaagttttga

SEQ ID NO: 2418 - DNA, 1954 bp, Cricetulus griseus
  modified_base (1525)..(1525): a, c, t, g, unknown or other
ccctccctcaagctggcactacagactggccgtgagcctcacccatctggcgtgtccagaaggctcttctgcagaagttcactccagagatcaaggacggccagaggcagttttgtgccaccagtaactatttgggttattttggggatgcgaaaaaccggtaccagcgcctctatgtgaagttcttggagaatgtcaacaagaaggattatgtgagggtgtgcgctcggaaaccctggcacaggcccccattgccagtcagacggtctgggcagaccaagggccctacctctgtgggggcacctctgagaaacctccagaactgacacctgagcctgctttgctggaacccctgccccagagaagccactccccacccgacctgtggagaaggagaaggagacggcctttacggagtgaacggtccacaagtgggcggcagatgaggactgacaggagcctggccgcaggacagtccaccacctcccggctgtccaaagctagacccacgaaggtgaaggctgagccacctccgaagaagaggaagaagtggctgaaagaggcagtgggcaatgcttcagcaggcggcgggcctgggggcagctcatcagactcagagtcctcccctggtgctcccagcgaggacgagcgggcagttccaggacggttgttgaagacacgggccatgcgggagatgtaccgaagctatgtggagatgctagtgagcacagccttggacccagacatgatccaggccctggaagacacacatgatgaactgtaccttccacccatgcggaagattgacggcctcctcaatgagcacaagaaaaaggtcctgaagcggctgtcactgagcccagcgctgcaggatgccctgcacacgttcccacagctgcaggtggaacagactggagaaggctcccctgaggaggggggctggtgcggctgcggcctgccggggagccctataaccgcaagaccctcagcaagctcaagagaagtgttgtgcgggcccaggagttcaaggtggagctggagaagtcagggtactacaccctctatcactctctgcaccattacaagtaccacaccttcctgcgctgccgagaccagaccctcgccatcgagggtggcgctgaagacctgggacaagaggaagtagtccagcagtgtatgcggaaccagccatggctagagcagctattcgactccttcagtgacctgctggcccaagcacaggcccacagccgctgcgggtgactgcaccaaaacctgggaaggggagggcacctcctccatgaactgagaactgacagaactgtcctccagagctgactctgtgctccctcgctgccaggagggaaggggtcgtcctcagccgagggtgtatccacacagccctcccctccacccctcttaaccacccaccccccatccgtgtaccagagaaattatttatatatatgtataaatgtctatttagtaacacttgccctgtcccctggcccagcccccccaacanggccatcgctcctgcccctctaccgtgtaccataatgtataggaaaattctatgtgtggttgagggaggtggggcaacttgagaggatgggaggcccctcccctctcgagcttcctcctccaggccaacacctttgctaaaagctgctccccaagggcgtgtggtgttgggtgggaggggccaaacatcttgttaattatttttaatcttatttattgtacatacctagggtggggaggggtggggagggagggtgagaaggctccccttgccctgcccctcctgttccttttctacagcatctgtctcccccaccctcagccccacttccctttgtcttctcaatgtggttctatttttaatgcctttgtctgtcccatccctgctcctttctgccctgttccctcctctccttgacctcttgctctt

SEQ ID NO: 2419 - DNA, 1954 bp, Cricetulus griseus
cacagaggagaagaatcaccactgaacaatgatgttctcaataccattctcttgtttttgttcccagatgctgcttctgagaagccaccggatgcaactgcttcaatagacaatagcaaccctccaccagagggtgaagactatactctctacaatcagttcaaatctgcgccctctgacagtttaacatacaaactggctttgtgtctttgtatgatcaatttttaccatggagggctgaagggagtggcacatctctggcaggaatttgttcttgaaatgcgcttcagatgggaaaaacaactttctgattccaggactaacaagtggaccaccagatctaagatgttgtttactacaaaactacagatgttaaattgttgtattgaaaggaagaaagcacgtgatgactggaagccagctaggcctggaccatcctgggactcctggagtgatagtgaagaagaattttttgaatgcctcagtgatactgaagaccttaaaggaaatggacaggagagtggcaagaaaggaggccccaaggagatggcaaacttaaagccagaaggacggctgcaccagcatgggaaactcacattgctgcataatggagagcctctctacattccggtgaccccaggaaccagcacccatgactgaagatctgctgaagagcagtctgaggtcttagctaaattaggaacctctgctgaggggcacacctccgcgcacgcatgcagagtgcctgtctgctttccgatatggagtcttttaaggcagctaatccaggttgtttcctgaagattttgtgaggtggtactcaccatgcccgcatgaagatccccagcaacatgtgggtggaggcttgggaaactgctaagcccattccagcaagacgccagaggagactgtttgatgatacccgagaggctgagaaggtgctgcactacctggccatgcagaagcctgcagatctagctcggcacctcctgccttgtgtgattcacgcggctgttctcaaggtaaaggaagaagaaattctggaaaacattccatcagttaagaagattataaagcagatcatagcccattccagcaaagttctgcacttcccaaccccgaagacaagaagttggaagaaatcatccttcagattactaatgtggaagctataatagcccgagcccgctccctcaaggccaaatttggaactgagaaatgtgagcaagaggatgaaaaggaagatcttgaaaggtttgtcagctgcctgctagagcaccctgaagtgtcagtcactggggctgggagaggacatgcaggccggatcatccacaagctgtttgtgaacgctcagcgggctgctgcagtggctctgccagaggaggagctgaagaggtcaggctacccagaggagagaagacagaactcagcatctgacttcccacctcctgtaggccgggagctcattctgagggcaaccgtgcctcggcctgcgccctactccaaagccctgccacagcgcatgtacagtgtgttcaccaaggaggacttcagacttgcaggtgccttttcctcagacacctccttcttctagtggtatggagaagaggcagctcctgccatggacacctgagctgcaggacctcggtttggtggttgtcaattattctgggacctaaaattcccatttgaatccaaagtaaaaaatggttatgctgaaatgtaaattctgcctgtgtgatttttaaaagctgatagaactgcacaaaccctgtgttatttttgtaaaaacaaaagaaatctatatgcatttatctgtagaatgtgtgcagacacgactgtgtgaataggggcctgtgtgagggggccaggtggtgacccctaggcctcacagcacttttctctgaggtgttggactttgcttcttaagaaacctatagatactgtctgaggc

SEQ ID NO: 2420 - DNA, 1953 bp, Cricetulus griseus
ggggatcgagaaggagaatggcagaccatgatacaaaaaatggtttcatcttatttagtccaccatgggtactgtgccacagcagaggcctttgccagatctacagaccagactgttctagaagaattagcatccattaagaatagacaaagaattcagaagttggtgttagcaggacgaatgggagaagccattgaaacaacacaacagttatacccaagtttacttgaaagaaatcccaatctccttttcacattaaaagtacgtcaatttatagaaatggtgaatggtacagatagtgaagtgcggtgtttgggaggccgaagtccaaaatctcaagacagttaccctgtcagtcctcggccttttagcagtccaagcatgagtcccagccatggaatgagtatccacagtttagcaccaggcaaaagcagttctgcacatttttctggttttgaaagttgtagcaatggtgtaatatcaaataaagcacatcaatcatattgccatagtaaacaccagttatcgagtttgaatgtaccagagctaaacagtatcaatgtgtcaagatcacagcaagttaataacttcaccagtaatgatgtagacatggaaacagatcactactccaatggagttggagaaacttcatccaatggtttcctaaatggtagctctaaacatgaccacgaaatggaagattgtgacaccgaaatggaagttgactccagtcagttaagacgccagctctgtggaggaagtcaggctgccatagaaagaatgatccactttggccgagagctacaagctatgagtgagcagctcaggagagaatgtggcaagaacacagcaaataaaaaaatgctgaaggacgcattcagtttgctagcatattcagatccttggaacagtccagttggaaaccaacttgacccgattcagagagaacctgtgtgctcagctcttaacagtgcaatattagaaacccacaatctgccaaagcaacctccacttgccctagcaatgggacaggccacacaatgtctaggactgatggctcgatcaggaattggatcctgtgcatttgccacagtggaagactacctacattagctatgcacttcaagagctcacacttacattgtggcaaatagtcaacatggaagtagaccggctctgctgatttgaaatttagattttttaattatgtactggggacaggtttttgtcgctttacattgcttcctagtttacagcatgatgcaaatgattttctaacttagtgttaggagaaaatattttccatcttttaacctcttagttgtctaagagttaaatattactgaatttcagacgttcaaattgatcatcagaaatcctttaaaacaattatctaaaagaaaccaaaaatcctgccttctttgttggggggagaagggggaaggaaatggaacaagttgtgtttgtgttagcatgtgggtgatgtaaactacaaattgggagctgttccgacccccgctcctgtgtaagcattcaatcagtgtaacttgcaaaatgcataaacatccgacagtttgaatttaatagtgttgatggaagaaatcatttttaatgtgtactgtaaaacttgaaatactcaggagctgagtgagtatgtttgttgctacttacaatcccgacctgttagtcccagtagttttgttttaacatggtctttttcaactttgtttcctgtttaactacagatgacttctgttgtagactcacaagtttaactgttgtattataacagtattacatgtcaacagtgtggttatgacctttatttatataaaaaccaaatatttagtcaatttaccgtgtcttaatttaatctttgtacaccttccatttttaagtgcttaaatgagtactatattgcaataaaaatgtagtgatattaaaaaaaaagta

SEQ ID NO: 2421 - DNA, 1953 bp, Cricetulus griseus
  modified_base (1188)..(1188): a, c, t, g, unknown or other
ggaaatggggtcctcactaaagctacagtccccatttatgccacaggagtcctcacgtgttacattcaggaagaggatcgaaagctgctagttggcttcttagaagatgtaatgacgctgctttcactgtctcatgctcctcttgacagcctgaaggcttcttttgtggaacttggtgcaaaccctgcctatcatgagctgttgctgactgttttgtggtatggtgttgtccacacttctgcacttgtcaggtgtactgctgctaggatgtttgagctgttgggagtgaagatgcagttggctctttcctggaagaccctcagtaccaagaccagcatctttgcatacagaggttatcagaacatttggcagagtcgggcctaatgcagaacctcgcttccgagatgagtttgttataccacatttacataaattagccttggtgaataacttacaaattgtggattcgaaaagactggacatcgcaatccatctttttgaagcctacagtgcactgtcctgttgcttcatttcagaggatttaatggtaaatcactttttacccggcctcagatgtttacggactgacatggaacatctgtctccagaacatgaggttattttaagttccatgataaaagaatgtgaacaaaaagtagaaaataagactgcccaagagcctcaaggctcaatgtcaattgctgcaagtttagtgagtgaagacacaaagaccaagtttttgaacaaaatgggccagttgacaacctcaggtgccatgctggccaatgtgtttcagaggaagaagtagaagcaggaagggagccccagcaaacactaaggtggacctcaagcagactggctccttgtacttgaagcacttacctttttatttcctgagcttatgttcttgtgttataattttatccaaacctccaaagatatttgcactgcttttgattattgctgtgtatctgttggtttgggaattataactgtggtaatagaaacttgatttaatgatctgtaccaagtccctattctatgttcttatttttgagaataacttttatatataatatatatatgtatatgtatagtgaagaggggtttttggtttccttttttaattttatttttggatgagatattcgcaaatatctgtattatactctaagttagtgtgttctntaggaattatgtgcattcctttctacacaataatttgtaggctgctgtggtgaatttgaatgacagagcctacaacaagtagataatgatgagacttaaaacatttcacatcttccttgaaaatcctttaagtgctgtttagcctcccgacacttagagcatatgacagcattacctgaggggaaatagcacttgagcatggtgaggagtagtagccagggtgaatttcacaacatttgtactagatttaaatgctcaaaaataaatgtactgagaagagctaataatcatttgtccccaagttgaaatacacaagaaaataaaatttaagtctgaaatttaacacctacttcctgtaacacattttaagatgttctctggttatttacattttgcagtttaccttttcatcctatctgagaagtactaaaaagtttaggacctttggggattcctttttcccttctaaactgaaagtgacattggttgagttacacagttgatgcatatagatgattctcatatttattgtataaattggctttaatacacttggattacattactttctaggaaagctagctttcctacacagtcaaagcttataaataatttcccttgggtttagccatttatttcttttacctatagtgaaattattgagtagtctttctgaactgttggattctaggcattcctgagaaattgaaagtggctacctttcgtgtcaaaatgttgatctattataaataaatgttttggata

SEQ ID NO: 2422 - DNA, 1953 bp, Cricetulus griseus
atgacagatttggccaagatatcatctctcctctgctgtctgtgaaggagctgagagacatggggatcactctgcatctccttttgcactcagatcgggatccgattccagatgttcctgcagtgtactttgtgatgccaactgaagagaatattgacaggatgtgccaggatcttcgaaatcagctctacgaatcctattatttaaatttcatttctgcgatttcaagaagtaaactggaagatattgcaaatgcagcattggccgctagtgcagtgacacaagttgccaaggtttttgaccagtatctcaattttattactttggaagatgacatgtttgtattatgtaatcaaaataaggagcttgtttcgtatcgtgccattaataggccagatatcacagacacagaaatggaaactgttatggacactattgttgacagcctgttctgcttctttgttacattaggtgctgttcccatcatccgatgctcaagaggaacagccgcggaaatggtggcagtgaaactagataagaaacttcgggaaaatctacgagatgcaagaaacagcctttttacaggtgacccacttgggactggccagttcagcttccaaaggcccttattagtccttgtcgacagaaacattgatttggcgacgcctttacaccacacgtggacataccaagcgctggtacatgatgtgctggatttccacttaaacagagtaaatttggaagaatctgcaggagtggaaaattccccagctggtgctagaccaaagaggaaaaacaagaagtcctacgatttaactccagttgataaattttggcagaaacataaaggaagtccattcccagaagttgcagaatcagttcaacaagaactagaatcttaccgagcacaagaagatgaggttaaacgactaaagagcattatgggactagaaggagaggacgaaggagccatcagcatgctctctgataacactgctaagctcacatcagctgtcagttctttgccagaactccttgaaaaaaaaagacttattgatctccatacaaatgttgccactgctgttttagaacacataaaggcaagaaaactggatgtatattttgaatatgaagaaaaaataatgagcaagactactctggataagtccctcctagatgtcatatccgaccctgatgcaggaactccagaagataaaatgaggctgtttcttatctattacataagtgcacagcaagcgcctactgaggctgatttggagcagtataagaaggctttaacagatgcaggatgcagccttagccctttacaatatatcaaacagtggaaggcttttgccaagatggcctcaactcctgccagctatggtagcacaaccactaaaccaatgggtctcttatccagagtcatgaacacagggtcacaatttgtgatggaaggtgtgaagaacctggtattgaagcaacagaatctacctgtcactcgaattttagacaatctcatggagatgaagtcaaatcctgaaactgatgactatagatattttgatcccaagatgctgcggagcaatgacagctcagttcctaggaacaaaaatccattccaagaggccattgtctttgtggtaggaggaggcaactatattgaatatcagaaccttgttgactacataaaggcaaagcaaggaaagcatattttatatggctgcagtgagctttttaatgctacacagttcataaagcagctgtcacaacttggacaaaaataacacagaagaaccgtaatgggctaatgagtttggatagatgtaaaaggagccagatgtgtccttctccatagcagtgtcctaacagtgcacctgtcagaatcatccatttttaataaattctatacttcctatactgtaaactgatcaaaataataaactatttcag

SEQ ID NO: 2423 - DNA, 1952 bp, Cricetulus griseus
ctgagagacagctcagggaccaagagcctggaggaagtttgccttcaggtgaccgacttgctgccaggactcaggaaactccgaaacctacttcctgaacatggctgcctgctgctgtcccctggaaacttctggcagaatgactgggagcgattccatgctgaccctgacatcattgggactatccatcagcatgagcccaaaactctgcagacatcagccacactcaaagacctgctgtttggtgtgcctgggaagtacagtggggtgagcctctacacaaggaagaggacggtctcgtacaccatcaccctggtcttccagcgctaccatgccaagtttctgagcagcctacgtgcccggctcatgctcctgcaccctagccccaactgcagccttcgggccgagaacctggtccacgtgcacttcaaagaggagattggcattgcggagctcatccccctcgtgaccacctacattatcctgtttgcctacatctacttctccacacgtaagatcgacatggtcaagtctaagtggggactcgccctggcagctgtggtcacagtgcttagctctctgctcatgtctgtggggctctgcactctctttggcctgacacccacactcaatggcggtgagattttcccatacctggtggtggttattgggttagagaatgtgttggtgctcaccaagtcggccgcgccagggactctggctatgacttcagccgcctggtgcagcgtgtgtaccaggaggagggcctggccgctgtgcgcatgccggccctgcgcccgccctctccaggctccccgctgccccaggcttctcaagaagacggggctgcgcccgagaagggctcccctcctctggcctgggcccccagcacagccggctctatctggagcttggagctgcaaggcaacctcatcgtggttggacgaagcagcggccggctggaggtgtgggacgccattgagggggtgctctgctgcagcaacgaggaggtctcctcgggcatcacagcccttgtcttcctggacaggaggattgtagctgctcggcttaatggttcccttgatttcttttccctggagacccacacttccctcagccctctgcagttcagagggaccccagggcgaggcagttctccttcctcatctgtgtacagcagcagcaacacagtggcctgccatctgactcacacagtgccctgcgcacaccaaaaacccatcacagccctgagagctgctgccgggcgcctggtgacagggagccaagaccatactctaagagtcttccgactagaggactcgtgttgcctttttaccctgcagggccactcagggcaatcacaactgtgtacattgatcagaccatggtactggccagtggaggacaagatggagccatctgcctctgggatgtactcacaggtagccgggtcagccatacattcgctcaccgtggagatgtcacctccctcacctgtaccacttcctgtgtcattagcagtggtttggatgacctcatcaatatctgggaccgcagcacaggcatcaagctttactccattcagcaggatctgggctgtggtgcaagcttaggtgtcatctcagacaaccttctggtgactggcggccagggatgtgtgtccttttgggacctaaactacggggacctgttacagaccgtctacttgggcaagaacagtgaggcccagcctgcccggcagattctggtactggacaacgctgccattgtctgcaactttggcagtgagctcagcctagtgtatgtgccctctgtgctggagaaactggactgagggcaggttgaccatacaacccactcgcccccacccagagtggggcctgtgggcagcaattctttggacctagactggagacaagagctaaccacaaaaaaaaaaaaaaaaaaaaaaa

SEQ ID NO: 2424 - DNA, 1952 bp, Cricetulus griseus
  modified_base (1570)..(1570): a, c, t, g, unknown or other
  modified_base (1947)..(1947): a, c, t, g, unknown or other
gttgcacgggggttcagacgtgtacggagcgcctggagggacagcctggatacaggttcactgatggctcagttgggagcagttgtggctgtggcttccagtttcttttgtgcatctctcttctcttctgtgcacaagatagaagagggacatattggagtatattacagaggtggtgccctgctgacctccaccagtggccccggcttccatctcatgctcccattcatcacatcctataagtctgtacagaccactctccaaacagatgaagtgaagaatgtaccatgtgggaccagtggtggtgtgatgatctactttgatagaattgaagtggtgaacttcctggtcccaaatgcagtgtatgatatagtgaagaactatactgcagactatgacaaagccctcatcttcaacaagatccatcatgagctcaaccagttttgcagcgtgcatacacttcaggaagtctacatcgagctgtttgatcaaattgatgaaaacctcaagttggctttgcaacaggacctgacctccatggccccagggcttgttatccaggctgtacgagtgacaaagcccaatatacctgaggcaatccgcaggaactatgagctgatggaaagcgagaagacgaagcttctgattgcagcccagaaacagaaggtggtagaaaaggaggccgagacagagaggaagaaggcccttattgaggcagaaaaagtggctcaggttgcagaaatcacctatgggcagaaggtgatggaaaaggagacggagaagaagatttcagaaattgaagatgctgcatttctggcccgggagaaggcgaaggctgatgctgagtgctacactgctctgaaaatagcagaagcaaataagctcaagctgactccagaatatctgcagctgatgaagtacaaggccattgcttccaacagcaagatttactttggcaaagacatccccaacatgtttatggactcttcaggtagactgggcaagcagtttgaggggctgactgacaagctgggtttcagcttagaagatgagcccctagaggtgaccacaaaggataattgaacaaagagcctccgtaaagtcctgctgcaagtgctgcttcccacctttgaatgtcacttctttaacaaaacatgtgaatgttcccatgtcattaacacaaattcagtagatgttggtatctgtcccagcagtaaaatcatggaattcagctgtctttttagaatgggacacgtagcccatctgtctgtatgactttgttttttgtaatactagaaaatctgattgtaaagcatttaaatttgaaagatgtgaaacgtgataagcaggcagtaggcagtgaagtcatggctgctatttatatagagaacttctatcaaaataagtaacttgtttgtaaaattcagtttttgtaggatttccccaaggcacagccaccttggtaaatatttctcactcactaaacttcacagaagcaattcctattcagaacagtttttagtcgctttccaatatatggtcaatgtttgtaaggaagcataagtttaanaactttttataactaaaaatagttgtcttcagtgggtttctagccactgtttatttacttataaaagctgtaaagggcaatcatgtgtctttacttccattcctttttatctatacttgtgtgtaaactggtgattgaatagtcatagcaattttttcaatgtgccccaagggcattagtgagcctttatagctgaaaaatgattcttgttatattaatcattccatgaataataggttaattaccttgggttaataactccaggaattattttagacaacacaaaaggtctcatgtgaatatacttatatcttggatttaatttcagtcttgctaaataaaatagtcctttagtaaaacttaaaaaaaaaaaaaanaaaaa

SEQ ID NO: 2425 - DNA, 1951 bp, Cricetulus griseus
  modified_base (111)..(111): a, c, t, g, unknown or other
  modified_base (1943)..(1943): a, c, t, g, unknown or other
agcgtgtctgatctgggcagccactggtgccaggcctacaggcgagtctgtcactaaggacagtatgaatgctacctctactcctgctgcattgtcaccttccatgctaanaaccccatccaagattgaacccatgaaagcatttgactctcggttcacggagcggtccaaagccacaccaggtgctccttccttgaccaatgtgatcccaacagctgttgaaaggttgaaagatcagaaccttgtaaaagagctgaggcccgggacctcctggagagtagtagtgacagtgatgagaaggtccacttggtcaagccctcctcactatccaagcggaaacttgagcttgaggtagagacggtggaaaagaagaagaaaggtcgccctcggaaggattctcgtcttttgcccatgtctctgtctgtccagtctccagctgccctgactgcagagaaggaggccatgtgtctgtctgcaccagcacttgcactgaaccacactgtctgtttgggatgttcacaggcaggtggttgtggtgaaagaagagtctctacactccatcttgtcaggaagtgatatgacggtgtcacagatcttgctaacacagcatggaatcccagtgatgaacttgtctgatgggaaagcatactgctttaatccatctctctccacatggaacctggtttctgacaagcaagattcactggcccagtgtgcagacttcaggaacagcctgccatcccaggatgccatgctgtgttcaggaccgttagccataattcagggccgcacctccaactctggaaggcaagctgcccggctcttctccgtgcctcatgtggtacagcaggagactacactggcatacctagagaaccaggttgccgcagcacttaccctgcagtcaagccatgagtaccgccattggctcctcctctatgctcggtaccttgtgaatgaagggtttgaataccgactccgagaaatatgcaaggatttgctgggtccagttcactgctccactggaagccagtgggagtcaacagtagtgggtctgcggaagagagagctgctgaaggagctgctgccagtcatcgggcagaatctccggttccagcgtctctttactgagtgccaggaacagctggacatcctgagagacaagtagcctgccctggcttgccccagcttcggcaggtgctgggccacactcttgctattagcaggtgccaggggctagcccccacctgtcagggtggtagtggaaagacaacttggcagaaggtgtactgtgctgcaccagcacaggcccagttccctgggtggacataccctatgtcccaggcctgggatgattccaaaagaggccagcttgtccctccatataggcctagctgtggacctggggctgggactggagctctgcctcactgccttggggccagcagcaatcttctgagcctgtcttgagctcagccccaaggtagacactggctcctgccctggcaggtgctgtgctgcttccgctttgaggaatgagccatttgtgagaacaagagcctgggagcgttaggggtcatgcagtcagcagaaggacccgaagcctgtgtaaaagcaaagctgttctgacacatggactatttttgtactagaatttgctaacttggaatatggagtttctttggtcgatcaggatatccctataagttacttggacattggtcacttgtaggaaatttaaattctaattatgacagctacactgaaaaaaataattagtactgaaattaacttgtctatcttcattttggtttaatttttaaatgtttaagtaaaaagagacactttgtgtggtgggggggtggacgaaaaaggggcgggcaattttcttttctaagtgtaaaataaatgaacatgcattggataaacaaaaaaaaaaaaanaaaaaaaa

SEQ ID NO: 2426 - DNA, 1951 bp, Cricetulus griseus
  modified_base (150)..(150): a, c, t, g, unknown or other
gtggccacaccacagatcaacaggaacctcatccagaaggcctggctaccctcgaatctcagaaacaagaccgggactggtcaccaccacatgggagaggctgtacttcttcacccaagggcgggaacctcatgtgccagcccagggganccgtggctggaggcttgattcaggacctggacaactgctctgtgatggcagtggattgtgaagaccgacgatactgcttccagatctccacacccagtggaaaaccgggaataattctccaggcagagagcagaaaggaatacgaagagtggatatgtgcaataaaacaacatctccaggcagatctacctgacagacaacccagaggcagtagccatcaagctgaaccagacggctcttcaggcagtgactccaattacaagctttagggaaaaaacaagaaagcttttgctccagtcaaaacatgagaaattcagacacagagaatgacaagattgttcccaaagcagcaggcagagttcctgaaacagaggaactgattgcacctgggacacccattcagtttgatattgtacttcctgcaacagaattccttgaccagaacaggggcagcaggcgtaccaacccttttggcgagatggaggatgagtcattccctgaagcagaagattctcttttgcagcagatgttcatcgttcggtttttgggatcaatggcagttaagacagaccacactacagaagtgatttatgaagcaatgagacaagtactggctgctcgagctattcataacatcttccgaatgacggaatcccatctgatggttaccagtcaaactctgaggttgatagaccctcagactcaagtgtcaagggcctgttttgaacttaccagtgtcacacagtttgctgctcatcaagaaaacaaaagactggttggctttgtcatcagattaccggagtccacaggagaagagtccctgagcacgtacatttttgaaagcaactcagaaggcgaaaagatatgttatgctattaatttggggaaagaaattattgaggttcaaaaggatccagaagcactggctcaattaatgctgtctataccactaaccaatgatggaaagtatgtactgttaaacgatcaaccagatgacactggcggcagtccaagtgacaacagaggcgcagaatctgaagcataactcacttgggcatcgggggtcggagtgcttgggaagagagccacctccttaaggggttttcaacttctctgacgtacaggcacactgacctgatttcagaatgctgacagtcacatgtggaatgtacccttggatgccttgacacagacacttgggagggaaacagtaagaaatgggacacagctacaaatgcgactacaaatgctattgtggtaagtgctttgtggtaagtctttgtttcagactgtactgttaagcacccagaatgagaactataaaaatgcattgttcactttatttggatgacatcacttcagtctctacaatccttttttaaaatggtaaaaccctggattttcagtttgttaaatactaaatagttcctattaatatggtctatttttgtattttacatagtttttaagtgcctgtcattctaaagatgtatttataaccacttatctgcctggacctcatggcactgctgtgcacaactggacctttctgaagcatctttcattagaagcttcaggtcctcttagagtggctgctttttgtggctattcaccgtaaagaagggacagctctactagttcctgtttcttctgagccagaccttcctcaaaggaccaattactttcagaactcacttgaggctcagctgtcagtgggggctcgggggtgaagttcctgttttaccttgatgtttctggttcctagagtcccagaccaattgccaaccctgctaattatgaa

SEQ ID NO: 2427 - DNA, 1951 bp, Cricetulus griseus
gcccgatgtgcttgtgactgatttgaacccagaatattgagaactcacgtctgtcccccatctcagccgtgccgcccttagggcttagctgcagcgccgctagactgtctgactttgagagcaccatggaccagagtgggatggagattcctgtgactctcatcattaaagctccgaatcagaaatacagtgaccagactattagctgcttcttgaattggaccgtggggaaactaaaaacgcatctatctaacgtgtaccctagcaaaccactgacaaaggaccagagattggtgtattcgggaagattgcttcctgaccatctgcagctaaaagacattctcagaaaacaagatgagtatcacatggttcatctagtctgtactgctcggagtcctcccagttctccaaaatccagcgccagtagagaaggtcccgaagcactggcatccagctccatttctaattcagatcactcagattcaacaactccgtcccccagtcaagagagtttgtcattagttgctggttcttcagaaggactgaggcagcgtacccttccacaagcacaaactgatccagcccagagtcgccagtttccatatgtaatccaaggaaatgtggaccaccagtttcctgggcaagctgtgccacctgggttcccagtgtaccctgctctcagcccactgcagatgctgtggtggcagcagatgtatgctcaccagtattatatgcaatatcaagctgcagttacagctcaagccacatcaagtgccagtccagcccagcctgctgcatcaccgtctctgaatttggcacatgttcctggagaagagcctccaccagctcccaacctagtggcccaagaaaatgggcccatgaatgagaatgtccaaatgaatgcacagggtgggccagtgctcaacgaagaggacttcaaccgtgactggctagactgggtgtacacattctctcgagctgcagttctcctcagcattgtatacttctactcttcctttagtcggtttatcatggtaatgggagccatgctgctggtttatttacaccaggctggatggttccctttcaggcaagaaggtggtcagcaacaggttcctaacaatgttgacgttaacaacgatgggcagaatgcaaacaatctagaacttgaagaaatggagcgtcttatggatgatggacttgaagacgagagtggagaagatgcaggtgaagatgccagtgcagttcaaaggcccggcttgatggcttcagcttggtcttttatcacctaccttttttacttcactaataccagaggggcctccccaagttgccaattagacctgaaaaactgtgccagctgcaaaggagggtttgactttaggaaagtggtttaaataacagtgacaatttacaaaatttttttgtttgtttgtctaaaagatcctaacagaacatagcataaactagtactggtcttcagttttattcatttcaattatgtgtagtttaccaagcagaaccactatgtgttgtttctttaaagagctgctaaacctttaaatgtccacagctagacggccagcccttcagtgtgtactttgaataaatatatctattttctgtgaattatcctgaaagttttaaacagaaatgacctcatagtttttaataaagaagtttatttacctaaaacgtgctagtagcatcttgcccacccataaagcaataaacttctcaaaaatcttaattttgacatttgaataaatgatggaaactttctattttaaggacacatgtcacatcaggtggaattagtatcctaaaagaaaaaaaaaggcagctcttcattggaattaagtgatacaaaatgtttgatatggcagtacttttataaaatatgctggaaattgctccctgtaattttttaaataaaaagtcaattatgata

SEQ ID NO: 2428 - DNA, 1950 bp, Cricetulus griseus
acagagagaagccaccacttcaacaccattgctgacttctaaaatggactccatgccattgaagacccctgccagagcatctgagggaggatggttcattgacaaaaccccaggtggaaagaaagaaagtcttcccttggacctgtcagatgaccaaagcaattataagcagccagattctgagatacagaatttaaaagattcttctcttctggaaagtgataagaaaaggaagtaggccaaagggtaatggaaacaaaagacttgacttgccaattctgaaagtggctgcaccagagattgtgtcaggagtttcaggggagtctgagcaaaagctcagagatttatttgaccaagctgtgtcaaacgccccctgtattgttttcattgatgaaatcgatgctattacccccaaaagagaagttgcttcaaaagatatggaaagaagaattgtagcccagcttctaacctgcatggatgatctgaataatgtggcagctacagctcgagtgctagttgttggagctaccaaccgaccagactcgttggatcctgctctgaggcgtgcaggaaggtttgaccgagaaatatgcctgggtatcccagatgaggcttctagagaaagaatacttcaaactttgtgccggaaactgagacttccagaaacttttaatttttgtcacttagcacatctgacgcctggctttgttggtgctgatctgatggcactttgccgggaggcagccatgtgtgccgtcaatagagtcttgatgaagcaacaggagcagcagcagagtcctgagatggaaggtttgccccctaaaggagcccaggaggagaggctgggggctgagcccacttctgaaacacaggatgacttgcaaaggctcttgaggttgctaagagaccaagatcccctctcagaggaacagatgcaaggactatgcattgagttaaatgacttcattgttgctttagcagaagttcagccttctgctaaaagagaaggctttgtaactgtccctaatgtgacatgggccgatattggtgccctagaagatattagagaagagctcataatggcaatattggcaccagtacgcaacccagaccagttcagaactcttggtttggtgactcctgctggcatcctactagccggtcctcctggttgtgggaaaactctgctagcaaaggctgtggcaaatgagtctggactaaattttatatccgtaaaaggccctgaattattaaatatgtatgttggagaaagtgaacgtgctgtgcgacaggtttttcaacgggccaagaactcagcaccctgtgtgatattttttgatgaagtagatgctttatgtcctcggagatcagaccgagaaacaggtgctagtgtccgtgtggtgaatcagctgctgacggagatggatgggttggaaacacgtcagcaagtttttattttggctgccactaataggccagatatcattgaccctgccattctgcgcccaggccgcctggacaaaacactctttgtaggtttgccacccccagcagaccgtgttgccatattaaagactatcacaaaaaatggcaccaagccgccgctgggtgaagatgtaaatttggaagcaattgccaatgaccttcgttgtaattgctatacgggagcagacctctctgctttggtacgagaagcttctctctgtgccctgagacaagaaatgacaggacagaagaccacagttggagcaggtgagctcaaagtcagccataagcattttgaagaagctttcagaaaagtaaaaccgtctatatcagcaaaggatcaaatgatgtatgaggctctgcagcgctccctcagtcagtgacgcctgcagtgcctggcagggaggtgtcttccacatggagcccaccaagaatcacacttgctctgaaggacttactttcagc

SEQ ID NO: 2429 - DNA, 1950 bp, Cricetulus griseus
gccagctctgtccactgtgccacctaccagtctgaaccctgctgccagtggccgcaagtgtctcttcagggtagaagaagatgaagaggaggacgaggaggacaagaagcctgtgtccctgtccacacaggtggtgctgcgccggaagccgtcggtcactaaccgcctgacgtctcgaaagagtgccccagtgctcaaccagatctttgaagagggcgagtccgacgatgagttcgacatggacgagaacctgccgcccaagctgagccggctgaagatgaacattgcttcgccgggcacggtgcacaagcgctaccaccgcaggaaaagccagggccgggattccagctgcagcagctctgagaccagtgatgacgactctgagagccgcaggcggctggacaaggacggcggctttgcttactcatggcaccggcgtgacagcagcgaggggccaccgggcagtgagggcgatggcggcggccagagcaagcctagcagcggtggtgggggtggataagagcagcccaggcgagcagggcacgggcggtgggtggccagagtggctcaggcgggaccccgtcagatgcggcaggctcctcgaggcgctgcgcaggcccccgactctcctcatccttcccccggcctcggcctccgccgctccccgtggcgcggagcttgtgcagagcctcaaacttgtaagcctgtgcctaggctcgcagctgcatggcgccaagtatattctggacccgcagaaggccttgttctccagcgtgaaggtgcaggagaagtccacatggaagatgtgtatcaacgccccaccggtgatagggaaactccatgctctgaggcacaccgatgcccgagacagaaccaaagcaataacgtggtgatggccacaggcctgggaggagccacagccgctgcagccacccagggcctgtgcaccaagaacctagccacggtttgagcgcccacacctgtttgtcttaagcgatagtgtaaaaacagttggggctcttacatttttgttaacaaagattttcttgtttgaagtaggtgagatcagctacttaggtttgtgaggcagcttcccctgtagaattacaaggagacaatcttttgtgaggtgatgaggtgaactcttgtcttaactacttagtgtgtctgtctgaaaaattaaaaaaaaaaaaaaaaaaaaaaaaaaaggtgcagctgaccatgtcattcagagcgggcagggcacaggccagtcaccccattcagtgctctctctgctactttagggttagtgtatattactcagaacttcccagtagaccctgatacactaagtaaaatgaaacttaagatactccctagacctaggctaacgctcgtgctttaagctacagtcttgttcagcgtgacgtttatagagttgaaagcgatgaagacagatgtgtgggtgaagccatagaacacatttgcttgaaattcttaagcagggatcttcaaagggccagaaaccagtgtggctctcagagacagtgagagccatgtctgtgtgagcgaggagagatgtttataaggggcattgcaataaactttgtcgcagtccgttttccgagtaatgtacatactcttgtgtggtcacgtctagcctcagactagcacctctgagctcagccgtgtgcgtttggtctccagtggttttatattcaggtgtatatacggtgctcactttagatcagcagtgttggccatttatgctgcagagctgtatcatagccttattagttgtgtgtggttggtgacccttttgggtacataaacgtctgtacacccctagaggagcaagctaccagtctttctccttgtgttaacattgacaggtatgtgacagatgggaagtaacccagtaataaagtgatatactggtgttcagcaatagaaaaaaaaaaaaaaaaa

SEQ ID NO: 2430 - DNA, 1949 bp, Cricetulus griseus
gaatgtaatttcttcacccaaattggaattgagagacactagcccaagtgctgcaagttccacaccaggaaaattccagagaacccgtgttcctcgagctgagtctggtgacagcattagttctgaggatcgtgatcttctctatagcattgatgcatataggtctcaaagattcaaagagacagagcgcccttccataaagcaagtgattgttcgaaaagaagatgttgcttcaaaattgggtgaaaagaataatgtcttttcttgccaagttaatatcaaacaaaaaatgcaggagctcaacaatgacataaatctgcagcagacagtgatctatcaggccagccaggccctgaactgttgtgttgatgaagaacatggaaaagggtctctggaggaagctgaagcagaaagacttcttctgattgcaactgagaagagagcacttctgattgatgaactgaataagctgaagaatgaagggcctcagaggaagaataaggctgctgtcatatctcagagtgaatttgttccatccaaagggtcagtcactttgtcagagatttgcttgcctctgaaagcagattttgtctgcagcaccgctcagaaaccagatgcatcaaattactactacttaattatgctaaaagctggagctgaacatatggtcgccacaccattagcaagtacctcaaactctcttaatggtgacgctctgacatttaccactacatttactctgcatgacgtttccaatgactttgaaataaatgttgaagtttacagcttggtacaaaagaaagattcgtcaggccctgataaaaagaagaaagcatcaaagtccaaggctattactccaaagagacttctcacatctataacttcaaaaagcaaccttcattcttcagttatggccagtccaggaggtctcagtgctgtgcgtaccagcaactttgcccttgttggatctcacacactctcattatcttctgtcggagacactaagtttgttttggacaaggtaccttttttatctcctttggaaggtcatatctgtttaaaaatcagctgtcaagtgaattcaagtgttgaggagaaaggcttcctaaccatatttgaagatgttagtggctttggtgcctggcatcgaagatggtgtgttctctctggaaactgtatctcctactggacttacccagatgatgagaggcgaaagaatcctgtaggaaggataaatctggccaattgtatcagtcatcaggtagaaccagccaacagagaattttgtgcaagacgcaacactctggaattaatcactgtccgaccacaaagagaggacgaccgagagactcttgtcagccaatgcagggacacactctgtgttaccaagaactggctctctgcagatactaaagaggagcgggatctctggatgcagaaactcaaccaggtcattgttgatattcgcctctggcagcctgatgcttgctacaaacccgttggaaagtcttaaactgtgggaacttcttaagcatggagaggctttgctagctgtgtcaaaaagtgtcctaagaagacattattaggcgcatcagatttgcaagttgtattttatgctttaaagataaaagggcctgtgcaaatattcactacatattattcagtatttatatcttttctatgtaaaacttcaaccagtttctcttgcattcataagtgtttgacagccaaccttcttgcaatttagaaatattgaaatgcatggcttcaatttttaaatatgtttgaatttcttctgtgactgttattgatactttcatttataaacactaaattctatcacctgccattatatttcttactcatctatatgtggtttttcttatgtatattataaaaatatttatgactgactgcctacataaataaataattgtaaatggtcaaaa

SEQ ID NO: 2431 - DNA, 1948 bp, Cricetulus griseus
  modified_base (1114)..(1114): a, c, t, g, unknown or other
  modified_base (1410)..(1410): a, c, t, g, unknown or other
gattgatgaactcccagagggagctgtgaagcctccagccaacaagtatcctatctctttttggtacccatgaaactgcatttctaggtcctaaagaccttttcccatataaggaatacaaagacaagtttggaaaagtcaaacaaacggaaaggatttaatgaaggattatgggaaattgaaaataacccaggagtgaaatttactgggtaccagacaattcagcaacagagctcttcagaaactgagggagaaggtggaaatactgcagatgcaagcagtgaggaagaaggtgatagagtagaagatggaaaaggcaaaaggaagaatgaaaaaggaggctcaaaacggaaaaagtcctacacttcaaagaagtcttctaaacagtcccggaaatctccagatgaagatgataaagattgcaaagaagaggaaaacaaaagcagctctgagggcggagacgccggcaatgacacaagaaacacgacttcagacttgcagaaagctggtgaagggcagttccaagtatggaaaattcattaagagacagggtgccacatcaggttttatctttaaaaggtacttttttaatttaaaatattttattctaaaattaatgacatccatcaaaagaccttttattgatcacaataaaacatatggagaatgtagataacattttaaattggaacatataacagctgttttgaattattttatatgcatagtgaatatggttagtcacatctgagtagtttcatttttatgctatttgtaggcactagagttgtaattttcacacataatatgtgcaatgttaaaatccatggtcacattcacagaaaatttttgatatatttcattaaacaagctgtttctcaacttcaatttcccttcaaaaatgagaatatacccatacaataccagtattttcattcacacatacattgtagagaaagaatctgtattcttgtgagcatcatggaagggaatgaagtagaacaccagttccatgtaacagggtcagagagaacatgaggtatattattccacctttcatctgcctttattcttatgaagaactcgggattgtaggtacagcggtaggccaagngctgaggaagaactccatatgctataaaactattagaaaagtaatacaggcatagcaggattaaaaaccaagaaaatattttctcagaaaacccgtgttactataaaatgtaaactccaagtctacatttttatgtttggctgaaattcaatttacacatgaataaagactgagaatttaaatgtaataagtagtaaattattagtatactatgatcaaagtgaaagataaagagtactatagtctaaagaggtggaagtaacaaggaatgaatcactaaaggaatttgttttaangtatttgttaccttacatttcctccttgagaataaagggcactttggagactgccttgaggagctgcggttgtggacagtctgggaactctgaacaaaaacttggctcctgacactatttttctctaggtcctactttaaatagctgtttatctgaattaataacaattttcttctggactagaggccagttttgaactctggttttgtcagatttgtgagtttagtgattctatccctatagattatgtgtacatcataaaacaaccagaaaaataccatccatagtttccaagaataacatgagcagttgtgtgtatttgtgtagacaagcctgcctgaaaggtcagtgattctgtgggccctttcctgcactaaacagtgcagctaatacctcattttcatgaacagtaaggtcatggcaacattaaaaaaatgatttgtgtccttagattagattgtacgcctactgggcagatactgtgtctaatgttttgtgtgacacctatcacattgttagagttcaataaacgttcaac

SEQ ID NO: 2432 - DNA, 1948 bp, Cricetulus griseus
ctggtgaactctctggctgaagtcattctgaatggtgatttatctgagacatacacaaagcctgcgcaggatgttcccagaagttctgccaagcccagcatccggtgcttcattaagcccactgagacactcgagaggtcccttgagatgaacaagcacaagggcaagaaacggatgcaaaagagacccaactacaaaaacgttggggaagaggaggacgaggagagagggccagctgaagatgcccaggaagacgctgagaaggctaaagagattgagatggtgatcatggagcgtagcaagctctcagagctggccactgccggggcctcggtgcgggagcagaacaccaccgatgaggagaagagcgctgccacaggctcagagagtacacagttgagcagacccttcctggatatggtataccatgccctggacagccctgatgacgactatcatgccctcttcgtgctctgcctcctgtacgccatgtctcataacaaaggcatggatcctagaaaaaactaaagcgaatccagctcccagtaccaagtgcagcctataagggagaagtagatttttttggtacatgtttgaagatgagtacaggagcatgacaataaagcccatgaatgtggaatatctcatgatggatgcttccatcctcctgcctccaacgggcactccactgactggcattgactttgtgaagcggctgccatgtggtgatgtggagaagacacggcgggccatccgggtattcttcatgctgcgttccctgtcactgcagctgcgtggagaacctgagacccagttgccactgactcgggaggaggacctgatcaaaacagatgatgtcttggatctgaataacagtgacttgattgcatgcacagtcatcaccaaggacggcggcttggtccagcgcttcctggctgtggatatttaccagatgagcctggtggagcctgatgtatccaggcttggctggggagtggtcaagttcgcaggccttctgcaggacatgcaggtgacaggagtggaggatgacagccgtgccctgaatatcaccatccacaaacctgcctccagcccacactctaagcccttccccatcctgcaggccaccttcgtgttctctgatcatatccgctgcatcattgccaagcagcgcctggccaagggccgcatccaggctaggcgtatgaagatgcagaggatagccgcccttctggacctcccaatccagcctacaactgaagtcctaggatttggtctcagcaactcctcctcctcctcccagcacctgcctttccgtttctatgaccagtgccgccgaggcagcagtgaccccacagtgcagcgctctgtgtttgcatccgtagacaaggtgccaggctttgctgtggcccaatgcataaaccagcatagctctccgtccttgtcatcaccatcaccaccatctgccagtgggagccccggcggcagtgggagcaccagccactatgactcagggggctcttcctccacaccctcagcagcacagagcccagcagatgcccccacaactccagaacagcctcagcctcaccttctagaccagtcagtgattgtgaatgaaatggatgtcaactccaagcccagcaagaacttggccagaagctctgaggtggagaccatgcacctggcccccagcctcctccccgcccagcagcccaccatctccttgctctatgaggacactgccgacacactgagtgttgagtcactgacccttgtgcccccagtcgatccccacagcctccgagccctcactggcatcccccagaactccacactggctgcagcaggcacagagactccagatgaagatactgtatacccagagtctgcgagccccacagaacactgagtggacacccaaggatctccctttgtgtgtgcagcc

SEQ ID NO: 2433 - DNA, 1948 bp, Cricetulus griseus
tgccagcaaaaagtttgttcacagagacttagctgcaaggaactgcatgttggatgaaaaattcactgtcaaggttgctgattttggtcttgccagagacgtgtatgataaagaatactatagtgtgcacaacaaaaccggtgccaaactgcccgtgaagtggatggctttggagagtctgcaaacacagaagtttaccaccaaatcagatgtgatacagtgaaccttgaagatttctcatagaaaactcagaagatatggactcttgcaagatgaatatggtggccccagcaggctgctgttggaattccagtgttttcaacatattctgttgtgtggtgatcatgaacattttccatttttgatgttgtctacctatcaggcaaacatttcccttttaaacttttatatacacattcctttggttggatgactatccacagacaatgtacttatttttcaagatagcatgacatgaggtgtgtttataaattttctagggtattttgtgttattgtacatagatgatgatgggaagattttttcaaaaacaaacacaaaaaactttgttacagtaaaatatttatcatgtaaatctcaacagtttagccaggagctagggctcacacctataatcccagcatttggaaagctgaggcagacacaccaccacaaggtcgaaaccaaccatggccacataatggtttagaggccagaatgggcaagagtgtgagacccaatctcagcaaacaaaaattcaactatttgagaaaaattttgttctgctctagtgaatgtggacacgtaattttttatctgttttttaaatggcaactctgaaaataagtaacttgtggtgataaatctttttaaagacaactcagtatgtttttaaaggacaataaaactgaaaggtgcactatttccagtcatggcttgtgtgtagacaaagaaagggtcaatggactggaaatatttgccctttctcaggtggaggcttctacactaaaacaattggaggcaacacttttggggagcctcattttgcattaggacgtggtttaggctaaataaaagcatattttcaaaacagacaaaaagccacttgaaaaatctttaatgaatagtttctctggacaggacttttgccatgttttgctctgtggaattctgtgcttactactgtatagtgcatgtggcttaggctactctagctggttttgtcaatgtaaacattgaaagtattatatttttatagaaatgtttatttttaatgctataagaacatttttgttaggccacagaaatactgcactgtgaacgtttaagaagaggtatgtgagagttggatcgacagcagcgtgattttttaaatggctgtaaattgtgataaggaagcatactgattgccagtacaccccaccctcattacatcatcaggacttgaagccaagggttaatagagcacactatgacatgggtgtgctcttctgaaacccaatagttgaatttggctgttgctgaaggaaaatgatggcaatcaaaaggtctttgatggtggtggaacataatcagaacacataaggaactgtagtacagatttatttcaaatcaaatagtactgcttgatctgctctgtagaaagaagtagctgtctctatgaggtcaagaaagcgaatccaccaagaacagaaagagctgtggaaggcacccagacctgtatatacatgctcaagaacgctgcaatgtgaaaatcatgttttctatttatgaaccttcctagggtaatgtgtctggacagattgtgcaagtaaatcattcttgtcagaattagaaacttgtcactgcctatacctgcagttgagctgaatggtactttgtattttaataattgttctgataaatcatacagttaaaataaagtgacgtaacatcttgtctactgtga

SEQ ID NO: 2434 - DNA, 1948 bp, Cricetulus griseus
agaagaaagctggaggagctgggagcttgatgagcagcagcggaagcgtgaaggatgatgatttgagaagatcagtgagctggggccggcaacggtggagtggtattcaaggtctcccataagccgtctggcctagttatggccaggaagctaattcatctggagatcaaacccgcaatccggaaccagatcatccgggagctgcaggtgctgcatgagtgcaactccccatacatcgtgggcttctatggggctttctacagtgacggcgagatcagcatctgcatggaacacatggatggtgggtccttggatcaagttctgaagaaagctggaagaattcctgagcaaattttaggaaaagttagcattgctgtgataaaaggcctgacatatcttcgggagaagcacaagattatgcacagagatgtcaagccttccaatattctagtaaactcccgtggagaaatcaaactctgtgattttggggtcagcgggcaactaattgactccatggccaactcctttgtaggcacaagatcatacatgtcgcccgagagactccaggggactcactactccgtgcagtcggacatctggagcatggggctctctctggtggagatggcagttgggagataccccatccctcctcctgatgccaaggaactggagctgctgtttggatgccaggtggagggagatgcagccgaaacgccacccaggccgaggacccctgggaggccccttagctcatatggaatggacagccgacctcccatggcaatttttgagttgttggattatatagtcaatgagcctcctccaaaattgcccagtggagtattcagtctggagtttcaagattttgtgaataaatgcttaataaagaaccctgcagagagagcagatctaaagcagcttctggttcacgctttcatcaagagatctgatgccgaggaagtagacttcgcaggttggctctgctccaccattgggcttaaccagcccagcacaccaacccatgccgctagcatctgagcctttgggaagcagcaaagaggaaatcctctgcccagtggcatgccatgttgctttcaggcctctcccatgcttgtctctgttcagacgtgcatctcatctgtgacaaaggatgaagaacacagcatgtgccaaattgtacttgtgtgtgtcatttttaatatcactgtctttatcactatggttactcccctaagtgattggctttgtgcttggggctatatgtatgttgatcaaacacataccaggctgaactatagtgaaaccctggtgaccagggtggtcattcttattgatgtttgcactgctgttcatgttccgtgactcactggctggctgcctctattgtcaggattctcggacccttggtacttcactcttgctggtgacctctcagtctgaagagagggagcttggtgagacccttcacaggcagtgcatgggaagcatgctttgctgctactgaaatgagcatcagattgtgtacatcatgttatttttatttttgcttttgatatagaactcagcaattcccatacaaaaaaaactaaccagagcccatcactgccatgatagctggggcttcagtctgtctactgtggtgattttttagacttctggttgtatttctatatttatttttaaatatactgtgtggggtacttagtgtggtgtatgtctcttaagtttggattagtgtttctaaataggtggagttattttgaatgtcacaaatggattatggcatcagtatgtgtcagagttctatctttcctccaatccaagcaccaatgctattgtaaacaacgtgtatagtgcctacaaactgtatgaaaaccctttaaccattttaatccagatgtttatcaatctaatctcttattctaataaaaatactatggaagtt

SEQ ID NO: 2435 - DNA, 1948 bp, Cricetulus griseus
atcagcttcacagtctgggatgtggtggccaggacaaaatccgacctttgtggcgacattacttccagaacactcaaggtctgattttcgtggttgacagtaatgacagagaacgcgtcaatgaggcacgggaagaactaaccagaatgttagcagaagatgagctcagagatgcagttttgttggtgtttgtaaacaaacaggatcttcctaatgccatgaatgcagcagagatcacagacaagctcggcttacattcccttcgccagagaaactggtacattcaggctacctgtgccaccagtggagatgggctttacgaaggcctggactggctctccaaccagctcaaaaaccagaagtgatcagaagcaacccattccctgtgcattgtggcaaagccagctggctgttcctgtgtgcatgtgagcgtgtgaggagcccatggggctgtgcagctgggagtgggggcagctttctcacaccgtgccttatacatgctatacgagaaccagtattccattttaagaaaaccagtgttacattttgaatgctaccttccatttcactagctttgatggtcattttgctgaggccccctgggtgtgatagctagagcagctccaggctagaaaagagagctggagccagacaggtcctattgttgcaatcctgggtctggcatctccacacaccctgaatcctgttggatttcagtgtccttttgtaaaaagaaaggaaggaactgtcattctttcccatcgtgccaaagctagcagctcacttgtactttaaagacatcctcaagaagagaagatatgtgattaccacaggttgaagaggctcagggagggtgcttcctccgagttctgttagttcagaccgacttgtttagcttgttttagtcaaaggaatcggtgacctttttcattagagtatcagactgtaacactaaagaagtttccagcctgtccctggaagttgccagatggagaccctgtgggctggtggcccaacaggaggccaggactcttccccgaagccgcctggtccacagtgaagtgtaggctggctggaggaaacgaagtgaggtggctcttgtgttctggcatcactgtctcaggccctagaggctgctgctcccacttccctgctctgtgctgaatggtcttcacacgaagcagacagctgctcctgggtggagtcatcactgtgtccagttgtcctagtctactgtaggcttttggttagtatctgtttgcagaactgcacacctatgagttctgagagtttgtgagaaagttatgaggttaatgtaggggatgaagttcccagtgaccccctggtactccctgggttggtgctaaacttcgctctgacaagcatcttttacctagacggctctggtgcatggactcctcctcaatggcagtagtgtctgaagagctgtttggaaatgtgtgctgtgttgtcctgcagatagtgatagataggaaggtccggagaggagctgggctcagcccatgccctctggccacacaactcttggccacatttgtacctaggcccttctgcttaaccctttaaaccccctctcaaaaaaatcttgattcattttaggaaggggactacaagctgaatttcaaggaacacgataagccttgttcattggtaacgaagttatactaggaaaacaaaaaatctttgccattgtaaatgtgggctgtgatgattttctctaaaaatcatcttaaagaatgttcattgcaataccggcgactaagtccagttgtgatttttaaccacagataaactcctgagaaatgttgaaattgtacacctcccatcggcagggagtttcttgccctttgtaattatgcttagtgtgcctggcctggtgctaggctgcagtaaatgtggtgattggttagacaataaagaacttact

SEQ ID NO: 2436 - DNA, 1947 bp, Cricetulus griseus
gatggagacagctccgaagccgggcaggggtggcccacccaaggaggacaagccccaggccaagaggaagaagccgcggcggtactgggaggaggaggccacccccgccgcagccggcgcctctccggggccgccccggaagaaggcgaggactcgggagccgcgacccccgaggtcaaagagcgcgcaccccgccaagaagtctcggctccgccagaagccgcgggccccgaaggacgccccagacccgaagaggaggccgcagcggaccctgtctggggcccaggacccgttcccgggacccgcccccgcccccgtggagggcgcccggaagttctgccgaattgacaagtccagaaccctcccgcattcgaagccgaaaacccggagcaaacttgagacggctgaagcgcaggaggaagaggcgagcgtcagagctgcccgcgcagagctgctgctaaccgaggaacctgggttcctggaaggagaagatggggaagacacagcaaagatactgcagacggacatcgtgggggctgtggacattgcaagtgctgccaagcactttgacctgaatctgaggcagtttgggccctacagactgaactactctaggacagggagacacctggcattaggaggtcgtcggggtcatgtggctgccctcgattgggtgacaaagaagctcatgtgtgagatcaacgtcatggaagccgtgcaggacatccacttcctccattctgaggctctgctcgctgtcgctcagaaccgctggctttacatctatgataaccagggcatcgagctccattgcatccgccgctgcgaccgagtgactcggcttgagtttctcccctttcacttcctcctggccacctgttcagagacggggtttctgacctacctggacgtgtctgtggggaagatcgtgacagctctcaatgcgcgggctggacggctcagcgtcatggcgcagaacccgtacaacgctgtcatccacctcggacacagtaatggcaccgtgtctttgtggagcccagctgtgaaagagccactggcaaagattctgtgtcaccgtggtgcagtgcgggctgtggcagtggattccacaggcacgtacatggccacttccggcctggaccaccagctgaaaatctttgacttgcgagggacattccagcccctgagtgcccggaccctgccccagggagcaggacatgtggccttctcccagcggggactgttagccgcgggaatgggtgatgtggtcaacatatgggcagggcagggcaaggccagctcaccctccctggagcagccctacctcacccaccggctctcaggccgagtgcacggactccaattctgcccctttgaagatgtgctgggggtggggcacagtggcggcatcaccagcatgctggtccctgggtccgctgagcccaactttgatggtttggagaataacccatacaggagccggaagcagcgccaggaatgggaggtgaaggccctgctggaaaaggttcctgcagagctcatctgtttggacccccgagccctggcagaggtagatgtggtctctctggagcagcagaagaaggagcggatagagagactgggctatgacccggatgccaaggctcccttccaacccaaggcaaagcagaagggccgaagctccacagcgagcctggtgaagaggaaaaagaaggtcatggaccaggagcacagggacaaagtcaggcagagccttgagcagcagcagcaacagaagcaagagaccaccaagcccccgagagcccgcccatctgcactggatagatttgtacgatgagccagaggcggcactccccaagatgactcagaggggtcagaaaaaaaaaaaaaaaaaaaaaaaaaaaaaaaaaaaaaaaaaaaaaaaaaaaaaaaaaaaaaaaaaaaaaa

SEQ ID NO: 2437 - DNA, 1947 bp, Cricetulus griseus
gctgaacactatcaatggaattgaaatagaagattctgaagctgtgggaatctccagcattatcagcaatctgataactgtgttccctcggaatgttttaactgccatccccagtgaacttttctcctcctttgttaactgcctcacacatctcacttgttcttttgggcgaagtgctgcgttggaagaagtgcttgacaaggatgacatggtatacatggaagcatatgataaattgctggagtcctggctaactttggtccaagatgacaagcatttccataaaggcttttttactcagcatgctgttcaagttttcaattcctatattcagtgccaccttgctgctccggatggcacaagaaatttgactgccaatggtgtggcctctcgtgaggaagaagaaataagcgaacttcaagaagatgatcgagatcagttttctgatcaactagccagtgtgggaatgttaggaagaattgccgccgaacactgtatgcctcttctgacaagtttattagaagaaagggtgacaagactccatggtcagttacagtatgatcagataagtttgccattgagcacagccttggagcagatacagagggttcccagtggattatcggctacctcttacagaaagtcatcagcaatctgtcagtctggagtagtgagcaagaccttgcaaatgacactgtacagctccttgtcacattggtcgaaagaagagaaagggcaaacttagttattcaatgtgaaaactggtggaacctggcgaagcagtttgcaagccgaagcccacctcttaatttcttgtcgagtccagtgcagaggacactgatgaaggctctggtcttaggaggttttgcacatatggacacagaaaccaagcagcagtattggacggaggtccttcagcctcttcagcagcgcttcctgagagtgataaaccaagagaacttccagcagatgtgtcagcaggaggatgttaagcaggagatcactgccacgctcgaggccttgtgtggcattgctgaggccacccaggtcgacaatgtagccattctttttaattttttaatggacttccttaacaattgcattgggttaatggaagtatacaaaaatactccagaaactgtcaatctcattatagaagtttttgttgaagttgcacataaacagatatgctatcttggagagtccaaagctatgcatttatatgaagcctgccttactttgttgcaagtatattctaagaataatctagggcggcaaaggatagatgttacagcggaagaagagcagtaccaggacctgcttctcattatggagcttctcactaaccttctctccaaggagttcatagacttcagtgacacagatgaagtatttagaggacatgagccaggacaagcagcaggcagatctgtgtcagcagctgatgtcgttttatatggagtaaacctaattctgcccttaatgtcacaagatcttttgaagtttccaaccctttgtaatcaatactacaaattgatcacatttatttgtgagatttttcctgaaaaaataccccagcttcctgaagatctgtttaagagtctgatgtattccctagaactaggaatgacatcaatgagttcagaagtatgccagctctgcctcgaggccttgacaccattagccgaacagtgtgctaaagcacaagaaacggattcaccactttttctagcaactcggcacttccttaagcttggtttttgatatgctggtattacaaaagcacaacacggagatgactactgcagccggagaagcgttctacacattagtgtgtttgcatcaggccgagtattctgaactggttgagacattactgtcaagtcagcaagcccattatttaccagagattagcagatgccttcaacaagctcactgcaagcagca

SEQ ID NO: 2438 - DNA, 1947 bp, Cricetulus griseus
gacggaagatggcggcggccacttcaggagttggccgctgcctaagcaaggtaggagcctagccggcgcccacctccagctcgagtaagggtagctgtacgactgcggccatttatggatgaagcaacaaaagcaaatgaacccccctgtgtacgaggtatagacagctgctctcttgaggtggccaactggaggaaataccaggagacactcaaatatcagtttgatgccttctatggggagaagagcactcaacaggacatctatgtaggttcagtacagcccatcctaaggcatttgctggaagggcagaatgccagtgtgcttgcctatgggcctactggggcagggaagacacacacaatgctaggcagcccggaacagcctggagtaattcccagggctctcatggacctcctgcagcttacaagggaagaaagcgcagagggccgaccctgggacctttctgtcactatgtcatatttagagatctaccaggaaaaggtattagacctcttggatcctgcatcaggagacctagcgatccgagaagactgtcgaggaaacatcctgattcctggcctcacacagaagcccatcactagcttctccgagtttgagcagcacttcctgccagccagtagaaatcgagttgtaggagccacccggcttaaccagcgctcttcccgcagtcatgcagtacttctggtcaaggtggatcagcgtgaacgtctggctccatttcgccagcgggaaggaaaactctaccttattgatttggctggctcagaggacaaccgtcgcacaggcaaccagggcattcggctcaaagagagtggagccatcaatacctccctcttcgtactgggcaaagtggtggatgcattaaaccagggcctccctcgaataccatacagggacagcaagcttactcgcttattgcaggactctctgggtggctcagctcatagcatcatcattgccaacattgctccggaaagacgtttttacctggatacagtctcagcattgaactttactgctaggtccaaggaggtgattaaccggcctttcaccaatgagagtctacagtctcacgccttggcacctgttaagctgtctcagaaagaattgctaggcccatcagaggcaaagaaagccaaaggccctgaagaagaaccaactgggagccctgagtctatagcagctccagcctctgcctcccagaaactaagcgttttacagaagctaagcaatatggacccagccatgttggagaacctcctgaacttggatcgtttgctgggctcccaggggagccaagggacacctttactgaataccccaaagcgagaacgaatggtactcattaagacagtggaggaaaaagacttggagattgagagacttaagatgaagcaaaaagaactagaggccaaggtgctggcccaagaggcactggatccaaaggagaaagagaacacgtgtctccagccccttccctcttgtacaggcacagtggcaaagcctctgaaaaaggctgtggtgatgcccctgcaactgattcagaagcagacagagtcgaagatccatatcctgaagagaggccacaaaagaaagccggagccatccgatgtgtccgagcctgtggaaaaggctgaggactgctgggagttacagattagcccagagttactggcacatgggcgcaaaagattattggatctgctgaatgaaggctcagctcgggatctgcgcagcctgcaacgcattggccagaagaaggcccaactcatcatgggctggagggagctccacggccccttcagcaaggtggaggacttggaacaggtggaaggcatctctggaaagcaggtggagtctttcctgaaggcgaacctcttgagcttggctgcggaccagcactccgctccctcctgacctacc

SEQ ID NO: 2439 - DNA, 1947 bp, Cricetulus griseus
  modified_base (1210)..(1210): a, c, t, g, unknown or other
tgagatacttactgtttctactgagtcctaaacttcagcaagtgaatttacagtggactgttccaaaccttactcaccaagaattaaaaatggcatttcagatagagataagtagaattaatacatccaacatcgtctgggtggagaattacagcaccactgtgaagtggaaccaacttctgcattggaactggaagtctgagatccccttggaatgtgtaacacatttcataagaatcagggctatggtagatgatgccaagtaccttccacagaattcttggagcaactggagttcctggaaagaagttagtgtacaagtttcagttgcacctaatacattattaatatttcctgataataagctgttggaagaaggctccaatgtcaccatctgtttgtctgtatggacagtatctatataatgtatcctgtatgttgacaaaagaaccaatccatggagaacaacttgattcacacgtgtcattaataaaatagatgctagaaaagccaacatgacctggaaggtgctctccctggaaacaactacatacttttgtgtcagattgaactccaacatgaaagggaagtgatacatgagcacaatgtttctgtccacatgagtgccagctacctcttcagtgatctggaagccagacacaaagtacaaggctcgagtgcgctgtgcggatgccaaccacttctggaaatggagtgactgggctcaaaaggagttctgcacacctgaggctggaatttttgaaaaatctatgcaacagaaagctcagttactagagaaacaaacgggatacacccaggaactggctcctctggagaacccggaagtgaccattaataactttacttccaactccttcattctgagctggcccagttatgacagcgacttccagtctgcttttatagaagggtaccacgtgtacttgaaatccaaggagatgcagtgccacccaaaaaggaaaaggatgactcttccagattattgggtgctctgtgaatatgaaatcaaagaccccgagcaaaaggcattcactgtggaaaaccttcgaccagaatcccactatgagtttctcgtcactccgtacaccagtgctggccaaggccccaatgaaacattcacaaaggtcatgactccggatgagaactccaacatgctgctgaagatcatattaccccatgactctctgtntcttgctctatcatcagtctgctactggaaaagtcctgacattccgaatccatacaagaagcagcatcctgtcactagataaaaataccaagaagaatagcccacttaataatgaatgtcaaagactgcattccagatgtccttgaagttataaacaaggtagaaggccccaagacacagtgcatagtctctgggaacccacacaatgaagatgtatccatgaagcctccctcctcagtgccaacagaagatggttcctctggctctgtgcccttcttcttcttcgagaattttacttatgatcagtcagcttttgattctggttcccatggcctcattccaggacccctaaaagacaccccatgtcagcttggactattgaccccacctgagaagttactaaatgttctagaaaaagactacatgaagtccctggcagaaagcccaactgaagaaactagcttgatttatgtgtctcagctggcttcacccatgggtggagacaaggacagtcttgccacaaatccacccatgccagggcactgttcagaatacaaaatgcaaatggcagtgccggggagactcccatcacttgctctgagtgagaataacagcctgacctcagagatacttttaggtcaaggtgaacagtaaagttaactaccaccaacccaattcatacactacaggcacttttggggatgtgactggtaccatgccatcaccatgtgccctgg

SEQ ID NO: 2440 - DNA, 1946 bp, Cricetulus griseus
gcctcggcctccagcttccgcgccttcgagatcctgcacctgcacctggacctgcgggccgaattcgggcctccgggaccgggaaccgggaaggccgcgggttgagcggcaccgtggtgctggagctgcgctgcttgctgcccgagggcgcctcggagctgcggcttgactcacacagctgcctggaggtgacggcggcgacgctgcggcgggggcagcccgaagaccagcagccactctcggagaccgtgccgtttcacacgcagcccttctcgcactatggccaggccttgtgcgtggccttcccgcagccctgccgccccgccgagcgcttccaactggagctcacataccgcgtcggggaaggacccggggtttgctggttggcccctgagcagacagcaggaaagaagaaaccatttgtctacacccagggtcaggcagtgttaaaccgagcctttttcccttgctttgatactcctgcagtgaaatgcacgtattcagctcttattgaggtcccagatggcttcacagctgtgatgagcgcgagcacttgggagaagagaggtccaaataagttctccttccagatgtgccaacccatcccctcctatctgatagctttggccattggagatctggcttcagctgaggttggacccaggagccgggtgtgggcagagccttgcctaattgaagctgccaaggaggagtacaatggggtgattgaagaatttctggcaacgggagagaagcttttcggaccctatgtttggggaaggtatgatttgctcttcatgccaccatcctttccatttggaggaatggagaatccttgtttgacctttgtcaccccctgcttactggcaggggaccgctccttagctgatgtcatcattcatgagatctcccacagttggtttgggaacctggtcaccaatgccaactggggggagttctggctcaatgaaggcttcaccatgtatgcccaaaggaggatctctaccatcctgttcggagctgcttacacgtgcttggaggctgcgacagggcgagctctgttgaggcaacacatggacgtctctggagaggaaaacccgctcaacaagctgcgggtgaagattgaaccaggcgtggaccccgatgacacctacaatgagaccccctacgagaaaggttactgctttgtctcatacctggcccacctggtgggtgaccaggatcagtttgacaattttctcaaggcctatgtggatgagtttaaattccaaagtatcatggctgaagattttctggaattctacctggaatatttccctgagctaaagaagaagagagtagattccattccaggttttgagtttgatcgatggctgaacacccctggctggcccccctacctcccggacctctcgcctggggactcactcatgaagccagctgaagagctggcggagctgtgggtgacctcagagctagacatgcaagccattgaggctgtatccatctctacctggaagacctatcagctcgtctacttcctagataagatcctgcagaagtcccctctcccacccgggaatgtgaaaaaacttggagagacatacccaaagatttcaaatgcccggaatgctgagttacggctcagatggggccaaatcatccttaagaatgaccaccaagaagagttctggaaagtgaaggaattcctccagagccagggaaagcagaagtacactctgccactgtaccatgccatgatgaggggcagcgaaatggcccagaccctcgccaaggacatcttttcagccactgcttcccagctccacagcaacgtggtcaactacgtccagcagatcctggtgcccaagggcagttagaggctcgtgtgggtggtctctgccacctgggcctcacaggctttctgaaaaaattatcccttccca

SEQ ID NO: 2441 - DNA, 1946 bp, Cricetulus griseus
tggctttaaaagttttaaaagaaatcttaaggcatcaaccggcaagattcaaaaactatgcagagctgactgtcatgaaaacattggaagcacataaagaccctcataaagaggtggtgaggtctgctgaggaagctgcctctgtgttggctacttcaattagtccagaacagtgcatcaaagtgctttgtccaatcatacaaactagctgactacccaattaatctggctgcaatcaaaatagcaaacaaaagtgatagagagagtatctaaggaaacccttaatgtgctcttaccggagatcatgccaggtctaatccagggctacgataattcagaaagcagtgtccggaaagcttgtgtcttctgcctggtagctgttcatgcagtgattggtgatgaactcaagccacacctcagtcaactcactggcagtaaaatgaagctgctgaacctttacatcaaacgtgcacagacaggctctgcaggagctgatcccactactgatgtttctggacaaagttagtgctgcaggtctcgtcgaaaaaaaaacaacccccccccctcctcaaaaaaagaaaaactctcaagtacagcttttggactaagctaccgtttcccagttctatctagttttctgttttgttctgttctgtattttctgtgacagagggtgtcctcagtctgcatgtaactttatgatagttattccaaattcaaggaaaagcagtattaacgtcagttgatcagtacaaaggtaaatttcacgtttttacttctttgtcttcccattaacctttgccagtgttatgattgtataaattttttaaaatgctggttaaacaggaatgcttcaggctttaaaagtttaacaggactaaacttttttttttttgttccgtatcatgtcctatgctagagatgctgacaatgatgtgagacacagcagggctacttggaactcctgccaggctctgtcgatgtggctgtggtacacgtcattaactgcaacttctttgggatgacctcaaagagaaatgtcatagaatcagccagttctgaaagactgatggtgtctgttggttcttgatgttgccacctttatttaaagccgtgccccttctctgaccccgtaagaaagctgcaccaaatcacctgcctgggtttccatggaaattactaaaatggaaggttttgttgcagagctttttggtttatctttgttgtgaatgatgctttttgttgtatttattaatatcgaattcacttatgcatagacttgataatggaaacagatgaaaaaatcaagtgcatgtgtgtctttgactgtcttctgtttctcaattgataaactaattattgacatgggagtcaaccaggacctgtttgatgagtggtggaacctggtttcctttgaccatgaaattgtcttacgaaaaaaaaccctggtcctgatgagagagaagatggtgccgaggctcgtgtcagtgggctcacactttctacctcttcagggctgacactttaccaaaccgctgcctgcagggttttggaaaactactttaaggtgatgttttgttaccttctaattattttttttaatcacctctgctaaagctattatttttatgtgcagccaactttcaaatattaccagtttgggtaaaacaccaaattaggtaatttggaaccaggataccatttatttctcatcttgacttttttttttttttttttttttttttaaatcctaacataaggtgaatttgactggaaagcaaatggctgttaaggaagcaatttgctattgttacagagttatctatactttgttcaactgaaaacaatgtagaaatgtatgtaaagaacttaagccaagagaactggatggatggttggttgtaggctttttcccttcctttgtttttattctgttctagcagcaa

SEQ ID NO: 2442 - DNA, 1946 bp, Cricetulus griseus
  modified_base (476)..(476): a, c, t, g, unknown or other
atgtaggaatagatatactaagtgtcccctcaccatccttctgccttcatcacccgtggcctgaccatttccaacatcaaccggcacagcagcacctggccatcctcaggccatccagacctttcaagttcccaagaagctacgcagccctgctagccgactggcctgtggtggtcctgggcatgtgcactctgctcatcgtggtctgcgccctggtgggagttctagtcccggagctgcccgacttctctgacccactgctgggttttgaaccaagaggaactgcaataggccaaaggctggtcacgtggaataacatgatgaaaaatcaggatacaaagcaacattagcaaattatccttataagtatgcagaagagcaagccaaaagccaccgggatgacagatggtctgacgatcatcatgacagagagagaagagaagtggactgggacttccagaaagacagctttttcngtgatgctccaagtgatggggccgtggtgctggaggttccacgagtaccttcctcttcaccttggcttacgagaagatgcaacagttctacaaggaggtggactcatggatctccagcgagctaagttcagcgcctgagggcctcagccatggctggtttgtcagcaacctggagttctacgacctgcaggacagcctgtccgatggcaccctcattgccatggggctctcggtggccgttgcatttagtgtgatgctgctgaccacttggaatatcatcctaagcctttatgccatcatctccatagctggaaccatatttgtcacagtcgggtccctcgtcctgctgggctgggagctgaatgtgttggagtctgtcaccatctcggttgcagttggcttgtctgtggactttgctgtccactacggggtggcatatcgcttggctccagatcccgaccgtgaaggcaaacggtcctggcgtacacccagctgggcaccttcatgatgctcgtcatgtgtatcagctgggccttcgccaccttcttcttccaatgcatgtgccggtgccttgggccacaaggcacctgtggccagattcctttacctaaaaagctccagtgcggtgccttttcccacaccttgtctgcaagtcctggtgacaggggaccaagcaaaacacacactgccaattcttaccgtgtagatgccagggaccccagatccgaactggagcatgagttttatgagttacaacccctggcatctcacagctgcagtgcctcagagaagaacactttcgatgagccacacatctgctccgcattttccaatggccaagcaaagactctagggttgcctgtgcctctaacctacaacagtgaactcaccaagagccccagaaatgaaccaggctcagccttgttacagccttgtctggagcagggtgccatgtgtcacttctctctcaatcagagatgtaagcatggatgagcatcttcccaggacagcagagcctctgctgcctgtcagcaggagccctgaggctttccaaagagcttgttgccatcctgagaataaccaaaggggactctgcaaaagtagagacacaggggacaccgagggcaatggagggaccaaaaccaaggtctctagtttaccaaaccaggctgacaaggcagagaagaaagtggagccaagccagctgcagactgatgaaaatgtgaactcagaacatttaaaccataatgaaccaaaatttatattcagccatttactaggagagactgactgcaggtcctgcccgagcagtccacaaagttgcagaagtattgtgagattgaagtgtgattccacagactgcacgatgccaaaccttgaagccagtgtgcctgctgtaccagcacactcagaactgtctggaagaaagcttgttaataaaacgctataataaatctagcattgcattca

SEQ ID NO: 2443 - DNA, 1946 bp, Cricetulus griseus
gggcatctctcccaaggcttgtggattgctggctttctgcagataccctaaagatgcagcggcttttggctccagcaaggagggtcttgcaagtgaaaagagtgatgcaggatgcttggatcacacctgctcacccgctctcagcagcccagcagaggttttttacaatccctcctgctcccctggccaaaacagacacttggccaaaagatgttggcatccttgccctggaggtctactttccagcccaatatgtggaccaaactgacctggagaagttcaacaatgtggaagccgggaagtatacagtgggcttgggccagacccgtatgggcttctgttcagtccaggaggacatcaactcactgtgtctaacagtggtgcagaggctgatggagcgcacaaagctgccatgggacgctgtgggccgcctagaagtgggcaccgagaccatcattgacaaatccaaggctgtcaagacagtgctcatggaactctttcaggattcaggcaacactgacattgaaggcatagataccaccaacgcctgctacggtggcaccgcctccctcttcaatgctgccaactggatggaatccagctactgggatggtcgctatgccctggtggtctgtggtgatattgcagtctacccagtaggcaacgccaggcccacaggtggcgccggggctgtggcaatgctgattggacccaaggctcctctagtcctggagcaagggctgaggggaacccacatggagaacgcatatgacttctacaaaccaaacttgtcctcggagtatccactagtggacgggaagctctcaatccagtgctacatgcgggccttggatcggtgctatgcagcctaccgcaagaaaatccagaatcagtggaagcgagagggaaacaacaagcctttcaccctcgatgatgtgcaatacatgatcttccacacacccttttgcaagatggtccagaaatccctggctcgactgatgttcaatgacttcctgtcgtccagcagtgacgcacggaatgatttatacaaggggctggaggccttcaggggtctaaagctggaagaaacctacaccaacaaagatgtagacaaggctattttgaaggcctccctggacatgttcaacaagaaaaccaaggcttccctttacctgtccacgaacaatgggaacatgtacacctcatccctctatgggtgcctggcctcacttctctcccaccactctgcccaagaattggctggctccaggattggtgctttctcgtatggctcaggcttagcagcgagtttcttttcatttcgagtgtccaaggatgcctctccaggttcccctctggaggagctggtgtctagtgtgtcagatctgcccaagcgtctagactcccggaggcgcatgacccctgaggaattcacagaaataatgaaccaaagagagcagttctaccataaggtgaacttctcaccacctggtgacacaagaaacctcttcccaggtacttggtatctggaacgagtggatgagatgcatcgccgaaagtatgcccggcgtcccgtctagaggaggccagtatccacgcaacagttcctggggaacaaatctgagcagagctgctgcccaaacagtgtctgcttcaaattccacccaaagctataaataatgaatagatgcagtagccccatagaatctgctctgcagtgaagggccgccacctcagtgggttcttcgggactctcccggatgcaatcactgcccaggctcatgctactgtggaccagagctcccctgtgaagagggagatggaagggaggggaatcgctgatccccagggaagagaagattctcccacatccagacagacctaccatttgttacagcttattcggacttcgctgctgttatattttatgctcctttcttaaagtt

SEQ ID NO: 2444 - DNA, 1946 bp, Cricetulus griseus
cattatcgactgtcagttctattatgtttggctggacccatgtgaccttgcttattgtcgtaacccagtcacatcttgttatccataacttgtttgaaggaatgatatggtttattttgttcccatttcatgtgtcatctgcaatgatattatggcctatatgtttggctttttctttggtcggaccccactcattaagctctctccgaagaagacctgggaaggcttcattgggggcttctttgccactgtggtgtttggccttctgctctcctatgtgatgtctgggtacagatgctttgtctgtcctgtggaatacaacaatgacaccaacagcttcactgtggactgtgagccatctgacctattccgcctgcaggagtataacattcctggagtgatccagtcagttgttggctggaaaacagtgaggatgtaccctttccagatccacagcattgccctctccacctttgcttcgctcatcggtccatttggagggttcttcgcaagtggattcaaacgagcctttaaaatcaaagactttgccaataccattcctggtcacggaggcatcatggatcgctttgactgccagtacctgatggccacctttgtcaatgtgtacattgccagctttattaggggcccaaacccaagcaaactgatccagcagtttctgacgttgcggccagatcagcagctccacatcttcaacacactcaagtctcacctgactgacaagggcattctgacctctgccttggaagatgagtagtgtccaaccaggaccaggagagccagagcaggactgagtgagggcaggtcaccaaggccagcccagatgctgtgacttagataatgaaaagcttcaactcacaatctgtatatacagtctgtttataatgtgggctgtgagtaagttatagctttgagttgcaaagaagtcgcagggaagaaccatttgggtttcttaaatacaggtattgaacaacatgaaagacagtgttgcccagctcagggggtccacttgggggggttctaactcccatccatctagttgttcctgggctgtatgagaggtcatgcattcatctgtgtctgactagtagagagactgtcccacctggagcaatgggggctgcctgctgtaagagggagggagggaggctcactgatcacatgagcatcttgtccaagccaaaaccctgcagagggcacatgagctttgcttgtagtttgctttcaccattacagactgaaagaagatttcagacttcatttttctcagaaagcatgaagaatttatgaagtctggaaagagaaacccacagtgtaatatttttagtgtatgcagtagaatgtactgtcacaaccttccccaccaccccaggctccagggcttctggaggaggtcctgtagaccacatctttcagagctgaggccttcacatatgtgctgtgggtttgctgctgctgagttcttccggggactcctgagaggtggggagcagagggcttcggttcacacaccctttgcctggaagcccacttgtgttgctgctgtgttgtgtatatagtactctcgaggtgaatgtatgtctgtgtgtttgaaagtcacttgtttcctatatgagttcggtcatcctgttgctattgagtcatgtcatgggccaacccaaaaggaaatacactcagagatctgcctgcctctgcttcccaagtgctgggattaatgtgtgtgtgtgtgtgtgtgtgtgtgtgcgcgcgcgcgcgctcagtgttttcaccgtgtcctacctttctctctctctgcacttaggattggtgtagaacacatgtagattccttttcagcacagtataagaatgtgatatattgtatattggaaagtatttaccttatttatatacctgaatgctcctattaaataaaataaacatata

SEQ ID NO: 2445 - DNA, 1946 bp, Cricetulus griseus
tgggccatgttcctgtctacactttcaattccctatttcttgttcaacttggccatggctacagcaagacttctcatccactcatctattcccttagccacggctttttcttcttagtcttccagcttggaattctaggttttgtaccaacgtatgttgtgttagcatacacactgcccccagcctcacggttcattgttatacttgaacagattcgtatggtaatgaaggctcactcgtttgtcagagagaatgtacctagagtactaaatgccgccaaggaaaaatcaagcacagttccagtacccacagtcaaccagtacctgtacttcctgtttgctcctacacttatttaccgtgacagctatccgaggactcctactgtaagatggggctatgttgctgtccagtttttacaggtttttggctgtctgttttatgtgtactacattctttgagagactctgtgccccattgttccggaatatcaaacaggagccccttcagcgctcgtgttctggtcctgtgtgtgtttaacttccatcttgccaggtgtactgatgctgttccttacgttctttgcctttttgcactgctggctcaatgcctttgctgagatgctacgctttggtgacaggattgttttataaggactggtggaactctacatcctactccaactactacaggacctggaatgtggtggtccatgattggctctactattatgcttacaaggacctcctctggtgctctttgtactcttcatgttctttggaatggcttttaactttattgttaacgacagccggaaaaggccaatatggaacattatggtatgggcttctctctttctgggccatggagtcattctgtgcttttattctcaagaatggtatgcccgccagcactgtcctctgaaaaatcccacctttctggattatgtccggccacgttcctggacttgtcagtacgtgttttagaagcctgggctctgcctactttcttgccgatgaggaatggatgttcttcctgattctggccagccgtcttcagcagttactgaataatggcgattttgggggggttatctcagctcaagctttggtagttttatctgtttgtttccttaattctgtccaaggagagactaagcatatcttgaccatgaattagccaaaacacttaggaagaaatcatttcagtacctgtgtcttagaagtttttcgtgcacactgttaggtgagctagctaactgtggcaactggggagaaataaattttgttatttctagtagaaagagagaaaatacctatttcccaaagataatcttgttatgctttctgctcatatcttttgttgctattttgttttgtctttgtttctgtgctgggaatggaatccagggccttgcccagtggcagcacactgagccacacaccagtcccatgttgtatttttctgaaagttctggactattctttttcttttttgtaacttttctgtttgttgtgattttttaaattgtgtgtgttgttttgttttgttttgttttcttttgttttaagacaagagtctcttctctgtagcttttgctgtcgtggaactcactgtgtagaccaggctggcttcgaactcagatctgcctgccttacctcctgggtgctgggattaaagacgtccctgtctgtggagtgctatgtgtgcattttcagaaaagggtgttactctgtaacggttctcaatgttgcatttgttgcatgatcaaggctgcgctttcccctcacccattcttttttgagacaagctctttctctgctgcccaagctggcatggacctcacatcctcctgactcagcctttttaggtgccagagtttacaaacctgtgctgcctcacccaacaaggcctttcattaggaattggtttcttcccggagattttag

SEQ ID NO: 2446 - DNA, 1946 bp, Cricetulus griseus
tgggaaacaaattcacgttgctttcttgaaagagtctgacaagttgttgttaattggcctgcctgctgaagaagttcctcttccccagctaaggaacatgatagaagacactgcccaaaccctgaagttcatgtatggttccttagatagtgccttttgccaggttgagaacactcctcatttggatcatttcttcagcttgttctttcaacgagctcttcaacctgacaagttgcatctcagcgccagccttagtgctcaacagtatgatgcagccagtgccgtgcttttggacagcctccctggagttcgttggctcacacttccacaggaactcaaggtggagttggacacagtgttgagtgaccttgaggctgccgacttcgaagaactgtccgaggattactatgacatgagacggctgtacacaattttggggtcttctctgttttacaagggttacttggtgtgcagccatctacctaaggatgatattgttgagattgctgcatactgtcgccagtactgcctactgcctttagcagcaaagcaaagaattggccagctgataatatggagagaggtcttcccacagcaccacctccagcctcctgcagactcagacaccgaggtcttccaggaacctaaagggagatatttcttactaattgtcggactgcgacattatatgttgtctgtgctgttagaagctggaggctgtacatctaaagctactgggaatcctggtccagattgtatttatgtagatcaggctagaacaactcttcatcagctggaaggaatagactcccgcatagaggaacggctagcctcatctcccgggctctgcctgtcttgtgctgactggttccttgctgcaccacatgaaaaggcagataatttgaccacttcacctatcctcaatagactgcaggggcccaccaaaacagtgacctctcccaacatgcagaagaacctttttcagtgactattccttcaagacacggaagcccagtccctccaggagtagtggaggatatgagcctggtgaaggtggagaagggtgttgttcctagcccacacactaccccagctgcagtacggaagcaaagagaatccaatggttcagaggacagcatggccttgcttaagctcgctagaaagaaatcgacgctcccaaatccatttcatttgggaaattcgaaaaaagaactttcaagacaaagaattggaagtctataacacgatgaaattgacctctggtcctgagaatacactcttccattatgttgccttagaaacagtgcagggcatcttcatcactcccacccatgaagaggtggctcagctaggcggtttccgccatgctcagctaattaagaatttccatcagtgttgtctctctatccgtgcaattttccaacagacattgaaggaagagaataggaaagtactgcgtggtgaagatcattctgagtctgcagattcaatgtcttctctgaccgctgtgaaagaacatggtgtgctatttgaatgttcacctgaaaactggactgatcagaagaaaacgccaccagttatggcatactgggtggtggggaggctcttccttcaccccaaacctcaagaactgtatgtctgttttcacgactcagtcacagaaattgccattgaaatggcgtttaaattgttctttggattaacattgtagctgtgtttgtaggattcaaagcagcacacaaagggatcgtgggacagtgtcagaatggctgaaatcaacatatagaaataaggctcagcttagtcatctttcactattgaacttatctttttaaacgctgagatgccatgctcttgggttgttgcatcaattcatatgtagtattatagaagacatttgagtagatatttgatcaaaatacagagacaagattgctaatttattg

SEQ ID NO: 2447 - DNA, 1945 bp, Cricetulus griseus
gaattggagaaggaggattcgggagattcgagaggttcgggctttccgatatcaggagaggttcaaacatattcttgtggatggtgacactttgagttaccatggaaattctggtgaagttggctgctatgtggcgtctcgacccctgaccaaggacagcaattattttgaggtatccattgtggacagtggcgtccggggcacgattgctgtggggctggtccctcagtactacagcttggatcaccagcctggctggttgcctgactctgtagcctaccatgctgatgatggcaagctgtacaatggccgagctaaggggcgccagtttggctccaagtgcaattctggggaccggattggctgtggcattgagcctgtgtcctttgatgtgcagactgcccagatcttctttaccaaaaatgggaaaaggtgggctccaccatcatgcccatgtccccagatgggctcttcccagcagttggtatgcattccctgggtgaggaggtgaggctgcatctcaacgctgagctgggccgtgaggatgacagcgtcatgatggtggacagttatgaagatgaatggggccggctgcatgatgtcagagtctgtgggactctgctggaatacttggggaagggcaagagtatcgtggatgtggggctggcccaggcccggcacccactcagcacccgtagccattacttcgaggtggagattgtggaccctggagagaaatgctacatcgccttgggactggccaggaaggattatcccaagaacaggcaccctggctggagccgagggtctgtggcataccatgcagatgatgggaagatcttccatggcagtggtgtgggggacccctttgggccacgctgttacaaaggggacattatgggctgtggaatcatgttccctcgggactacatcctggacagtgagggggacagtgatgacagttgtgacacagtgatcttgtcaccaactgcccgggctgtccggaatgtccgaaatgtcatgtacctgcaccaggaaggtgaagaagaagaggaggaagaggaggaggaagaggaagaggagatagagcaagagcatgagggcaagaaggtggtggttttctttacccggaatggcaagatcattgggaagaaggatgccgttgtgccttctggaggcttctttcccaccattggaatgctcagttgtggggagaaggtgaaagtagacctgcacccattaagtggctagaggcttcacctgcacatctgcccctttccttctgcaccagttgctgctgtctccccctggctgggctagggggcctgtcttggctatctctcttttcactggctgctgtcctaaatcacatctagggtcttcattctttcctttgagagacaaccccgcccccacacccacaccaaagcatcacataaagtcgagcctggctccctacctgcccacagagtgctcagtatctgtgtgagagaaaggccagtctgtgtggcagtgggggactgtagcctttgctcccatctccttgtctgcactcttcctcaaggcacccctagccctggctcacctagatgcggctaaggcaccagggcatgtgttttgttgtggctgttgctcagagctgcaacttggccccttatgtcccttcccctgcccactccctgaccctgtgccccagcttgctgcttgtgccagttgactgtttttgcttcagtgtatgattctagcgtctacatagaccccgctcttggtctcagtttgcacagtgggtaggacttggggggtgctattgtgctgctggggctcctctgcccctccttccggcccctgcactatgatgtatgaaatgtatgtacagaccagagatgtttatacacccaataaagatggagtttccatatttatcaggaaaaaaaaaaaaaaaaaa

SEQ ID NO: 2448 - DNA, 1945 bp, Cricetulus griseus
gccatggggctcctgtcggacccggtgcgccggcgcgcgctcgcccgcttcgtcttgcgcctcaacactccgctctgcgtgctgagctacgtggctggcatcacctggtttttggcgctggctttcccgcccctaacccagcgcacttacatgtctgagaacgccatgggctccaccatggtggaggagcagtttgtaggtggagaccgcgctcgaagctttgcccgggacttcgctgcacaccgtaggaaagtcgggggctctgccagtggccttggctggagcggtcgatgcgatccgtagggctggaggtctacactcagagcttctcccgcaaactgccctttccggatgagacccacgagcgctatatggtgtcaggtaccaatgtgtatggcatcctgcgggccccacgtgctgccagcaccgagtctctggtacttactgtaccctgtggtccagactctacaaatagccaggctgtggggctgctgttggcacttgctgcccatttccgagggcagatttactgggccaaagatataatcttcctggtaacagagcatgatcttgtgggcactgaggcttggcttgaagcctaccatgacattaatgttacaggcatacagtcatctcccctgcagggaagggctggagccattcaggcagctgtggccctggagctgagcagtgatgtggtcaccagtcttgatgtgactgtagagggactcaatggtcagctgcccaaccttgatctgctgaacctcttccagacattctgccagaaaggggggctgttatgcacactccagggcaagctgcagcctcaggactggacatcactcgaaggaccattgcagggtctgcagacactgctactgatggttctgaggcaggcctctggccagccccatggcccccatggtcttttcttgcgctatcgagtggaagccctaaccctgcgaggcatcaatagcttccgccagtacaagtacgatttggtggcagtgggcaaggctctggagggcatgttccgcaagctcaaccacctcctggagcgcctacaccagtcattcttcttctacctgctgccggccctctcccgctttgtctccattgggctctacatgcctgccatgggcttcttgctcctggtccttggacttaaggccctggagctgtggatgcagttacatgaggctggagtgagccctgaggaggccgggaaggctcctggccctgggtctccacccttggcaacacagggcgtgggcctggcctcacttatggcacccctactgatctctcaggccatgggtttggccctctacgtcttgcccgtgctgggccaacatgtagctgctcagcattttccagtgggtgaagctgaggctgtcgtgttgacactgctagctatttatgtggctggcctagcccttccacacaacacccaccgagtggtcggctcacaggtcccagacagaggctggatggcgttgaagctggtggccctgatctacctagctctgcagctgggttgcattgctctcactaacttctccctgggcttcctgctggctgctaccatggtacctgctgctgcactcaccaagccccatggaccccggccactctatgctgtcctgttgatgatgacaagcccagcagtcacactccttggtagcctgttcctgtggcgggagctgcaggaagtaccactatctctggcggagggctggcagctcttcctgacagcactggcccagggcgtgctggaacaccacacctatggtgccctcctcttcccaatactggccttgggtctatatccctgctggctgcttttctggaatgttcttttctggaagtaagatctctggggcagggatccctgagcctctgttctacctcctcctgggaaataaacaagatcttttgtttctgt

SEQ ID NO: 2449 - DNA, 1945 bp, Cricetulus griseus
aacctcatcattttgaagagtgctacgttttgccagtcacctcttgcaactgcgtgccaaagaaggactccatgaaagatgacagaagaagtcattgtcatagccaagtgggactacacggcccagcaggaccaggagctcgacatcaggaagaacgagagactgtggctgctggatgactccaagacctggtggcgggtgaggaacgcagccaacgagggacggctacccacgcactgatgcggagtacccggccgaactggcagcggtgctgaccgcatctatgacctcaacatccccgccttcgtcaagttcgcctacgtagctgaacgagaggatgagctttccctggtgaagggctcccgtgtcacagtcatggaaaaatgcagcgatggctggtggcgcggcagcttcaatgggcagatcggctggttcccctccaactacgtgctggaggaggcagatgaagctgccgctgaggcccccagcttcctgagccttcgtcgcggtgccgctctgagcaatgggcaaggagcacgggttctgcacgtggtgcagacgctgtaccccttcagctccgtcactgaggaggagcttagctttgagaagggggagaccatggaggtgattgagaagcctgagaacgaccctgagtggtggaaatgcaaaaatgcccggggccaggtgggcctggtccccaagaactatgtggtggtcctcagtgatgggcctgcaatgcaccccgcgcacaccccacagatcagctacaccgggccctcagccagcgggcgattcgctggtcgtgagtggtactatggcaacgtgacacggcaccaggccgagtgcgcgctcaatgagcggggcgtcgagggcgactttctcattagggacagcgagtcctcgcccagtgacttctctgtgtctctcaaagcgtcagggaggaacaagcacttcaaggtgcagctggtggacagcgtctactgcattgggcagcggcggttccatagcatggacgagcttgtggagcactacaagaaggcccccatcttcaccagcgagcacggggagaaactctacctcgtccgggccctgcagtgaaggcagccgtcagcctttccatgccctgcccgctgtgggcctcgctgccacctccgcctcctagagcccagcggtgccagccacctccacccacgcagcctggatcacctccgtggcccagtgtgttctctgcagccctgttggtccaaacatagctacccaggccctcatagccatgcccgcggccaccaccttctggattttttattttatttttactttttttggctccaggctctgcaggagtccaagaatgtgcggatagcaatactggaaaccctggggagatggtggtgagggaactgcccagtgcctttgaggctgtgcttgcaataaaagagggttttgagaaagaaactcgggtaatgtcccccaggtgtgccatccacatagtgctctttccctcttgccctccggcttgtttgaatttcacaattatgtatttaattctcaaagtaatatgtatctgtagccgtttgttgacactaataacagatgattaaggaaaacagctgatctctcgggttggggagctaccaatactttatacatacacactatatatatatatatattatatatatatataatatatgtatttgctttacagggaaatttttcagggtttacaaaagagtatgtgattggtagtaacagaatgtttatgaagaaattgcattttctttttattctttacatttgaacttctttatagtttgactatagagtcttgagatggcacattcctacgattgaagaaggggtcttgagatcccctaaacttgcatacccagttttttgaatattgtaataaaaaaaagtatcatgaacaaaaaaaaaaaaaaaa

SEQ ID NO: 2450 - DNA, 1945 bp, Cricetulus griseus
tgagcattcaaaatagcaaccagatatgtccttggacaacatcaagatgtcatccagtgacctgctggaaaagaaagaatctagacagtggagggctttgggtaaggtgtccttgtgtttccacaaaagtcatggatttgtcatcctcaaaagggtaggtacacagggcccaaccgtgctgagtacaatgaggctctcttggaggaggggaaggaatgatgcacagactgagacacagtcgagtggtgaagctgctgggcgtcatcctagaagaagggaattactcgctggtgatggagtacatggagaagggcaacctgatgcacgtgctgaaggccgagatcagtgtcccgctttctgtaaaaggaaggataatttcggagaccatcgaaggaatgtgctacttacatgacaaaggtgtaagacatggagtatactgactaaagagaaacacaacaagcagaaggaagtgaacagcatctctaagaatggaggcaccctctactacatggcgcctgaacacctgagtgacatcaatgcaaagcccacagagaagtcagatgtgtacagttttggcattgtactttgggcaatatttgcaaataaggagccctacgagatggcattgaagaagaatttaggcctttttacttaagtcaatttgaagaatatgtagaagaagatgtggcaagtttaaagaaaaagtatccagatcaaagcacagttttgaagaggatgtattctctccagtatgattgtgtacccttacctccaagcaggtcaaattcagaacagcctggttcgctgcatagctcccagggattccagatggggcctgtggaggagtcctggttttcttcctctccagagcaaccgcaggaagagaatgagcgcagtgtgcaaagctaaacttcaagaggaagccagttaccatgcttttggaagattcacagagaaacaggcaaaaccgcagcccaagcagaatgtggcttacagcagagaggaagaaaggaaacgaagggtctcccatgacccctttgcacagcagagacctcgtaagaatgttcagagtgcagaggccaagggtttttctgatcccagtaccgccagtcatggaaatacagcacacccgctgtcagggccagccagccatggaacaatggattttatagtcagcatgggtttggaacttcaggtgcaggagtttggtatgggccaaatccaagccaaatgtttaatacttataaaactcccgtacctgagaccaatctacctggaagcacacccaccattccattcatctccttgccactagcagatgagtccataaaatgtactatatataatagttctggtgttcagattggaaactacaattatatggatcttggactgagttcacaagtaccagacaacatgtgcaaagaagagtcagctcccaagtaccaagccatctttgataacaccagtagtctgactgataaacacctgaaccctgtcagggaaaacctgggaaagcagtggaaaaactgtgcccgaaagctgggcttcactgagtctcagattgatgaaattgaccacgactatgaacgagatgggttgaaagaaaaggtttaccagatgctccagaagtggctgatgcgggaaggcaccaagggggccacagtgggaaagttggcccgggcacttgaccagtgttacaggatagacctgctgaaccacttgatacaggccagccagagcaaagcttgagcgggctctggcagtgggaactagactgtacactaggtgcacaagccctgtttgctccctggccttcagaactcgatctcagttcaagccccgcatctgcagtggcatgcattttggaactggagaatggaaagagaagtctgcagcccacagtggttcttcagaaagtacaagcatgcagattgccgaatga

SEQ ID NO: 2451 - DNA, 1944 bp, Cricetulus griseus
  modified_base (204)..(204): a, c, t, g, unknown or other
gaggaagccagttcatcatgtcggccgcagctgtagatacagttaatgccacacccatgtcagggtcaaaagagatgagtttggaggagccaaagaagatgaccagagaggactggaaggaaaaagaaggagctagaagaacagaagaaaattgggcaatgcacctgcagaagttgatgaagagggaaaagacatccaaccctnatattcctcaatacatttcttcggttccgaggtgtgaaggagaattctataactaccaagtaccgcaaaggggcatgtgaaaattgtggggccatgacacacaaaaagaaagagtgctttgagcggccaaggcgggtgagagctaaatttaacgaagcactaacatcgctccagatgagcacatccagcctcagctgatgtttgactatgatgggaagagggaccggtggaacggctataatccagaggagcacatgaaaatcgttgaggaatatgccaaagttgacctggcaaaacgaactttgaaagctcagaaattgcaagaagagttagcctctggaaaattaatgggaacaagctaattctccaaaacatcagtggggagaagaggaacccaattctcagatggaaaaggatcataacagtgaagatgaagatgaagacaaatacgcggatgatatcgacatgccggggcagaattttgactcaaagaggcgcattactgttcggaatctcaggattcgagaagatatcgcaaaatatttgcgaaatttagatccaaattctgcctattatgatccaaaaactagagcgatgagagagaatccttatgccaatgcaggaaagaatccagatgaagtgagttatgctggagataactttgttagatacacaggagacaccatttcaatggctcaaacacaattgttcgcttgggaagcctatgacaagggatctgaagtacatctccaggcagatcctacaaaattagagctgctgtataagtccttcaaagttaaaaaagaagacttcaaggagcagcagaaggaaagcatcctggaaaagtatggtggccaagaacacttggatgctcctccagctgagctgctgttggcccagacagaagactatgtggagtactccaggcatggaacagttattaaaggtcaggagcgggctgtggcctgctccaagtatgaggaagatgtgaagatccacaaccacacgcacatctggggatcttactggaaagacggccggtggggatacaaatgttgccactcattcttcaagtattcctattgtactggagaagctgggaaggagagtgttaactcagaggaatgtattataaatgatgcaactggcgaagaatctgtaaagaaacctcaaaccctcatggaactgcatcaggaaaaactaaaagaggagaagaagaagaaaaagaagaagaagaaacaccggaagagcagttccgacagcgacgatgaggacaggaagcaagagaaactgaaaaaggcactgaatgcagaggaggcccgccttctccatgtcaaggagatcatgcagattgatgagcggaagaggccttacaacagcatatatgaaacccgggagcccactgaagaggaaatggaggcctacagaatgaaacggcagaggccagatgaccccatggcctctttcctgggacagtagtaactataactagttactggaatgcatacacaggatgttcattccggctccttgctgactatagaagatccttgtccatcctctttactgcctgacattaataaagcttttagaagtctcaaaatcattttccacagtaaagaaacaaagcgaacaagaaagagagtaccgttgtgagctaaggttaaaaatcatccatttcaattagacttggaaagagactttggctgtcttcctctcaagaccagccagattcagtca

SEQ ID NO: 2452 - DNA, 1944 bp, Cricetulus griseus
tactgcccaggcatcatctacaaagacccctccctgccgggcttggagcccagccggcggcgagcaatatacactgccatgagccaagtcctgtgcagaattcacagtgtggacctgcaggccacgggcctggacagctttgggaagcaaggagactacattcctcgccaggtacaaacctggaccaagcagtaccgagcagcggaaaccagcagcatccccgcaatggagaggcttatccagtggctgccactacaccttcccaggcaacagagaaccacagtggttcatggcgacttcaggctggacaacctgattttccatcctgaaaagtcggaggtgctcgctgtcctggctgggaactttctaccttagggacccttttgccgatgtggcctacagctgcctggctcactacctgccatcggtcactcacaggacaggcaagctcggcaacagccaagcaaagcgggaagctcactgagttcatggctgagctggcatgggactttgccatcaaagaggggttccgggttttcaaggagatgccagccaccaaaccacaagtgagatcctaccacgcatgggccgggttacggccccagtggaccctggcaggtctgaggagttacagcactgtagcagctgcttcccctcctcaggagacaaagggaggcctgatcatctctccagaggggcctctctcctcgagtcagaaagttgtatgaccggctgttgcagtttatggaacagaatgtgtaccctctagagccagagctgcagagacaccaggcctcagccgacaggtggagcccttcccgctgatagaagacctcaaggaaaaagccaaggctgaagggctttggaaccttttcctacccttggagacagaccctgagaaaaagtatggagcagggctaactaacatggagtacgcgcatctgtgtgaagtcatgggcatgtccctgtatgcttctgaggtatttaattgttctgcgccagatacggggaacatggagctcctggtgcggtatggcactgaggagcagaaggcccgctggctggtgccactcctggagggcaggatccgctcctgcttcgccatgactgagccccaggtggcctcatcagacgcctccaatattgaggcttccatcaaagaggaagatggctcctatgtcataaatggtcacaagtggtggatctcaggcatcctggatccacgctgcaaactctgtgtgtttatgggaaaaacagacccacaggccccaaggcaccagcaacagtccatggtcttggttcccatggacactccaggaatcagtgtcatccggcctttgtcagtgtatgggctggaagatgctccgagggggccagtggtgaagtatggttcaaggacgtacgtgtgccaaaggagaacatagtcctgggccccggtcgaggctttgagatcgcacagggcaggctggggcctggccggatccatcactgcatgaggctgatcgggttttcagagagggccctggcgctcatgaagacacgcgtgatgtcccgcacagcctttgggaagcccctcgtggagcatggcaccatcctggcagacattgcccggtcacgtgtggacatcgagcaggcacggctgctggtgctaaaagctgcccacctcatggatgtgaccggaaacaaggctgcagctctagagattgccatgatcaaaatggtagccccatccatggcctatcaagtaattgaccgagccatccaggccttttggagcagcgggtctgggcagcgactacccactggctcagtttctttgcttgggcccgagcactgcgctttgctgatggcccagatgaagtacaccggctcaccgttgctaagatggaactgaagaatcccagcaggctacaggagccggcggtgcccagagtgtagattctg

SEQ ID NO: 2453 - DNA, 1944 bp, Cricetulus griseus
agctcttacgagcggggcggcgacgtgtcccccagtccgtacagcagcagcagctggcggcgctcgcgcagcccctacagcccagtgctcagacggtctgccaaatctcgaagcagaagcccatattcatctaggcactcaagatctcgtagcagacacagattgtctagatccagaagtcgtcactcaagcatttctcctagcacactaactctcaagagtagcttggctgctgaattgaacaaaaataaaaggcacgagctgcagaggcagcaagagctgcagaggcagcaaaagctgcagaggcagctaaagatgcagaggcagctgccaaagctgcaaaagcctcaaatgcatctacccctaccaagggcaacacagaaactggtgccagtgcttcgcaaacaaaccatgtgaaggatgtgaagaaacttaaaactgagcatgcaccttctccttcaagtggtggaaccttgaaaagtgagaaagcaaagacaaagccaccccttcaagtaacaaaggtagacaataacttgattgtagataaagtcaccaagaaaacagttgttgggaaggaaagtaaagctgctgctacaaaggaagaaccagtatctactaaagagaaaactaagccacttacaccaagcgttggagccaaggagaaggagcaacatgggcctttaatgacctctacattaccaccattacctttgcctcccatgctgcctgaagagaaagatgctgatagcttaagaggcaatatttctgtaaaagcagttaaaaaagaagtagaaaagaaactccgatgtctgcttgctgatttgccgttgccccccgagttaccaggaggagatgatcttgctaagagtccagaggagaagaaaacagacagcacagttacacagcaaaagaaggacctaagtatgtggtgcagagtgtcatttgcagttctcttgactcagttaataaaggactcaacaagtcaaaacagaaagatgtcatgttagaagagagagaaaatggatcgggacatgaagctcctttgcaactcaggccacctccagaacctagcactccgggatctgggcaagatgacctcatccagcaccaggacaggaggattttggagctgacaccagaaccagaccggcctcggattctgcctcctgatcaacgacctcctgaacctcctgaaccaccaccagtcactgatgaggacctggattatcggacagaaaaccagcatgtacccaccactagttcttcactaactgaccctcatgctggagtgaaggcagccctcttacagctgcttgctcagcatcagccccaggatgatcccaaaagagaagcagtcctcacaaacagcaacgacccttctacagggccagagagtacctcaccccttgccagcaaagatgcacaactataactatggtggtaattacaggaaaatccaggcggccctagcctcatgcatgggcagacctggacttctcctgcccaaggacctggatactcacaaggatacagaggacacattagcacatcagctggcagaggtcgaggtagagggttaccatactgagtatctgtttttcctcaggcacatcatttttatctggaaagacttttctagctgcaatttcaggcagcaatccaagagacttgaataatattaattcaacaacagctttatttttatgtggaaaagggtcttgcatacaatagtgaaaaacaaaaaaacaaacaaaaaatacctttagcttaaattcatgctgttcttaaaactagctctattgattgtacatcgtcacagattttagttaacagttttattttgtattattgtcagtttttaagtggatgctaacattagggacataatgtttttgtggccctgttgcagatcttctgaactatgcacacttgtgtctttttttt

SEQ ID NO: 2454 - DNA, 1944 bp, Cricetulus griseus
ctttttaaatgctccttaaatgacatcctcacgttaactcttttctagaagacagctttacaaggatctagaaggaccaaattcggggctccagaactctccagcgaccagcttagcagatcatacagtcttcaggagctgaaaattcctaagtctggtcttcaccgtgatttggaactttccagtctcagaaaagttgaccaagggactgcacaggactgagtccatatggaagaagaactacctggtttctatggagaaagtggcaagccagtacaggctaccctgtcatcattgaaaatgctagatgtggggaagtggccaatcttttccctttgttctgaggaagaacttcagtcgattcgtcaggcttgtgtctttggcagtgctggcaatgaagttttatacaccacagtcgatgatgagatttttgtacttggcacaaactgcagtggctgtctggggataggtgatattcagagcaccattgagcctcggagactgaattctttaactggcaaaaagatagccagcctcagctatgggagtggcccacacatcgtccttgcaacaacagacggagaagtcttcacctggggtcacaatgcctatagccagctgggcaacgggaccacaaaccatggtttggtgccttgccacatctctactaacttgtcaaacaaacaagtcattgaggttgcctgtggctcttaccattctttggtcctaacgtctgatggagaggtatttgcctggggttataataactctgggcaggtaggatctggatcaaccgctaatcaacccattcctcgaagagtcactggatgtttgcagaataaagtagttatgaacatagcatgtgggcaaatgtgttccatggccgttgtagatacaggagaggtctatgtctggggttacaatgggaatggacagctgggcctgggcagcagtggcaatcagccaaccccctgtagagtggcggccctgcaaggcattcgtgtccagcgggttgcctgtggctacgcacacacattggtattaacagatgaaggtcaagtgtatgcttggggtgcaaattcttatggccagttgggcactggtaataaaagtaaccagtcctaccctacccctgtcgttgtggaaaaggacaggatcatagagattgcggcctgtcactctgcccacacatctgctgccaagacccagggcgggcatgtgtacatgtggggccagtgccggggccagtcggtggtcctgccccacctcacccacttctgctgcaccgatgacgtgtttgcctgctttgccacccctgctgtcacctggcgccttctctccgtggaacctgatgaccacctcactgtggctgagtcactgaagagggaatttgacaaccctgacactgcagacctcaagtttctggttgatggaaagtacatttatgctcacaaagtccttctcaaaattaggtgtgagcattttcgttcttcattagaagacagtgacgatgatattatagaaatgagtgaattttcataccctgtgttccgagctttcctggagtacctatacacggataacatcagcctatctcctgaggaggcagtaggattgctagatctggccacattttacagtgagactcggctgaagaagctctgtcagcaaactatcaagcaagggatctgtgaggagaatgctattgctctgctgtctgctgctgtgaaatacgatgctcaggatttagaagagttctgcttcagattttgcataaaccatctgactgtagtaacccaaacttcagggtttgcagaaatggaccacgatcttctgaagaatttcatcagcaaagccagcagagttggagcctttaagaactgatccctaacatgcaaaggagtatctaagcctttacacttcacccctgcaaaaacaaataaa

SEQ ID NO: 2455 - DNA, 1943 bp, Cricetulus griseus
cgagtactctgtgtacctggccatccagagctcacagggctggtggtgaaccaagagctctaccccagcccagctagccttcatgcgagtgtactgtgggcctagcccttcctgcctcgtgcagtcctccagcctctccaatgcccacattgactacaccaccaagcctgccatcatcttccgcattgctgcccgaaatgaaaagggctatggccccgctacacaagtgaggtggttgcaagaaaccagtaaagacagctcgggcaccaagccagccagcaagcggcccatgtcgtctccagaaatgaaatctgctccaaagaagtctaaggctgatggtcagtgaggaatctggccagcatctggatcctccagatccctctgcttcaggaacgccctatatggcctggcccaccctcccaccctgtccacccagcctttgcacttcaccctcaccagccgctggctaccattcagtctccctctttccctatgttttacaataaagaaagcacattttatcattgctgttgggaggaagcagaaagcagattggaaagagcggcaagtaagcaaatgagctcaagttgtgctccttccttttccccacctggtgccctccctgagcggagtatgactagacagttcagagactttgggtagagaaattaaagctgaagacaaaggaggtagtacccacacttaagcctgcacttgtttgtagttcatcgtccttggcctgagaggcagccaagggctggagggggggaggagtatcctccaatttccctcaggctttccccagcaagtgccccatcctggatgtctgtctggttctattttgttttgttactacccttcttcttcaagcttagtcagatctgtcttgcccagtgaacccaccagaagcgtaacatatctcagaggcctttgtgctgccacttaacacctctcccttgggtggtctaagcagtggctgtgaaatcctcccaatgggcacagagtggcccctagtgatcctggctttggcccaccttgcttgaacctgggggccacatcaccaactgctgcatttgttgtatttttaagttgaaattaatgaagttaacatttttattgtaattttagccttagtgtgtgggggtttatccctttttgttagctgtgtacagaatgtgtatcgtatttggctaataattggcagggatctttctgggaaaaagctgagagagcagcttgggcaggagagaaacagagtgtcctggataggacctggtagacactgcctagttcaattttcctgttgctagaccctgcctgcttttggaacagtgtgtgacaattgaccttattccttgtgggttagcacttgacatgtagaggcttgggcttgaaggtggagtccaccttcatcagcatcacttacagaaactgaccctgaacaatacagcagtggcagggaacaggtgggatctggccaccttgaaagcagaccaggaaggtggtggggtatgccaaataacccacagaggctgtgggtaggtacatgaaacaactcagtaattaatttcatagcattgcccccaagctctggattttttctctccaggacccaagttttaggtggtgagtaatgcttgcaagcaagttactgaaggatttagaaatggacagccaatgtgttcagccacttaggcccataccccctggggcctctagtgtattatatcatatttctctgtggaaaatgtcttgtttagtcaagttggagccctggcccctttgttttccctatcccttctcccaagcacccgttgatttctcttctgagaacagtactaccccattcatctattgtagagtaatccctgtgactcaatattaccatagtgcgatgttgttttgtgctattttgaacaattaaaagactttttttgaaataa

SEQ ID NO: 2456 - DNA, 1943 bp, Cricetulus griseus
agctggaccacaccgtcatggaggaggatgagaagcggagcctgctagtgaaggagcttcaaggtctgtcaatggcccagcgagaccacatgatccggaacatgcccttgagcctgggtgagaagcgctggcttcgagagaaaagctggagtccaaagggaaagcaacagggccagaagggccgaggtgggaccttctcctgcagcagactcagatacagctgcattctggctctgcacagcctgggactggtgttgctttcaggactgtatgcagccaggccgtggcgctatgctctgaagcagattggcggccagtttggttccagtgtcctctcctacttcctcttcctcaagaccctgttggccttcaatgcgctgatgttgctgcctctgctggccttcctcgtgggtgtgcaggctgccttcccacctgacccatccggcctggtccctaccttctctggtctagaactcatcacaggcaggggctgtttcacacacaccgtcatgtactacggttactacagcaacaccacgctgagccagtcatgcgcctcccctcgagaaactggccagcagcctgccctataacatgccgctggcctacctcttcacggtgggcgccgccttcttcattacctgcatcactctggtgtacagcatgtcccactcctttggggagagctaccgggttggcagcaccaaaggcatccatgctcttacggtcttctgctcctgggactacaaggtgactcagaagcgggcctcccgtgtccagcaggacagcatctgtactcagctgaaggagctgctggctgaatggcaacttcgagagaggccccagagcgcatgtgggcagctgtggcaggctgccatgctaggcctgggatggttgctgtgtctgggcaccacgatgggctgtgcagcggctgttcttaccttctcagaggtcatgattcagagaccggatgctgatggccagggggtagagctgctggccctacccttggtggtcagtgtccttaatctgggtgcctcctacctgttccgtggtctggccactctggagaggcatgactcccccgtgttggaagtatacatggccatctgtaggagtctcatcctgaagatggctgtcctgggtgtgctttgttatcactggctgggccgcagggtggccaagctgcaggccccgtgctgggaggactttgtgggccaggaactgtaccgctttctggttgtggatttcatcttcacgctcttggattccctttttggggagctggtatggaggctcatctctgagaagaagctgaagaggcagaagcctgagtttgacattgctcggaatgttctggacctgatttatgggcagactctgacttggctgggtgtcctgttctcaccgctcctgcctgctgtgcaaatgctcaggctgctgctcctgttctatgtcaagaaggcaagcctgatggccaactgccaggctcctcgccgcccctggctggcgtcacacatgagcaccgtcttcctcacgctgctctgcttcccgtcattcctgggcgccgctgttttcctctgctatgctgtctggcaggtgaaaccctcaagcacttgtggccccttcaggactctgaacaccatgtacgaggcaggcaccgtctgggtgcatcgtctggagcgtgccggctctggggcctcctggctgccctggctgcaccacttcctggtggagaacaccttcttccttttcctggtgtcagccttgctgctggccgtcatctacctcaacatccaggtggtgaaagcgcagcgaaaggtcatctgtctgctcaaggaacagatccggaatgagggcgaggacaaggtcttcctcatcaacaagcttcactctgtttacgaggcgggggagcggaggcgcaggcctggcagaacccagga

SEQ ID NO: 2457 - DNA, 1943 bp, Cricetulus griseus
agcctatcaagattacatttagctgactgtaaggcctctgaggtaaaggaattcacaatcagcttcttggaaaagcccttgagccatctggatggtgggcagtctggcacactaacgtgtttgaggtgcttgttgaggttacaaacgtggacttttcagccctgaaggcagtagtgagacttgcagagccatgcatctatgaatctaagttgagcacttttaccttggcgaacgtgaaggagcttttggacctgaaggagtttcagctgcctctgcaggagttgtgggtggtgtcggatggctcacatgaatctcaccagatggctcttgcaattgagcatgtcaggttttcataaaacatttggaggagttgggatgaagaagaggaggatgagtacgattatttgtcagatgtgttgaacctcgattgagattgtattacgatatacttgaagatcgagttccctcaggacttattacaggaaatttttaaatctgagaagtagtttgtcagattgtcattctgattctgagacaagaaaatatctccatggtggaagggttaaatttgtattcagagattgaacagttgaaacagaagctaaaactcattgagaatcctttgttgagatatgtttttggttatcagaagaactctaatatccaagccaagggccctcgtgagaacagccagaaggtgacccatgtagtctcctccaccatgaagacaggtctacttcggtctctgtttagggacaggttttctgaggagccttgcaaagaagaaacagaaattcagttccatagtgatctgttatctgctgtaaatgcctgtcatgagggtgacactgtcattatttgccctggccattatgtggttcatggtacctgctccatagctgactccattgagttggaaggatatggtctaccagatgatattgtcatagaaaagaagggcaaaggagatacttttgtggattgcacgggtatggatgttaaaatctcaagcataaaatttattcagcatgattctgtagaaggaatcttaatcattcaccatggcaagaccacactggagaactgtgtactgcaatgtgaaactacaggcgtcacagtgcgcacatcagcagagcttttcatgaagaactcagatgtctacggtgccaagggtgctggtatagaaatatatcctgggagtaagtgtaccctgactgacaacgagatccatcactgcaaggaagggatcctcattaaggacttccttgatgagcattatgatattcccaaaatttctatgataaataacatcatacataacaacgaaggttatggtgttgttttggtgaagcctacaattttctgtgatctacaggaaaatgcccaagatgaaactgctggcaacacaactcagaaaaatagagaggcgggtgccactgaaggattagatctggaagaaatgcttcagtgtgttgccaacaaaatggagctttcttccacggctgacttttctgaacaagctaaggggaattgtgaaattataaatgaactacttgctacttctatgcaaaaaggccggatgaagaaacgattgagtgaacttggaatcatacaagctgatgacaacataatgtcacaggagatgtttattgaaatcatgggaaaccagtttaagtggaatggcaaagggagttttggcacatttctttactagctacaatgaaaccatagctcacaaaatactgtattttgaacatgtcctaagaatcatgctgcttatgtagtttactttatttgcttcatggttgtatattatataatatgtgcttgaccaaaaaaaaaaaaaaaaaaaaaaaaaaaaaaaaaaaaaaaaaaaaaaaaaaaaaaaaaaaaaaaaaaaaaaaaaaaaaaaaaaaaaaaaaaaaaaaaaaaaaaaaaaaaaa

SEQ ID NO: 2458 - DNA, 1943 bp, Cricetulus griseus
ccgcttccatgtactggtggccagccaggactttgtagagagtgtgctggtgaggaccatcctgccaaagaacaatccacccactatcgtgcatgacaaggtgttgaacctcatccagtcctgggctgacgcgttccgcagctcgcctgatttgacaggtgttgttgctgtctatgaggacctgcgaaggaagggcctggagttccccatgactgacctggacatgttgtcacccatccacacaccccagaggactgtgttcagttcagagacaccatccggacagaactctgtgggctgtgacactagtcagcgaggagacctgagccagcatgccacccctctgcccactccagctgtcctcccgggcgactcacccatcacaccaactcctgaacagattgggaagctgcgcagtgagctggagatggtgagtggcaatgtgcgagtgatgtcggagatgctgacagagctggtgcccacccagatagagcctacagacctggagctactgcaggaactcaaccgcacctgccgcgccatgcagcagcgggtcctggagctcatcccacgcatctccaatgagcagctgacagaggagctgctcatggtcaatgacaacctcaacaatgtgtttctgcgccatgaacggtttgagcggttccgaacaggccagactggcaaggcctccagtgaagctgatccagctgctgacttgattgacatgggtcctgacccagcagccaccagcaacatctcatcccaactggcaagaatagaacgaccttggctccagcagtgtgagagctggcctgcagtcgctggagacctcaggtcacctggaagatgactttgacatgtttgctctgactcggggcagctcactggctgaccaacggaaaggggtcaaatatgaagccccccaaaccacagatggcctggctggggccctggatgcccggcagcagaacaccagagcgatccctgccacccaggcccgcatcatggaggacattgagcagtggctgtccacagacgtggggaacagtgctgaggagccctctggtgtcaccagtgaagaatttgacaaattcctggaagaacgggccaaagctgctgatcgcctgcccaacctggccagcccttcagctgagggacccccgagaccttctcttggcacagctcctcggaagaagacccaggagaaagatgatgatatgctgtttgccttatgaatgcagggtctggcaccctgcagcccggggcctggcactctcatacccactgggatccctccctcccttggtgttaaggctgcttgggggtgttttgtcaccccacttctctcctcctggagcctgggcagcagtgggatgaactggggttaatgggtccgccctccgctgggatcctgactggtcctgcctccttctcaatccgctacccactatgactttgctgagaccttaggccccagacaagctgacctgatgtgacctgattgacctggtgtgaggctgcttccatgaaattcccctggttccttcccagggaagcccatgggagccctccacaatccacacttccagtctaggtgatatgtctaacagacattaccacaagcctcgcccatccctgcccctgcagagcagggcctgaagaaggctttggctggctgttggggtgggcaatggtggcctctgctgagctgccccctgtccaggtacgaagctgcacccagtgaggcaagacctcaccaatctaggtgtcaagatgagaccttggggattctgtgcacccagaaccccccagttcctccactgcctcccggtccttgctctattcctccagcagggctccacccacctgaggctcacctgttggttggtcctcaggtacagggcaaggtgccttttgtgttcccaaataaagtagaaagacca

SEQ ID NO: 2459 - DNA, 1942 bp, Cricetulus griseus
caccatcaccagcaccagacacgaagactatgagaccccggagagtccggtgcccccggcccgaagcccctctcctcctcccaaggtggtggacgtgcccagccacgccagtcagtcagcccggttcaacaagcacctggaccgcggcttcaactcgtgcgcgcgcagcgacctgtacttcgtgccgctggagggctccaagctggccaagaagcgcgccgacctggtggagaaggtgcggcgcgaggccgagcagcgcgcgcgcgaggagaaggagcgcgagcgcgagcgggagcgcgagaaggagcgcgagcgcgagaaagagcgcgagctggagcgcagtgtgaagctggcccaggagggccgtgcgccggtggagtgcccatctctgggtccagtaccccatcggcctccctttgagcctggcagcgccgtggctacagtgcccccttacctgggtcctgacactccagccctgcgcactctcagcgaatacgcccgacctcacgtcatgtctcctggcaatcgcaaccaccccttctatgtgcccttgggggcagtggacccggggcttctgggttacaatgtcccagccctgtacagcagcgacccagctgcccgagaaagggagcgggaagcccgtgaacgtgacctccgtgaccggctcaagcctggctttgaggtgaagcctagtgagctagaacccctgcatggggtccccgggccaggcctggatcccttcccccgacacgggggcctggctctacagcccgggccacctggcctgcatcctttcccttttcatccgagcctggggcccctggagcgagaacggctggcgctggcagcggggccagccctgcgccctgacatgtcttacgcggagcggctggcagccgaaaggcagcatgcagaaagggtggcggccctgggcaatgaccccctggccaggctgcagatgctcaacgtgactccccatcaccaccagcactcccatatccactcccaccttcacctgcaccaacaggatgccatccacgcagcctccgcctcggtgcaccctctcattgacccgctggcctcagggtctcacctcacccggatcccctacccagccgggaccctccctaacccccttcttcctcaccctctgcacgagaacgaagtccttcgtcaccagctctttgctgccccttaccgggacctgccagcctccctctctgctccaatgtcagcagctcatcagctgcaggccatgcacgcacagtccgctgagctgcagcgcttggcgctggaacagcaacagtggctgcatgcccatcacccactgcacagcgtgccactccctgcacaggaagactactacagtcacctgaagaaggaaagcgacaagccgctgtagaacctgctatccagagagcacccactgctccttcatccagaccttggaggactccccccaacctttagatcccccccccagccgaggagagggtgctgcctacttgcagaacttctgcagctgggcagagggagggagggaagaagggacagatgaggtcaaggcccggggttgtgtgcggaggtgggaagtggcaagggtggggacagaaagaaagtgcacagtatcatggaccaggtccctcttccttaccccctgcttttcttctcctctatgcccaatccttggtggccactgcccctcccctaacccattggtgtgattatttcatctggtagatgtggctgtttgcgtagcattgtgtgctgcccccgccccatccccgtgtgtgcacccccccctcggcaatgtgcgccccttgcccgtcccacattaataatttatatatataaatatctatatgatgctctttaaaaaacatcctgaccaaaaccaaccaaacaaaaacatcctcacagttccccaggaaaaaaaaaaaaa

SEQ ID NO: 2460 - DNA, 1942 bp, Cricetulus griseus
agtaacacagccggagctgattcagacccacaaatctcaagagtcacaactgcctgaggagaccaagccagcaagcagcaagtccccctcggactggaggcaagcaggaccccagtggcctctgagtgcactcacacagatggtgcagaggaagtggctggttcgtgtccacaagcttcgacccacagtcctcccagcaaatctaagctggttgtgaagcctccagggagcctcaatggggttcccccaaatcctaaccctattgtccaaaggctaccagcctttctagacaatcacaattatgccaaatcccctatgcaggaggaggaagacttggcggcaggtgtgggcccgcagccgagttgcggtccgaccaccccagcagtactctgatgatgaggatgactatgaggatgatgaggatgatgtgcagaacaccagctctgccaatcagatacaagcggaaggggacagggaagccaggatcgttgagcaattcttcagaggggcagctgtcagtgctgcagcccaacaccatcaatgtcttaactgagaagcttcaggagtctcagaaagacctttcaattcctctgtccatcaagactagcagtggggctgggagtccagctgtggctgtacccacacactcgcagccttcacccacccctagcaatgagagcacggacacagcttctgagattggcagtgctttcaactcacccttgcgctcgcccatccgctcagccaacccaacacggccctctagccctgtcacctctcacatctcaaaggtgctttttggagaagatgatagccttctgcgtgttgactgcatacgctacaaccgtgctgtccgtgacctgggtcctgtcattagcacaggcctgttgcaccttgctgatgatggtgtactgagtcccctggcactcacagagggtgggaagggtacctcaccttctaccagatcaagccaaggcaaccaggggtccagcagcctagaggagaaggaggtggtagaagccacagataacagagacaagtctgggctgagcaggtccactgagcccttgagtggagagaagtactcacctaaggagctgctagcactactaaagtgtgtagaagctgagattgcaaactatgaggcttgtctcaaggaggaggtggagaaaaggaagaagttcaagattgatgaccagcgaaggactcacaactacgacgagtttatctgtaccttcatatctatgctggctcaggaaggtatgcttgccaacctagtggaacagaacatctcagtgcggcgccgccaaggggtcagcattggtcggcttcacaagcagcggaagcctgaccgacggaaacgctctcgcccctataaggccaaacgccagtgaggacctctggccctgattctgcagcctctcttgccacaaggctcttaccaagtcccctccctatcccacttttttccccccagtattactgaatagttcagctagatcccaggccctgggagtgggaataagctgtgtgtcctgctttattatgctctggggcctggcaggggtaagtcagccccataatgctcaggaagcagcagacagcctaccagggtcccacagctatagtggagagaagtgttgagttgtcccaggtcaaagcaaggctctggggctgtttgccttcagtgttgtggccctggctatgggcctatcttgggctcctaatctctgtttgtttatgggactcagagaagtctctacccagcccctcagtattaccatgtctccctcctcttagggatatcagagacagggctgcttgaatgaagctggtactattcaattctctctactgtaccagcttccttggcctcttataaggtactcagggtaggggacagggtcaagatgagttataactcctgtgttcccatggggct

SEQ ID NO: 2461 - DNA, 1942 bp, Cricetulus griseus
gcagcgcgaggacccgcggcccaccccggcccggcctggcagtttctagtcctggcaacgagccacagctgtcaaaggaactcctcgtgcctgagggcatcctgagtgaccccagggacaacggatcagcttgacaagaactctgtgtgaggggctaatcaaccatggttacatggagttccctgtcctaggtagcagaggcagcaggccgtgccgggggggcatgttcctgtaacttgtggtccaggggatgttacggtggacagtgcatctggagggcgggccacgcagggtgaaccatgctgcggtggctgttgggcaccgagtgtactccttcgggggctactgctctggtgaagactacgagacactacgtcagatagatgtgcacattttcaatgctgtgtccttgcgttggacaaagctgcctccagtgaggcctgctgtccgagggcagcctcctgttgtaccctatatgcggtatggacactcaaccgtcctcatcgatgacacggtcttcctttggggtgggcgcaatgatacagaaggggcctgcaacgtcctctatgcctttgatgtcaatactcacaagtggtctacaccccgagtgtcaggaacagttcctggggcccgggatggacattcagcctgtgtcctgggcaagatcatgtacatttttgggggatatgaacagctggcagactgcttttccaatgacatccacaagctggataccagcactatgacatggacccttgtttgcacaaagggtaaccctgcacgctggagggacttccattcagccaccatgctgggcaatcacatgtatgtctttgggggccgtgctgaccgctttgggccgtttcattccaacaatgagatttactgcaaccgaattcgagtctttgacaccagaactgaggcctggcttgactgtccacacactccagtgctgcctgaggggcgcaggagccattcagcttttggctacaatggggagctgtacatctttggtggctataatgcaaggctgaaccggcacttccatgacctctggaagtttaatcctgggtcctttacttggaaaaagattgaaccaaaggggaaagggccatgtccccgccggcgtcagtgttgctgtattgttggtgataagattgtcctcttcgggggtaccagcccctctcccgaggaaggcctgggagatgaatttgacctcatagatcattctgacttacacatcttggactttagccctagtctgaaaactctgtgcaagctggccgtgattcagtataacctggaccagtcctgtttgccccatgatatcaggtgggagctcaatgcgatgaccaccaacagcaatatcagccgccccattgtctcctcccacggataggaatgcctcccctcctgagcctgctcttgtcttcattgcccctgcctgtctcacctgcctgccccttgggaccctggactcagtatacctccacgtggagttggtggactagaggtgttttctgtgctgtgaattcagtggggagttgtggggggagggccactctcctcccttgggccgagggccccttcccttggtgctctgttcccatccacctccctccacggctcctgggcctttgctctgacccaggccagcggggcagccaggctgtgctggaaagggacaggagtcgggagaagacaagccgtgttggagcctcaggagcttccctctcctcgtcaccatccctctccctgcttgagcacctgcccgggagctgaaaggagcctcagctgttggcatgaaacccctcacccccacccggccctcgggagtggggaccaacagacagcttctcccatcattgagctgttgctgtacccccgaagatcagccagctctgattttataaaatagtaaaacctcaaaaaaaaaaaaaaa

SEQ ID NO: 2462 - DNA, 1941 bp, Cricetulus griseus
gagctgggccagagcctgcagggcgtcgagcagaaggtacagtccctgcaagccacatttgggactttcgagtccatcctgagaagctctcagcataaacaggacctcacggagaaggcggtgaagcaaggggagagtgagatcaaccggatcagcgaagttctgcagaagctgcagaatgagatcctcaaagacctgtcggatgggatccatgtggtaaaggatgcccgagagcgggacttcacatccttggagaacacggtcgaggagcgcctgacggagctcaccaagtccatcaatgacaacattgccatcttcaccgatgtacagaagaggagccagaaggaaataaatgatgtcaagatgaaggttgcctccctggaagagtccaagggtgatcgcagtcaggacctgaaagttctggagaaaggcctgaaggaggtacaggcctctttgaagtccagggagagggacatcgaggccctgcagagttcccttcagaccatggagtccgatgtctacacagaggtccgggagctagtgagcctcaagcaggagcaacaggcattcaagcaggcggcagactcagagcgcctggctttggaggccctcacagagaagcttctgcagtctgaggagtcctcctctcgcctcccggcagacatcaggagactggaagaggagctgcagcagctgaaggctcaggcccatggagcagaggaggccgttgtcttcaaagactccaaagccttagatgaactccagaggcagattgagggcctaggtgccaggctgcagtacgtagaggacggagtctactctatgcaggtagcttctgcacgccacactgagagtctggaatcgctcctgtccaagagccaggagtatgagcaacgcctggctgtgctgcaggaacacctggaaaccctggggccctcctctgatctggccagcacagtgaagagcctggaggaggcccagctgatgctgaccagcaacgtgaaggagctacagcagagcctgggtgagctccccaacactgtggagtctctgcaagaacaggtgcactcactgctcagccaggaccatgcccaggccatgcctcctcaggactttctggacaggctctcctctctagataacttgaagtcctcagtgagccaagtggagtcagacttgaaaatgctcaggactgcggtggacagtttggttgcctactccgtcaaaatcgagacaaatgaaaacaacctggagtcagccaagggcttgctggatgacctgaggaatgatctcgacaggttgtttgtgaaagttgaaaagattcatgaaaagatctaaatgaactgcttgtgcagggcacagattttatagtccagtttctatgaaccaaaaaaaacaaaacaaaacaaaattgcaattgttaccacacatctttggtttctgaaatcctgtttctgctttttggtttggcttcctgaaggcccagccggatgtgtctactgttaggaagagggcaatggccttaactggggattaacagggagcagattaacctaaaagaaagttgtgatgtcagagctgtactgtccataaaggatttggacatctccctgggagatgttaggccagatctttttattttatcacagtattcctgaagaggtctcctgtcgcctggccccatctgtcagtgacgatcactcgtgctgcatttctgtaattgttcttcctgtatccttgccctttgagcagtgttgtctttaatggctgccttgtccttcccacccccactcccccccccccaagaaaaaaggaaagaaaaattttaaaaaagaaaatgctgaaaagaaaaacaaggtttgttaatttactgtgaaatgaactgtatggcttatttacagtatttttaattcttaataaacacttgagctttgttatgac

SEQ ID NO: 2463 - DNA, 1941 bp, Cricetulus griseus
agatttcagaatgtctaccatcttgacttccacttttaaaaacctttctactacatcaaaatgggccctcagattttctgtaagacctctgagctgttcttcccagctacgatctgccccagctgtccagaccaagtccaagaagaccttagcaaaacccaatattaagaatattgtggtggtggaaggcgtccgcattccatttctgctgtctggcacttcctataaagacttaatgccacacgacttggctagaggggcactttcgggtttgttgcatcggtccaatgttccaaaaaatgttgttgattatatcatctttggtacagttattcaggaagtaaaaacaagcaatgtggctagagaggctgcccttggtgctggcttctctgacaagactcctgctcacactgtcaccatggcttgtatctcttcaaaccaagctatgaccacagctgttggtctgatagcttctggccagtgtgatgtcgttgtggctggtggtgttgagttaatgtcggacgtccctattcgtcattcaagaaaaatgaggaaaatgatgcttgatctcaataaagccaagactctgagccagcgtctgtccttacttactaaattcagattgaattttctatcacctgagctccctgcagtggctgagttctccactaatgagaccatgggccactctgcagaccgactggctgctgcctttgctgtttctcgaatggaacaggatgaatatgctctgcggtctcatagtctggccaagaaggcacaggatgaaggacatctttcagatattgtacccttcaaagtaccaggaaaggacacagttaccaaagataacgggatccgtccttcctcattggagcaaatggccaaactaaagcctgccttcatcaaaccctatggcacagtgacagctgcaaattcttctttcctgacggatggtgcttctgcgatgctgatcatgtcagaggagaaagctctggccatgggttataagccaaaggcatatttgagggattttatatatgtgtcccaggatccaaaagatcagcttttacttggaccaacatatgctactccaaaagttctagaaaaggcaggattaaccatgaacgatattgatgcttttgaatttcatgaagccttctcaggccagattttggctaactttaaagccatggattctgactggtttgcacaaaactacatgggcaggaaaaccaaggttggatcacctcctctggagaagtttaatatctggggcggatcactgtctctgggacacccttttggagccactggctgtcgactggtcatggcagctgccaacagactgagtaaggatggaggccagtatgctttagtggctgcctgtgcagctggaggacagggtcatgctatgattgtggaagcttatccaaaatgattgctctagaggaggtggtctgatttctgtgtgcagcactcgaacttggcaatgccatttcaatgcaccaccaagtgacacctgtagttcctagctcttcttaggaaaacaacagctgtggccttctcttaatactttgcaatcaagccttgccagtgttccaagctttccgataacctcatcttctgctctctaaattccagagtatcacatatgtgcacacagttcttgttatctctgttgcaaagactaatggctgatagcagcttggagagaggttggctgaggtttgaagtcatctttgtaacatttgcagattccccttgttcctgtccatgtcatagagataattattttttctaaaatacaaaccaatgtgcctaaattaacttactatgaaaaaaaagtaatctaaacatctctgaaaactgaaatgcttagatatataaataccatattggttgaccttaataaattagaaatgtattaaaaaaaaaaaaaaa

SEQ ID NO: 2464 - DNA, 1941 bp, Cricetulus griseus
tccgccgccccgcgcccggccgccgcccgaccgccatcgcccgggcccgtcgctcgcggacgcagaccaggcaaattgggagcggtgccgagaaaaatttccttactagatgacatttcatcgcaatgtccgatcgtttggggcaaataacccagggcaaggatgggaaaagcaagtattcgactctcagcctgtttgacaagtataaagggagatcagtaggcgcggtcagatcctcagttattcctagacatggcttacagagtcttgggaaagttgccacagcccggcgtatgccaccgcctgcaaacctgccaagcctgaagtctgaaaacaaaggaaacgaccccaacattgtgatagtgcccaaggacgggacaggatgggccaacaagcaggaccagcaagacccaaagagttccagtgtgacagcctctcagccgccggagtcgcagccgcagccgggtttgcagaaatctgtctccaatttgcagaaaccgacacagtggcctggacagagctctcttctgctcccgaaagctcctgaaagttccattgtcagccagcccacatcgtagatatatggcattgacctgcttgctttggtacaaaagagcagactccctccttcccgccctctgcccagtgactgtggagtgagtctcctgtgcagtgcagtgcagatctgcccgcctgccccattccccaggcacagtgggcttggcagcagggtcattatagctggaggctttttgttttaaaaagcagctatggtttttacaaaggggaaaagaaaacaaaatgctagctacgtctgtatagctgaacttttatacgttccttgctgtcctctcactgctctgctgtccccagtggtctccttttatctgtcctatttgacatgtcacagcgctaccttaagaggtgattcttaagagacacacacacacacacacacacacacacacacacacacatacaccttagaaatgcggccagactcacatcacctaatgctggtggacattatgtgtcaaaagaagcattttctcctgcagaatttcagtccaggatgctgttacaaactcaaaatgtgccctttaggtagcctgctgtcagaatggcagtacttcctgtttgtgaagaaaaattaggaggttgcctgttttcagtcctttctctcaccctgtatttccctcctgcctcccaccccaaataaagacaagaaacactagaatttatttatatgtattgatgttgtaggtctagagaaaaaaaaagtaaaaatgtcccacctgctctgtttatataatgtctgaattactgtgcaggaaaggccaggaaattgcatgtgaaatttgatgttctcaccacctctgtaacctcagctttgggctcttcccctctggggtgcacatttgcaattagattctggggacagagggcagcttcgggcctctaaaagtccctggccctcagtatgatctggtcaagccaagtttttagtgcagagacattataaggtgcaatatctcttcatgtggttttctctttgtgagatggctctaagacatgttaggtcatctggaacagagtggctcagtgttggggatgagcactgtcacttaagctgtgttctccaccaggcccaccagctctggctggtgaccttctaggcatgtgacacctggacgatgctaaaggtgtactgtgcagcttgtttagacgtgatttgggagcctcttacctcggatgggaagtggaatcgtgaattcaccctcgccctccttccctccggttcagtccctgttgtttctcctttcaaatatgtgattgtactagctctttccgtatgaaagaactctccttatttaaataaaaaaagtataaaaaaaataaagccaaaacatgactttaaactaaaaaaaaaaaaaaaaaaaa

SEQ ID NO: 2465 - DNA, 1941 bp, Cricetulus griseus
gacctcctcgacttcgcggtggagtacttcacacgcctgcgcgaggcccgcgcccaggagccaagcacgcacatcaccgccacgacgacctttcacacgccggagtctagcgcggtcgccaccgaggaggacaaggagagcgactccgactcggacgacggggatctggaagttccgactcctggcagattttctagacgagtatcagtctgtgcagaatcctataatcctgatgaagaagaggaagatactgaaccaaaggtggttcatcccaaaactgatgagcagagatgtaggcttcaggaagcttgcaaagatattcttcttttcaaaaaccttgatcaggagcagctttctcaagttctcgatgccatgtttgaaaagttagtcaaaactgatgagcatgtcattgaccaaggagatgatggagacaacttttatgtcatagaacggggaacctatgacattttagtaacaaaggataatcaaacacgttctgttggtcagtatgacaaccatggcagttttggagaactagctctgatgtacaataccccgagagctgctaccattgttgccacctcagaaggcgccctttggggactggaccggttaacttttagaagaatcatagtgaaaaacaatgccaaaaagaggaagatgtttgaatcatttattgaatctgtgccactctttaaatcactagagatgtcggaacgaatgaagattgtggatgtgatcggggaaaaggtatataaggatggagagcgaataatcactcagggtgaaaaggccgacagcttttatattatagagtccggggaagtgagcatcttgattaaaagcaagactaaaacgaacaaggatggtgggagccaggaggttgagattgcccattgccataagggacagtacttcggagagcttgcactggtcaccaacaaacccagagctgcttctgcctatgcagttggagaagtcaaatgcttagttatggatgttcaagcatttgagaggcttctgggaccgtgcatggacatcatgaagaggaatatcacacactacgaagagcagctggtgaagatgtttggctccaacttagatctgttggaccctgggcagtagatgtgatgattctcagagccttctcagtgtgacaccaaaaccttccagtcagccacagaacacacacagaaaacagacacgacagaaccgttcctgctgttgtcaccgccgctgccattgctgtggttaagggcatttagaaatcttgagagtcagcactgaaagatggacagaggctccgccccacctccactttgcttctgaagcccatcattagaccacttatgtttactgtgaaggcctttctaactgtctctcagcttttgccgtggtcacttgtagttaagagatgtccagactagatcagtcaccaccattttagtaattactttttcttgtgttccatgaaataaagcaggactcttcagactgccctaagtagcctatgttacagctttgggaattgtatggtcataactactactccaaagcaggcagctagcactggaaaacctttgtggtgatcccaaattttcctaaggtcattttctatggtattgctttattaaataaatcagaccttgcactttgaccgaataatacctggttcttgcaaaggtaagaggtgcactggactccaggagcagcccaaaattccagctcccaaaccttagaaggactctgaacccccaccccagcctccatgccagcatggattgtggctggctgtgaatcttatgctggagttattcctgcaggctgctaagggtgggctttctcagcctgcccacacatcccagtctaatcttcagagtcccccctgtcccctttcctgccacactaatggctgttcttttagagtagaagtcatcaagt

SEQ ID NO: 2466 - DNA, 1941 bp, Cricetulus griseus
  modified_base (122)..(122): a, c, t, g, unknown or other
ttggctcattgtctgcccgtagtgactctgaagcaacaatatcaagaagtagtgcctcttcacgcactgcagaagccatcattaggagtggagccagattagtaccatccgataagttttcncctagaactagagctaacagtatctctctttcagttctctagaaagataagacaatctattgataaaacagctgggaaaattagaatattatttaaagacaaagatcggaactgggatgacatagagagcaagttaagagctgaaagtgaagtacctattgtgaagacctcaagcatggagatttcttctattttgcaagagctaaaaagagttgaaaaacagttgcaagtgatcaatgccatgattgacccagatggaactttggaggctcttaacaacatgggatttcccaatgctatcctgccatctccaccaaaacagaagtccagtcctgttaataaccacaccagccctggtcagacaccagcactttgcccccccagaaacaacaatcttgttatctttgtctccttgatttatttatttattttcacctctaatgtgttataccagcttttcaaaccactcaaacaaccacttgaagcacacttagcaaaaggcagattgtgtcagctttgccttttgtggtttcatggttttcaaattgaatcatatcactgtatcctttcccttcatagatctttgtgtttgtttgttttgagccatgctgtgacctacacactaaacttttgtaaggaaatcagatttttgtctctccttttagatgaaatgactagaaaaggtcaaaacttgacagatagtttaggtggagtatattttaaaattaagaacatgtatatttatcctgtgttaccaagtttttatgtgccctctgaaatgatcatgaggttaatttttcttcattaggagatgtggagaatcagtaattgtgagagtagttgatagttccactcccagtcattgaattgcttctgtgtttccctgtaggttcatagtaaccccgtgtcagtcttacacatttgtaaggaccctgcaagacagcaacgacgactaaggctttgggctaatagctactgtaaagaaagcctgtgaaaaataccttctttaaactttgtttttgttacttgttttgttttctttccagtaagctcacatttcaataagtttttaaataaaggaattattttttgtgtttccagaacactataatttgggtgaatcttaattcttttaaatattaataggcctggatttgcttcaatggccccattagtctataaagagtaaattgcaacttttatgatatggtctttgatatattagcaataacttgtgctacatttgttttaagggaaagttaaatgtatacttcaggatttttcaggatctaagaaatcctgtgctgttggatcagttaataaaactgcaaaatctttttgtaaacatgtaaaagcaagtctgctgtataatggatctccttgtattttttttctttaaattaaaaaggaagaaaaggaaccgttctccttgtaaagctaaatccacaattctgtgaagtaaggcttcaaaagagttccaaaaaatataaggggagtgagatgctttgaagaaacaaacaaaacatataaacagggtcggtccatttgaagaaaaattatgcaaaataataaccattgttccctcctttagttaatgtttggtactgagtctgtccatatggaagtacatgagaaggaatctaagaaagtattaaaatgtatgcttacattattgtttgtttacagttttgttcaattataaactatttggccttttactatgtttatttttattttgtatgaatacattctcctttattttattttttgtttactattttatttacgtttattttgtttatgtctatttactaactcc

SEQ ID NO: 2467 - DNA, 1941 bp, Cricetulus griseus
ggccccatgtgggattgaacctgtcacctctaataccgtggcttgcctaagagatctgcacctacagcccttgtcttgtagcctggtgacaatgccagcgtgaacagggtcccaggcatggagttcctgtcagcccccagcacccaccagggcccccagccatggacttggaggagcccaaaagccccgagctgccctctgatgaccagcccactagcacccagtgggcctcggggcccggagggcctgtcacgccgaatgagatggagctggacgcatccggtgtgcaggaactgatccagcaactggaagccctgcctggtgacctgggtggcccgttcccagaaggagagccctgtcccctgcacattgccactggccaaggcctgacggcccaggagagtgtggacgctggagggctcttgtctgctgaggctggcgggggtgactttctgggtctgctgaggtttgaatcatcttcgcctgcccagccagggcctgtggatcctccacagactgcaccccgcttgctgcagccaccggaggacccatctggggacccggggtggatggaggggatgtcagccgcggagccagcagacagcaggagttctagcagctccccggagccctggctggagacagcaccgctggtgacccagcaggagccacctgcaagtgcccagagccccgagaccctggcctcatgccctgccgtctccgaggttccaggtccctgtggacatgaggaactcgtggacggcgtcgtttttgcggcaaaatacctgggctccacccagttgctgtcagagcgcagcccaccacccagcatgcgcatggcgcaggcgcaggaagccatggaccgcgtcaaggcccccgagggtgagactcagcccatggtggaggtggacatctttatctccaccaagagggtcaaggtgctagccgctgactcccaggatgccctgatggaccacgccctgcagaccatctcctacattgcggacattgggccagtgctgatcgtgatggcccggagacgactggccaggaggaccgcgccccaggaccgcaagcagcgtctctacaaaatgctgtgccatgtgttccactcagaggatgcccagctcgttgcacaggccatcggccaggccttcagcatcgcctacagccagttcctgcaggagaacggggatcgaccccagccaagtgggcacgcggccctcggacgccagtcacccgcacaacggtgacctggaccacttctgcaacagccagaactgcagggaggtctgcatccagaagcggcctggagagggcctgggcgttgccctggttgagtccggctggggctccctgctgcccaccgccgtcattgccaacctgctccacgggggccctgccgagcgctcgggagccctcagcatcggggaccgtgttaccgccatcaatgggaccagcctggtggggctgcccctcgatgcctgccaggccgctgtgcgcgaggtgcggcgacactcgtcagtgacactgagtatcatccactgcccgcctgtcaccacagccatcatccgccggccccatgtgcacgagcaactgggcttctgcgtggaggacggcatcatctgcagcctgctgcgcgggggtgcggctgagcgtggcggtgtccgcgtgggacaccgcatcatcgaggtcaacgggcagagcgtggtagccatgccgcatgcgcgcatcatccagctgctcacagaggcgcgagagattcacatcaagaccatgccagctgcaacctaccggctgctcacggggcaggaacagccggtgtacctgtgaccgccccgtccgtgcgtgccttcgtccccgccaccaggactgtcaccccacagcccatggggaccccagaatcctcatccttgtattattttctaatgttaaaaaatt

SEQ ID NO: 2468 - DNA, 1940 bp, Cricetulus griseus
gaacgcaacaagaagatagacttccagtgggttcaaggagatgtgtgtgaagttcagctgatggtgtacaacccaatgccgtttgagctccgtgtggaaaacatgggcctcctcaccagtggagtggagtttgagtctcttcctgcagcactttcccttcctgcagaatccggtttgtacccagtcacactggtcggggtcccacagactacagggatgatcactgtgaatggttatcacaccacagtctttggggtcttcagcgactgcctgctagacaacctcccaggagtgaaaaccagtggctccacggtggaagtcattcctgctttgccaagactgcagattagcacatcactgccaaggtctgcacattcattgcagccttcttctggtgatgaaataacaaccaacgtgtctgtccagctttacaatggagaaactcagcagctggttattaccttggagaacattggactagagcccctggagcagctggaagtcacctccaagcttctcaccaccaaggaaaagttgtctggggacttcttgagctggaagctagaagaaacactgtcccagttccctcttcaacctgggaaggtggcaactttcaccgtcaacatcaaggcaaagctagacttctcttgccaggagaacctcctccaggacctgagtgatgatggagtcagtgtgagcggctttcccctgtccagtcctttccgccaggtcgtcagaacccgagtagaaagccgacccacaaacgcttctgagggcagcaagtcgggggaccttggccacctcaagactctggaagctgtcctgaacttcaagtactctggaggcccaggccacgtggaagggtattacaggaatctatctctgggactgcatgtggaagttgagccatctgtgttttttactagagtcagcacacttcctgcaaccagcacccggcagtgccatctcctccttgatgtcttcaactccacagagcacgagctgacaatctgtgccaggaacaactctgagcttgtcttgcatgccagcgagtgccagcgaatggctattcaagtggacaagttcaactttgaaagtgtcccagaatcccctggagagaagggacacttgacaaatctgaagcagctagaagaagagaggcaggaggcacgaggcctggagatcagcagcaagctggacatctgctggagaatcccatctctaaagcgcagcggtgaggcgagcgtggagggcctcctgaaccagctcgtcctggaacacctgcagctggcacctctgcagtgggatgtgctggtggatgggcagccatgtgactgtgaggtggcagctgcctgccaggttggtgaccctgtgcacttagaggtgcggctgacgaatcggagtccctacagcgtggggccctttgccctcactgtggtccccttccaggaccacaagaatggtgtgcacaactatgatctgcatgatgtcatctcctttgtgggttccagcaccttctaccttgacacggtgcagccatcaggccagtcgacctgccttggggccctcctcttcctctacacaggtgacttcttcctccacatccgcttccacgaggactgcaagagcaaggagctgccaccgtcctggttttgtttacccagcgtgcacgtgcgggctctggaggcacaggcctgaacccctcagccccaaaggctgtgccctctttgcaccatacccagctttcttccttcctcccagaagtcaccctgtttgctgcctgctctgtttctggcctattatgctgagcgacctcacacctagtaccagcctgggtggccctgctctatggccagtactgtgaagggtcctttctagtgtgtcatctcccaaaaaaaaaaaaaaaaaaaaaaaaaaaaaaaaaaaaaaaaaaaaaaaaa

SEQ ID NO: 2469 - DNA, 1940 bp, Cricetulus griseus
gcgggtcggaggatcgaaggattgagccaattgcggacgaaacgtctttgcaaggaagggggtgagggagcagccctttgagttccgcctcttctctaggcgctggtggggaagggggacgtaaggaatcctgccctctgagccgcggacccgacgcctcagtgcaaagtgcggagaggacggcgggaaaagctcccgtcgggagcaggggacggaagcagccaggaagccgtgcgggagggcgcgcgcgcgcgcgcccttttcagcagtgtggcggggtcgcacgcacgcccgcctcggcggctgggcgcgagaaccgtggagggaggcggaggaatatgtccgagagggaagtgtcgacagcgccggcgggaacagacatgcctgctgccaagaagcagaagttgagcagcgacgagaacagcaacccggacctgtcgggagacgagaacgatgatgctgtcagtatcgagagtggcacaaacacagaacgccctgatacgcctacaaatacaccgaatgcaccgggaaggaaaagctgggggaagggaaaatggaagtcaaagaaatgcaaatattctttcaaatgtgtgaacagcctcaaggaagatcataaccagccattgtttggagttcagtttaactggcacagtaaggaaggagatcctctggtgtttgcaactgtgggaagcaacagagttaccttatatgagtgccattcacaaggggaaatccggttattgcagtcctatgtagatgctgatgcagatgaaaacttttatacttgtgcatggacctatgatagcaacaccagccaccctctacttgctgttgctgggtctagaggcataataaggataattaatcccataacgatgcagtgtataaagcactatgttggccatggaaatgctatcaatgagctgaaattccacccacgagacccaaatcttctcctgtcagtaagtaaagatcatgctttacgactatggaatatccagacagacacgcttgtggcaatatttggaggtgtggaaggacacagagatgaagttctgagtgctgattatgatcttttgggtgaaaaaataatgtcctgtggtatggatcactctcttaaactttggagaatcaactcaaagagaatgatgaatgcaattaaggaatcttatgattacaacccaaataaaactaacaggccatttatttcccagaaaatccactttcctgacttttctaccagagacatacataggaattatgttgattgtgtgcgatggttaggcgatttgatactttccaagtcttgtgaaaatgccattgtatgctggaaacctggcaaaatggaggatgatatagataaaattaaacctagtgagtctaatgtgactattcttgggcgatttgattacagccagtgtgacatttggtacatgaggttttctatggatttctggcaaaagatgcttgcattgggcaatcaggttggcaaactttatgtttgggatttagaagtagaagatcctcataaagccaaatgtacaacactgactcatcataaatgtggtgctgctattcgacaaaccagctttagcagggatagcagcatcctcatagctgtctgtgatgatgccagcatttggcgttgggatcgacttcgataaactattttttcctagaaaattagaatatgtttgttgtctttgtaaaatagaattaatgtatcttgctagtaagggcacatagagcatttagacttgtttttcagcattcaatcaggctgagctgaatgtagtgatgtttacattgtttacattctttgtactgtcttcctgctcagactttacggcttttaataaaaatttatttttgtaaagctgtgttattttttattgtgatgaaacaagttggaagtaataaaattataccatatctttttg

SEQ ID NO: 2470 - DNA, 1940 bp, Cricetulus griseus
ctcaatgccgaaaacgagaaggactccaggaggcgccaggcacggctgcagaaggaacttgcagaagcagcaaaggaacctctgcctgttgagcaggatgatgacattgaagtcattgtggatgagacttcagatcacactgaagagacctctcctgtgcgagctgtcagcagagcagctactaagcgactctcgcagcctgctggaggccttctggattctatcactaatatctttgggagacgctctgtctcttccatcccagtccctcaggacaatgtggacactcatcctgcttccggtaaagatgtgagagtcccaaccactgccttgtgtgtcttcgatgcacatgatggggaagtcaacgcagtgcagttcagtccaggctcccggttactggccaccggaggcatggaccggagggttaaactttgggaagtattcggagataaatgtgaattcaagagttccctggctggcagtaatgcaggaattacaagcattgaatttgatagtgctggagcttacctcttagcagcttcaaatgattttgcaagcagaatctggactgtggatgattaccgattaaggcacacactcacaggccacagtgggaaagtgctctctgccaagttcctgctggacaacgctcggatagtctcaggaagtcacgaccggaccctcaagctctgggatctacgcagcaaagtctgcataaagacagtgtttgcaggatccagctgcaatgacattgtttgcaccgagcaatgtgtaatgagtggacattttgacaagaaaattcgtttctgggatatacggtcagagtgtgtggtccgagagatggaactgttgggaaagatcactgctctggacttaaaccccgagagaactgagctcctgagctgctctcgtgatgacctgctgaaagtcattgacctccggacaaatgccatcaagcagacattcagtgcacctgggttcaaatgtggctctgactggacccgagttgtcttcagccctgatggcagttacgtggcagcaggctcagccgagggttctctttatgtctggagtgtgctcacagggaaagtggagaaggttctttccaaacagcacagctcctccataaatgcggtggcgtgggccccctcgggcatgcatgttgtcagtgtcgacaaaggaagcaaagctgtgttgtggacacaaccttgatgcatcccctcaggagcagcatgggacccccacagccctgtcttggagggtgatgtgtcctcccagagaagagctggagccatgtggtgccatggctttcctgagaactttgacttaaggtctctgagatctagaagaagcaacactgaatcatattgactctgcaagtgcctagcagaggtttggattcttgtctgcatttgagtgggaaacactactaactgaccttccatacctcatggggagcacagggtccctgctggctctccccactggacacagtgccaaggacaaccccacacactgggtattgggtctcctgtggctttcttgtctttccaaagtctgttttggcctgatgcacactccctttctggggtcatttacccaagggagtcactgtaggcattgggtcagtggaaaccaaatgcagggcctgtcctcatgtgacaaaggatgggtggagctggtttcagggctgggggtttggactggtctcgttgctgaaacctgcatctgcagctggccttcagaactggctcccttcctgccagcatttccccatagctttgtgtgtgtgtgaactcacctgttggtttgctgccagagagcttgtgttgatgggagttgaaattcgctggccagggcacatcttttatttatttaattatgtgtcccaacagaacttgattgtaaataataataaaaaaatgtgttatatacttttc

SEQ ID NO: 2471 - DNA, 1940 bp, Cricetulus griseus
gtttgtaactgtactacttttgtacttccgccagtacatgagattggacatggcagcagttagagccctcaacctttccagggttctgttgaagataccactggctctcagtctctggctgcgttattgaataaatagcaaaactagctcaaggacaaagattggttaaccagtggattaaacagcctctcatggataagaacagaatagaagaaagattaaatttagtagagacttttgttgaggattcagaactgaggcagactttacaggaggacttacttcgtcgatttccagatcttaaccgacttgccaagaagtttcagagacaagcagcgaacttacaagactgctaccgactatatcagggtgtgaaccagctccccagcgtcatacaggctctgaagaaataccaaggaaggcaccaggcattgttgatggcagttttcgtgactcctcttattgatcttcgttctgatttttcgaaatttcaagaaatgatagaaacaactttggatatggatcaggtggaaaaccatgagttccttgtaaaaccttcatttgatcctaacctgagtgaactaagagaagtaatggatggcctggaaaagaagatgcagtctacattaataagtgcagcccggggtcttggattggacccctggcaaacagattaaaattggattccagtgcacagtttggatattattttcgtgtaacctgcaaggaagagaaagtccttcgcaacaataagaatttcagcacagtggatattcagaagaacggggttaagtttaccaacagtgaactgtcttctttaaatgaagaatatactaaaaataaaggcgagtatgaggaggcccaggatgccattgttaaagaaattgtcaatatttcttcaggctatgtagaaccaatgcagacactcaatgatgtgttagctcagttagatgctgttgtcagctttgctcacgtctcaaatgcagcacctgttccttacgtacggccagtcatcttggagaaaggaaaaggaagaattgtattgaaagcctccaggcatgcttgtgttgaaattcaagatgaggttgcatttattccgaatgatgtgtgctttgaaaaggataaacagatgttccacatcattactggtcccaatatgggaggtaaatcaacatacatccgtcagactggagtgattgtactcatggcccaaattgggtgttttgtgccctgtgagtcagcagaggtgtccattttagattgcatcctggctcgagttggggctggtgacagtcagctgaaaggtgtttccacgttcatggctgagatgctggagaccgcagctatcctcaggtcagcaaccaaagattccttaataatcattgatgaactgggaagaggaacctctacgtatgatggatttgggttagcatgggctatatcggagtatattgcaacgaagattggtgccttttgcatgtttgcaacccattttcatgaacttactgctttggctagccagataccaactgtcaataatctgcacgtcacagcactaactagtgaagaaaccttaactatgctttaccaagtgaaaaaaggtgtctgtgatcagagttttgggattcatgtggctgagcttgctaatttccctcggcatgtggtagagtgcgccagacaaaaggctctggaacttgaagaatttcagagcattggaacctcacagggacgtgatggagaaatggaaccacccgcaaagaagtgctacctggagagagagcaaggtgagaaaattattatggagttcctgtccaaggtgaagcaagtgccctttactgacatgtcggaggagaatatcacaaggaagctaaaacaactaaaagccgaggtggtcgcaaagaataatagttttgtaaatgaaatcatttcacgaataaagg

SEQ ID NO: 2472 - DNA, 1940 bp, Cricetulus griseus
tcagataatggtacaatcaaatctcctcattggcctcagccatcccacgaacagcagatgctcctggacagccatcacgcatgagagtaaacactgggagattagctttgacagcaatttccgaatccccagcagtgacagccagtgtgggaacagctttgtgaaggtctggggaggaaccttgaagaccaacgataccctgttggcaacaagctgtggggatgtggctcctagtcccattgtcacaacaggaaacacgttcactgctgtcttccagtctgaggagatgccaggccagggcttcgtctgcatccttcataagccgatgtggacgtaggttcaatggatccagaggtgacattatctctccaaactttccaaagccatatgacaacaacatgtttggaagatcgctcagccatcactggaaactgtgatcatgacggcttgcacatcatcaaaggtcacaacctgtcttccactcctcttgcgaccatatgtggttctgaagccttacatcccctcactgtggatggcccagtattgcttaacttctattctaatgcatatgccacggactttgggttcaagatttcctacagagtcaccacctgtggtggaatctacaataaatccattgggctccttaggagtccttcagactcatctaccaactaccccaacaatgtctactgtgtctacaccatctatgtaagaagcaacagagtgattctgcttaggttcaataattttgatgtggctccctccttcttttgtcaaaaatgaccacctagaggtttttgatggtcctagcattggaaatcggtctcttggaacgttctgtggttccagaattccacaaaatattaagagcaccaataacagcctgaccctgctgttcaagacagattcttctcaaactaaaagcaagaggttgggaaatgtatttctgggagtacataattgcacctgaaaacaaactcattaatctcaccttcactaagttttctctagaggcagcaacagcacagggaagctgcaactatgattatgtgctgattgcagatggcaggagtgagacgtcagatttaggtggaaaattttgtggttcccaaatacctgcaccttttatctcttcgagaaacttccttacgttacagtttgtctctgacgtaacttttgaaagagaaggatttaatgcaacatatacctttgtggacatgccttgtgggggaacacatgttgcaactttgaccccacaaaacgtttcatcgcctcatttgtcaaacatcagacgtccatattccacctgtacttggatcattgtggctcctccccacaagcagattaagataactgtgtgggagttacagctgacctcacaagactgctcagagaactacttagaacttcaagattcaccacagagaaatggtccagtgactcagttctgcagtgccaacttcacagccttgccagcattttattcttcaaggaggactgcaaaggttcgttttcaaatctgaagttttaaacacaaactcgagagtgcatttcacctatcagattgcagattgcaacagagaatacaaccaaggatttggcaatctgaagagtcctgggtggcctcaagaatatgataataacttggactgcataattattctcagagccccacagaaccacaccatttccctctttttctattggtttgagctggaagactcaacacaatgtcagcatgattacttggaggtacgaaatggcagcactggaagttcaccgctccttaacaagtactgtggatcactactgccatcccccgtcttctctcagagcaatgaactgtatctgaggtttaagaccgatacctcagtcaccttacctggatatgacattatctggacctcctctccatcaggctgtggagggactctttt

SEQ ID NO: 2473 - DNA, 1940 bp, Cricetulus griseus
aacaagacgacttctgaggtgtggttgatagatggcctgagcccttgggacccaccagtattcagaagagaatacatggggtactttactatgtcgaacatcgagatgatgaattatacatcctcactaatgttggagaacctacagaattcaagctgatgcgaacagcagccgatgccccagctattatgaattgggatttattcttcacaatgaagagaaataccaaggttgtagacttggacatgtttaaggaccactatgttctgttcctgaagcacagcaacctcctctatgttaatgtgattggtctggctgacgactccattcgctctctcaagctccctccctgggcctgtggattcataatggatacaaattctgacccaaagaattgcccctttcagctttgctctcccataagacctccaaaatattacacatataaatttgcagaaggcaaactgtttgaggaaactggacatgaagatccgattacaaagaccagtcgtgttttacgaatagaagccaaaagcaaggatggaaaattagtgccaatgacaatttttcacaaaatggattctgaggacttgcagaagaagcccctcttggtgcatgtgtatggagcttatgggatggatttgaaaatgaatttccggcctgagaggcgagtcttggtagatgatggatggatcttagcatattgccatgttaggggtggtggcgagttgggcctccagtggcatgctgatggctgcctaactaaaaaactcaatggccttgctgacttagaggcttgcattaagacgcttcatagccaaggcttctcccagccgagcctaaccacactgagcgctttcagtgctggaggggtgcttgtgggagccctgtgcaactccaagccagagctccttcgagctgtgactctggaggcacctttcttggatgtcctcaacaccatgatggacaccacacttcccctgacactagaagagttagaagaatgggggaacccctcgtctgatgaaaaacacaagaactacataaaacgctactgtccctgtcaaaacatcaaacctcagcattatccctcaattcacataacagcttatgaaaatgatgagcgggtacccctaaaaggaattgtaaactatactgagaaacttaaggaagccatcgcggagcatactaaggacgcgggagaaggctatcagccccccaacattattttagacatccagcccggagggaaccatgtgatagaggattctcacaaaaagatcacagcccagatgaaattcctgtatgaggaacttggacttgacagcaccaatgctttcgaggatcttaagaaatacctaaaattctgaaatgctgcatttagctgagaactggaaacacatggaaaataattagtcttatttccagttggtttagcaaaagtgtaattttttaagttattacataaatttttaaaagttcctaacacagggtatacagaatgtccagtgtgctggaatagcatgcacgattggagacaaagcatctgtctctgagagctgcttggtggtggtggagagtcgtcatgctgtgttccaagatgagtccttctcccttctccagagaaatggcttgtgtgtcaacctcactgcctttggaggccgagttagtacttaatcttattctaagtttcgtaggaagacctgagatgatttcctgtagatttagcagagttgatgattctccaaaattcaaaatcacaatgaagactttatctatgccatccagctctcttgtgtacacaacaaagttactatcaacactcaaaaggcaaaaccagcccctattgagaagcagctctctggcgtggagtagacttaaatcctgatacagcctcaacgctgaacttggttcggtcttttggacctagtttttaaaaa

SEQ ID NO: 2474 - DNA, 1940 bp, Cricetulus griseus
ggtacaaatatagggagagtaagaaatcaaagaaggaatatgagagagtgacctctggagacccagcagtgccacaagtctggaacatcaacctcaatttatgaactggggatgcatagcatgcctgattaacgttaatatttcattttattaataatatttatgttgggtcatgtgttaggtcaatgactgtatatttttaatatacttggaaagtgttttattttttgacagactatttgttaatatattatatgtaaaatatttaatatcaaaagaaattgatattttataagaatttcctgagtgaaatgttttattgaaaagcatccaagctcagtaagctggtgcagtgctttgagtgagcaatgtccaatctgtttgaatatcaatcagaaaatctacatttgaagaaaatttgaactccattttaggttatttatttttgtagggaatttactgaagaattataggattaaatcagaatccaaaatcaaattaatcataattttaaaatacaacaggatgctagtcagatcttaactaatctacaaatgtactttttaattttatattcaagaggttttgtttgtttgcttttggctttttgttttgttgttgttatttttcttttttaaccccagagtctcactctttagtccggactggttccaaggtcatggtaattctcctgccttagcctccctggaaaaataaattacaatgtatttttctaaaggaaaaatgcatttgggagcttttaaaattttagacttaactatgcatcctcatggaagctaagatgaaatcttgaccctttccctgtcgtttgtttgcctttatggaaagagagaggttggtctctattctcagcctgtcagtcttagtgagtcactagattgtcctgtgaagttgcctcaggagtccctgcaggcacacctttgcctttcctgggaggctacctaagcgactgctcaaccttaggtggaatctgtctggaacacataccaggtcagggagagtctatcgttcctccacctttttcctggcatgtgctagggcaacagaaccatcatgagtttcctctgacctctagagtgcaagggaagaaaacattgctgccctatggagtcattcatggaaaaccctggaaggttcacacagctcacatcaaaagtcctggctttactatgagggagaggagcagataaaataagcaatgcacacgtgcattcttggatacgtgctccgggacacaagctccatactttgcagaattacagctatttgtttctgtactaaccaacatactcacttttaaaaagaaagggaaatgaaagttggtgacatttaaaagcgtatttctttgtcattttatttagctaaaagtctaaggtcctgtgtaagaacacattttaccaaatttgccatttttgcttcaatttctattttgtcagatttttttaaaacaagttttatttgctgcccaatattttctaatttttctaatgttatgggaagaaggggagcataaatagtatttctggggtatatttgaaagttttaactgaagaatacatatatctaagctctctgctcttcaaacctgatactgttgaatgtaatacagtgtattttcttttttgccattttgcactctgtaattgcactttgtaggtttaaagaggcactctggtataaagcttctattaaagattctaatggaatataaagttgtattgtgttcaccctaaaacttatttgattatggatgttatcagggtactgaattgtatcaatttgtttgcaggtaatatcagctttgatagttgtgtaccttaagatagtgaaggagactgtgacttacaagttattgtcagtttttacttatttttgttaggaattggcaaagatcactatgaaaaaaataaaagaataaa

SEQ ID NO: 2475 - DNA, 1939 bp, Cricetulus griseus
ctgaggccgagggaccgcggcccgagccggggccatggcgaagctgctgagctgcgtcctcggcccccggctctacaagatctaccgggagcgggagacggagcgggccgcgtccagcgtcccggagactgccactgccgtccccgccccgtccgccagctcctgggatacatattatcagccccgtgccctggagaagcatgccgacagcatcctggcactggcttcagtcttctggtccatctcttactactcctctcccttcgccatcttctacctgtacaggaaaggttacttgagtttgtccaaagtggtgccgttttctcactatgctgggacattgctgcttctgctggcaggtgtggcctgcctccgaggcattggacgctggaccaatccccagtaccgacagttcatcaccattttggaagccacacatcggaaccagtctgtagaaaacaagaggcagctggccaactataacttcgacttcaggagctggccagtcgacttccactgggaggagcccagcagccggaagggatcccgaggtggcccttcccgcaggggtgtggccctgctccgcccagagcctctgcaccggggaacagcagacacattcctcaacagggtcaagaagctgccttgtcagatcaccagctacctggtggcacacaccctggggcgccggatgctgtacccaggctctgtgtacctgctccagaaggccctcatgcctgtgctgctgcagggccaggcccgactggtggaagagtgtaatgggcgccgggcaaaactactcgcctgtgatggtaacgagattgacaccatgtttgtggaccggcgggggacagctgagccccaggggcagaagctggtgatctgctgtgagggaaatgcgggcttctatgaggtgggctgtgtctccacacccctggaagctggctattccgtcctgggctggaatcatccaggctttgctggaagcacgggggtgccgttcccacagaatgaggccaatgccatggacgtggtggttcagtttgccatccaccgcctgggcttccagccccaggacattgtcatctacgcctggtccatcggaggcttcactgccacgtgggcagccatgtcctacccagacattagtgctgtcattctggatgcctccttcgacgacctggtgcccttggccctgaaagtcatgccagacagctggagagtcctggtgaccaggacagtgaggcagcacctcaacctcaacaactcagagcagctgtgtcggttccagggccctgtgctgctgatccgaagaaccaaggatgagatcatcaccaccacggtccctgaagacatcatgtccaacagaggcaatgacctcctgctcaagctcctgcagttccggtatcctcgcgtgatggtggaggaggggctcagagccgtgaggcagtggctggaggcctcctcccagctagaggaagcctcagtttacagtcgatgggaggtggaggaggactggtgtctgtctgtgcttcgctcctaccaggcggaacatgggcccgatttcccctggagtgtgggggaggacatgagtgcggatggacggaggcagctggcgctgtttctggcccggaagcatctgcacaactttgacgccacacactgcaccccactcccagccgagcatttccagatgccctggcacctctagggaccgcacttggactcttgtggaaggcaggacgggagggggacacttgtggtcctctctgttcgtgttctctttgtagtctgggcagcggggatgctcccctctgaccacggtcctcttgcacgtttcccctcatccacgtggaagcacttagctctccccatatacatcctgcattaaatgaatgatttattcctaataattaataaaaatgtattttttctacaa

SEQ ID NO: 2476 - DNA, 1938 bp, Cricetulus griseus
ggtttggagaaaattgaagttttgcagcaacatgaaaatgaagacatatataaattagcatttgaaatcatagatcaatatttctctggtgatgatattgatgaagatcctagcctcattccctgaagcaacacaaggctaaggtctattaagtgcagcaccttttattcaatacaaacaccaccagatggccaccaagcgataagacagcaagcaacagaaggctcccagctctcttgcctcttcgttttgatgcttctaaagcaagccatgtctcagtcactttgcagttgccaaaagtcactctcacatggactgtaaatgcatatgcatgatttcctaaactgttttagaattctccttaacagtctcaactaccctattttccatgttccctggtgccacatgctacaactgcagtctccagttagaatgttccatagtggtggcaatcggctgtccactgatactgctttggaaaaaggtgcgctgtggatcaagacactttggtatgatgctcattcatattggaagactacagaggtgcagtgtgatctgagcctccattattgtcctccacaaacatattttcatattcttatgtggaagaattaaagtacaaaccaaatgattttcattggtggaactgaacaaaaaaaagtaatataaacttaaaaacaagaaacttaggttaattagaattaaaaagataagttttttaaaactgtacttcactaccatgaattgatgtgtttattatctgcctcagaagccagggttggagcaagagctttagatataaatggtaattaatgcttccgccattatacctaattgttgagaacagcaaaccctatttgaccactcacttcagcctgtgtgttcctgctgttttgaataatcaaatgctgtgcatggtctctacctgagctgcaacctgttacagacttgaacttctgttaaggtaatttagtcttacaacattttacttagtaaccagtacgtttgataatgtggtggcaacaaaccagcaactattcagaagtgttacaagacttcattcttgagtattggggagctcattccgatcccactcaaagcacctgcacatggtaaagagaaaccaaggatctgtatagaggaatgatctgcagttattgaactagcctgatttgcagtgatctttagctctgcaaaatctcatattactgtgtaaagtcattgcttttggcaaattgtctggcccagttattaatgaatgaatattactgtgtatgaagaggagacagatgccatcagagctttgtgaatcagctgggtgtttcactgataacaacacatagcaggtgtgctttaaggtggctcagatttttcaactcttgtgcacataaaattgagttgaagttcattgtgccttttttcttttacccaaattttgagttaaagcttcatatggtaactgcatcctgttcaaacacttgtctaaattttgaaactgtgtagtgttcactaaaagtaggaataacaaagttggaatgaattaaggtcacaaattttggtgaaacccttaaagtccaaatcttctggacagtgtgattgtccccttccagtgtagtttcttctggacccttcccactcaactgacagttaccttttcagatttgcacacattgagattaaattgggcctctactgtgatgattcccatttcctctctcgtcctaagtgcaaactaacctttaaataacattagcatcaagtagtgcagacttgtgtgcatctgcttgattcagtttgctgtgaccttacagttttgaattggaatcacaccatttcgtagataaaggaaactgagtgtattgctgcacttttaagttttcaaaacagtgttttaaaaattgctattgtttttattttttttaaactctagtttaaaaa

SEQ ID NO: 2477 - DNA, 1938 bp, Cricetulus griseus
tcccagaaagattcaaaccatgagattattcagcaagaattatttggcttatattatggactgtttgtgtagcagaagattgtaaaggtcctcctccaaaagaaaatacagaaattctgtcagggtcttggcctgaccaaccatacccagaaggcattcaagccacctacaaatgccgccctggataccgaacacttggaactattgttaaagtatgcaagggtggaaaatgggtggcttctaacccatccaggatctgtcggaaaaggccatgtgggcatcctggagatacaccctttgggtcctttagcctggcagttggaactgcgtttgagtttggtgcaaaggttgtttatacctgcaatgaggggtatcaactgttaggtgagattgattaccgtgaatgtgatgcggatgggtggaccaatgacattccattatgtgaagttgttaagtgtttgccagtgacagaaccagagaatggaagaattgtaagtggctcagtggaaccagaccaggaatattattttggacaggtggtgcgctttgactgcaatgcaggcttcaaggttgaaggacagaaagcaatccactgctcagaaaacggcctttggagcagtgaaaagccgagatgtgtggagatttcctgcacaccaccagtagttgcaaatggacaagctgtatccaagaaaccagtttacaaggagaatgaaaggtatcagtatcaatgtgaccgaggttttgtgtacagagaacgaggggatgcagtctgcacagtttccggatggagtcctcagcctgcctgtgaagaaatgacatgcaaacctccttatatcccaaatggtatctactcacctcacaggattaaacacagagctgatgatgaaatcagatatcagtgttcacatggcttctatcctgcaaccagagaaactgttgtaaagtgtacaagtactggatgggtcccagctccaagatgtagcttgaaaccttgcgattttccagaaataaaaacggaggtctatatggtgcagagacacgcagaccttacttcccagtacctataggaaagcagttcgattattactgcaacaggggatttgtggctccttcagggacgaactgggactacatccactgcactgcacaaggatggaagcctgaaattccatgccgcaggcaatgtagtttcccatatgtggagcatgggaaacttttagaatggaaacagctatctacaggaccagtactttaaaagtcaagtgtcactctggctacagtcttaccaaatggtcaggacacaattaacctgccacatgggaaagtggagctctccacctcgttgtgttggacttccttgtggacctccaccttcaatcctcatgggattgtgtctcatggactagacagttaccaatatggagaagaggtgacatacagctgtgctgaaggatttggagtttctggacaagcatttatgaaatgtgtaggaggaacttggtcccagccaccagcttgcataagaactgattgtgacagtttacccagggttgaaaatagccatactcatagaagaggaaaaagagattcatataggtcaggtgaacaagtgacattcaaatgtgcaccttcttatcaaatgaatgggtccaacattgtgacatgtgtcaatcgcacatggattggagaggtagtatgcaaagatacttcatgtggggaaccaccacatgtggaaaatgctactatactaacaagacccatggctagatatccatccaatgaaagggtacggtacgaatgtaataaaccttttgaactatttggtgaagtagaagtgatgtgtcaaaatgggatttggacagaaccaccaaaatgcagagattcaacagggaaatgtgggcctcctcctcctattgacaatggagacatcacctcctt

SEQ ID NO: 2478 - DNA, 1938 bp, Cricetulus griseus
ttttaaaccggcttcccacgtgtgagtagcatcggcaagtttttcgagaaaaatgcccaaattgaaggtggcccgcggggcccggaatcaggagaagcatgcacctctggccgagcagattctggctgggaatgcagtgcgcgcggggacccgagacaagcggcggggacgcggggttgaagaggaggaagagtatgttggaccccggctgagcagacgcattttgcagcaagccaggcaacagcaggaggagctcgagactgaacacgggactgcagaccagcctgcaaagccacgggaacgcgccacgcggctgggtctgggagtgccccaggatggaaccgacgatgaggatgaggaatggcccaccctggaaaaggcagccaaaatgaccggagtggaccaccaagcagaggtggttgtggaccctgaagatgaatgggccattgaaatattcatgaataagaaccctcctatgaggcgcacactggctgacatcatcatggagaagctgacagagaagcagacagaggtggagacggtcatgtcagaggtgtcgggcttccctatgcctcaactggacccccgggtcctggaggtctacagaggagtccgggaggtgttatccaagtaccgaagtgggaaactgcccaaggcttttaagatcatccctgcactgtccaactgggagcaaatcctctatgtcactgagcctgaggcctggactgcagctgctatgtatcaagccaccaggatttttgcctctaatctgagagaacggatggctcagcgcttctacaaccttgtcctgcttccccgagtacgagatgacatcgcagagtacaaacgactcaactttcacctctacatggcactcaagaaagccctcttcaaacctggagcctggttcaaaggaatcctgatcccattgtgcgagtctggcacatgtaccctccgagaagccatcatcgtgggcagcatcatcaccaagtgctccatccctgtgttgcactccagtgcggccatgctgaagattgccgagatggaatacagtggcgctaacagcattttcctgcgcctgctgttagataagaagtatgcgttgccataccgggtgctagacgccctggtcttccattttctgggcttccggacggagaagcgccagctgcctgtgctctggcaccagtgcctcctgacattggcacaacgctacaaggccgacttggccacggaccagaaggaggccctcctggaactgcttcgactgcagccccacccacagttgtctccggaaatcagacgtgagctccagagtgcagtccccagagatgtagaagatgttcctgtcaccatggaatgacagcgctcacctgtcttggtccagggaggataggaggacaccaggagcccagttggttagttaaagacctaggttaaggcaccgaaggcttacgacagcatctgtgtgtggctctagtcctgggcaggaggattgatctggttggctttctctgccattctaggctttggtccctgttcacttctggaagctaactggagttacctgatgtcagcactccctcaacccagccggtacttggtattagggctgctctctccagttactgtgtcagttcactggggtgtggataaaacagagttggttatttattgaagctctgtgttttggttcagtccctggaggttcctgcctcatccatccttactcaaaccctcctgctggaagacgaggtacagggcctcaggagaggaaggcacggccccatcccaggctgtaggacaagctcctggaccacaaagcggtagcagaggggagggaaacagcaaccaccaggggttaccaccgcttgtggggtacaggcctcactgtaccctcttacagttgtattcaaaggcaataaattaaaatgacca

SEQ ID NO: 2479 - DNA, 1938 bp, Cricetulus griseus
atgccttttttgatccaaaatgcccaggagatgtggattttcataatagtgactgggacattaagacaatcacaagctccttaaaattctacctcaggaatctttcagagcctgtcatgacttataagcttcacaaagagcttgtctctgctgccaaatctgacaacctggattaccgtctgggggctattcactccctagtatataagctaccagaaaagaaccgggagatgctggaactgctaatcagacacttggtaaatgtgtgtgagcacagcaaagagaatcttatgacaccttccaatatgggggtgatctttgggcccaccctgatgagagctcaagaggacactgtggctgctatgatgaacatcaaattccagaatattgtggtagaaatcctgattgaacactttggcaagatatatttaggtccacctgaggacagccaagtacctccagtgcctccacctcgggtgacagcaagaaggcacaaaccaatcacaatctcgaaacgtttgctgagagaaaagacagtgttctacacttcttccctggatgaaaatgaagatgaagcccagcgtcaaactcctaatggtacaatcactagcaatctggatacccccaagctaccacagcacctcaaactacccattcagaaaagtggggaaactgaccttggaagaaagtctccaaacagacctgtttctgacagccagccggagtcctgcccagaggtggatgtggggaagttggtatttagattgcaggatggagggaccaaggctactccaaaggccaccaatggacctgtgccaggctctggacccaccaagacaccccctttccctataaagagacaagctccccgaccagtggctccccacaaggaaggagatactgactgtttcagcaaagttcggcccccaggagaaaagcaaacaatcatccgtccgcccgtgaggccccccagaccctccatgccgggccagtacttcacaaaagccagaaccaaagccagatactgtggctggcaatgcaggggaaatcccatcatcggtggtggcgtccaggaccagattctttgaaacagcatcccggaaaactggaagttctcaaggaaaacttcctggagatgaaagctgaggccacaggtttgaaaagacttggccttgagggacccttttgaggttgtaaaagggtctacttcaaacacttgtgagctatttggtgatgaagagcagctcatttctggccttgtaccttcagtgtctgggaagccataaaataaggagcacatgtcttatacatgtgtctgtttctcctttgtatgctgtcttcatcttcccagaatgtctgttgtgagcagctcctaggacactggatggctggattctctcaagctccaaactctactgaagtgaaaatacccattgacctgtactgaagaggggaacctagattctcacacttctctgaacttattgtttcctcagaggtcattggactctgaatgattcagggctaaagactgttattaggggtatctcaccctgatggaaaggtcagttggggccatcgtttactgtatttggaaaggggtagggatgttagctgaacattggagaattgtgtcatgtctctttctgagtatatggacactgactagtaccagattggcatcttggtaccatgagatgttaatgaaatctggtggggccagactgcatgaatgattcccacccagtgtccttccccgggatgggcttaggaaggtagcctttctgcttttgcctccagcctctgaggacaaatctgctaagcatgttttgcatgtcaaagcttaggcctatctggtattttccttttgcctacttcacccaatagcttcctttccagcaatcaacaaataaaaacaaaacaagaaaatgtttctgt

SEQ ID NO: 2480 - DNA, 1938 bp, Cricetulus griseus
  modified_base (1922)..(1922): a, c, t, g, unknown or other
ctgtggagtaccacctgttcctgataccagataaagcaagagacacagatgaacccaaagagattcttcagaagtacattgaaagaataatgacccagtttgcacctatactggttccttatatctggcagaatcagcctttcaatctcaaatataaacctgcaaaaggaggtgttcctgctcatatgtatggcatgacaaagtttggagataacattgaggatgaatggtttattgtttatgtaataaagcagattacaaaggcatttccagagttagtagcaaggatcgaagacaatgatggcgagttcttgttaatagaagctgctgactttctccctaagtggttggatcctgataatagtgccaatagggtattttttcatcatggggagctgtgtattattcctgtgccaaggaaatctgaaagaataccctggctgcccactacacccccaacaatccaacaggctttggatatcatctcagcacacccagaagctgtgttagcttcagaacctatacaggctgctgtggacaggcgcatcagagggtacccagaaaaaattgaagcttctcttcatcgagcacactgcttccttccagctggcattgtggcagtactcaaacaacgacccagactagtgtctgcagcagtccaggccttctacttacgggaccccattgacctgagggcctgtcgagttttcaagacatttttgcctgaaacacgaataatggcatctgtcacttttaccaaatgtctgtacgcgcagctgctacaacagaagtttgtgccagacaggcggagtggatatgggctgccacctccatcacatccccagttccgagccatgaattggcatgaagttggctcatggatttgagattttgtgctccaaatgtagcccacatttttctgactccaggaaatcccttgtgactgcttcacccctctgggccagcttccttgaaagtctgaagaggaatgattactttaagggactgatagaaggttctgctcagtaccaggaaagactagaaatggcaaagaactacttccagctctccatacaccgcccggaaagttcagttgctatgagtccaggtgaggaaatcttaaccgtgttgcagacactgccttttgatgtcgaggagctcaagaaagaaggagccgctcttcctcctgaggatgatgaccagtggttagacctctcaccagaccagctggaccagctgctgcaagacactacaggcagaaaagagtcacagcccatttcccagaaggaggagcagaagaattatgatgtagcacaggtctcagacagcatgaaggccttcatctccaaagtctcaacccacaagggggcagagctgccaagagacccttctgaagctccaatcacttttgatgcagattcttttcttaattatttcgataagattttaggcacaaaatctcaagagtcagactctgatgatctggatgaagatgactttgaatgtttagacagtgacgatgacttggactttgaaactcaggactctgaatctctgaaaggagctcttggcagtctcaagtcctacatggcccagatggaccaggaactggcacacaccagcatgggtaaaagcttcagtacccggaagcaaatgaagaaggaccttccatcccagactgcaaatgacaattcagatgaggaagactcaggcgcaggtgattgtgttgtcgaaacagtggatgtagacctaaacctggtctcaaatgtactggaatcctacagctcccaggccgggctggcagggcctgcttccaacctgttacacagcatgggtgtgcgactccctgacaatgcggatcacatcccccaaggaagccagtgaagggttagcctgcacatcagcatttaactttttttttntttttttttggtttat

SEQ ID NO: 2481 - DNA, 1938 bp, Cricetulus griseus
cgccgggagggagcgaggccgcagtcaccgcggcgcgcgctcggacccgccggcgtcccgcgctcaccgtgcggccatggcctccgcgtcgggccggcgcggctcagagactgagcgactgctgaccccccaatcctgggtatgggtcccaggtgggaacttcgccagccccaacaactcccccagaagaggaagacctccgccgccgtctcaagtacttctttatgagcccctgtgataagttccgggccaaaggtcgtaagccctgcaagcttatgctacaggtggtcaagatcttggtggtcactgtgcagctcattctctttgggctcagcaaccagctggtggtgacattccgggaagagaacactattgccttccgacatctcttcctgctgggctactctgatgggccggatgacacctttgctgcctatacacgggaacagctctaccaagccatcttctatgctgtggatcagtacctgatactgcctgacatatcccggggccggtatgcctatgtccgtggtgggggtggcccttgggccaatggctctgctctggctctctgccagcagtactaccaccgtggccatgtggacccagccaatgatacctttgatattgacccaagggtagtcactgaatgtatccaggtggaccctcctgacagaccccccgacatccccagtgaggacttggatctcttggatagcagcaccagttacaagaacctcacgttgaaattccacaagctgatcaacgtcaccatccacttccagctgaagacaattaacctgcagagcctcatcaacaatgagatcccagactgttacaccttcagtgtgctgatcacgtttgacaataaagcgcacagtgggcgaatccctatccgcttggagacccagacccacatccaggagtgtaaacaccccagtgtctccagacacggagacaacagcttccggcttctatttgatgtggtggtcatcctcacctgttccctgtctttcttgttgtgtgcccgctcactgctacgtggcttcctgctgcagaacgagtttgttgcattcatgtggcggcggaggggtcgggaaatcagtctgtgggaacggctggagttcgtcaatggctggtacatcctgttggttaccagtgatgtgcttaccatctcagggactgtcatgaagattggcattgaggcaaagaacctagccagctatgatgtctgcagcatcctcttgggtacctccactctgctcgtctgggttggtgtcatccgctacctgacttttttccacaagtacaatatcctgattgccacgcttcgtgtggcactgcccagtgtcatgcgtttctgctgctgtgtggctgtcatctacctaggctattgcttctgtggctggattgtcctgggaccctatcacgtgaagttccgctcgctgtccatggtttccgagtgtctattttcgctcatcaatggggacgacatgtttgtgacattcgcagccatgcaggcccagcagggtcacagtagcctggtgtggctcttctcccagctctacctctactccttcatcagcctcttcatctacatggtgctgagtctcttcattgcactcatcactggcgcctacgacaccatcaagcacccaggaggcactggcacagagaagagcgagctccagacctacatcgaacagtgccaggatagtcccacatctggcaagttccgtcgaggaagtggctcagcttgcagcctgctctgctgctgtggaagggactccccagaggaccactcgctgctggtaaactgattccaagatgatcgccactacactttatcccctgtacccctgggaccccagcttatttatttttagaatttgccttttaaaagggtattagaaaaagaaaaaaaaaaaaaaaaaaaaa

SEQ ID NO: 2482 - DNA, 1938 bp, Cricetulus griseus
ctactcaaataggcaaggagatggaagagtaataagtccgtcgccgtttattgaactttcagcacaattttataactcggatccaaaatatttctaatctacagagattaatattcttggacttatatgataaccagattgaagaaatcagtggactttccactctcgaggtccctccgtgtccttctaattagggaaaaacaagaattaaaaaaaatactcaaaatctggagaatctcaaaaatttagatgtcttggaccttcatggaaatcagatcaccaaaattgaaaatgtcaatcatttgtgtgatttgagagttttaaaccttgccaggaacctcttgagtcatgttgacaatctcaatggtctggattcactaactgaacttaacctccgacacaatcagatcacctttgtgagagatgtggataatttgccctgcctccaacgtctctttctcagcttcaacaatatatctagctttgacaatgtttcctgccttgctgagtcgacttccctctcagacatcacctttgatggcaatccaatagctcaagagtcatggtaacaaacacacggtccttcagaatatgatgcagctgcgccagctagacatgaaagagaatcaacggaagaagaaagacgtgtggcatctgttgtagaccaaaaaagaggaggagaagaagagggaaagtcataagcagtctttgttgaaggagaagaaacgactaacgattaacaatgtcgctcgaaagtgggacttgcagcaacgagtagccaatctcaccatctctcaggacagaaaggactctgagtcccctcctcaggaaccctgtaagattgatggcagcgccatctctgcgttcccagaggaaacagggtctctagacccagggctcagcaatgcattacaaggcttgtcagtcacagaaacacacttggtggagatagatggagacaccctttcactgtacggctcaggggcattggaatgcttggatcggaactggagtattcaaacagccagcatggtcaccactgtctctttcacattcatcgaatttgatgaaattgtccaagtgcttcccaaactgaagatgaagttcccaaattctctgcaccttaaattcagggagaccaatcttgtaatgctgcagcagttcaacgccctagcacagcttcgtcgggttgaccagttgacaatcgatcctcagggaaacccagtggtcaactttacactctggaaatactacgtgctatttaggctcagccacttcagcatgcagaaaataaatggaacagaggtgacacaaaatgacatgataatggctgaacggctctttggaatcctagcccatgtggcatcttccgagttgcctcagtatcgcatgatttcaattctgggtgatgccaggaaaaagcaattccgatatctactagaaagtaaatgtaaaaaaactggcattatcagtgaggataccagcgacagcaaaaggctcatgggggaaaacacgaatcgtgccacactgaattacaccaccagagaattctaccatgagaagctggaggaaataaaggacaagaagaagttctgcaagatgtatgtagaagaccttgtgaaggaaaccacggcaatcaacatgaaaaacgaggctctgcagaagctgtggccgcagatgttcattgagcttgtcagggacgccgtcattgaaatccgcagcaaggattcctacatgaagctctgcctgcagcagatcactgaccagaaatagggatggctcctactggctagcataagatgcttccaccaacctccagccaagacgtttctcccttttttttgtcctttttattttatgtcatgattcaaagccaagcatatgttcttttttatgagtgaagaataaatacattagtttaaaaagaaaaaaaaaaaa

SEQ ID NO: 2483 - DNA, 1938 bp, Cricetulus griseus
taaatgtctaagaggattttccacagaaggaatgtctttggttccagtaactccctatacatacacacccctgaaatctacttaaagaaggtgcaattgtcaatgtctatgctgttgtgaaattctttaagcctccatacctcagcaaaggaactgattattgctcagtagtaacaattgtggaccagacaaatgtgaagttaacatgcatgctctttagtggaaactacgaagcccttccaatcatttacaaagttggagacattgttcgctttcacaggctgaagatccaagtctataaaaatgagcttcagggaatcaacagctctggttttgcatctctgacatttgaaggaactttagggactcctgtcacagcgcggacgtcaagcaaactgtttagcttcactcctcaggacgaaaaaaaggtagaagccttgcgggtttgggcatccacacacatttcagcttcttcaactgtagtgcagttgtgcgatgttcaacccatgcagtactatgacctcacttgtcagctcctgggtaaagcagaagtggacggaacagcatttcttctaaaggtatgggatgggacaaggacagtgtttccctcttggagagtctccatacaagaccttaattttgaaggtgacttaagtcacattctacgcctccagagtctggtgatagacattctagtctatgataaccatgttcaagtcgcaaaatccgcctccataccaaactgcattctgttaatacagacaccaacagttcattgttaaggctggagtttcatctccatggagggaccagctatggtcgaggaatcagggttttgccagaaactagctcttgtgtggatcagctgaaaaaagatttagaaggtgcagatttggcagtcaatcagccctcaaatagtcaatcagcaaatgaggacaactttgaactttcaaactccggatcaggctcagtatcactgtatgaggtagagcgatgtcagcaagtctctgctacaatacttacagatcaccagtatttagagaaaacaccattgtgtgccatattgaagcaaaaagctcctcagcaatatcgaatccgtgcaaaactgagatcatatatgcccagaagactttttcagtctgttaagcttctttgtcctaaatgtcattctttgcaagaagttccatacgagaacaatttggataaaattttgcaagatgctgcagctatagctccaaacagcaagctgcaagatacaacactgtatgactcgaaagtctggtccactgaaggccaaggaggacggcaggtggctgttcattttgtgaagaatgataacattctccctcctttcaagtgaatgtttaatttttgatagaaggaggaaggctctgtgaagtctccaaactgtcgagtaagttttcacagtgtgattcctgtgaggtccggccctgaggacctggagctgttagacctttcagcaccattcctcatacaaggaaaagtgtatcactatggatgtaaacagtgttcaaacttgaaacctatacaaaacctaaattcccttcttaataaaggactatggattccttccgctgtggcagaagttctaggaattgtacctctacagtatgtgtttgttatgactttcactctggatgatggaacaggagttctggatgtttatctcaaggattctgagaactttttcaagatcccagcatcagaaatcctcactgatgacgaccatcagagaagtttagaaacaatcatgaatatgatatgccctccagaaataaaaattgatgcatacccatggctggagtgcctcatcaaatcctacactgtcacccttggaacagagcgaagaatttgttaccagatttttgacaccacagttgcagaagacaacatctagtgctgccattcagtgcagtg

SEQ ID NO: 2484 - DNA, 1937 bp, Cricetulus griseus
agagtcagaaaagaacagaagtgatgacccagtggatgtacaagtcaacgggaatcttatcaaggagcctgacaatctggagtcggaagacaacagggctgcacagctgaacatgcggggagtgtttctgcacgtcctcggagacgccttgggctccgtgatcgtggtagtgaatgccctgctcttttacttcttctggcagggctgttctgaagacaacttctgcataaacccatgtttccgtgatccctgcagaacctccgtagagatcatcaacagcacccagacggtggttcgagaggccggtccctgctgggtgctctacttagatccaactctgtgtgtgataatggtttgtatacttctttacacaacctatccattgcttaaggaatctgctctcatccttctacaaaccgttcccaagcaaattgatatcaaacatttggtaaaagagctccgagccgttgaaggcgttgaggaagttcatgagctacacgtctggcagcttgctggaagcagaatcatcgccactgctcacataaaatgtgaagacccgacctcatacatgcaggtggccaaaaccattaaggatgtttttcacaatcacggaattcatgctaccaccatccagcctgaatttgccagcgtgggctctaaatcaagtgtagtccccatgtgaacttgcctgcagaactcagtgcgctctgaagcagtgctgcggggcgcgacctcaagtcctttctgccaaggatgcagacaagaccccggcagttagcatatcttgtttagaactcagtgagaatctagagaagaagcccaggaggactaaagctgaaggcagcctccctgctgtcgtgatagagattaaaaacgtgccaaaaaaacagcccgaatcatctttgtgagtcttgaaaaaagatgtgatatttgactttgcttttgaactgcaagagaaaatagactccattgaaatactaagtttttgccaagtagtgtaattgaagtccttgtctggtcgcacagtttaattctatttttgtaagaacataatggaactgcataagagagcgttctgcattagcgccttgtgatactagtgcatagtgcagctacgctgtaacactttgtgaaagccagtttaacactatgttacatatctacattgtagaaatacaagctagaacatgaaaaacaatccttaaacgttttactgtattttcacaggaagctgtttacatgtgtgtgtcttgtcagcattctgttattttgagtttctgtagtttttgaggggaaagataaaactaatgtgaagtatttggtgtgtaaactggttttgaatgtttgttttacaagcagataaccatttggacaataaatgtcattaacctgctgtcttaaggtagtcatacacaaataaggagtgtgattctacaatagaaaattttttaatactacgtttcagttaagtgataaaacagtattaagaggtcttgggaaggtggaaaggttttttgttgtcttttttgtaattgaaactgtcctagtgcttcacggtctggtctgggaaatgggactgtaatcgcactattttgatacagcactgcatatatccatacagatgtgtatatggtgatgctattttgttgtactaacaagctctggaatatttagcagtcattttcactggcacaagagcctttcgtatagtaatcaatttaaacttttaaaccaaaaatattaaggttcagtgtctggcagatagatactgaggagaatgtaacatagaattaatatgtggttatataaaaagacacagatcgccatgataggggtctgccttgaaacagcacaatggagtgtcagtgtgtctgtgactttttgagacttttctcgtgttggtttcgtccgctgccacctgtcctctgggccaacag

SEQ ID NO: 2485 - DNA, 1937 bp, Cricetulus griseus
cctcatgatctgctggacatcagacagatgaagggacaaaaaccgaaagccgtggtgatgaaattaaaccggcatctcagagtttgctacctctccagaaaaagtcagcgattacatttctccgcttctgaactttgctgcagaacatgtgccacgggcaaaacacaaagagacacctctctacattctctgcacagctggaatgagagttcttcctgaaagccagcagaaagccatcctggaggacctcttgaccgacatccctgtgcactttgacttcctgttttctgactcccacgctgaagtcatctcagggaaacaagaaggtgtgtatgcttggattggcattaattttgtcctcggacggtttgagcatattgaagaagatgacgaggcggttgtggaagtcaacattcccggtagtgagagcagtgaggccatcgtacggaaaaggacagctggtattcttgacatgggaggcgtgtccactcagatagcatacgaagtccccaaaactgtaagctttgcctcctcacagcaggaggaagtagctaaaaacttgttagctgaattcaacctgggctgtgatgtccaccggactgagcatgtgtaccgagtctacgtggccacatttcttgggtttggtggtaatgctgctcggcagagatatgaagacagattatttgccaacacggttcagaaaaacaggctcctgggtaaacagactggcgtgactcccgacgctccattcctggacccatgcttgcctctggacattaaagatgagatccagcaaaatgggcagaccctgtaccttcgggggacaggagactttgacctgtgtcgagagaccctccagcctttcatgaacaaaaccaatgagacacagacttccctcaatggagtctaccagcccccaatccacttccagaacagtgaattctatggcttctccgaattctattattgcaccgaggatgtcttgcgaatggggggagactacaatgctgctaaatttactaaagctgccaaggattactgtgccacaaagtggtctatcttgcgggagcgctttgaccgaggactgtatgcctctcacgctgacctccatcggcttaagtatcagtgtttcaaatcagcctggatgtttgaggtgttccacaggggcttctcctttcctgtcacatacaaaaacctgaagacagccttacaggtgtacgataaggaagtgcaatggaccctgggggccatcctttacaggacccgctttttgcccttgagagatatccggcaggaggtgttccgggctggccatgggcactggcggggtgtgtcgtttgtctacaaccactatctgttctctggctgcttcttggtcgtcctgctgtccatccttctctacctgcttcggctgcgacgcatccatagcagggcaccccgaactggctctctgtggatagaggaaggcctgccctcccagaagggccctggccccttgtgacactatgtcagcttaaggaggcctctacaggaaaagccatttttgcctcagggtttttctgtatgctcagatggttttgtgatccctttcctttctgttaaaatgaaacccactgattgtaaaccctgctgtctagaggcattgccatttgaatacagctttaactggaggggtgggaaaagggaattcacgtttgtttgtatgttcatttgttttgtttgtttttaaaccagagagttgttaaagctcccctggtgtttttctccagcacactccacactgctcgacagttctcattgtcaaccctgtggttgcattgtctctggcagtgccactgtaagcccataccatggaagagcctggatttgaaacaagaaataaatacacatgttgaaaacaaatttgacattttaagcagaaacctgagaaggacaac

SEQ ID NO: 2486 - DNA, 1937 bp, Cricetulus griseus
gggcagaggctttctgaaaatattcctgcggaccagcaagtagagaaaccaaaaaagaggaaagagtttgaagatgatcttgtagaggaaaattcaagtcatgtggaggactctccatccaagaaaagaaaacttgatgttgaaatcatcttagaagaaaaatgctctggtggtgatggagctgattcaaagaaaaggaaactggaaaggggtgacgtttctgaggatgaagttggaggaaggacacagctctgccgttgctgcccactataatgagcttcaagaagtgggtttggagaagcgcagtcagagtcgcattttttacctaagaaactttaataattggattaaaagtattcttattggggaatttttagaaaaggtacgacaaagaaaaaatcgtgatatcactgctttggacctgggatgtggaaaaggtggtgatttactcaagtggaggaaggggagaattagcaggctagtgtgtgctgatattgctgatgtttctatgaaacaatgtcaacagcgttatgaagacatgagatgtcgtcgtgataatgaatacatttttaatgcagaatttataactgctgactgttcaaaggaacttttggttgaaaaattccgtgatccacaaatgtgctttgacatctgcagctgtcagtttgcttgtcattactcctttgagaccttggagcaggctgatatgatgcttagaaatgcttgtggaaggcttaaccctgggggctattttattggaaccactcccaatagcttcgaactgataagacgccttgatgcttcagaaacagaatcatttggaaatgaaatatacactgtgaaattccaaaagaaaggaagctatcctttatttggctgcaagtatgacttcaacttggaaggcgttgtggatgttcctgaattcttggtgtatttcccattgctaactgaaatggcaaagaagtacaatatgaagctaatatataaaaaaacatttcgggaattctatgaagaaaagattaagaacaatgaaaacaaaatgctcttgaaacgcatgcaggccctggagccataccctgcaaatgagaactctaaacttgcctctgaaaaggttggtgactatgcacatgcagcagagtacatgaagaacagtcaagtaagattacctctgggaaccttaagtaagtcagaatgggaagctacaagtatctatttggtttttgcctttgagaagcaacagtgagcacttagttgtctcagagtgcactccatctttccagatgtaacaaaccatctcatacatttgacagctgttagtttattttaataataagttctaaatgtgtaggatgctgccaaaaagtccagtgtataaatttgacatttactgtctgtgacaggttagcatagaagacgcaggttcagttcccaggcaaccacatggtgactcacaactgtctgtaactgcagttccaggggatctgacactgggtctgagatgggctttagtacttatacttactattagacataggaggagttcccatgaggccaccccctactggaaacagttcaagaagctgcctctttttgtgttcttacctgctcagcctccacccctacactgctccttgttgaagttaaatgactcaaaatgagtttttgaggacaagaatgagaaggtagtcctttccactgttttaatcaataaatgagactttttccagcatatttggaacctacatgtttaattttgccaggacttgtaagtacttgatgagaaaggcatggattttcattacaggatccaggaagaatccattattttgtgctcaatgatgagaatgggtcagaggagctgtgcagacactccaggcctgtcacacagggtaccctccaagggtgagtttcaaaatgaagatcaggggctagagaca

SEQ ID NO: 2487 - DNA, 1937 bp, Cricetulus griseus
tgctggacaaatttgccagcataagaattccagggagcaagaaagagagacctcctcttcccaatctgaagcatctatctgggagcagtgatcactcatcagcgttttcagagacaagggaaaacattcccaagccactatccgagaatgaagtcttaaaacttttgagaacatgatggaagatatgaatttaaatgaagacaaaaaggcaccattgacgggaaaaggacttcagtatcaaaaagaaataggtgatggcagtacattaatactgcttctaagacatttggtggaccagtgccaccaccacctcccctgggatttctcagcggacaaagctttcctccattaaacctgccattgggttgaaaccaaagaaagagtttaagcctgaaatcagcatgagaagattgaattggttaaagatcggaccaaatgaaatgtaaactgtttctgggtaaaagtaaatgaaaataagtatgaaaatacagatttgctttgtaaacttgagaacacattttgttgccaacagaaagtgaaaatgaatacaaatgattttgaagagaagaaagttattaagaaaagaattaaggaacttaaatttctagatcctaaaattgctcagaacctttcaatcttcctgagctccttccgggtgccttacgaggaaatcaagatgatgatattggaagtggatgaaacacagttgtcagagtctttgattcagaacttactaaagcatctgcctgatgaagagcaattgaattcattgtcccagttcaagagtgactacaacaatcaaacctgacatcatggctgtcagtactgcctgcgaagagatcaaagaagaagcaagagctttagcaagttgctggaacttgtgttgctaatggggaaactacatgaatgctggctcccggaatgctcaaaccttcggatttgaccttagctctctctgtaaactaaaggacataaaatcagcagatcagaaaacaacactgcttcacttcctggtggacatatgtgaggaaaagtacccggacatcctgccttttgtcgacgattttgcacatttagacaaagcttgtagagtctctgtagaagtgctggaaaagaatttgaagcagatgggaaggcagcttcaacagcttgagaagaatttggaaacctttccccctcctgaggacttgcatgacaagtttgtgataaagatgtccagctttgttagcagcgcaaatgagcagtatgcaaacctctcagagctcctagacaacatgacacagttgtaccagagtgtaatggcctactatgctgttgacatgaagaaggtctccgtggaggacttttttaacgacctgaacaacttcagaactacattcatgcaagcgttaaaggaaaacatcaaaaaaagagaagcagcagaaaatgacaagcgtgccagaatagccaaagagcgagcagagcaagaacgcctccaacgccagctagagaaaaagcgcttactagaaatgaaaactgaggctgacgagacaggagtgatggatagtctgctggaggccttgcagtcaggggctgccttccgcgacagaagaaaaaggacaccgaagcctaaagcagatattcggcagagtctcagtccaatgtctcagaggcctgttctcaaagtttgtaaccatgaaaaccagaaagcacagttgacagaagggtcacgtccacaccacagtatcaatggcaactccaccaggactccagtcgccaaggagcttaattataatctagacactcataagtctacagggaggatcaaggcagtcgagaaggaagcctgtaatgcagaaagcaacaaaaaaaaggaaatggaacttcttggctctgtttcgaaaagcgaatcagttcctgaagttgaaaccctgctggcaagattacgagctttataa

SEQ ID NO: 2488 - DNA, 1937 bp, Cricetulus griseus
  modified_base (1928)..(1928): a, c, t, g, unknown or other
gaaacatcgaatataaactcaagttggtgaatccgtcccagtaccgctttgagcacctggtgacccaaatgaagtggcggctccaggaggggcgcggtgaggctgtctaccagattggggtagaggacaatgggctgctggtggggctggctgaggaggagatgcgggcttctctcaagaccctgcaccggatggcagagaagccctgactgtgccctgctcctcgtacagtgccaacactggaatcgctggcaccacacgggaacatctggggcttggccttggccctgaaagtgcccttcttcatcgtggtcagtaaagtggacctgtgcgctaagaccacagtggagaggacagtgcgccagctggagcgggtcctcaagcagcctggctgccacaaggtccccatgctggtcacctctgaggatgatgctgtcactgctgcccagcagtttgcccagtcacccaacgtcacccctatattcacactgtccagtgtgtctggagagagtctggaccttctcaaagtcttcctgaatatcctgcctccactcaccaacagcaaagagcaggaagaactcatgcagcagttgacagaattccaggtggatgaaatctacacagtcccagaggtgggaacggtggttggaggaacactatccagtgggatctgccgtgagggggaccagctggtggttggcccgacagatgatggctgcttcctggagctgagagtatgcagcatccagcgcaatcgctctgcctgtcgtgtgctgcgagctggtcaggctgctacactagccctgggagactttgaccgttcactgcttcgcaagggcatggtgatggtgagccccgagatgaatcccaccatctgctcggtgttcgaggcagagatagttctactgttccatgccaccaccttccggcggggattccaggtgacagtacatgtgggcaatgtacgtcaaacggcagtggtagaaaagatccatgcaaaggacaagctgcggacaggggagaaggcagtggtacgtttccgtttcctgaaacacccagaatacctgaaggtgggcgccaaactgctgttccgggagggcgttaccaaaggcatcggccatgtcacggatgtgcaagccatcacagcaggagaagcccaggccagcatgggcttctgagtcctcaaaacagctctaccgctgtccctacaatacataaggtgacttccagccatgctgccaaccgttggcggctctgtgtgttaataggctaggcagagtggctactgccacttgcttcctgccacctttctgagagacatcaagcttggtgtgaccagggaggggcagtccggaagggagaagacaattcagggctgttctcagcatctgtgtgcccgctggttggctcattaaccctggctgcatggtcttgtctactggagggaatggtgcataggcatcttggaccactgtcaggatcgggcatgactcaccagtgtgatctctgcacttcaggaattgtcgtaactggggtggcccttgaaagcacttctttttttatacctcctctcaaggccactaagttgcccttctctacctgactgtggataaaagataatgctcctggccatctggtggacccagggactgaagaaatgacacagagaccatgaaagactgtgtccctaccctgtgttgagtcctgatgcatcttcctggctttattttgttgcccttcactcaagggcggtttccccagatcctccttggccccacttggtgctatttgtggtgctggctcaggcgtggggctgccaagctaagacttggcacaccaaaggccagctgcatgtcagtttatttcctatttaaatacacatatatattgtacagaataaaaaaagttttatttggtaaaaaaaaaanaaaaaaaaa

SEQ ID NO: 2489 - DNA, 1936 bp, Cricetulus griseus
gtgtcctctggatactctttgtttatattgaagcagcaattagattcaaagatctgaaaaattttcatgtagacctttgtcgtccatttgctgctcactgtattgggtaccctgtggtgactttgggctttggcttcaaaagttacgtgagctacaagatgcggttaagaaagcaaaaggaagttcaaaaggagaacgagttttacatgcagcttcttcaacaggccctccctccagagcagcaaatgttgcagaagcaagaaaaggaggccgaggaagcagccaaaggattgccggacatggattcctcgatccttatacatcacaatggaggcatcccagccaacaaaaaactttccacaacgctgccagagatagaatatcgagaaaaagggaaagaaaaggacaaggatgccaaaaaacataaccttggaataaataacaacaatattctacaacctgtagactctaaaatacaagaaattgagtatatggaaaaccatatcaatagtaaaagattaaacaatgatcttgtgggaagtacagaaaatctcttaaaagaggactcatgcactgcttcttcaaaaaattacaaaaatgccagtggagttgtgaactcctcacctcgaagtcacagtgctacaaatggaagcattccttcctcgtctagtaaaaacgagaagaaacagaagtgcactagcaagagcccaagtgcacataaggacttaatggagaactgtattcctaacaaccagctaagcaaaccagacgcgctggtaaggctggaacaagacatcaaaaagctaaaagctgacctgcaagccagccggcaagtggaacaagagctacgcagtcagatcagctccctctcaagcacagaacgagggatccgctcagaaatgggccagctccggcaggagaacgagctgctgcagaataagttacataatgctgtgcaaatgaagcaaaaagacaagcagaatatcagccagctggagaaaaagctaaaagctgagcaggaagcccgaagctttgtagaaaaacagttaatggaggagaaaaaaaggaagaagttagaagaagccactgctgcacgggctgttgcctttgctgccgcatctaggggagagtgcaccgaaaccttgcggagtcggatcagagagctagaagccgagggcaagaagctcacaatggacatgaaggtgaaggaggagcagatcagggagctggagctaaaggttcaggagcttcggaagtacaaagaaaatgagaaggacaccgaggtgttaatgtcagcactctccgccatgcaagacaagacgcaacacctggagaacagcctcagcgcagagacaagaatcaagttggacctgttctctgcactgggtgatgcaaagcggcagctggagattgcccagggacaaatccttcagaaagatcaggaaatcaaggacctaaaacagaagatagccgaagtcatggccgtcatgcccagcataacatacagtgccgccaccagtcctctgagccctgtgtccccccactattcttccaagtttgtggagaccagcccctctggactcgatcctaatgcctctgtctatcagcccctgaagaaatgaaggccagctgtgtgtttgcccaaccatttggaaccagaagtctttgaaaagcagcgtctctggtggtcaagataaaaacgttgataattgtgttttgtgggactgtatatgttgtcatttttaaaggggggaaataacatccaagtctgactagaactgcccatcagttgttcttgtaagtttttagaagacctcacaggactttgcagtttatttttcttggccaacacattaaaaccattcttggatttcaagtagcctaattttgcctttctatgtatttttacatagtttcctcttgaagaacaaaaaaa

SEQ ID NO: 2490 - DNA, 1936 bp, Cricetulus griseus
gaggtgagagccagcaggaggtccagcgcctccaggcccagctgaatgagctgcagacccagctaagccagaaggaacaggcagctgaacattacaagctacagatggagaaagccaaagacccattgcccaggtgcggagcctggaggcgcaggttgcccatgcagaccagcagcttcgagacttgggcaaattccaggtggcaactgatgccttaaagagccgtgagcctcagaaaccccagctggacttaagtattgacagcctggatctgagcttggaagagggtaccccatgcagtgtcactagcaagctgccttgtacccagccagatggcaccagtgtccctggagagccagcttcacccatctcccagcgcctgccccacaaagtagaatccctggagagcctctacttcacccccattcctgctcggggtcaggcccccttggagagcagcctggactccctgggggatgccttccctgactctggccgtaagacccgctctgctcgccggcgtaccacacaaatcatcaatattaccatgaccaagaaactagatgtggaagagccagacagtgccaactcgtccttctatagcacacagtctgctcctgcttcccaggccagtttgagagccacctcctccacccagtctctggcccgcttgggctctcctgatgatggtaactcagctctacttagcctgcctggctaccggcctaccactcgaagctctgcccgtcgctcccaggccaggatgtccagtggtgctccccaaggaaggaacagcttctatatgggtacttgccaggatgagcctgagcagctggatgattggaaccgcattgcagagttgcagcagcgcaacagagtgtgtcctccacacctgaagacctgctatcctctggagtccaggccttccctgagtctggcaaccatcactgatgaggagatgaaaaccggagacccccaggaaactttacgccgagccagcatgcagccaacccaaatcgctgagggtgctggcatcactacccggcagcagcgcaaacgggtctcctcagagacccaccagggtcctggcactcctgagtccaagaaagctaccagctgcttcccacgccccatgactcccagagaccggcatgaaggacggaagcagagcagcactgctgtagcccagaagaaagcagctccagttgttcttaaacaggcggaccggcgacagtcaatggctttcagcatccttaacacacccaagaagctgggaaatagtcttctaaggagaggaggttcaaagaagaccccagcaaaggtctcccccaatactcagagtggtacccgccgttctccacgaattgccaccaccacagctggtgctgccactgccacccctcgggccaagggcaaggcaaagcattaaagagtcaacaccagtgtgtgcgcgtggccctacctgtgtcctcagaactgaccttgtccttttccttctactgtccctctcagtgccttctctgagctcccaggccagtggtggccagccccccccagagacagtgatgtttgtctgcacccttgtctggtgcctgaaaggtaccagtgaagatccaggtatcttttcagagctggcccaggaggcttggagcttggacagtatggggtcttctccctatcttgcctcctgatacagctgcctggaggatgctttttttccagggcagatgggtcctgcgtctcaggggtgggatagggggcagccttaatggcagctcacacttcacctaacccagacttgcactggggtgggatatagaactatgggaaggtttttaagggccagggatggatcttttctaaatgttattacttgtaaataaagtctatttttctcccttgaaaaaaaaaaaaaaaaaaaaaaaaaaaaaaaaaa

SEQ ID NO: 2491 - DNA, 1935 bp, Cricetulus griseus
gtggaaagcagcctgagcggcggcggcggcggcggcgggcgggcggcggcggcaaagaccgccgtggcgccgggagcagcgagccgaagggaacgcggagcgacggcgacggcggggacccggtgacagcgcgagaggtactaagtgtaacaagtttgcatcatgcgtgaatataagctagtcgttcttggctccgggggtgttggaaagtcggctctgactgtacagtttgttcaaggaatttttgttgaaaaatatgatcctacaatagaagactcatatagaaagcaagttgaagtagatgcgcagcagtgtatgcttgaaatcttggatactgcaggaacggaacaatttacagcaatgagagatttgtacatgaagaatgggcagggctttgctttggtttactccatcacagcacagtctacatttaatgatttacaagatctgagagagcagattcttcgggttaaagacactgatgatgttccaatgattctggttggtaataaatgtgacttggaagatgaaagagttgtagggaaggaacaaggtcaaaacctagcaagacaatggaacaactgtgcattcttagagtcctctgcaaaatcaaaaataaatgttaatgagatcttttatgacctagtgcggcaaattaacagaaaaactccagtgcctgggaaggcccgcaaaaagtcatcatgtcagctgctttaatgtcctgggtgcattgtagctctgagccaggtctgaagaactgttgccctattcaacagtgccagcattccaactttgttaaacctaccaacatcttaaacggactttcctgtggtggttcccttaagaggcggatgaaagctactctatcagtttgcacattctgattactgtccagtgtcacgagagatttttacttatataatagttctagagaatgcagctggtcagaccagaggctacatccagtattactgctaagagacattcttcatccaccaatgttgtacatgtatgaaaacggtgtactgtatactttaacacaccccatactttgtattggagagtacagtaatgtaaatcctaaaagcaccactattttagcataataaaagaaagtccaaagagctcctatatagactactccagataacttcgcttctttgatacttattgtagcttattgtaattttttttaaattcaaggtcattatcattgtattatacaaaataagcgctttgattaacacagctatatagttttttaatttttcaaaaacctgtggagacagtgatcttgtctttaaaatatgatagccctttcagtataatgtcttagattaaagacgttgcctttaatatctgttgggaaggaaatgtccagacttttcaaatctccttattatatgtttccttttttgtttacatagggaacaatgtttatagttgtgtgtacagtgggggtctacaacaagaagtgtatattttcaaacaattttttaatgatttaacaagttttgtaaatcattttcaggcttctgcagctgtagattctcactgtgacccccttgcttgctcatgcatatgtgtgtctgcaataccaaatatacaggtttagtacctttgcctgttagtgattgtttcccatgtgtaacgttttggttgagatgttaaatggtggacgagtactgtggatgtgaatgtgggaagtaattttaatcatgtgtaattggtcacaaggcctaattgcagtaactattgctgttttatttaacaatgccttgttgctttgtatgcattaacgtttgggtgtaaagattgtgtgtccatccaacagggagccacagtatttaaattgaccaacctgatgttacaacgactttgaggtggccaaatgtaaactaaaagccttaattaaagtggtgcaattttgtataa

SEQ ID NO: 2492 - DNA, 1935 bp, Cricetulus griseus
gcccgcgactgcgtctgctgctgttggagagcgtttctgggttgttacagccgcgaacggggtccccgttgcccctgtgcatcccccaatccactgggccccgcatttgcctgggctcatgtgcttattgcggctgcatgggacagtgggtggggctcagaatctttcggctctaggggctttggtgaatatcagtaatgcacatcttggttccatcaaaaccggtttgaaggcttgtgtctgctgtccttgttggtaggggagagccccacagagctgttccagcagcactgtgtgtcttggcttcggagcattcagcaggtgttgcagtcccaggactcaccatccacaatggagctggctgtggctatcctggagggatctgctccgatatgcatcccagccttcctacgaagatagtcttgaggtctcctctttctgctcagaagcactagtgacctgctctgctctgatacacccccgagttcctccccttcagagctcaggccctgcctgccccacacctgccccagttcctcctcctgacaggtcccattcccacagtaggcgcaatttcctcagctggccctatgccatccacaggcctggtgccctctcgccctggacctccagcaacagccaaccacttaggcctctctgtcccaagcctggtgtctgtcccacccaggctccttcctggccctgaaaaccaccgtgcaggctccagtgaggaccctgtcctggctcctagtgggacccctccacctagcatacccccagatgaaacttttggggggagagtacccaggccagcctttgtccattatgataaggaagaggcatctgatgtggagatatccttggaaagcgactctgatgacagtgtggtgattgtacccgaggggcttccgtccctgccacctccaccaccgtcaggcagtcctcccccgtggctgctactggcccaccgacagcctcccctcctgtgccagccaaggaggattctgaagaactgcccgcaactccagggcctctacccccaccccaccccctcccccacctgtttctggtcctgtgacacttgcaccaccacagctggtccctgaagggactcctggagggggaggacccacagccatggaagaagatttgacagttattaatatcaacagtagtgatgaagaggaagaagaggaggaagaggaggaggaagaagatgaagatgaggaggaagaagactttgaggaagaggaggaagatgaagaagagtattttgaagaggaagaggaggaggaagaatttgaggaggaatttgaggaggaggaggaaggtgaattagaagaggaggaggaggaagaggaggaagaagagttggaagaggtagaagatgtggagtttggttcagcaggaggagaggtagaagaaggtggacctccaccccccacgctgcctcctgctctgccacctacagactcccccaaaatacagcccgaggcagaacctgaacctgggctcttactggaagtggaagaaccaggggcagaggaggtgccagggcctgagacggctcccacgctggccccagaggtgctcccctcccaggaggaggtggtgcaggaagggggaagtcctccagcagggcctcctcaggagcttgttgaagaagagtcctctgctccccctaacttctggaagaggggactgagggtggaggtgacaaggtgccaccaccacctgagacacctgcagaaacagagatggagacagaagcagaagctgcatctccacaggaaaaggagcaagacgacacagctgccatgctggctgacttcatcgattgtccccctgatgatgagaagccaccacctgacccagagcctgactcttaaccccttctgcaccctaacactttgtatccaataaagttatgtctgt

SEQ ID NO: 2493 - DNA, 1935 bp, Cricetulus griseus
  modified_base (1246)..(1246): a, c, t, g, unknown or other
ggtccggcccactcggaggggcgcctcagcgggagtgctgcggggaccccggagggttgaaggctaagcatggggaagagctgcaaggtggtcgtgtgtggccaggcatctgtgggcaaaacttcaatccttgagcagctcctgtacgggaaccacgttgtgggttctgagatgattgagacccaggaagacatctatgtgggctctattgagacagaccgaggggtgcgggagcaggtgcgtttctatgatactcggggtctccgggatggggccgagctgcccaggcactgcttctcctgcactgatggctacgtcctggtctacagcacagacagtcgagaatcgtttcagcgagttgagctgctcaagaaggaaatcgacaagtccaaggacaagaaggaggtcaccatcgtggtccttggcaacaagtgtgaccttcaggagcaacgtcgtgtagaccctgatgtggctcagcactgggccaagtcagagaaggtgaaactgtgggaagtgtcggtggctgaccgccgctccctcctggagcctttcatttatctggccagcaagatgacccagccccagagcaaatccgccttccccctcagtcgcaagaacaagggcagtggttccttggatggctgaagagctgcccttctttcttcgctatcccaaccccattccaggatgggtcgagggcacaggggtgcaaaagcaagctgttcttccagtcagtaagggaacagccttctaggccaggaagctgggctggcccaggccagtgccacttttgtcccctcttaactccaagaagtgcaagtgaacttgattgctggcccgccccttgacccttccatggtagtccccaccccacccccagcttacatcacattttctccactgttacctggacacttatgtctacatagtgtctcttccatctgcctggggcaggaaacagggctggcatgccaaagtgcccagtccagggtccggctcctatcagggattccaactctctcaatttcctgccaataacacagcaccagcctgggcttgagaaagtgaccaggtattatgagcgcacagttatatgtgctggtttagggttggctcctcgtcccttaccctgacctttcccctggcttgttgaaggctgggaaaagccaggctcctgggagtggcattttctgtctgatctccacccatctcccagctgtttgactttctcttcctgctctgggancagaggtcattggttgaggtagagtgggacaggagcttggatgattacttagagccttggcagctctgtgattttttaaagccagtggcttgggcctcctgtgtctgcccctgcttcaccctcttcaaggtgctacacctaccagccctggaggctggacaagcctctcctttaaccaccagggggcaggagtgcactctgtgctcagtggcacaggtggcacagcctgtggacttgcccatagtgggtgtccagccctcctcgttgtttttggctagtagctggacttatatttatattctctctctgtatttatatgcctgacaccttggtgaaggtgggataagccgctcctctagcccctcctccttacctcagatgcctgaacagaaccaggcaaagcactagcagcttcctaggagctgacaggccttgcagctggggcttgtgctatcaagtgagcgtataacccacaacttctggtgcccgccttgagcttctgatgtgcacaccttacctgagttagacactacagccaggccacctccgataccaccccttctccccagaacaggcgagaaggggctggtgcccagggctgggcaaggagagtcaggacatctacaggctcaggctcgaagttcatttattaatgtgttggacacaataaaaccacaactgctgttatc

SEQ ID NO: 2494 - DNA, 1935 bp, Cricetulus griseus
gtgcgcccagacccttgcagcagtgggagttggtgcctattgaggtgtttgaggcaaggcaggtgaaagccagcttcaagaaattgctgaaggcctgtgtacctggttgccctgccactgagcccagtgcggcttcctttctgcgctcactggaggactcggaatggctgattcagatacacaagctgctgcaaatatcggtgctggtagtggagctgctagactcaggctcctctgtcctggtgagcctggaggatggctgggacatcaccactcaggtggtatccttggtgcagctgctctcagacccattctaccgcactctggagggcttccgcctgctagtggaaaaggagtggctatcctttggccatcgtttcagccaccgtggggcccacacccttgctgggcaaagcagtggcttcacacctgtcttcctgcagtttctagattgtgtacaccaggtccatttacagttccccatggagtttgagttcagtcagttctacctcaagttcctcggttaccaccatgcatcccgccgctttcggaccttcttgctggactctgactatgagcgtattgagctggggctgctgtatgaggagaagggtgaacgcaggggccagctgccatgcaggtctgtgtgggagtatgtggaccggctgagcaagaggacccccatgttctacaactacacatatgcacccgaggacacagaggtgctgcgaccttacagcaatgtgtccaatctgaaagtgtgggatttctacactgaggagacactggctgagggccccccatatgactgggagctggcccaggggccccctgagcctccagaagaggaacggcctgatggaggtgctccacagagcaggcgccgtgtggtatggccgtgttatgacagccgccctcgagtccaacctgatgccatctcacgcttgctggaggagctgcagcggttggagacagagctaggccgaccttctgaacgctggaaagacacctgggaccgtgtaaaggctgcgcagcgccttgagggccggcaggatggacgtggtacccctagctcactactggtgtcaactgtaccccaccaccgccgctcgttaggtgtatatctacaggagggacctgtgggctctactctgagcctcagcctggacagtgaccagagcagtggctcaaccacatccagctctcgtcaggctgcccgacggagcaccagcaccctgtacagccaattccagacagctgagagtgagaacagatcctatgagggcaccctgtacaagaaaggggccttcatgaagccctggaaagcccgctggtttgtcctagacaagaccaagcaccagctgcgttattatgaccaccgagtggacacagaatgcaagggtgtcattgacctggcagaggtggaaactgtggcacctggcacacccaccataggtgcccctaagactgttgatgagaaggccttctttgatgtgaagacaacacgtcgcgtttacaacttctgtgcccaggatgtaccctcggcccagcagtgggtggaccggatccagagctgcctgtcggatgcctgacccctcccggccctgcccgggctgctctgcttccagtcgttacagaccactaggggtgggcagggccgccccggccatgtttacagccccggccctcgacagtatttgaggccctgagccccccagcacttgtgtgtacagcccccgccccgccccacctggccagctctaacttattgtggtgtcatggctgagccgtttagggacgcggccatggtacagccctgcattgggcttgtaaatagtccaccccacccggcccatcagtgtgctggccctggccggctggctgtgctgttgtttctagaaccagagtctatataaagagagaactaacgaacaa

SEQ ID NO: 2495 - DNA, 1935 bp, Cricetulus griseus
tggaagtcttgcaggagagtatcaagcgggtcaaggatggacctccctccctcaccaccatctgcttctatgccttctataacacagagcagctgctgaatactgcagagatctcctctgatagcaagcttctggctgctgggtttgacaactcctgcataaagctctggagcttgcggtccaaaaagctgaaatcagagccccaccatgtggacacatcccgtatccgtctagcttgtgacactctggaggaggaggagagtgaggaggataatacaggcacagagatgaagatcctgcgaggacactgtggcccagtgtacagcacaaggttcctcgcagacagctcggggctgctctcttgttctgaagatatgtccatcaggtactgggacctagggagcttcaccaacactgtgctgtatcagggacatgcctaccctgtatgggatgtggacatcagcccctacagcctatattttgccagtgggtcccatgaccgtactgccaggctgtggtcttttgatcggacgtacccgctgaggatatatgcaggacacctggctgacgtggactgtgtcaaattccaccccaattcaaactacttggcaacaggttccactgacaaaactgtccggctgtggagcgcccaacaggggaactcagtgcggctattcacgggtcaccgaggtcccgtgctttccctttccttttctcccaacggtaagtacttggcatccgctggtgaggaccagcggttaaagttgtgggacttggcctctgggacgctttttaaagaactgagaggccacacggacagtatcaccagtctggcctttagcccagacagcggtctggttgcctctgcctccatggacaactctgtacgtgtctgggacatcagaagcacgtgctgcaacacacctgctgatggctcttcgggtgagctcgtgggcgtgtacactggacagatgagcaatgtcttgagtgtacagttcatggcctgcaacctcctcctggtgactggaatcacacaagagaatcaagaacattaattttttattcaggtggcagacttggtggggctggaaaactggtcacagtccaggacttgctaaaactgaatcagtgattgcaaaagagccctcccctaccccacactcacccaacacagctctggtgcacaagactccagttgagagctgtatgctcaggcttgatgcctcctggctctatgcaggcaccttgcttttgcatttccctcttcccagtagggttactggaacagttgcagaactcctctgtagcagctgtagacagtgtctcctgtggctacccctcaagggaagtggtgacagggactaggaaaggaagggatgatctagcagtctttccttttccataatgatagaaccaggatttttattattattattaataataattattattattgaggaggaaacctagcattggcagtgactcctggcactggctatgatacttggaattttgaggttcagggaattcagactttggtagcccatgtatcaggagaaaggggtaccatataatgtgcttttgcaagcaggcaggtagcttaactgaacattgagctcttgcagtgatggtgggagagaaagattcttttactggctgcactctgtcagtacttctctaccctagaagaaatattatggtgggcagaggatgggcctcagcacttgagtcgattgtccaaggttccatccctagcaccatcaacaaaattatgataaagaataattttgaataaatcacaaaataggcttgaaaagctggatttccagatgactgtttattctgagatgtggtctttttggtgttctttctcccttcaatgattattttgttatttttgttttctattaaaatgtatttagtttacaaaaaaaa

SEQ ID NO: 2496 - DNA, 1934 bp, Cricetulus griseus
ggctgatttggaaagttgcgcccgggctccagcatcacggccagttcttctcactgtcgccttctcctccgcggggtcctggccccaccaacacccgtagctccgcctgtccagggcatgtgagccgccgcccctgaagccgggcgggaggctccggcccgggctccagcaggcagtgcacggcctaggggtgcgccctggtcccagccacgctcgccatgggcatccagggtatggagctgtgcgccatggctgtggtggtgctgctgttcattgccgtcctcaagcagttcggcatcttggaacccatgtccatggaagacagcagtgacagtgaactggagttgtccacggtgcgacaccagccagagggcttggaccagctgcaggccctaaccaagttcaccaagaaggagctgcagtccctttatcgaggctttaagaatgagtgtcccacaggcctggtggatgaagagaccttcaaagtcatctactcacagttcttcccccagggagatgccaccacctatgcacacttcctcttcaatgcctttgatgctgatgggaacggggccatccactttgaggacttcgtggttgggctctccatcctgctccgagggacggtcccatgagaagctcaagtgggccttcaatctctatgacattaacaaggatggttacatcaaccaaagaggagatgctggccatcatgaaatccatctatgacatgatgggccgccacacctaccctgtcctggcgggaggacgcacctctggagcatgtggagaggttcttccagaaaatggacaagaaccaggatggagtggtgaccattgacgagtttctggagacctgtcaaaaggacgagaacatcatgagctccatgcaactgtttgagaatgtcatctaggacacatgggaggggaccctgggtggtcattgcttctcacgcccggagaagcctcaatcctgcctcacatgagcagcctctatgaagaaacatttttctaatatatttgcaaaaactgaacagtttactcccaagacagacacacacacacagatgcacacacacaaacacacacacacacacacacacacacacacacacacacacacacacacacacaatccatcctgtgcctcagagccttgggggtctcacagctcttccccagcccagctcgccaacattctaaagcacaaacctgaggactgtgctcgcctgagctgcaccctggggatgggagaccacatcagctctaagctgaagctagccatgagcatggggacctgtgaccaggcaaggtcaacagaccctcaggaggagagagagctgttcctgcctgcccaggcctcccccataagggaccatgtccccaggcagcatgttacccagaggaacattcccacaaatacattccatcaactgcagcccagtctctgcccaggcccagttctgagagtccctgggtgttccccagaaggccagccccaggataagggaagtctccagaggaaaggcagggtgacagtgacccccatacacaggtggactcccatctcagggctgcactgatcccatctccatcctgattgggggtccccttcaccccatctagagaccatcagctttccctggctcagggacctcccctaccccagcctggcccttcccactggggttcctgtgcttgtgagaaaccaaggccacaggagaagattaccattctagcctgccccaccccttagcctctggctgcacgcccaaccagggggtctgtcccccttgcagggggacacagactggccgcatgtctgcatggcagaagcgtctcccttgggtgcagcctgggagggtggttcctgtctcagtgcccaccaatattcagtcctatatattttaataaaataaacttagaacaaagga

SEQ ID NO: 2497 - DNA, 1934 bp, Cricetulus griseus
  modified_base (343)..(343): a, c, t, g, unknown or other
tggaaaaaagtttcttttgggaggtgctccttttcatctgatactttggggcccacctgggatgaagacgaagcagaatccacgggtgaaattataaggcttggagacaccgcacataccttttccataagaagtcatggtgctcaaaattccatggacatgcagtctagcaaagttttagcttcaccaggcactaaaccatatgaggaagtgtggaaccccatctcattgagttttccatctaagaacggaatgacttttgaagcagcagaaaccccttctctgagtatggttacaagtgccaggaaattaggtgagccaatcagagctgccattcccttanatcctccctaccatccttctgagtctcgagcaccttgtcccatagggaagaatacctcgttcaagtcaacttccatgttatctaaagatgatgaacaggaaacatgtctagctccgactcaaagccccaggacaaggaggcttcctaaagggaaaagaaatgaaaatagagctgtggcctcctcagagtatcggccttgccctcagaaggccaggaagtggctaacagaagaagaattgcatgcagtatcagagaaactcaatcagcggctctctgaactagactggatgttaaaaaatgccctgggcaaccgagcagcagataggactgacggtgagactggagatgaagaggtgcacggtggaaatgaggaggagctgctgtcacagaacagtgacagcatcatggagtgcggaccaaagaagcccaggccaggatttttcatgtccagaaagtcaccttacaggtcccattcactgtcaccatcttcagtaaacaaacatagacaattagagaaagagcaacaaaacgcagcacaagtctaaaggaccaggctcacgtcgattacaagcagaggcattaactgaagcatttgaacgggaactaaagaaaaaataaagttacaagagaacattggacttcgagggataagtgatgaggaggcgtcggcagaggaaacagaaaaagcaatacagagaggtcattcctaaaggaaactccaaaacagagtcagatccagaggatttactccagaaaaactgcagctccaagtccaaaaggtggttccctgaagtcgagcaaggcagctatgatgaaagtgaatgaatgtagccttctgcccctgatgctggagcagtttccatttctctatgtctctgacccaacactgaccaaaatgtggaagcagcaaatagcacagattgaacaactcaaaagagaagcacagagagaaaacagatcaaagaagaaactccaggatgaaatagaagaagccctgagaagacatgacctccttactacccttgtcaagaaagaatatgaacataacaagagattgcaagacttcaaggaccgaattcatagacaaaggttgacgaaatcaaagataaaagaaaatcgtcagcaaattgttcgtgcccgaaaatactatgatgattacagagttcagttatgtgcaaagatgatgaggatgagaacccgggaagaaatgatctttaagaaactatttgaagaaggtttacaaattcagaagcaaagactacgagacttaagaaactacgccaaagagaaacgtaatgaagaaaagagacagcaccagaatgaactgtactcaatggaaaactactataaggaccagttttcattgctggcagaagccatatcacaggagcgtcaggaactcaaagcaagagagaaatctcaggctcagacattacataaggtgaagagggagctgagagccaagatggagaaggagatccagcaactgcagtacataataacccagaatgacgacgatgctttcttccggaactagaagcagagcgtttcaaagctacggctgcagctggcttcctccagtacagtaaaa

SEQ ID NO: 2498 - DNA, 1934 bp, Cricetulus griseus
ccaaagaagagtatgttaaattaattctgcctgaacttggtcctgtgtttaaacagcaggagccaatccagaatttgttaattttcctacaaaaatggatttgctcctaaccaaaacccctcctgatgagataaagaacagtgtgctacccatggtctacagagccttggaggctccttcctttgagatccaggagctctgtctaaacatcatcccaacttttgcaaatattatagactatccatccatgaaaaatgctttgattccaagaattaaaaatgcctgtttacaaacatcttcccttgctgttcgtgtgaattcattagtctgcttaggaaagattttggagtacttggataagtggtttgtacttgatgatatcctacccttcttacaacaaattccctccaaggagcctgcagtcctcatgggaattttaggtatttataaatgtacttttactcacaagaaactgggaatcaccaaagagcagctggctggaaaagtactgcctcatctcattcccctgagtattgaaaacaatcttaatctcaatcagttcagttctttcattgccgtcataaaggagatgctgagcagactggagtcggaacacaggactaagctggagcagcttcacatgatgcaggagcagcagaggtctttggacataggaaatcaaatgagtgctcccgaggagacaaacgttgcacatgctggaagtcagcagattgacaaggtctttaacaacattggagcagaccttctaactggtggtgaatcagaaaataaagaagatgggctgcagaataaacagaaaagagcatcacttacacttgaagaaaaacagaaattagcaaaagaacaggagcaggcacagaagctgaaaagccagcagcctctcaagccccagccccacactcccattgtgcccatcaaacagactaaggacttgacagacacattgatggacaacatgacctcattgagcagcctttctgttagcactcccaagctttctgcttcaagtaccttcacgtctgttccttccactggcctcagcatgatgttctctacaccaattgataatacaaagagaaatttgacaaatggtctaaatgccaacatgggctttcagacttccgggttcaacatgccagtcaatccaaaccagaacttcttcagtggtacaagcacagctggagtgaccacgatgactctgggagcagcccccactctgtcaaactacagttctttgagtgttccttctgctggtgtgaagcaggctcaacagagaccaaccgatatgtctgcccttaataatctctttggccctcagaaacccaaagttagcatgaaccagctatcccaacagaaaccaaatcagtggctgagtcaatttgtacctcctccagggtccccaggcctgggcaacgcagccatgggcacgcaggtgaatgtaataggacagactgcctttggtatgcagggtaatcctttctttaacccacagaactttgcacagccacccactactatgaccagtagcggctcagctagcaatgacttgaaagatcttttcgggtgaggtgcccatgctgctctttggagggtcactgcactttcagtcctcggtaagcaggtttacatcgctgtgcagctggcttgaagaaactgcttctgggagagagacagagagcacctgcttccatgccagccagtgcaggagttgtgtggatcctggccagttgaattttttaaagtcattgaggattttctcttacaaacgcctcttcaggtttttaaagatccagtccttactagtctcaaagtacaaaaggacaaccgagttatcttgaatagcagtttttaaatcagatatttattttggcttgtaaatcttcatgttattaaaaaccttaagttgatggtaa

SEQ ID NO: 2499 - DNA, 1934 bp, Cricetulus griseus
tggcttagggcgggagagagcagctgcctgctgtgaggctatcgtggaagactctcaggaagtgttgtctacctaccttcttttttccacctcccctccctcccagctgatggttcctgggaaggaaggtggggtacctcttgctcccaaccagcctgctcacggcacccaggccgatcaggagagactggtgactcatgcaccttctgatggggaccccactgtgctgccacaccctctagcagtgaggacactgagactgtatctaacagcagtgagggacgggcctcaccccatgatgtcttggagactatctttgtccgaaaagtgggagcatttgtcaacaaacccatcaaccaggtgaccctgacaagtttggacataccctttgccatgtttgctcccaagaatttggagctggaggatgctgatcctatggtgaatccccccggaatccccagagaccacgtctcccctccacggcagcctgcactcagatggctccagcgggggcagcagtggcaatacacatgacgactttgttatgattgactttaaacctgctttttctaaagacgacattcttccgatggacttggggaccttttaccgtgaatttcagaatccccctcagctgagcagcctttccatagacattggagcccagtctatggcggaagacttggattccttaccagagaagctggctgtacatgagaagaatgtccgagaattcgatgcctttgtcgaaaccttgcagtaacagtgtcctgagtatccgcagcatccccttcctgtggacccagcagagaacctcctcctcagcagctccctgctgccttcctgctgtttctggccaggtgaaaggcagggtggttccttccctatgggacctacaagtccctgctcttggacctcatgggagcttcagcagggaccatcagcagcagcttcacaaagggtgccattctgttccttcggctgccagcctcctgcctggtctactctgcaactgacccctgcctgcttgatcttactgtcaaccacctgacattccagctggtggccgggacactgggcaaggcagaaagagcaaggagaccaagtgagagtcacagaaagggtctttcctccacatcctccctcagttgctgctgcttggatataggacatggtaaatatttattactttcagagaaatcagatattttatagaaaaaatgtttggggttagcagtgtcactggggaaggaggaggtgtctgtcctgctgctcgagtcactgagactagagcaggactgaggaactattcctccctctccaattccagagtccgtatatggccctgggtttacaagctggattggttcccttttgagaaaccaaagctgagcttttggttgacttaaaccttcaggtattgttgcttgagtaataagtcaagtgcctctgccagcctgccctgttcttctggtccctgattgtcactggcagcagctgttactcattagagcgggtggctcacaactgcttgttagtaatctgcatgtaacactggagcctttcccctgtgcatatgtctgctgccacagagaaatgtgctcagcagtggtggccaaatgacactgcagcctttggatcaggcacattcatggcctactgaaccagatttgcccccagagccagcactgagtggggtgagaacgtggatacttggcaagactcagccagtggcctctgtagacagtagcctttgtgtcccagacctatcagggaagatgccagggaagctgagcagagcatccttcagggtggactgtgcccttcagctctacataatggaaaagatagtctctagaccaactcctgcagccagaactcaggctgggaccaggtaaaatataatcaagagatttccaataaagttttctgta

SEQ ID NO: 2500 - DNA, 1933 bp, Cricetulus griseus
ttgcttctagggctggcaggagtcggcttcttcatccataggaaggaggaaggaccctgagagcccgccagtcctccgaagatgtctattttccaagtcagaacaattgaagcccctgaagacctatgtggacccccacacttatgaagaccccaaccaggctgtactcaagtttaccaccgagatccacccatcctgtgttgcaaggcagaaggtgattggagcaggagagtttggagaagtgtataaggggacactgaagacatcatcagggaagaaagagatacctgtcgccatcaagactctgaaagctggctacacggaaaagcagcgcgtggatttcctgagcgaggccagcatcatgggccagttcagccatcacaacatcatccgcctagagggtgtcgtctctaaatacaagcccatgatgatcatcacagagtatatggagaacggggccctggataagttccttagggagaaggatggtgagttcagcgtgctgcagctggtgggcatgcttcgtggcattgcgtccggcatgaagtacctggccaatatgaactacgtgcaccgggacctggctgcccgaaacattcttgtcaacagcaacctggtatgcaaggtgtccgattttggcctgtcccgtgtgctggaggatgaccctgaggccacctacaccactagtggcggcaaaatccctattcggtggacagcgccagaggccatttcctaccgcaagttcacctcagccagtgacgtgtggagctatggaatcgtcatgtgggaggtgatgacttacggagagcggccctactgggagctgtcaaaccatgaggtcatgaaagccatcaatgacggcttccgtctccccacacccatggactgcccttctgccatctaccagctcatgatgcagtgctggcagcaggaccgctcccgccggcccaagttcgctgatattgtcagcatcctggacaagctcatccgagcccctgactccctcaagaccctggctgactttgacccccgagtgtccatccggctgcccagcaccagcggttcagagggagtccccttccgtacagtgtccgagtggctggaaagcatcaaaatgcaacagtacacggaacacttcatggcagctggctacacagccatcgagaaggtggtacagatgtccaatgatgacatcaagaggattggggttcgtcttcccggccaccagaagcgcattgcctacagcctgctgggactcaaggaccaggtgaacactgtggggatccccatctgagtccccattgcattcccagtgtgccctggggctagagcggcaccaagaccattgactgccacgtgggacctttctgaacagaccttcccatcaccttttctccccaagaagccacctcaggagctgaggttgggcgctgagcccaagaccagatgactagggcaccgtaagccccaccctcattggtagagggtagaatatggacttggctgggtggagccacacccatctaccagtgccttcttcagacccagggccctgccctccgcccttgttgggccaatttcttactttcctggagccccctcaggatgcttgtttgtgttgaggtttttttttttaatacttattttgtacttgtggaaagattgagtgtgtggcagggaccttgccaaggctggggacagaggatgccctgcagtagacattcccaggctgggggctggccagacttgcaggagagtcactgcccagccacctcatctctagcccctttggacgactgtcgctgtcagtgttactgattttattgggttgtttttgttcttgttttttttgaaaccttaacttatttaatttttttatatttattgttagaaaacaacttatttctgctctggaataaagctgcagatggtt

SEQ ID NO: 2501 - DNA, 1933 bp, Cricetulus griseus
taggctccaggcaggactgtaggcggaagcatcaatcctggggagggctgagggactgatgcagttctgtccacacagcgcatgcggtgacgcctcaaaagaatcatggcagcggctgacgcactggccttccatgagttcgaagaagccacaaatcttctggcagagaccccagatgcagccaccactagccaaagtgatgccctgacctcacgggagcacgtgactgtggtcgtgggatcaggtattggctatggagccgaagtggtggaggaagagggcgatagagcatcgcttctacaggaagaaaagccacagccaagattctggacgtttgactactatcaaagcttctttgatgtggacacctcccaggtcttggaccggattaaaggttcgctgctgccccaccctggccacaactttgtgaggtaccatcttagaaatcggcctgacctatatggccctttctggatctgtgctacgttggcctttgtcctggcagttactggcaacctcactttggtgcttgcacagaggcgggacccctccatccactacagcccccagttccacaaggtgactatagctggcatcaccatctactgctatgcgtggctagtgccactggcactgtggggcttccttcggtggcgtcagggcacaagggagcacatggggctgtacaccttcctggagacggtttgtgtttatggctactcactctttgtcttcatccccaccgtggtcctgtggcttatcccagtggagtggctgcagtggctctttggagcactggccctggccctgtcagctgccgggctggtgttcaccctgtggcctgttgttcgagaggatacaaggctggtggctgcagcactgctgtccactgtggtgctgcttcacgccctcttggctctaggttgtaagctgtacttcttccagccattgcccctggaacatgtgataccagcaccccaagccacacttctatctcccagtgtcctgctgcccacctcagcccggtccatgacaaccttctaggaagcaggtcaaaccccaggggctacgacctgtcctgccctccctgtgaagattagaggagtcttggaccctggagaccaccctgctactttgcaggcttttcttacaaagcaaacacttttattttctatgcaaaggtgatccagagaatttatataaaggtggggggggcagccgagcaggaaatattactgatggacagaagagcccggtttcccagcctgcctgtgggccctgtttcccttacaggtcagggggtggcacagggcaggtccagccattgccaggagtacctgtggtgggctctggccactgaggtggggactctagggcaaaggagcaggggagaaactgcctttccttccttgtttgcttttcttcttgttctgtctggagggagaggttcctgctaggccccttctcaggggtgctgtcttgagaggaggaagtagagcatgaatgtggagtgcacacacaggcctatgttagctatcagggagaggatgccctccttccttctgtgacagatccttgaggtttttgtctaccccactggccctaggtgactttccctctgggctgcctgttccaggttttggtggagggggactttagggctcaggacaggacagtagcaggaagcagaggctagaggcctttggacagctgggagttttgtacattcaagtgtgaggtgaaccctttggtgagaggggattacgtccgccctgaaggcttgacagggccacccctcacctagaacctctgggcctagggacaggggctgctggctgggcccggccagccgggtttctcagagggtctgtgggttgacactggttcttttcgtaaaaaaataaaattaaaaaaagcagcaaaaaaaaaaaaa

SEQ ID NO: 2502 - DNA, 1933 bp, Cricetulus griseus
tcgtcacttccgccttcctttcccctgccgtcttcccggcgcggcttgtgagggattatccactgcgctgagttcgtcggaaccatggcgtccctttccctggcacctgtgaatatcttcaaggctggagctgatgaagagagagccgaaacagctcgcctgtcatcctttattggtgccatcgccattggagacttggtgaagagcactttggggcccaagggcatggacaaaattcttctaagcagtggacgagatgcctctctaatggtaaccaatgatggtgccaccattctaaaaaacattggtgttgacaacccagcagctaaagttttagttgatatgtcaagggttcaagatgatgaagttggtgatggcactacctctgttactgttttggcagcagaactactccgggaagcagaatctttaattgcaaaaaagatacatccacagaccatcattgcaggttggagagaagccaccaaggcagcaagagaggcgctgttgacctctgctgttgatcacggttacgatgaagtcaaattccggcaagatttaatgaacattgcaggaacgacattatcctcaaaactccttactcatcataaggaccactttacggagttagctgtagaagctgttctcagactgaagggctctggtaatctggaggccatccatgtcatcaagaagctaggagggagtctggcagactcctatttagatgaaggttttctgttggataaaaagattggagtaaatcaaccaaagagaattgaaaatgctaaaattcttattgcaaatactggaatggataccgacaaaataaaaatatttggctctcgggtcagagttgattccacggcaaaggttgccgaaatagagcatgcagaaaaggaaaagatgaaggagaaggttgagcgtattcttaagcatgggataaattgctttattaacagacagttaatttataattatcccgaacaactgtttggtgctgctggtgtcatggctattgaacatgcagattttgcaggtgtggaacgcctggcacttgtcacaggtggtgagattgcctccacttttgatcacccggagctggtgaagcttggaagctgcaaacttatcgaggaagtcatgattggagaagacaaactcatccacttttctggagttgcccttggtgaggcttgtactattgtacttcgtggtgccacacaacaaattttggatgaagctgaaaggtctttgcatgatgccctttgtgttcttgcccagactgtgaaagatcctaggacagtctatggaggaggttgttctgagatgctgatggctcatgctgtggcaaaacttgccagtaaaactccaggaaaagaagctgtagcaatggagtcttttgctaaagcactaagaatgttgccaaccattatagctgacaatgcaggctatgacagtgcagatctggtggcacagctccgggctgctcacagtgaaggtcgtacaactactggactggatatgaaggaaggtaccattggagacatggcagtactgggtatcacagagagtttccaagtgaagcggcaggttctcttgagtgcagctgaagcagcagaggtgattctccgtgtggacaacatcatcaaagcagcaccgaggaaacgtgtccctgatcaccacccctgctaagcattcccattgctgttgctctctggaccagttcatagtgaagttgtatttgaaagacttcaaccttttgaagaagactatggagttgatgtgtccatgatagccttaagttggaacatttagctgaccttctgttttaaacatgggtctaatttatttgctatttcattttccatacaattcagctgatttataagttcatttctcagactgtgtattaaaataaaaacccagttactta

SEQ ID NO: 2503 - DNA, 1933 bp, Cricetulus griseus
ttcttggcatccatccggtgacctctgacgtgcatccttgacaacacgagttgcttacttacctcccagagaggatccctttccttaggagggccagactgagtgggcgaggactggccaggtccagactatgccgtccaagtcagcttgcctacgtcacacggaggcacctgggcagctggagggcagaatgctccagggacagcttccaaacacagacaagaacctcaccccaacaccgggctccctaccagccaccgagcctcagggttcagagacaaaccccatgcctcctttcagcattccagcaaaaccaagcaaccagaacccacaccctgcctcagcacatccttgcaggagatccctaagaccagaagggccacaggcagtgagggagggagcccatccgtgtggagtgactgtcttcctggaatgatcagcacctccttggacctcctgcacagagagacaaccccaggtgggggctcccccaagttggcaagtttgcatgctgcacacaccaccagccatggacctcaacatagcctccagctccctgagaacagcaaacaaggtggaccctgagcacgctgactacaagctccgcagaccaggctagtcagggcccacagcagcctgggccctagcaggccccggagccccggagctatctagagggaagtcttatggccagcggggccctgctaggagcagatgagctgggtacttcccagaccggaacatggctctctttgtggctacctggaacatgcagggccagaaggagctcccagcaagcctggatgagtttctgctccccactgaggctgactacactcaggacttgtatgtcattggagttcaggagggctgctctgacaggcgggagtgggagacacgtctgcaggagacactgggccctcagtatgtgttgctgtcatcagcagcgcatggggtcctctacatgtccctgtttattcgcagggacctcatctggttctgctcagaggtcgagtgctccacagtaactacacgcatcgtgtcccagatcaagaccaagggggccctgggcgtcagcttcaccttttttggcacttccttcctcttcatcacgtctcactttacctctggagatgggaaggtagctgagcggctgctggactacagcagaaccatccaagccctagccctgccccggaatgtgccagacacaaatccctaccgctctagtgcaggggatgtcactacccggtttgatgaggtgttctggtttggggactttcaactttccgcctgagtggtggacgagtagctgtggaagccttcctgaagcaagacccagaggtggatgtgctggcactcctgcaacatgaccagctcacccgggagatgaagaaagggtccatcttcaggggcttcgaggaggcagaaatccactttctcccatcctacaagtttgacattgggaaggacacctacgacagcacctctaagcagaggacaccttcctacacagaccgagtcttatacaaaagccgccacaagggtgacatctgtcccatgaagtactcctcttgccctgggatcaagacttcagaccaccgtcctgtgtatggcttgttccgggtgaaagtgaggccagggagagacaacatcccattagctgctggcaagtttgaccgagaactgtacttgataggaattaaaagacggatctcaaaagaacttcagaaacaaacaatgaagaatcagagctccagtgctgtctgcactgtatcttgaagtcagacaagtactggccactgcagctcggggaccaaggacactggaaagagattgggcttgttctttggtgcctcttgccatgttggggtctaataaactatggctagaggctttcctgctctcactacagaccccacccctcaggaca

SEQ ID NO: 2504 - DNA, 1932 bp, Cricetulus griseus
cctgcatctgtttggagagtgcctgttcattgccatcaatggagaccacagtgagagcgagggggacctccggaggaagctgtgtgtgctcaagtacctgttcgaggtgcacttcgggctggtgacggtggacagccagctcatccggaaggaacttcgtccccctgacctggaccagcgtgctcgggtgtggaagcactttcagagactgctggggacctacagccacctgcgagaacaggagcagagcttcgctgtagaggctgtggagcggctgattcacccccagctctgtgagctgggcatcgagacgcttgagcgacatgtggttcaggctgtcaactccagccctgagcggggcagtgaggaggccctgcatgccttcctgcttgtgcactgtaagctgctggctttctactccagccatggtgcgagcaccctgcgcccagcagatctcctggcacttatccttctggttcaggacctccatcccacccaagacaccacagaggaggatgacaatgatgacagcagccctcagtctttcccccagaggagacccctgagcagccaaaacatcccagtgcagcaggccaggagccagagcacctcaggccccacgaggagctctgaggagacggacacagacagcatctccctccctgaggagtactttacacctgctccttccccgggcgagcagagttcaggcagcatcctctggctggatggtggtaccccacccacggatattcctcagatggctgagggcaccctccgagggctgatgccacactccccagaaccttccagcccccagaggatcttcctggatgccaatgtgaaagaaaactactgtcccctggtgccccacaccatgtactgcctgcccttgtggccaggcattaacatggtgctgctgaccaagagttccagcactgcactggccctggtcctctaccaactgctggatggcttctccctactggagaaaaagctgaaggagggtcaggagcctggaagcgccctgcgatcccagccctttgttggagacctgcgccagaagatggacaagtttatcaagaatcgcgttggacaggagattcagagctcctggctagagtttaagaccaaggccttttccagaagtgaagcaggatcatcctgggagctactccaggcctgtggaaagctgaagcgacaactgtgcaccatctaccggctgagcttcctggccaccgcacccagcaggggaggcccacacctgccccagcacctgcaggaccaagcccagaaactcatgaaggagcgactgctggactggaaggatttcctgttggtgaagagccggaggaatgtcaccatggtgtcctacctggaggacttcccaggcctggtccacttcatctacgtggaccgtacaactgggcagatggtggccccttctctcagcaacagtgaaaagatgtcttccgagttgggaaaggggcccctggccgccttcgtcaaagccaaggtctgggctctggtgcggctggcacgcaggtacctgcagaagggctgcaccacactgctgttccaggaaggggacttccgctgctcctacttcctgtggttcgagaatgacatgggctacaaactgcagatgattgaggtgcctgtcctctcagaggactcagtccccattggagtgctgggaggcgactactacaggaagctcctgcgctactacagcaagagccgcccctcagaacctgtcaggtgctatgagctactgaccttgcacctgtccgtcatccccacagacctgctggtgcagcaggccagccagctggcccggcgcctgggggaagcctcccgggtgaccctgccctaggcagtatgtgctcattaaaaaaattaaaaaaaaaaaaaaaaaaaaaaaaaaaaaaa

SEQ ID NO: 2505 - DNA, 1931 bp, Cricetulus griseus
  modified_base (1449)..(1449): a, c, t, g, unknown or other
ccatgtttgtctctactttatcactcccacgggcactccctgaagtaccctggacctggtaaccatgaagaaactagatagcaaggtgaacataattcccatcattgccaaggctgacaccatctccaagagcgaactccacaagttcaagatcaagatcatgggtgagctggtcagcaatggagtgcagatctaccagtttccccacggacgatgaggctgttgcagagatcaatgcagtcatgaatgcacacctgccttttgctgtggtgggcagcacagaggaggtgaaggtgggcaacaagctggttcgagcacgacagtacccttggggggagaaggaacgggagctccacgagaagttcgagcacctgaagcgaattcaccaggaagagaaacgcaaggtggaggagaagcgcagggagctggaggaggagaccaacgccttcaactgcaggaaggcagccatggaggccctgcaggctcaggccctgcatgccacttcacagcagcccttgaggaaagacaaggacaagaagaaacaggctacctgggcctccggccagctacccctctctatgcaaacgtgtcaaagccatgaatgctggcatccaaaactgacaaggtttattttttccagagccggtggctggtcttccatttacagtgtcactattccttgacggagcagttatgggccgctctagtgatggccccagccagtgattctaggcctaattgttcatcatcaagccagcgactcatgtggtgcctaggcgtggcctgtggtctggtgtatacatgctgcaaaattcgcctgtttaccttcatttaatttttctaacctagagtcttaatttcaataactctaaaacacttactaaatttttatttttggcaccaatgtaaagacaaataatatctatctttcccattattttcataagtaacacagattgcctgatttttttttttaaacctaaaaagacctctaaaccttcttacatagaaagcacccctatgatatatagggagaggtgggaaataaagttcctattctggcagtgtttgggacttctttacagactgaagtggacccccaacaagacccacgcccagcctttttactgtgaatgtaaatggaacagcagcccaaagcccttgtctctgccctagaggtgctacaaggtgacaggggaccaagtgcatgtgtgttaagtgtttgactccaaaaaagctgcctgctcccaatcaatgtgctcagttgggagaaggctgtcatgtcaaggtcattgttacttttttcctggcttggaggcaaagggaaataaaggtgtctgaagtattagggcaatttgagggttcattcagagtgagctggaggggaaggttgtgagtccactgaggctcaatgcccctaagacctcttgtacctgtgagaggccccanacagcaggagaatagtgtctgctgatgctctgaggaaaatccatgtccagggtggatcctggctgcaaggctggacttagctatttaccaagactgttttaagcaaaagaatataaaattcggttcaggccttggaaaccttgtgagcttcatagctcatctgcctctagtcatggcagaactgatgttggactttggtgtctgaggcagaggtgaactgcaggccagtggctcctcttagggacactgtatattgtgtgtgtgtgtggactccccttgtttagggctcacactgggtaagagacccaggaaagccagcttgcttgtctgttatgttaccatgcatttctaaaaccacttcagttgttaatccatttactcctctatccattgacttgtttttgttcctttccttccactttgtactcatttgttttcattaaattttgcatttattttgaaaaaaaaaaaaaaaaaaaaaa

SEQ ID NO: 2506 - DNA, 1931 bp, Cricetulus griseus
ggaggaggtagggaggaggagacatcgggggtggtcctgggcgcctgggacacctttcctggactataaattgagcacctgggatgggcagggggccgaagcagccaccgccacccacattcacagttcgttcagtgaccgcagcagcgcccttgggcagccgccatccgcaacacaaacactgagaaccggcagctcaaagaggtcaaggctagacccaacctcccactatcatcgcgagccaaagctaggagcagcctcgcatcacgcagggctgggctgcgacagaaaccagagttagagagggccaagaaggatccgggaatcccgcctcaccggttaccagcaggctcctggcaccggcttctgagagtgcttgaaggcaggcatcgccagcgttctatctcggtttaccagtgtcccagcgtttgctcgcccgctcggccaccatgatgcaaatctgcgacacttataaccagaagcactcgctctttaacgccatgaatcgcttcattggcgcggtgaacaacatggaccagactgtgatggtgcccagtctgcttcgcgacgtgcccctctccgagccggagctagacaacgaggtcggcgtggaggtaggaggcagtggcagctgcctggaggagcgcacgaccccggcccccagccccggcagtgccaatgaaagctttttcgcgccctcccgggacatgtatagccactacgtgctgctcaagtccatccgcaacgacatcgagtggggagttctgcaccagccatcgcccccgccagctgggagcgaggagagcgcctggaagtccaaggacatcctagtgggcctgagccacttggagagcacagatgcggccgaggaagatctggagcagcagttccactaccacctgcgtgggctgcacaccgtgctctccaaactcacccgcaaagccaacatcctcaccaacagatacaagcaggagatcggcttcagcaattggggccactgaggcgggcctctccccgctgcccagcaccctctcgggccggctctcccacccctctcttccctccaagctattttcttcctggttgtggggcgcgaagggcacactgtaaagttgggctgtgtacatgtggggttgtgtggagaagagggccccatcacgagagcaaaggaaagtagtcgccagagaggggggttcaaggacccccggagggggcctgctctgtgttggtgggaatgggactgggccgacatctttcattcagcctgtgcctttcttggggtttcttttctgttctttccggaagagaagggcctgagaaagggccatgccagggcacggcgctgggttgccacacttgggagggcagcttctggctgggtgcgggtgcaggggagaggcggggcacagcctcctgcctgtcctgctttgagctgcaagaggaggccctggcgttgctaggattgcgtcagttttcctgtttgcactatttctttttgtaacagtgaccctgtcttgagtatttcgaatttctttgctctgaaacttcgtcgattccattgtgataagcgcacaaacagcactgttggtaatcggtactactttattaatgattttctgttacactgtacagtagtcctgtggcaccccatccctttcacgccacccctcccccacccctgtgtgtgtaaactggcagtgcgccagcttggatgaagcttgccactcggccagcgaaaataacattattataagaaagtggatttatctaaagtggaaccaactgacattctatccgtgtcgtacgtagaatgatgaagggctccactcttgttatatgtcttgtttatttaaaactttttttaatccagatgtagactatattactaaaaaataaaaaagcaaatgtgttaattaaaaaaaaaaaaaaaa

SEQ ID NO: 2507 - DNA, 1931 bp, Cricetulus griseus
gggctcctgctacccgcgcggctgacgggggccgtcgggagcctgaatctggaggagctgagcgagatgcgttatggcatccagatcctgccgttgcctgtcatgggagggcagagccaagcttcagacgtggtggttgtgtcttcgaagtataaacagcgctatgagtgccgcctgccagctggagccattcacttccagcgggaaagggaggaagaggcacccgcttaccaagggcctgggattcctgaattgttgagcccaatgagagatgctccctgtctgttgaagaccaaggactggtggacttatgaattctgttatggacgccatatccagcagtaccatatggaagactcagagatcaaaggtgacgtcctctacctcggctactatcagtcagccttcaactgggatgatgaaacagccaaggcctccaagcagcatcggctgaaacgctaccatagccagacttacggcaatgggtccaagtgtgatctcaacgggaggccccgagaagcggaagtccggttcctttgtgatgagggtgcaggtatatctggggactacattgatcgagtagatgagcccttgtcctgctcctacgtactgaccattcggacttctcggctctgcccccaccctctcctccggcccccagccagcgctgctccacaggccattctttgtcaccctgccctgcagcctgatgagtacatggcctacctccagaggcaagctgagtcaaagcagcatgaggagaaaatcacagaggaggtccaagacacagaccgccaagtgtggggcgagaccaagtctgctggagtaaccccagagaaaggagatgtcagcccagccaaggaacacaaggaatctgaattttggaagatgctgcatgagccagaggaacaggctgcagtaggagaggaggcacaggcagggcaggagaaccggaaccctgaggctacagaagatccagcttccaaccctcccaatgatcttcagaacaatgtgcaggtcaaagtcatccggagcccagcagacttgattcgactgatagaggaactgaaaggtggaaccaaaagggaaagccaagcacagaccaggaacagcctggagatgataccacggaggcccctcggagggaggtggagctgaaggaaaagggggatgaaccccaggctgtttcggaggaggaggaagaggacaatgaggaggaagaggaggaggaggaggaagacgaggatgagcggcagttattgggagagttcgagaaagagctggaagggatgctgctgccctcagaccgtgagcggctccgctcggaggttaaggccggcatggagagggagctggagaacatcatccaggagacagagaaggaactggacccagatggcctgagaaaggagtcggaacgggagcaggcaatactggccctgacagccactctggataaactcatcaagaggctgcaggaaaaccagagtccagacctgctgcagaaacacaagaagaagaagactgtccctcaaaagcctcccccatcaccacctcctacagggaagattgagatcaaaattgtgagacctggagctgaaggtaacgaggaggacacacgctggctaactgatgaagacacgaaaagccttaaggagatcttcttcaatatcttggtgcagggagcagaagaggccaataaagagcgccagagacagaaagacctggagagcaattaccgacgcgtgtggggctctccaggcggtgaggacactggggatcgggatgagtttgatttctgaaaccagagctgccaggccttccaaggattccagaatcttcctgactggctctgcctcctcctcatctcccaccttggggcccccggaggcaaaagggcaggttggaagccaagctctgaacttcagggg

SEQ ID NO: 2508 - DNA, 1931 bp, Cricetulus griseus
ggaaaatgtcaaagacaagcttcgggccatcgtggtgaccctacaatatagtctccaaacacctcggttacggtggcagcgacaagctcctggtcaggggctccccccctcgtggctcccattctcagtgctcaccagcctagcacacagaggacagagatccacttcctgaagcaaggctgtggtgaagataagatctgtcagagcaatctgcagctggtccaggcccgattctgttctcggatcagcgacacagagttccagcctctggaatgacagccctgtttgcactgagtgggcagccattcataggcctggagctgacgatcaccaacctgccctcggaccccagcccgtcctcaggcagatggagatgatgcccacgaagcccagctcctggtcaccctaccaacctcgttgcactactcaggcgtccgggccctggactctgcggagaagccgctctgcctgtccaatgagaatgcctctcatgtcgagtgtgagctggggaaccctatgaagagaggtgcccaggtcactttctacctcctcctcagcacctctggaatcacaattgagaccacagagttggaggtggagttgctgttggccacgatcagtgagcaggagctgcatccagtttctgttcgagctcaagtcttcattgagttgccgctgtccatttcaggggtggctactccccaacaactcttcttctctggcgtggtgaagggtgagagtgccatgcgatctgagagggacgtgggcagcaaagtcaagtatgagatcacggtctccaatcaaggccagtcgctcaacaccctgggctctgccttcctcaacatcatgtggccccacgagattgccaatgggaagtggctgctgtaccccatgcgggtagagctggagggcggacaggggcctgggaagaaagggatctgctctccaagacccaaccatcctccgcctggatgtggacagcagggataggaggccgcgagagctggagcaaccggagccgcaggagcctccagagaagttggagcccagcagcacatcctggtggccagtgtcctctgctgagaggaagagaaatgtcaccctggactgcgcccagggcacggccaagtgtgtggtcttcagctgcccactctacagctttgatcgtgtggccgtgctgcatgtctggggccgcctctggaacagcaccttcctggaggagtacatagctgtgaagtccctggaagtgattgtccgagccaacatcacagtgaagtcctctatcaagaacttgttgctcagagatgcatccacaacgatcccagtaatggtgtacttggaccccatggctgtggttgcagaaggagtcccctggtgggtcatcctcttggcagtgctggctgggctgctggtgctggccctgcttgtgctgctgttgtggaagctgggattcttcaagcgtgcaaagcaccccgaggccactgtgccccagtaccacgcggtgaagatccttcgggaagaccgacagcagttcaaggaggagaagacaggcaccatccagaggagtaactggggcaactcccagtgggagggctctgatgcacaccccatcctggatgctgattggcaccctgatctgggtcctggatggaactcccgtgccagtcactgcctaacggggcatggctggaagggcaggcctgtcctgatgcagaatggggagtaggggtcctgatctccttctctcagctgccctgaataccatgtcttccccaaagtgccttagacagagggtcagggagatcatgtcactgtctcaggggctctcccctccctagtccaccctgtcctctgaccttagtgtgctgttccagcctagtggtttttgtctatttattaaaaaagtatttgacaaataaaaaaaaaaaaaa

SEQ ID NO: 2509 - DNA, 1931 bp, Cricetulus griseus
  modified_base (1680)..(1680): a, c, t, g, unknown or other
gtgtctctaagtctccggggtccgaaggctgtttctaatggaattataaacaagccaaattttacaggaaaagacagataacctgaagaatcaaagctgatgtcagatgaatcatgtgaccttgatgttgaaaaatgaagaacccctaactttgcatggaaccctggaagcactcagcctctttgattacattagcacttttgaaaaggaaaagatggacatggaatctctgcttatgtgtacagttgatgacctgaaggagatggggataccccttgggcccaggaagaagatagccaatttcgtaaaacttaaagcagccaaactggaacagaaaaaagcatcagaaaagaaggtagtgatggctgctgtgacaaagggacaagatgagagtgctctgaaaactaaggaaatggcttctccttctgaatccagcgagtcaaggaggaagctgtcacttggggcctacgtgtcattctttctttgccttgggctctccaagtcggcatgtttctcactatccgaggtgtggacaggattgatgagaactaccgtctccctacctgcaaaggcttcttcaatatctaccatccgctcgatccagtggcatacagactagaacctatggtcgctccagatttgaacttaaaagctgttctcattccacatcacaaaggcagaaagagactccacttagagttgaaagaaagcctttctcgaatgggatctgatttgaagcagggctttatcagctctctgaaaagtgcttggcagacactcaatgaatttgcacgtgctcacacctcttcaactcaattacaagaagaattggaaaaagtggtcaatcaattcaaagaggaagaagaaaatcgagtagttgaagcagaaaagattgaaagtccagaactttccaaggatgaggattacttaggaaaggttggaatgttaaacggaggccgccggattgactatgttcttcaagaaaagccaatagagagttttaatgagtatctcttcgctcttcagagtcacttatgctattgggaatctgaagataccgccctcttgttacttaaagaaatctatcgaacaatggacattagtccagagcagccccagcattgagcagacttgcattttactaggaagttccagcatgagtgctgttgctaaaaggctctgtggtggcgatcgccctttgctcctatgatggatgacagaaaagtgacccagcagcagtttctaacataggcttctcggatgtaggaattcattttaaaaggcgtgggacagaaagacactgaaaaaaaaatcagtaccacatttggacagtatagaaaaaaatataatcataaaatgatgctgtggaaattctcagatctgtttagttgtgtagttatcaaaattaagtatgtcttaatgaagagagatttgtagcatgcaaactgttatttctatttcttgaaactattgtcaatgggtattaaatgtatatttttctttgtattaatgcaatatgttatttttatttaaatatggacttcttgagaaactatagtaacatgatttttaagaaacttatgctaggctgtgcgtggtggcacacgcttttaatgccagcacttgaaaggcagaggcatgtggatctctgactttttttttttttttttttatttttanagttaatttatgaagactgctctgtaacatcagtttgtttactataaactccttacctaaatatttcctaacagacactgggaatgctgatttccttcttttgttacatagcagaaacattttatgttgtttacatagttctcatggaacatggacgttttttgaaaacaacatataatacacatttttgtgtatgtattctaattggtgtgaataaaacagtaacatggatgctcttttcaagctgcaaa

SEQ ID NO: 2510 - DNA, 1930 bp, Cricetulus griseus
agagtttcctattgtggagagactgaactggctgatccatctccactatatccggaaggattatgaagcatgcaaggctgtgatcaaagaacagcttcaggagactcaggggttatgtgaatatgctatctatgtccaagcactgattttccgcctggaaggaaatatccaagaatccctggaactctttcagacatgtgctgttctcagccctcagtgtgctgataatctcaagcaggtggccagatctttatttcttctgggaaaacataaagccgccactgaagtttataatgaagcagccaaacttaaccagaaagattgggagatctgccataacctgggagtgtgctatacttatctaaagcagttcagcaaggcacaagaccaattgcacagtgccctccagcttaacaagcatgacctgacttacataatgctggggaagatccacttactggagggagacttggacaaagccattgagatctacaagaaagcagtagagttctcgccagaaaatacagaccttcttacaactttaggattactctacttacagctcggtgtttaccagaaggcatttgaacatcttgggaatgcactgacttacgaccctgccaactacaaggccatcttggcagcaggcagcatgatgcagacccatggggactttgatgttgccctcaccaaatacagagttgtagcttgtgctattccagaaagtcctccactttggaataacattggaatgtgtttctttggcaagaagaaatacgtggcagctatcagctgcctaaaacgagccaattacttggcacccttcgattggaagattctgtacaatctgggccttgtccatttgactatgcagcagtatgcatcagcattccattttctcagtgcagccatcaacttccagccaaagatgggggaactctacatgctcttggctgtggctctgaccaatctggaagatacagaaaatgccaagagagcttacgcagaagctgtccgcctggataaatgtaaccctttagtaaacctgaactatgctgtgctgctgtataaccagggtgacaaaaagggtgccctggcccagtaccaggagatggagaagaaggtcaactttctcaaggacaacagtactctggaatttgactctgagatggtggagatggctcagaagttgggagctgccctccaggttggagaggcactggtctggaccaaaccagtcaaagatccaaagtcaaagcaccgcaccaattcagccagcaaatctgctgctctccagcagcctttgggctccaatcaagctctaggacaggcgatgtcttcagcagctgcatacaggaagctcccttcaggtgctgtaggagcccagctcacaaagccaccatcgcttccattggagccagagccagagtccactgtggaggcaagtccaacagaagcatcagaacaaaagaaagaaaaatagacaacaaacacaaaaaaacaggatgaccctggagtggggagggtctcttaggtgagaccatatagaaagaaagtggtcatatgaccaggcagatagaggccagccctgttccctgggtgggcactgtagaattaaaacagaacccagggtgcgctgtgatgatcaagagaagcctaaagcccatgcagctcttacctggccccatcatccaggaacgagggagaagaaagacatgctaggataggcttgaagccctgcatgtatagctccaagagtcagcaaggcagatgatcagagaccattactcgatgaagaacttttatcttgataaagggaaagggacttctggttagtagcctgtggtgatgaagccccattctaactggactgggggaacacaccagtccccactgtaaacacaaaccttggattaagaacctagttaaa

SEQ ID NO: 2511 - DNA, 1930 bp, Cricetulus griseus
ccgagcggctgaagcggctgaggtggccgctggcgctctggtggcgggcgcggccgggatggcgaagagcagcaaagagaatgggccgcgcgcgcccgcagcgggcgggagcctgtcggggacccgggagagcctggcccaaggtcccgacgccgctactaccgacgagctcagctctctcggctccgactcagaggccaacggttttgccgagcgccgcatcgacaagttcggcttcatcgtgggttcgcagggcgccgagggcgcgctggaggaagttcccctggaggtgctgaggcagagggagtccaagtggctggacatgctcaacaactgggacaaatggatggccaagaagcacaagaagattcgtcttcgttgccagaagggcattccaccttctctgcggggacgggcctggcagtacctgtcaggaggcaaagtgaaacttcagcagaatcctggaaaatttgatgagctggacatgtctcctggggaccccaagtggctagatgtgattgaacgtgacctgcaccggcagttccctttccatgagatgtttgtgtcccgaggaggtcatggccagcaggacctgttccgtgtgctgaaggcctacacgctataccgccctgaggagggctactgccaggcccaggcacccattgctgctgtgctactcatgcacatgcctgcagagcaagccttctggtgtctggtacaagtctgtgagaagtacctgcctggctactatagtgagaaactggaggcaatccaactggatggcgagatcctcttctcactactacagaaggtgtcccctgtggctcacaagcaccttagccgccagaagatcgaccccctgctatacatgacagagtggttcatgtgtgcctttgcccgtaccctgccttggagctctgtgctgcgagtctgggacatgttcttttgtgaaggagtcaagatcatcttccgtgtggggctggtactgctgaagcatgcactaggctcccccgagaagctcaaagcctgccagggccagtatgaaaccatcgagcagctgcggagcctcagccccaagatcatgcaggaagccttcttggttcaggaggtgatagagttgcctgtgacagagcgccagattgagcgggagcaccttatacagctgcgacgctggcaagagacccgtggtgagctggagtgtcgctctccacctaggatgcatggtgccaaggccatcctggatgcagagcctggtcctcgacctaccctgcaaccgtcaccttccatacgcctaccctcagatgcaaccctcctcacctccaaagctaagccacccaagcaggtccagaaggagcagaggaggacaaaagacagcgggcagctggacaagtccccaggccccaatcaagctgcagtgatgactgcttcaggagatgcatgccctcctcaggatgtgtccccaaaggactcagtcccccaggactctgctccccaggacttagcctaccaccgttcccaggagagcctgaactcccaggagagtgaggacacctacttgtaacccgggagccaggcctccaagtggggtctccacacatcttacacggttcaaagactgacagcactccaggtcctgtgtacctgaaggcccaactgcttggccattgggctgggacagaatctggctggcccagtacagattctgcctaagcctccttatttattttctcttgagtcaagttggctcagccagcacaggcagaagctatggcccaatgggttgggtctcactcagtcccatcctcctgggaaatgttccccagggctagggtgctgacatgcggggaagtggtggggtactctttgtgtaaaatagaaacatggttttgtacggaaataaacaggcttgtatagaaaaaaaaaaaaaaaa

SEQ ID NO: 2512 - DNA, 1930 bp, Cricetulus griseus
cctccacccctggctgcccctttttcccgctcagcacttgatggcccaaccctccccaccaaaaggaagacagtcaaacttttctggcgggaactaaagctggctgggggccctgggttctctggaaaccgctttggaccttgccctaccctgtgggcctctctagaacctgtctcagtagacacagcccggctggaacacctatttgagtcccgggccaaggatgtactacccaccaagaaagctggtgagggccgccggacaatgaccacagtgctggaccccaagcgcagcaatgccatcaacattggcctaaccactttgccacctgtgcatgtcattaaggctgccctgctcaactttgatgaatttgctgtcagcaaggatggcattgagaaactgctgactatgatgcccactgaggaagagcggcagaagattgaggaagcccagctggcaaaccctgatgtacccctgggcccagctgagaatttcctgatgactcttgcttctattggaggcctggctgcacgcctgcaactctgggctttcaagctggactatgacagcatggagcgggaaattgcagagccactatttgatctgaaagtgggcatggaacagctggtgcacaatgccaccttccgttgcatcctggctacccttttggctgttggcaacttcctcaatggttccaagagcagtggctttgagctgagctacctggagaaggtgtcagaagtgaaggacacagtgcgccggcagtcactgctgtatcatctctgttccctggtgctccagactcggcctgactcctctgatctctactcagaaatccctgccctcacccgctgtgctaaggtggactttgagcagctgactgagaacctggggcaactggagtgccggagccaagcagctgaggacagccttcggagcttagcaaagcatgagctagccccggctctgcgtgcccgccttacccacttcctggcccagtgtacccgccgggtagccatgctaagggtagtgcaccgccgagtctgcaacaggttccatgccttcctcctctacttgggctacactgcacaggcagcccgggaagttcgcatcatgcaattctgtcacacgctgagagagtttgctcttgagtatcggacttgccgggaacgagtactgcagcagcagcagaagagggctacataccgtgagcggaataagactcggggtcgcatgatcactgagacagagaagttctcaggtgtggctggggaggcccccagtaacctgtccgtcccagtggctgtgagcagtgggccaggacagggtgatgctgacagtcatgccactatgaagagtctgcttaccagcaggccagaagataccgtacacagccgacggagcagaggcatggtgcagagcagttcccctgtcacacacacagcagtgggggcctccactgtatcccctgaggagacttcagcttccagtttacccagtgacacatcagatgagataatggatctgctggtgcagtcagttaccaaaagcagtcctagagccttagctgctcgggaaaggaagcgctctcgtggcaaccgcaagtccttgagacggacattgaagagtgggcttggagatgacctggtgcaggcactgggactaagcaaagctcctggcctggaggtgtgagggtgctaacacaccaggaaatctatctggatacagctatagcaacaagagactgagcacaaagagggcctggagcagaaatctagttcagaagtctgcatccaggaaccagtattgtgaacagtattagggtgtgtgtgtgtgtgtgtgtgtgtgtgtgtgtgtgtgtgtatacacgcacatgtattttgcatgtgtgagttccctattcggaacaaaataaagtttacctagctaa

SEQ ID NO: 2513 - DNA, 1930 bp, Cricetulus griseus
ccaccatgctgctcctgccgagcgccgcggggggccagggcaccgccgtcacccacgccctgacctcggcctctgcactctatcaagttgaacctgtgggaagatggtttgaagcttttgtcaagagaagaaacagaaatgcttccacatcatttcaagaactggaggataagaaagagttgtcagagggatcagaagatgaagagttacagttagaagagttccccatgctgaaaacactggaccccaaagattggaagaatcaagatcattatgcagttcttggacttggccacgtcagatacaaagccacacagagacagatcaaagctgctcataaagcaatggtcctaaaacatcatcccgacaaacggaaagcagctggggagccgatcaaagaaggagacaatgactacttcacttgtataactaaagcctatgagatgttgtctgatccagtgaaaagacgggcatttaacagcgtagatcctacctttgacaactcggttccttctaaaagtgaagcaaaggacaatttttttcaagtgttttctcctgtgtttgaaaggaattcccgatggtcaaataaaaaaaatgttcccaaacttggtgacatgaactcctcatttgaagatgtagatgcattttattctttctggtataattttgattcttggagagaattttcttatttagatgaagaagagaaagaaaaagcagaatgtcgtgatgagaggagatggatcgaaaagcagaaccgagcaacaagggcgcaaaggaaaaaggaggaaatgaacagaataagaacattagttgataatgcttacagctgtgacccaaggataaaaaagtttaaggaagaagaaaaggccaagaaagaggcagaaaagaaagcgaaggcagaagccagacggaaggagcaggcagccaaagaaaagcaaaggcaagcagaattagaagctgctcggttggctaaggagaaagaagaggaggaagttagacagcaggctttgctggcaaagaaggaaaaggacatccagaaaaaggccattaagaaggagaggcagaagcttcggaactcatgcaagagctggaatcacttttcagacaatgaggcagatcgtgttaaaatgatggaagaagtggaaaaactgtgcgatcggcttgaactaacaagcttacagtgcttgaatgaaatactaacaacatctacaagagaagtaggaaaagctgcacttgaaaaacagatagaagaagtaaacgagcaaatgaggaaagagaaggaggaagctgacgctcggatgcggcaagcatctaagaatgcagagaagtcaactggcggaagtgggagtggcagtaaaaattggtcagaagatgatctgcaattactaattaaagctgtcaacctctttcctgctgggacaaactcaagatgggaagttattgctaattatatgaatatacattcttcttctggcatcaaaagaactgccaaagatgttattggcaaggctaaaagcctccaaaaacttgatcctcatcaaaaagatgacatcaacaaaaaggcttttgataagtttaaaaaagaacatggagtggcccctcaggctgacaaagcggcaccatcagaacgatttgaaggtccctgcacagatttcaccccttggaccacagaagagcagaagctattagaacaagctttgaaaacatacccagtaaatactcctgaaaggtgggaaaagatagcggaggcagttcctggcaggacgaagaaagactgcatgagacgatataaggaactcgttgagatggtaaaagcaaagaaagctgctcaggagcaagtgctgaatgcaagcagagccaagaaatgatgcaagaaatgatgttggttgtgtgtgcacttttataataaaactgaaaatactgtaca

SEQ ID NO: 2514 - DNA, 1930 bp, Cricetulus griseus
gagcaggggccgggccgaggcagctgcgcgcgggccaccatggccaccgacgagctggccagcaagctgagccggaggctgcagatggagggcgaaggcggtgaagcgaccgagcacccggggctcaacggggcggcggcggcggcggccggggttcccgacgagactgcccaggcgttgggcagcgcggacgacgagctgagcgccaagcttctgcggcgcgcggacctcaaccagggcatcggcgagccgcagtcgcccagccgccgcgtcttcaacccctacacggagttcaaggagttctccaggaagcagatcaaagacatggagaagatgttcaaacagtatgatgccggcaaagatggcttcatcgacctcatggaactgaaactcatgatggagaagctgggggccccccaaactcacctgggcctgaagagcatgatcaatgaggtggatgaggattttgacagcaaactcagcttccgggagttcctactgatcttccgcaaagctgcggcaggggagttgcaggaagacagtggcttgcatgtcctggcccgcctctctgagatcgatgtctccacagagggcgttaagggtgccaagaacttcttcgaggccaaggtacaggccatcaacgtgtccagccgatttgaggaggagatcaaagccgagcaagaggaaaggaagaagcaggctgaggaggtgaagcagcggaaagcagcctttaaggaactacagtccaccttcaagtagccagggctgaggccgagacccggccttgcccagtgtgcagtctgggagcatgggtgggtacaggagacttgtgggagacaaactgagtcctggcctatatgtgccgggaccactactgaaatctaaactgtctgtgaacggatctcatgcaggagtctccccagtagttgggacagtccctgctccctcctgctgttcctgaggctgtgacaccagccaccagcatcctctcgggactcctgttttggtgaagagacccagcccctagcactctaggccgatataaatggggcccagccaggcagggtgcaggccactgaatctacctcacgggttacactctgcttagacatgccatgggaacgtgagtgacagggctctgtggagagaggtagacatgtcactttctgacaccctaccccagaacaagctgagggtcccagggggctgcggagaggaggtggggtgccaagggattggcccttcctggggagagcctcacgcaccctgccttggctccccagggagtgcctcatgtgtttgtgtgtattgcagtaggacacggccgccgccggcacccctttcacaccctcccctgagtttgtcacctgtgagagcacctgcctgtcatgcccacccctagaacgcatgggcaggccatagtgaaacccgtgccattcctccatcgctctcatgtgcttgttcacgtgtgtgtatgtgtgtgtgtgtgtctgttgctgtgttgtgaaaccgtgacgtcacccagtctaagtgaatggccacataggccgctgttatacaatgctcagtgtgtcactgcttttgaaacttgataactctttattttactacaaatgccccgagtccccagttgccccctatgggacttgctaaaggttttatttttcggtcttagaacccataggagttggagggaccgagcccagctcagcccagcccagcccagcagctgtggccctggcttgtgtttgccttagtggatatgtttatacagatgaatataaattccctttacttttggctttctgcattttattttttgtccccccaccaccacctcccctcccctccaaaaaagaaaacagctacttcttcattcagtggtacgattatttttttaactaaaatgagataaaattctatattctta

SEQ ID NO: 2515 - DNA, 1929 bp, Cricetulus griseus
ggcggtcctgcggagcggtgagggcagcggaggaaaagaaaagggaacggctcgcaatctgccccagcggctgctgcaagacctcggcgccaacctcgcacaagcgagcgcaccacagcccctcggctgccgctctatgtgttgctgagccggtcctggacccgacgagcccgccttcggtgttcggagcagaaatcgcaaagacggaaggactggaaatggcagaccatatgatggccatgaaccacgggcgcttccccgacggcaccaacgggctgcaccaccaccctgcccaccgcatgggcatggggcagttcccgagcccgcatcaccaccagcagcagcagcctcagcacgccttcaacgccctcatgggcgagcacatacactacggcgcgggcaacatgaatgccacgagcggcatcaggcacgccatggggccggggactgtgaacgggggacaccccccaagcgctctggcccccgctgccaggtttaacaactcccagttcatgggccccccggtggccagccagggaggctccctgccggccagcatgcagctgcagaagctcaacaaccagtatttcaaccatcacccctacccccacaaccactacatgccggatttgcaccccgctgcaggccaccagatgaacgggacaaaccagcacttccgagattgcaaccccaagcacagcggcggcagcagcacccctggcggcgcgggcggcagcggcacccccggcggctctggcagcacctcgggcggcgctggcggcagtggcgcgggcggcagcggcggtggcaacaccatgccggcctcggtggctcacgtccccgcggcaatgctgccgcccaatgtcatagacactgatttcatcgatgaggaagtgcttatgtccttagtgatagaaatgggtttggaccgcatcaaggagctgcccgaactctggctgggccaaaacgagtttgattttatgacggacttcgtgtgcaaacagcagcccagcagagtcagctgttgactcggttaacctcggcgggcgggcgaaagaaatcaccctccccaccccacccccaccccaacttcttcggtgtgaattaaaaaaaaaaaaaaaaaacaaacattcccttagacgcagtatctcacttttcagatcctgaaaggtttgagaacctggaaacaaagtaaactataaacttgtacaaattggtttaaaaaaaaaaaagattgctgccacttttttcctgttcttgtttttttttgtagccttgacattcacctcccttatgtagttaaaatatctagctaacttggtcttttttgttgttgtttttactcctaatttcctcactttctccagtgctcaactgttagatattaatcttggcaaactgcttaatcttgtggattttgtagatggtttcaaatgactgcgctgcattcagatttatgattgaaaggaaaaattgcatttgttggctgcatgaactctgaagggcagatattactgcacaaactgccatctcgcttcattttttttaactatgcatttgagtacagactaagttttcaaatatgctaaactggaagattaaacagatgagggccaaaccgttctggatcaggaagtcatactgttcactttaaagttggctgtctcccctccccatatgtacagacaataatagggtgtggaatgtcgtcagtggcaaacatttcacagatttttattttgtttctgtcttcaacattttttgacactgtgctaatagttatattcagtacatgaaaagatactactgtgttgaaagctttttaggaaattttgacagtatttttgtacaaaacatttttttgaaaaaatacttgttaatttattctattttaatttgccaatgtcaataaaaagttaaagaaataaa

SEQ ID NO: 2516 - DNA, 1929 bp, Cricetulus griseus
  modified_base (1009)..(1009): a, c, t, g, unknown or other
aatatgtcatctgaaatgctgccagtgtctgttgagactcctaaatgtggaaaagaagccaggcgtgagtgaaggtgatgaggagagacacaagccaagattagatgcagggactgagccaatatctaagcgacaaatgaagaagctgatgaagcaaaagcagtgggaagagcagcgagaactgcgcagggaaaaacgaaaagaaaaagacgcaagagaaagaaattagaacgacaacatcagctggaatccggttcagatggaagtgacaggaaacgcattcgaagagatggtgttcatagcagcctccgccttgtcatcgactgtagttttgatgatttgatggtgctaaaggatattaagaaacttcataagcagattcaacgatgctatgcagaaaaccggcgagcatcacaccctgtgcagttttatttgacaagccatggaggtcagctgaagacagaacatggatgaaaacgacagaggatgggtcaattggaaggatatccacatcaaatcagagcactatagtgaactaataaaaaagaagacctggtttatctgacgtcagactctcctaatgtgttgaaggacttagatgagtcaaaggcttatgtgattggagggttggtggaccacaaccatcacaagggactcacatttaagcaagcgtccagtcatggaattgagcatgcccagctccctcttgcagactttgtgaagatgaacagtcgaaaagtcctggcagttaaccatgtgtttgaaattatcctggagttcttggaaacaagagactggcaagaggcattttttacaatcttaccccaacggaaaggagctgttcctgcacacaaagcctatgaaaactcttctcaggaccagcagccccggccagaaggatgggacagttccagcgagggagagaactgcaggaatgaccccgcctcaccacagaaagaagagcagggtccgcagagcagcccggtgtcctcagtgagttctgtcccanagtgacccttcacaggatactcagactacaagaaagttgattttctctcatctctgttgtggaattttaaatcttgtcacaaattaaatgataatgaaaaaccctttaagcaccaagaaaggattgtttggttttgtgtaagaagacttaaaggtatgatttcagagttgttctaaccctcaaatcagagtcatggagaatgttacatattagtgtgccttcattctcctccattccgggagtctattcttcagggtgtgccttctgacctcttagctttgctcttttgtgttcctctcagtgtctttttggtctgatcctgtttggtagagcagatgttcatgaacgttttgtgcggctactagaatgttgaacttgggataagaaacacattattctgtaaggaatagcagttgttttgatggacatagtaattctgtccttgtggacagtggagcccattcctgtgcctcccttgaggtatcttctcatacttctgaaacaatcacaagaataatcttaatcccttaatgacaataattaatttaattacaaaattaaagttttgctggctagattatttcacaatgttattcttgaaggatcaatttgtctttaccgcagtctaaagtaaaacatctattctttctttcttctttctattctatatttttcatatatgttacatatattgccttatatgttagcttttaatgtgaatattttccttccttccttttctgtctctctctcctttctttctttttttttatttatttttttatttttctgagacagagtttctctgtgtaactctggctgtcctggaactcactctgtagaccaggctggcctcgaactcacagagatccgcctgcctctgcctcccaagtgctgggattaaaggtgtgagccaccac

SEQ ID NO: 2517 - DNA, 1929 bp, Cricetulus griseus
gaaaaatatcaacaagttactctcttttataatgagcttcattatgtggaaaaagctgctgcagtctcccttgaaaatgttctgttggatgtcagagagctgcagaggggaatggatttaaccaagagggagtataccatgcatgaccacaacacactgctcaaagagttcatccttcacaacgagggcaagctgaagaagctgcaggatgatgctaagattgctcaggatgcctttgatgatgtggtgaaggtattttggtagaaaaccccaagacaacaccaccatctgtgttcttccctgtatttgttcggtttgtgaaagcctacaagcaagcagaagaggaaaatgagctgaggaaaaaacaggaacaagctctcatggaaaaactgttggagcaagaagcattgatggagcagcaggacccaaaatctccttcccataaatcaaagaggcagcagcaagagttaattgcagaattaagaaggcgacaagttaaggataacagacacgtatacgtagggaaaaatctttttacatccatatgttattcagttttttaaccaaaatgtaaatttcatattaaattcattatttgccattgtgattgttccttatggcccaccctggtttcctggcaatttgtaaataactgggatgtatctgctatgggcttccttttgctgagaagtcttctaagaaattgtttgttcgagccatattcttcaactgtatttttaaggacttgtaacaagggagaaggaaactggcacaggataatttctttctataattaagccccagcaaaatacaagatgcaactgcagtgccactagaagtctgtcttgtctcatgttgtttctgtgtaagggtaccacgcacaaaggcattcacttgtatgactgcaagatggcataaaacattccattatgggtcaatagttaaaatagaaattggtgccttgttagtcagggagaatttaccacaagctctatcagataagcattcaagattacatgtggtagtgtaatgttggaacttggccttattctcttctgacaatcgaagggtccttttctttccttctgtaaactgaagtatactgatacagctgacattaagttatcaaggctgaattgcttttgcatttctcacttatgagaatttccaattagaaaattaatgtttaagtttaaattatattgatagggttaaatggttaaatcatttatttttacttcctcactgacaaggcattttgatccatttcaaagtcaaagactggactaaagctaaattttcacttctcataatacatattctgcttctggcttaccttgttggtacatcagtatattaattgtaaaaattatgtatagtatttaaccactgaatttgtgttcatgtgaaccccttggtgaaggtccccttttttcatggatgtgtagttatatgaccttttaaaatgtacagatattttgctataagattggtgcagtttttttatggtttttacacttctttaattcctacctaagtccctgggtaatcctgtaaatattgtttaaaaatgctacagcctatgctacacaatctgaatgttactttaacttatagtttttttttaaatatatatatttaactacaaggacagtttaagagtcagttaccacatttcacaatagtagacctatttacagatcccttttaaactgccaccgctgttacattcataaatgtatcgtttaaaaagaacatgccaagattcatttcccaatacacaaaagaacagtaatgttggcatattcttttgtctgtctattaatggtcctgcttcttagcaatattagaaatgttttataaaagcaattcatgttacttttctggtcttttcatgccatttgagcaaataaactatttacactacta

SEQ ID NO: 2518 - DNA, 1929 bp, Cricetulus griseus
tgttccagccagccagtctggtgcgatacccacgcctagaaggcactgaccagaagtattgtaccgaagagctgttctgctgcagagattcattaagatcctggacagtgtcccttcaccacctggtccctgcatgggaccacacactgggcaccttcagtgagattaagcaagtgaaacagttcctactgctgtcacgccagcggcccagcctggtagctcagtgcctgcgggattcggaaagcagcaagcccagcttcatgccacggctatacatcaaccgccgccttgccatggaacaccgtgcctgcccttctcgggaccctgcctgcaagaatgcagtcttcacccaggtttatgaaggcctcaagccttctgacaaatatgaaaagcccttggactacaggtggcccatgcgctatgaccagtggtgggaatgtaaattcattgcagaaggcatcattgaccaaggtggtggtttccgtgacagcctggcagatatgtcagaagagctgtgccccagctcggctgacacccctgtgcctctgcccttctttgtgcgcacggcaaaccagggcaatggcactggtgaggcccgggacatgtatgtgcctaatccctcttgccgagactttgccaagtatgagtggattggacagctgatgggggctgcccttcggggtaaggagttcctggtactggccttgcctgggttcgtgtggaagcagctgtctggtgaggaagtgagctggaacaaagacttcccagctgtggactccgtgctggtgaagctcctggaggtgatggaaggaatggacaaggagacatttgagtttaagtttgggaaggaactaacattcaccaccgtactgagtgatcagcaggtggtggaactgattcctgggggcacaggcatcgtggtgggatatgaggaccgctctcgtttcatccagctggtgcagaaggcacgactagaggaaagcaaggagcaggtggcagccatgcaggcaggtctgctgaaggtggtaccacaagctgtgctagacttgctgacctggcaagagttggaaaagaaggtgtgtggggatccggaagtcactgtggacgctctgcgcaagctcactcggtttgaggactttgaaccatctgacacccgagtgcagtacttttgggaggcgctgaacaatttcaccaatgaggaccggagccgtttcctgcgctttgtcactggccgcagccgcctcccagctcgaatctacatctacccggacaaactgggctatgagaccacagatgctctgccggaatcttccacctgctccagcacgctcttcctcccgcactatgccagtgccaaggtatgtgaggagaagctccgctatgccgcctacaactgtgtggccatcgacacggacatgagcccctgggaggagtaaggctgcgcctcactcagcatgtcacgctcgctgccctcacccaggccaaccaagtttggtgtcatcaaaagagatggggttgggaacatcagcacactgggtcctgtgcctgtgcctttgtacggttgcattgagagccatgagttgacacgggtagtccagctcccacagactcacaagccctactcgtcctggggcttacgtccccaggtatttagcctctgtgagagtgaatcttccacaagcccagcacaagctgccaggcctgagctacttgaagggggccatctagctccccaacccatggactttgattccatttttggtttccccgttttccctttttttctagcttcagccatggctcaaaatgtttaaaaattgataggatggtacgtcaagcaaggagccaagaacagatagagtggtacatctttcttggtcacttttatttttaaaattaaaaaaaaaaaaaaaaaaaaaaaaaaaaaaa

SEQ ID NO: 2519 - DNA, 1929 bp, Cricetulus griseus
ctctctacaagtccttaactttgttcactcattccaggaaggtgcttcaactctggatcttcacacggagcccggctttcccagtgtgctttcccagtcgtcctgggccgacacgggagttccgcttcctgccaaaaacctgatgttcaaagacggcctcttgtcagagtggagtggacgctcgccttcctcctttctccttgcgaatctccacctgcagtaatttgattacaccattgattgctcacacgttctgcctttttctttcttgacattggctttacagtgtcagccaccaagagcatcctctgctgcggtgccgcccgtgctcgctataggaagtgctcagagcctgccggttttccgaaggaagccgtagtgttgcacgtcttactgcagtgcagcccagtgctcttcagcagccagcaccgcgtttttaccttgagacaatctgcatttcttttctaaaactaaggatgtactttataggttctaggtgactgttaggtttataagcagtcactctgaatattgcagtgtagttttctaggttagtttcacataaacctggtttaattttatattttgttatctacactaagggatcccaggaggagatggaactcttcctccaccagggcattaagggttccgtgtggtatgtctgtgaattatgtatgccaagtgaacaggattgggaaatgtcagtcagcatggtgtgtaagcttcaccttggtttgtaaggtctcaactgactattcattgacatctcgtgaaaaaagctttggaaaacattctatttttaaatgatgtttgtatgtgggcttctgctgtcaactcaactttgggctttatattttcatagagtctttatggaaaagtagaatttattttctacttgtacttgaggctgtcgcgtgtctcattttgtcttgtagcgttaccagtgaactgttaggacagttgactttggtttccaagcaaggattgtggttgggagctgcccagtcgcagcgtcagggcggtctttggactcagctccatggagcctaacagttttgctgatggcctttgttatttatgcagctgatatttgtgtatttaacaaacttctggaagtatatgcctttcttggaaccattctagtggccatgcatttaatacccatggcctatctgtagaactgaggattttggaccaggttacttgtaacacagttagtgctgtgtttggggtaaatgcagtaatgtttagttttgtactttgtcttgtataaggtgtgtatgtcaggtttgtctgtaaaggaaaagtacgtagtaacattaaacgatctctatgactgtgaaacactcatttttgctttgtttgagttaactgtggtatttatccttgtattagcagttgagcaccaactctaacgacatgtacactaataaagaattgaacagttgtagttacaacagtgagtccagttattgctgactttatagcttaaaaatatgggagtgatttgctgctataattcctttgcaaaacactgaaggaagagatggaacctaaccacgatggtgaacttcagggacacagcgttaggaagggtgagaaccactgctctggggcctttcttgtttcaaatacgtaaccagatgcttctgtatttgtttgagggaagttgatttctcttactggctgttctgtttttgctgccattcacattcatttttttaatgttcagtgtttcaaatatactttgtattcaaggattttaaagtaccaaaactgtaactcagaacagtgcattgttttctgtcatgatgttaatattatacaatgaaattgtataaagtgttgtcaatttgattattgacacaaataacatgtttacaaataaactgtggtgttgatcaaaaaaaaaaaaaaaaaaaaaaa

SEQ ID NO: 2520 - DNA, 1929 bp, Cricetulus griseus
gaaagctgaggctgtagcatagctgggactgtggggcgtgccatggcggtgaacctgagccggaacgggccggcgctgcaggaggcctacgttcgcgtggtcaccgagaaatccccgaccgactgggctctttttacctatgaaggcaacagcaatgatatccgtgtggctggtacaggggagggaggtctggaggagctggtggaggagctcaacagcgggaaggtgatgtacgccttctgcagggtgaaggaccccaactccggcctgcccaagtttgtcctcatcaattggacaggcgagggtgtgaatgatgtgcgaaagggagcatgcgccaaccacgtcagcaccatggccaacttcctgaagggtgcccatgtgaccatcaatgcacgggctgaggaggatgtggagcctgagtgcatcatggaaaaggttgccaaggcctctggagctaactacagcttccatagggaaagcagctgcttccaggatactgggcctcaggccccagtgggctctgtgtaccagaagactaacgccatatctgagatcaagagggttggcaaagatagcttctgggccaaagctgagaaggaagaggagaaccgccgactggaggagaagcgccgggctgaagaggagcggcagcggctggaggaggaacgtcgtgagcgagagctgcaggaggctgcccgccgagagcagcgctaccaggaacagcacagaccatctggacccccaagcagaacgtgtgagcaggagcaagaagtggtttcaaggagcagacaggaatgggagtctgcgggccagcaggccccacacccacgagagattttcaagcagaaggaaagggctatgtccaccacctctgtctccagctctcagccaggcaagctgaggagccccttcctgcaaaagcagctcactcaaccagaagtctcctatggcagagagccaactcccactgtctcaagatcaggagcaggtgtgtgtgaggagccaacacctagcactctgtcttcagcccagacagaagaagaacccacatatgaagaacccccagagcaggacaccctgtacgaggaacctccactggtacagcagcaaggggctggctccatacacattgacaactacgtgcagggccaggacctcagtgggcaagggttgtgcgcccgggccttgtacgactaccaggcagctgacgacacagagatctcctttgatcctgaaaacctaatcacgggcatcgaggtgattgatgaaggctggtggcgtggctatgggcctgatggccactttggcatgtttcctgccaactacgtggagctcatcgagtgaggctgaggcctgtcttccttctccactggaagtagcttccttgttctgaaaagaggcctaagagttaatttttggcactcttccaggaatgtaacttcaatgaggacaaggctccctctgccttgagtgctctgttaccccagatgtagcagaaccctgctcctcccccaaatgcttaccacagcctccaggacctcctactagactcacacttgaccccaatgggaatggcatgttgagccaagcttaacctgtggccagctcctgggtgatctctgtctaaagacggcagccatgagaagctgaggtcaaagcagggacatctgggtccagagtcttcatttgcctctttctctgtgtggtttctatggggtggttgtttgcatctatttagaaaggcccttgggaatcatgaacttaagagaattgcttttagcgaaatcttgaccaaagtcaaaatagaccatgatggttttgacagcagggaggttttcttactaggggcttccctaccttcatttctgtcccatgtctgtgctgtgggaagaaggatgggatggccaagctcccatctctgggaatgtg

SEQ ID NO: 2521 - DNA, 1929 bp, Cricetulus griseus
tcctaccgctaccccaggacaggcagcaagaatcccaagattgccctgaagctggctgagatccagacggacacacagggcaagatcgtgtcgagctgcgagaaggaactggtgcagccattcagctccctcttccccaaggtggagtacattgctcgggctggctggacacgggatggcagatatgcctgggccatgttcctggaccgtccccagcaacggcgccagcttgtcctcctgccgccagccctctttatcccgtcccctgagaacgaggcccagcggcaggcagctgctagagctgtccccaagaacgtgcagcccttcgtcattcatgaagaagttaccaatgtctggatcaatgtccatgacatcttccacccattcccgcaggccgagggccagcaggatttctccttcctccgtgccaatgagtgtaagactggcttttgccacctgtataaggttactgtggaacttaaaaccagtgactatgactggacggaacccctcagccccacagaagatgagtttaagtgcccaatcaaggaggaggttgcactgaccagtggcgagtgggaggtcttgtctcgccatggctccaagatctgggtcaacgagcagacgaagctggtgtacttccaaggcacaaaggacacacccctggagcatcacctctatgtggtcagctacgagtcggccggtgagattgtgcggctcaccacacccggcttctcccacagctgctccatgagccagaacttcgacatgttcgtgagtcactacagcagtgtgagcacaccaccctgcgtgcacgtgtacaagctgagcggctctgatgatgacccactgcacaagcagccacgcttctgggccagcatgatggaggcagccagctgtcccccggactacgtgcccccggagattttccactttcatacccgcgccgacgtgcagctctacggcatgatctacaagccgcacaccctgcagccaggaaggaagcaccccactgtgctctttgtctatgggggcccacaggtgcagctggtgaccaactccttcaaaggcatcaagtaccttcggctgaacactctggcgtccctgggctacgccgtggtggtgatcgatggccggggctcctgccagcggggcctgcgatttgagggagccctgaaaaaccagatgggacaggtggagatcgaggaccaggtggaaggcttgcagtatgtggccgagaagtatggcttcattgacctcagccgtgttgccatccatggctggtcctatggtggcttcctctcgctcatggggctcatccacaagccacaagtgttcaaggtagccattgcgggtgctcccgtcactgtgtggatggcgtatgacacagggtacacagaacggtacatggatgtccctgaaaacaaccagcaaggctatgaggcagggtctgtggccctgcatgtggagaagctgcccaatgagcctaatcgcctgctcatcctccatggcttcctggatgagaacgtccacttttttcacacaaacttcctcgtgtcccagctgatccgggcagggaagccttatcaactccagatctaccccaacgagagacacagcatccgctgcccggagtccggggagcactacgaggtgacattgctgcacttcctgcaggagcatctgtgacctccgacctctgccctaacgccgtcgctgcttttcttgcgttttgtaatcttttagtttttgaagcttttcgatttgtttgcttgctgctgctgcttgggggccaggacagaggcggtggaggcccccatgctgccctccttgggctggttaggaggagtccgccaccaggcccacagccgttacgggggctgccacagccccaaacttgcagcaccatcccagcacagagcatgtgcc

SEQ ID NO: 2522 - DNA, 1929 bp, Cricetulus griseus
atgttgatgcaagctgctgtcaggcgttgttagggggcccctgcgccaaacctcgtgggcagaatggggtcagagggaacttcgactgggtcacctggctcccttcacaacgctccacaaggacaagccactttctgatagaagaagtgaactaaagagacgtctaaaagctgagaagaaattggcagagaaagaggccaagcagaaagagctcattgagaaacaactaagccaagctgctgctgctgctgccaccaaccacactgctgataatggcgtgggtgttgaggaggagactctggacccaaaccaatactacaagatccgtagtcaagcaatccaccagctgaaggtcagtggggaagacccttacccacacaagttccatgtggacatctcactcactcagttcatccaagaatacagtcaactgcaacctggggaccacctgactgacatcaccttaaaagtggcaggtcggatccatgctaagagagcgtctgggggaaagcttatcttctatgaccttcgaggagagggggtcaagttacaagttatggctaactcaaggaattataaatcagaggaagaatttgttcgtatcaataacaagctgcggcggggagatataattggagttcaagggaaccctgggaaaaccaagaagggtgagctgagcatcatcccctatgaaatcacgctcctgtctccctgcttgcatatgttgcctcatcttcactttggcctcaaagacaaggagacaaggtatcgtcagaggtacttggacttgatattgaatgactttgtgaggcagaaatttattgtccgagctaagatcatcacatatataagaagtttcttggatgagctgggatttctagagattgaaactcccatgatgaacatcattccaggaggagctgtggccaagcctttcatcacctatcacaatgagttggacatgaacttatatatgagaattgctccagaactctaccataagatgctggtggttggtggcattgaccgagtttatgaaattggacgccagttccggaacgaaggaattgatttgactcacaaccctgagttcaccacctgtgagttctacatggcttatgcagactatcacgacctcatggagatcacagagaagatgctgtcaggaatggtgaaaagcattacaggtagttacaagatcacctaccacccagatgggccagaaggtgaagcctatgagattgatttcaccccacctttccgaagaatcagcatggtagaagagcttgagaaagcactgggtgtgaagctgccagagaccagcctctttgaaactgaagaaactcgaaaaattcttgatgatatttgtgttgcaaaagctgttgaatgccccccacctcggaccacagccaggctccttgataagcttgttggtgagttcctcgaagtgacatgcatcaatcctacattcatctgcgatcacccacagattatgagccctctggccaaatggcaccgctccaaagagggtctaactgaacgctttgagctgtttgtcatgaagaaggaaatctgcaatgcctacactgagctgaatgatcccatgcggcagcgacagctgtttgaagaacaggccaaggccaaggctgctggtgatgatgaagccatgttcatagatgagaacttctgtactgccctggaatatggactgcccccaacagctggctggggcatgggtatcgaccgagtcaccatgtttctcacagattccaacaatatcaaggaagtacttctgtttcctgccatgaagcctgaagacaagaaggaaactgcagcagccactgaaacactagaaagcacaacagccggcccctctgtctagaagataaatgaaactctggcttctctgcatttcagcagacctggtct

SEQ ID NO: 2523 - DNA, 1928 bp, Cricetulus griseus
gattctcttcgttgtaagccaaagttagggttattaaaggaccacatctttaaagagttgcagaaacaccttccaactcacgcccttccagatgacatggtgttgattgacactctaccatttacatgtcatggtaaaattgatgtttctgagttaaacaagatatatttagactacataaactcacagcctaggaataagatccatggaaaagaggaactttgggaaaaattacagcatttatggaagtctattctgagtctccctgaggatcctgaagatactttgaaggttcctgatgactcagtcttcctggacagtggaggagactccctgaagtccacgtggctcctcaatgagattgaaaaactcactggcacgtccatacctgggctcctggagcatattctcagcagttctatcttagaggtttacaaccacatcattcagaccgtgtttacacacaaggacctgaaagtcaacaacagtcatgctctgaagaggaaactcagtgacatggatccagaggaagccagcggcaagcctgaacatctggagtctgccttgccccttacccacaacagtgagacgaatgctttgattgctctgagcagagggagtcagcttttgtctctgggtacttggaggcttttaactaagttaggacactgcccttcagtctgtcctctggatttaattccacagactaacacacaagtactaaaagacttaagtcctccacctcctgatgaaaagttgaaaaaaccaccagtttcgatggtgttgcgagagaggtggaggtcagacacaggcaaatgtgtagatgcttcccccctgcttgtgatagcagctgccaatcagtcatccacaactgtgtatatcggctcccactcccacagagtgaaggcagttgacctttactctgggaagatgagatgggaacagcttttgggagatcgaattgaatcctccgcatgcgtgtctaagtgtggaaactttattgtagtgggctgttataatggattagtttatgttctgaaaagtaatagtggagaaaaatactgggcgtttactactgaagatgctgtgaaaagctcacccgccatggatcctaccacaggactcatttatgtcggatctcatgaccagcatgtgtatgctctagacatttatgaaaagaagagtgtctggaagctaaaatgcggagggacgctcttttcttctccatgtttgagcctgagtccacatcgtctctactgtgctacacttcggggactcttactggctgtaaatcctgctactgggagtgaagtttggaagcactcctgtggaaaaccactcttctcttcccctcggtgctgccagcggtacgtttgcattggctgtgtggatgggagcttgctctgcttcactcactcaggagagcaggcatggagcttctctgctggaggaccagtcttttcatcgccatgtatctcagcaacagaagaagaaatatttttggttcccatgattgctttctctactgctgtagcatggaaggtcacctccggtggaaatttgagactacagcgagggtgtatgcaacaccctttgccttcagtaaccagagctgtagcagtgaaaccctgctggcagctgcctctactgatgggaaactgtggatcctggagtctcagagtggaatgcttcgaagtgtgtatgaactccctggggaggttttctcttctcctgtggtctgggagtcgatgcttattattgggtgcagaaataattacatttactgtctggatttattgtgtggggacaaaaataatcaagtgtagtccttgtaaatatgtatgtgtgagatagttggaaacgtctttataaagctatatggctggttttatattaaagattctattttggttaaggaaaaaaaaaaa

SEQ ID NO: 2524 - DNA, 1928 bp, Cricetulus griseus
gggccgccgcgagtggttccagttcactggttccagcggagccgggcggagggcgcgagcgcgggacgcgcgggcgggaagcgaggaggcgtgggcgggccggcaggagcgcggagcggaccggcgcgagcggccgacagggctcgggccccacaccttgcagccgcccgtgagcttgctcatctgcttctggggccaccgccatgtcgagccgcggtgggaagaagaaatctaccaagacctctcggtcagccaaggcaggagtcatcttccccgtggggcggatgctgcggtacatcaagaaaggccaccctaaatatcggattggtgtgggggcacctgtgtacatggctgccgtcctggaatacctgacagctgagatcctggagctggctggtaatgcagcaagagacaacaagaagggacgggtcactccccggcacatcctgttagctgtggccaacgatgaggagctgaaccagctgctaaaaggagtcaccatagccagtgggggtgtgttgccgaatatccatcctgagttgctagcgaagaagcgaggatccaagggaaagttggaagccatcatcactcctccaccagccaaaaaggccaagtctccatcccagaagaaaccggtggctaagaaaacaggaggcaagaagggggcccggaagtctaagaagcagggagaagtcagcaaagcggccagcgcagacagtacaacagagggcacgcctgcagatggctttaccgtcctctccaccaagagcctcttcctcggccagaagctgaaccttattcacagtgaaatcagtaatttagccggctttgaggtggaggccataatcaatcctaccaatgctgacattgaccttaaagatgacctaggaaacacactggaaaagaaaggcggcaaggagtttgtggaagctgttctggaacttcggaaaaagaacgggcccttggaagtagcaggagccgctgttagtgcaggccacggcctgcccgccaagtttgtgattcactgtaatagtccagtctggggtgcagacaagtgtgaagaacttctggaaaagacggtgaaaaactgcttggccctagctgatgacaggaagctgaaatccatcgccttcccatccattggcagtggcaggaatgggttcccgaagcagacagcggctcagctcatcctgaaggccatctccaattactttgtgtctactatgtcgtcctccatcaaaaccgtgtactttgtgctttttgacagtgagagcataggcatctatgtgcaggaaatggccaagctggacgccaactaggccagtgatccctagaaccagcacaggcctcgtcccctgcctccaactggaaagaaagaaagagaaaaaagccctttgctcttgctgggaggtgggactcctttccttttcagtctcattcatctagggaaaatgaggtttttggtttccagtttgattgctttcggccttctaaaatgttttctgttagcactgatagtcggcattgtccctgttaagcactgcgttccagaccgtgtctgacttagttaacctaggggattttatagttttactttaacgaagtcctgattaacacagaacagcgggaggacggttcctctcctgtctcacagcagcaggaagccccatttgtaacgtgtgttgtgacgctttactgtacacccagtggcgttctttttactatgttttttttttccctcaaagaaaaaaaatcataaaatttgcaacagacctaacttttgtttactttttgtcttaatgatagatttgaaaatgaaaaaatgttaaagacagaactgaatctgttgtccttaattatatttgcaatttgaaatttgtgtgagttcatttagtaaagtgttaaactgttaaaaaaaaaaaaaaaaa

SEQ ID NO: 2525 - DNA, 1927 bp, Cricetulus griseus
tggagagactggcctaggagaggaaaaccaggactctgtgaacaacctctgcaggcagtatgaggagaaggtacggccctgcattgacctcatcgactccctgcggggccctgggtgtggagcaggacctggccctgcctgccattgcagtcatcggggaccagagctcagggaagagctctgtgctggaagcactgtcaggagtggccctccccagaggcagtggtattgttaccagatgccccctggtgctaaaattgaggaagctggagcaaggagagcagtggagaggcaaagtcagctatgaggacaacgaagtggagctctgtgatccctcagaggtggaagatgaggtcaacaaagcccagaacctcattgctgggatagggctggggatcagtgataagctcattagcctggaggtcagctcccccaatgttccagacctgaccctgattgacctgcctgggatcaccagggtggctgtaggcaaccagcctgcagacatcggataccagatcaagagactcatcaagacatacatccagaaacaggagaccatcaacctggtggtggtccccagtaatgtggacatcgccaccacagaggcactgagcatggctcaggaggtggaccctgaaggggacagggaccatagggatcttgaccaagcctgatctggtggacagaggtactgaagacaaggtcattgatgtggtgcggaacctggtgtaccacctgaagaagggctacatggtagtcaagtgcaggggtcagcatgacatccaggaacagctgagcctgaccgaggctcttgagaaggagcaagccttcttcaaggagcacccacacttcagagttcttctggaggatgggaaggccacagtgccctgtctggcagagagactgaccacggagctcatctcacacatctgtaaatctctgcctctgttagaaaatcaaataaagaactgttaccagagtaccagcgaggagcttcagaagtatggcacagacataccagaagacgacaatgagaaaactttcttcctgatagataaaatcaacacttttaacgaggacattactgccatagtacaaggggaggagaatgtgggggagggagaatgtcgcctgttcaccaagatccgaggccagttctcgtcgtggagtaatgagattgaggataatttccaaagtggttatgatgttttatataaagaagtctggaaatttgaaaagcaatatcgaggccgagagctgccagggtttgtgaactacaaaacatttgagaacatcataagacggcaaatcaaagtcctggaagagccagctgtagaaatgctgcacagggttactgaaatggttcgagatgcctttaccattgtttctgaaaaaattttgatgagttttttaacctccacagaactaccaagtccaaacttgaagacctcagattagaacaagaaatggaagcagagaagatgatccgacttcactttcagatggagcagatcatctactgtcaggaccaagtttacagaggagccttgcagaaggtcagagagaaggaagctgaagaggagaagaacaacgcaaagtcaagcttcttcacttcctctaagtctgaagctttacagaactcatccatggctgagatttttcagcacctgaatgcctaccgccaggaagctcacaaccgcatctccagccacattcctttgatcatccagtatttcatcctgaaaatgtttgctgagcagctgcagaaaggcatgctccagctcctgcaggacaaggattcctgcagctggctcctgaaggaacacaatgacaccagcgagaagaggaagttcctgaaggagcgattgtcaaggctggctcaggctcgccgccggctagccaaatttcctggttaagctggctc

SEQ ID NO: 2526 - DNA, 1926 bp, Cricetulus griseus
tccaagaatgcaacaagcagggacttctgtctgaagtcaattttgccagtcttgtgggcaagcgcacaacagatcgggacccccagctaaaatcatcagaaaatgccaacatccagcctaaccctgggctgatcctccgggcagagcccaccgtcacaaacattctcaagacgatggatgcagaccactccaagtccccagagggactgctgggggtcctgggacacatgctgtccgggaagagcctggacttgctgctggctgccgctgctgccactgggaagcttaagtcctttgcccggaaattcatcaatctgaatgagttcactacccatggcagtggagagagcaacaaaaacagcctctgttcgtgccttgctcttcgacatctccttcctcatgctgtgccacgtggcccagacctatggctcagaggtgattctctccgaggcaagctcaggagaggaggtccccttctttgagacctggatgcagacctgcatgcctgaggagggcaagattttgaaccctgaccacccttgcttccggcctgactccaccaaagtagagtccttggtggccttgctcaacaactcctctgagatgaagctagtacagatgaagtggcatgaagcctgcctgagcatctcagcagccattttggagatcctcaatgcctgggagaatgggggtgctggccttcgagtccatccagaagatcactgacaatatcaagggaaaggtatgcagtctggcagtgtgcgctgtggcttggcttgtggcccacgtccggatgctggggctggatgagcgtgagaagtcgctgcagatgatccgtcagctggcagggccactgtacagtgagaacaccctgcagttctacaatgagagagtggtgattatgaactcaatcttggaacacatgtgtgcggacgtgcttcagcagacagcaacacagatcaagtttccatccacgggcgtggacacaatgccctactggaacctgcttcctcccaagcgccccatcaaggaggtactgacagacatctttgccaaggtgctggagaggggctgggtggacagccgctccatccatatcctagacaccctgctgcgcatgggcggcgtctactggttctgcaacaacctgattaaggagctgctgaaggagactcgcaaggaacacacactgagggcagtacagctactctactccatcttctgcctggacttgccgcaggtgaccctggtcttgctgggccacatcctgcccggtctgcttactgactcctccaagtggcacagcctcatggaccctcctggcactgcactagccaaactagctgtgtggtgcgccctgagttcttattcctctcaaaagggacaggcagcttcccgccacaagaagagacacagggaagacattgaggactatatcagcctcttccccgtggaagacatgcagccttcgaagctgatgcgactcctgagcaccaatgaggatgatgccaacattctgtcgagtcccactgaccgttccatgaacagctccctctcggcttcccaactccacacagtcaacatgagggaccctctgaacagagtcctggccaacctgttcctgctcatttcctccatcctgggctcccgcaccgccggcccccacacccagtttgtgcagtggttcatggaggagtgtgtcgactgcctggagcaggacagcaggggcagcattctgcagttcatgccctttgccactgtgtcggaactagtaaaggtgtctgctatgtccagccccaaggtagtgctggccatcacagacctcaccctgcccctcggtcggcaagtggctgccaaagccatcgctgcactctgaggagcttggagtagcctggacggggtcccagccccagcatcccagcaggg

SEQ ID NO: 2527 - DNA, 1926 bp, Cricetulus griseus
gagtcggtgctgagagccgcttccaggatcctgagatccggagaagccggggtctgagcggctcctccagagttactgatctatgaaatggcagagaatggaaaaaattgtgaccagagacgtgtaacaatgagtaaagagcagcataatgggagtttcccagacccctcttcagtacatgagaagaagaaaagggatcgggaagaaagacagaatattgtcctgtggagacagccgctcattaccttgcagtatttttctctggaaactcttatagttttgaaggaatggacctcaaaattgtggcatcgtcaaagcgttgtggtgtcttctttactgctgctcgctgtgcttatagctacgtattatgtggaaggagcacaccaacagtatgtgcagcggatagagaagcagtttcttttgtatgcctactggataggcttggggattttgtcctctgttggtcttggaacaggattacacacctttctgctttatctgggcccacatatagcttcagttacattagctgcttatgaatgcaattcagttaatttccctgagccaccgtatcctgaccagattatctgtccagatgaagacagcactgaaggagccgtgactctgtggagtatcatctctaaagttagaattgaggcctgcatgtggggcattggtacagccattggagagctacctccatatttcatggccagggcagctcgcctctcaggtactgaaccagatgatgaagagtaccaggaatttgaagagatgctggaacatgcagagggcgcacaagactttgcatcacgagcgaaactggcagttcaaaaccttgtacagaaagttggattttttggaattttggcctgtgcttctattccaaatcccctgtttgacctggctggaataacatgtggacacttcctcgtaccgttttggaccttctttggtgcaaccctgattggaaaagcaatcattaaaatgcatatccagaaaatctttgttataataactttcagcaagcacatcgtagaacagatggtggctttcattggtgctgtccccggcataggtccgtctctgcagaagccttttcaggagtacctggaggctcagcggcagaagctccaccaccacagcaaagtgggcaccccgcagggagaaaactggttgtcctggatgtttgagaagctggtcgttgtaatggtgtgttactttatcctgtctatcattaactccatggcacagagttacgccaaacgaatccagcagcgcttgaactcagaggagaaaactaaataagcagagaaagtttttatctgcagaagttagcatggagggttcctgccttacactgggagggctctaaccaggaaggaagatccccttttccatcctgtattatttttaaaacactcttcctgaagcagtttagtccgtatttgacactggcacacttttcctttatgtgttaaggtaaggtctccaccctccgctcgaccacatgtattttgttagggtggatgtgatattctgctgcagactcaacaaaaattggccttctgttactttcaaagggccacacaaaacgctctaaagtatgttaaatatgacaggctttttaggcttgtcacaaatgattgttttttctaagtcatcaaatgtatataagttattatatattggataccagtcttgcatgtctatcatggaacaatttaatatgccttcctttcccaccctcaaaaaggccattttatgatgcattgcacaccctctggggaaattgatctttaaattttgagacagtataaggaaaatctggttggtgtctcacaaatgagcacaccattttttattctgtatatttagaatgaagtcgtgaaaaactttataaagacatctttgatcattccgaaa

SEQ ID NO: 2528 - DNA, 1926 bp, Cricetulus griseus
ggcagggcggcgccagggccgagcatctcggggctgtagcgccgcgacttctctgcctgcagcaccacctggcgcgggccggggtccggtgagagaaagatgttttcccgggtaagagccattgtcactccttgtactttgacatgtcgtcatttgcacctgaaggagaaaggcaaaccactcatgttgaatccaagaacaaacaagggaatggcatttacgttacaggaacgacaaatgcttggtcttcaaggacttttacctcctaaaatagagacacaagatattcaagccttacgattccatagaaacttaaaaaaaatagactagccccttagaaaaatacatctatataatgggcatacaagaaagaaatgagaaactgttttatagaatactgcaagatgatattgaaagtctgatgccaattgtatacacaccaacagttggtcttgcctgttcccaatatggacacatctttagaagacctaagggattgtttatttcaatctcagacagaggtcatgtcagatcaattgtggataactggccagaaaaccatgttaaggctgttgtggtaactgatggagagagaattctgggtcttggagatctgggtgtctacggaatggggatccccgtaggaaagctttgtctatatacagcatgtgcaggcatacagcccgagaaatgcctacctgtgtgtatcgacgtgggactgataataaagcactattgaaagatccattttatatgggcttgtatcagaagcgagatcgatctcaactttaattgatgatctgattgatgaatttatgaaggcgattactgacagatatggccggaacacactcattcagtttgaagactttggaaatcataatgcattccggttcttaagaaaataatcgagaaaaatactgtaccttcaatgatgatattcaagggacagctgcagttgccttgtcaggtcttcttgcaacccaaaaggttattaataaaccagtctcagaacacaaaatcttatttcttggagcaggagaggctgcacttggaattgcaaatcttatagttatgtctatggtggaaagtggcctctcagaagaggaggcacggaggaaggtctggatgttcgacaagaacggcttattagttaagggccggtctgctagcatagatagtaaccaggaaccatttgctcacggggccccagagaacgtacctggaacttttgaagatgcagtaaataaacttaagccttcagttataattggagtggcaggtgctggtcggctttttactcctggcgtaatcaaagccatggcctctatcaacgaaaggcctataatatttgcactaagtaaccctacagcgcaggctgagtgcacagctgaagaagcatatacactgacagagggcaggtgtttgtttgccagcggcagcccatttgagccagtgaaactccaggatggacgagtcttcaccccaggccaaggaaacaatgcatatatttttccaggtgtggctttagctgttattctctgtcaaacccgacacatcagtgacagtgttttcttggaagctgcaaaggcactgacaagtcagttgacagatgaagagttagcccaagggaggctttacccatcactcgctaatattcaggaagtttctgttaacatagctattaaagttacagaatacctgtatgctaataaaatggctttccgatacccagaacctgaagacaaggccaaatatagttaaagaaagaatatggaggagtgattatgtttccctgctgccggatgtgtatgattggccagagtcttcattgaagcctcctcagatatcagaatagaagcttccccattaagatattccatgcttcagggaatcactatttttagacaaaaagatacttttctc

SEQ ID NO: 2529 - DNA, 1926 bp, Cricetulus griseus
gctggggattgagcccaccaaccaggctgcagtagtctatactaccgagagtgatggttctcttctccgaagcctggtgcccaccctggtcctggttagcatcctcctctatgcgatgaagagggggccgaatggggactggtcgtggtggacgaggaggaggcctcttcagtgttggtgagacaacggccaagaatcttaaaaaaaaacaattgatgtgcgattcgcagatgtggctggctgtgaagaagccaaattggaaattatggagtttgtgaatttcctgaagaacccaaagcaatatcaggacttaggagccaaaattccaaagggagcaatgctcactggtccacctggtactggcaaaacacttcttgcaaaagcaactgctggggaggccaatgtgcccttcatcactgtgaatgggtcagagtttctggaaatgtttgttggtgttgggccagcacgggttcgtgacatgtttgcaatggcccgaaaaaatgctccttgcattttattcattgatgagattgatgcaattggcaggaagcgaggccgtggtcacctgggaggccagagtgagcaggagaacactttaaaccagatgcttgtggagatggatggattcaactctaccactaatgtggtagtgctagctggcaccaatcgccctgatatccttgacccagccctgacacgtcctggccggtttgaccgccagatctacattggtccccctgatatcaaaggcaggtcctctattttcaaggtccacttgcgtccactcaagctagacgaacgcctcaccaaagatgctctttcaaggaagctagcagctcttactccgggcttcactggtgctgatatttccaatgtgtgcaatgaagcagcactgattgctgcccgccatcttagcccttctgtccaggaacgacactttgagaaagccatcgagagggtcattggaggccttgagaagaagacccaggtgctacaacccaatgaaaagacaactgtagcctatcacgaggctgggcatgcagtggtgggctggttcttggaacatgcagaccctctgctgaaggtgtccatcatacctcggggcaaaggacttggctatgcccagtaccttccccgggagcagtacctttacacacgggagcagctcttcgaccgcatgtgtatgatgctggggggtagggtggctgagcagctgttctttggtcagatcactacaggggctcaggatgacctgaggaaggtcacccagagtgcctatgcccagattgtacagtttggaatgagtgagaagctgggccaggtatcctttgacctccccagacaaggtgaaaccatggtggagaagccatacagtgaagcaactgcccagctcattgatgaggaggtccggcgccttgtcaggtctgcctatgatcggactctggagctgcttacacagtgccgggaacaggttgagaaggtgagcaggagactcctggagaaagaagtgctggagaaggctgacatggtagagctgttgggccctcggccctttgcagagaagtctacctatgaggaatttgtagagggcactggcagcctagaggaggacacaacccttcctgaggggctgaaagactggaatcagggacgggaggaaggaggcactgagcggtgcttacaggagagccctgcatagccatggcctgtgggtgaccacctgtgaccactgttgactgggagctgctcagcctttgcagaacagctgtcagagtaacaaaaacaaattaaaacaggtgacaactgcaaacaaatgttttaggtaagaccattcagaatccacagaagaagagttaggacttggcagcattcagccaaggcaatagctaagggatcaaaggtgtggcctgaggccacagaccctgg

SEQ ID NO: 2530 - DNA, 1925 bp, Cricetulus griseus
tctcgtgggttggtaaaggctcctgggaagagctcattcaccatgtttgtggatctaggaatctaccagcctggaggcagtggggataccatccctatcacagccctggtaggtggagagggcggtcgtctggatcagctgcagttcgatgtaaggaagggctctgtggtcaacgttaatcccaccaacacccgggctcacagcgagactcccgagattcggaagtacaagaagcgattcaattcggagatcctctgtgcagccctctggggggtcaacctcctggtgggcacggagaatgggctcatgttgctggacagaagtggacagggcaaagtgtatggcctcattgggcggcggcgcttccagcagatggatgtgctggaagggctcaacttgctcatcaccatctcagggaaaaggaacaaacttcgggtatattacctgtcctggctgcggaataagattctgcacaatgacccagaggtggagaagaagcaagggtggaccaccgtgggagacatggagggctgtggccactatcgtgttgtgaaatatgagcgtattaagttcctggtcattgccctgaagaactccgtggaagtgtatgcctgggctcccaaaccctaccacaaattcatggccttcaagtcctttgctgacctccctcaccgcccgctgctggtggacctgacagtagaggaggggcagcggctcaaggtcatctatggctccagtgctggcttccatgctgtggatgttgactctgggaacagctatgacatctacatccctgtacacatccagagccagatcacaccccatgccatcatcttcctccccaatactgacggcatggagatgctgctgtgctatgaagacgaaggtgtctatgtcaacacttatgggcggatcatcaaggatgtggtgctgcagtggggagagatgcccacctctgtggcctacatctgctccaaccagataatgggctggggtgagaaagccattgagatccgctctgtggagacgggccacctagacggggtcttcatgcacaagcgagcccagaggcttaagttcctgtgtgagcggaatgataaggtgttttttgcctcagtccgctctgggggaagcagccaagtttactttatgactttgaaccgtaactgcatcatgaactggtgacgaggcccctgggctggggctccccaacatggacccagctctcctccccacagccagactacccaggccgcccgtccctgccccctccccttgggcttttgcttttactggtttgattcactggagcctgctgggaacgtgacctctgatccctgaagcttttgtgatcacgtgaccatcctttctcccaacatgttttcaaaactgtgcctgtccccaacttgtggggaaagaatgacacagcttccccttaccaggaactgagtgggacttgccccgccccttttctccacttaagaggagagtgctcggggcttggactcccttaccccattgctgctgactgagcagggccctgtacccctttatttgcacgccaggggagctggctcccccttgaatgtaccagactctgggggggtcactgggccctgggttctggggggggtcaccagccactccagaggcagggaccatgtcctcattttctgaaagcactttaatgattcccctccccccaggtcccagggaatggaggagggaccccacagccaaaacattccttctttcccaccctccccccagcctctcccccttccctagagggagagctcagcgctcccaccctccatatccccttgcttgcatctgtatatagtgtgagcagcaagtagcccttccttcctgtatcctttctcaatgtagtggccttggaaacccgtttgttaataaagacaatt

SEQ ID NO: 2531 - DNA, 1925 bp, Cricetulus griseus
atgaagcgcagttcagtttccaccggtggtgctggccgactttctatacaggagttaagatccgctggacctcaataaaccaggccttcacacccctcaaaccaaaggagagaaccacctttggaaagctgagcacaaacaaacctacatctagaaagaaaagtctcaatattcggcaaaagggactagcggacatggatccaggaatagtcaacttggtatattttccagttctgaaaaaatcaaggatccaagaccacttaatgataaagggttcattcagcaatgtattcgacagctctatgagtttcttacagaaaatggtaatgtatgtagcgtgtccatgaagtctctgcaagccccatccactaaagatttcctgaagatctttgccttttctttatggcttcctgtgcccatcatatgaacttcctgatacaaaatttgaagaagagatcccaagaatttttaaagaccttgggtatccctttgctctgtccaagagctccatgtatacagtgggagcccctcatacctggccacacattgtggcagccttggtgtggctgatagactgcatcaagattcatgctgccatgaaagaaaattcacctttatttgatgatatgcagtcttggggagaagaaactgaagatggaattatacataataagttgtttttggactacaccataaaatgctacgagagtttcatgaccggggctgacagctttgaagagatgaatgcagagctgcagtcaaagctgaaggatttgtataaggtagatgcatccaagctggagtcattagcagcagaaaacaaagcactaaatgaacagattgcaagattggagcaagaaagagaaaaagaaccgaaccgtctgatatcattgaagaagctgaaagcctccttgcaagcagatgttgaaaagtataaagcatacatgagcaatttggagtcacattcatccattctagaccagaaattgagtggtcttgatgaagaaattggtagattagaactacaatgtgaaacaataagacaggagaacactcgactacagaatattgttgataaccagaagtactcagttgcagacattgagagaataaatcatgaaaaaaatgaattgcagcagaccattaataaattaaccaaagacctagaggctgagcaacaacaaatgtggaatgaggaattaaaatatgccagaggcaaagaggcgattgaagcccagttagcagagtaccacaagttggctagaaaattaaagcttattcccaaaggtgctgagaattccaaaggtcatgactttgaaattaagtttaatcctgaagctggtgccaaatgccttgtcaaatacaaggctcaagtgtatgtacatctcaaagaactcttgaatgaaaatgaagaagaaattaacaaagctctaaataaaaagattggtctggaggatactttagaacaactgaacaccatgaagacagagaccaggagaagtgtgaagatgctgaaggaagaggttcaaaagcttgatgatctttaccaacaaaaagttaaggaagctgaggaagaagatgagaagtgtgccagtgagcttaagtccctggagaaacacaagcacctgctggagagcacagtgaaggaaggcctccgtgaagccatggatgagctggatgccgtccagcgggaataccaacttgttgtgcaaaccacaactgaagaaaggagaaaagtaggaaataacttacagcgtcttttagagatggttgctacacatgtagggtctttggaaaaacatctcgaagaacagattgctaaagctaacagagaatatgaagattgtatgtctgaagacctcctggaaaatatcagagagagtgcagagaagtataagagtaacgctgctgtgtttaaggctccc

SEQ ID NO: 2532 - DNA, 1925 bp, Cricetulus griseus
cactgaaggctggggctatgatggcggcaacagtggtatctcagatgcggatggggacacggtgggcccgagtcctgtggctgcatctgtttttggtggtggtggcagcggcagtggccgcggagcagcaggtgccactggtactgtggtcgagtgaccgggacctgtgggctcctatggtcgacacacatgagggtcatattaccagcaatatgcagctttctacctacttagaccctgccctggagctgggcccccgcaatgtactgctgttccttcaggacaagttaagcattgaggatttcacagcatatggtggtgtgtttggaaataagcaggacagtgccttttctaacctggagaatgccctggatttggctccctcctcactggtgcttcctgctgtggactggtatgcaatcagcactctgactacctatctgcaggagaagcttggggctagtcccctgcatgtggatctagctactctaaaggagctgaaactcaatgccagcctccctgccctgctgctcatccatctgccctacacagccagctccggtctgatggcaccaagggaggtcctcacaggcaatgatgaggtcattggacaggtactgagcacactgaagtctgaagatgtcccttacaccgcagctcttactgcagtccgcccttctagagtggtccgtgatgtacccatggtggctgagggtctaggtcgacagctgcttcagactcaggtggcatcacatgtgatccatcctcctgtgagttacaatgacactgccccaaggatcctgttctgggcacaaaacttctctgtggcatacaaagacgagtggaaagacttgacttccctcacctttggtgtggagaaacttaacttgactggctccttctggaacgactcctttgccatgctttcactgacctatgaaccactctttggtgcaatggtgacattcaagttcattctggctagtcgcttctacccagtgtctgcccgatactggtttactatggaacgacttgaaatccacagcaatggctctgtttcccatttcaatgtttcccaagtcacgggacccagcatctattctttccactgtgagtatgtcagcagtctgagcaagaaaggcaatctccttgtgaccaacgtgccctcactctggcagatgactcttcaggacttccagatccaggccttcaatgtgacgggtgagcagttctcctatgctagcgactgtgctggcttcttctctccaggcatctggatggggctgctcaccaccctcttcatgcttttcatcttcacctatggcctgcacatgatactcagcctcaagaccatggatcgttttgacgaccacaagggccccaccatcactttgacacagattgtgtgacctgtgccagagagagattgagggagtgttggtgtctaggttgtcatgtttgcatcttgtggcatagtggatagaaagttttttttctcttcgatagcatgaaccctgcagtaccctcagcctgtcttgcttcctcttcaacctactgagggactggcttccctggggctatcccccatctctaccaacaaagtgtatatattcttcatagatattagacaaatcttccaggctccatcatcatgaggggaaggaacattaattctagggttccctttctccctttcccccttatttattcttgcccctccgctacttgctgtttatagtgcttctgtgtaattaatgctcactccccaagctttatgaatcttccagcaacagcaataaacttgaggttccttgagtttgagatgtatggaaagactacttaactgtctgtccagcttggctgttgtgttttttggggccttcctaataaaataaagacgtgttgtcaataaaaaaaaaaaaaaa

SEQ ID NO: 2533 - DNA, 1925 bp, Cricetulus griseus
ggatgaatcccgactgccacagtgagggaggctacctggactacctcgaggcatcttctgccacttcccccacctcctccctctggccatcaccctttatgttttctggctactttacctctttctgatcctgggagtcaccgcagcaaagttcttctgccctaacttgtcagccatctccaccaatctcaagctctcccacaatgtggcaggtgtcaccttcttggcctttgggaacggagccccagatatcttcagcgccctagtggctttctcagacccacgcactgctggcctggccattggggctctgttcggtgcaggggtgctggtcaccactgtagtggccggaggcatcaccatcctgaaccccttcatggctgcctccaggcctttcctcagggacatcgctttctacatggcagctgtattcctaaccttcactgcaactctatctccggcggatcacgctggcgtgggcactgggttacctgggcctctatgtgttctatgtggtcacagtcatcctctgtacttgggtctaccaacggcaacgtagcatgtctctggtccactccatgcctgagacaccagagatactgtctgattctgaagaggatcaggtgtcttccaacaccaacagctatgactatggagatgaataccggcctctgttgctgggtcaggagaccactgcccagatcctgatccaagccctgaatcccttggactacaggaagtggaggacccagtcaatgtcctgtaggctcctgaaggtggccaagttgcctgtggagttcttgctgctgctcacagtacccgtcgtggatcctgacaaggacgatcggaattggaagcggccactcaactgtctgcagctggtcatcagccccctggtcctggtcctgaccctgcagtcgggggtctatggcatctatgagattggtggcctccttcctgtctgggctgtggtggtgatcgtgggcacagctctggcctcagtgaccttctttgccacatctaacagagagccccctagacttcactggctctttgccttcttgggcttcctgaccagtgccttgtggatcaatgcagctgccaccgaggtggtgaacatcttgaggtccctgggcgtggtcttccgtctgagcaacactgtactagggctcaccctcctggcctgggggaacagcattggagatgctttctcagatttcacgctggcccgccagggctaccctcggatggcattctctgcctgtttcggtggcatcattttcaatatcctggtgggtgtcgggctaggttgcttgctgcagattgcccggaaccacgccacagaggtgaagctggagccagatggactgctggtgtgggtgctggccagcgccctgggactcagcctagtcttctcactggtgtccgtgccgcttcagtgtttccaactcagcaagacctatggtctctgcctgctcctcttctacgtcactttccttattgtggtcctactcacagaatttggggtgattcacttgaagagggtctgactgaagctgcttggcctggtggtttaggggtgactcccctggcctcctgatgggagaactggaggggggccctctgcagttcctgtgtagctcccaaaagggtggtctattattgccagagcagagagctcctcatggataacaaggtcctgaatgctggcacccagcagctttagtctggggatttggaggctggctttgctggggaccaccccaggtggaaaggatgggaaacaggagccagcctgggccctgtgtgcctacctcaaggggactcactctataggccagactggtctcgaactcaacagagatccaccggcctctgcctcccaagtgctgggactaaaggcgtgtgccaccactgcccagctt

SEQ ID NO: 2534 - DNA, 1925 bp, Cricetulus griseus
agttaccgggcccaactggataccaaaacggattccaccggcacacactcgctctacaccacctaccaggaccatgagatcatgttccacgtctccacgatgctgccttacacgcctaataaccagcaacagctcctgaggaagcgtcatattggcaatgacattgtgaccatcgtgttccaggagcccggtagcaaacccttctgtcctacaactatccgctcacacttccagcatgtgttcttagtggtgcgcgcacaggctccctgcaccccgcacacttcatacagggtggcagtgagccgcacccaggacactcctgcctttgggccagcactgccgcatggtggaggccccttcgcggccaacgccgatttccgggcctttctgttggccaaggcactcaaagtggtgagcaagcagccggccacgcacgccagtttcacgctatggctactcgcacacgccaacagtacctgcaggacctggctaccaatgaagtgactactacatcgctggactcggcttcgcggtttgggctgccatctctgggcggcaggcgccgggctacccctcggggcccaggcgctgagctgcaggcggcgggcgcgctgatgtggggcgtccgcgcggctctaggggcgcgggtcgccgcgggagcggagacgggtggcccggacaactgtgcctgtcgcgacgtgttggcttggaccttctcggaacaccagcttgatctgtaccatgggcgcggggaggcgatcacgctgcggcgtcgacggggcgccggggcaagcagtgggcgaagtcgtggcacgtctgcagttggtgagccgcggctgtgagaccagagaactggccctgcccagagacggccaaggtcgcctgggcttcgaagtggatgcagagggttttatcacgcacgtggagcgcttcacgttcgcagagaccacggggcttcggcccggagcacgcctgttgcgagtgtgtggccagacgctgcccaagctgggtccagaagctgctgcccagatgctgcgctctgcgcccaaggtctgcgtcaccgtcctgcccccagacgagagcggccggccgcgaaggagcttttcagagttgtacacgctgtcactgaaggaacccagccgccgtggggccccagagccagtacaggatgggactgtgaaggtggtcctactgccccccacaaagcaactactgcatttttccctgcaagacaacagtggccctccagggcctggggatctgactgaagagagaacggagttcctacatagccacaactccctgtcgacccacagctccctgtcagatgaggctccagtcctgcccaacaccaccccagacctcctccttgtcaccactgccaacccatcagcacctggtactggcagagagacacccccctcccaggaccagtcaggcagctccagtagccatgaggaccccagtgactcagccccagaactgagggcctccatcctgccaagaaccttgtctctgcggaattccatcagtaaaattatgtcagaagctggcagtgagaccctagaggatgagtggcagtccatctcggagatcgcttccacttgcaacacaattctggagtcactgtcccgagagggacagcctgtctcagagagtggagaccccaaaggagctccaaagtgtgattctgagccagaacctgggagcctgtcagaaaaggtctctcacctagagtccatgctcaagaagctccaggaggacctgcagagggagaaggcagacagggcagccttggaggaggaggtgcggaacctcaggcacaacaaccagcggctgctggcagagtctgaaagtgctgccacccgactgctcctggcctccaggcagctggcttcaccgacttctgacctggcctaaagttc

SEQ ID NO: 2535 - DNA, 1924 bp, Cricetulus griseus
taagaattcagtattgggacccctcgtattctcaagaccgaattctccaagccactggggaaacattgcactggcctttcatctgctgtgtgagcgagccagccccaactctttctggcagccatacattcagaccctccccagtgaatatgacaccccactctacttcgaagaagaggaagtacgatgtcttcagtcaacacaagccatccatgatgtcttcagccagtataaaaacacagcacgccagtatgcctatttctataaagtcatccagacccatcctcatgccaacaaactgcccttgaaggattctttcacttacgaggactacaggtgggcggtctcttcagttatgacacgacaaaaccaaattcccacagaggacggctcccgggtgaccttggccctgattcctttatgggacatgtgcaatcataccaatggcctgatcacgactggttataacctggaagatgaccgctgtgagtgcgtagccctacaggactttcaggctggagagcagatttacattttttatggcactcgatcaaatgcagagtttgtgatccacagtgggtttttctttgacaataattcacacgacagagtgaaaataaagcttggagtaagtaaaagtgacaggctctacgccatgaaggctgaggtcttggctcgcgccggcatcccaacatccagtgtgtttgcattgcattttactgagccgcccatctctgcccagcttctggcttttctccgagtattctgcatgactgaagaggaattgaaagagcatttgctaggagacagcgccattgacaggatcttcactctgggaaactctgagtttcctgtcagctgggacaatgaggtcaaactgtggacatttctggaagatagagcctcacttcttttaaaaacatataaaacgacgattgaggaagataagatcgtcttgaaaaaccctgacctgtcggtccgtgccacaatggccatcaaattgcgcttgggtgagaaggaaattttggaaaaagcagtaaagagtgcagccatgaaccgggagtactaccgcaaacacatggaggagagggctccgttgcccagatatgaggagagtgacctgggactcttggagggcggtgtgggggactctaggctccctctggtcctgaggaagctggaggaggaggcaggtgtgcaggagtctctgagcctcacggagactgtcagcaaagccaaggctgccgagaacgggctcgtcaatggggaaaatgtgatccctaatgggaccaaagagtcttccggcagtacgggtgaagcgaaggagcggctctgagatgcactcattgggatccagtttagcagaagttgtggacagcccactacattgccgtgttccttgttaacatttttcttttcgcagagaggagaatatgtttttgctgctttatataaaagtgatttttaagttattttaaagatctagcttccctttttgattaagattgccatcttgcttctgggctgcagaccagccgtaggcacttgcagctcttcctgggaaagagttgaggtccgagctcagctgtgctctgcaggcctgccatccttgctccagagtgaaagctagctctgcctcctgctgaggagccaaggttggactctaggtgttcagcggacagtggagatgaggcacagtggaaagaaagccaagtgaggtctgggcaaatctttttcgctccttaaaaataatatccccagtaccaaaaggtaaggtggcaacttgatttcccatggcttaaaatgttgatgatgatcttaattatataaatacacacatatatctagtaatttctaaggatttgttttcttttttgtgttctgttttgctgtattaaaaacttgtccttttccttaaatcaaa

SEQ ID NO: 2536 - DNA, 1924 bp, Cricetulus griseus
gctggcctcgctgactgaggtgttgctgaattgcccggcgggcgccctccccacgcaggggcccggcaggcggcgccaaaacctcgacccgccggtctcccgcgtccgctcggtgctgctggacgccgcgtcgggtcagctgcgcctggtggacggcatccatccctagcggtggcctgggccaacctcaccaacgccattcgcgagaccgggtgggcctatctggacttgggtacaaatggaagctacaatgacagcctgcaggcctatgcagctggtgtggtggaggcttctgtgtctggaggagctcatctacatgcactggatgaacactcctgcagctgaaaggcctagaggacagctacgaaggccgtttgaccttcccaactgggagggttcaccattaaaaccctggggttcctcctgctgcagattgccggagacctggaagacctagagcaagccctgaataagaccagcaccaagcttccctgggctccggttcctgctccgctatcatcaagttgctgccaggcgcacgtgacctcctggtggcacacaacacatggaactcctaccagaacatgctacgcatcatcaagaagtaccagctgcagttccggcaggggcctcaagaggcgtaccccctgattgctggcaacaatttggtcttttcgtcttacccgggcaccatcttctctggcgatgacttctacatcctgggcagtgggctggtcaccctggagaccaccattggcaacaagaatccagccctgtggaagtacgtgcagccccagggctgtgtgctggagtggattcgaaacatcgtggccaaccgcctggccttggacggggccacctgggcagacatcttcaagcagttcaatagtggcacgtataataaccaatggatgattgtggactacaaggcattcatccccaacgggcccagccctggaagccgagtgcttaccatcctagaacagatcccgggcatggtggtggtggccgacaagactgaagatctctacaagacaacctactgggctagctacaacatcccgttctttgagattgtgttcaacgccagtgggctgcaggacttggtggcccaatatggagattggttttcctacactaagaaccctcgagctcagatcttccagagggaccagtcgctggtggaggacatgaattccatggtccggctcataaggtacaacaacttccttcacgaccctctgtcactgtgtgaagcctgtatcccgaagcccaatgcagagaatgccatctctgcccgctctgacctcaatcctgccaatggctcctacccatttcaagccctgtaccagcgtccccacggtggcatcgatgtgaaggtgaccagcttttcactggccaagcgcatgagcatgctggcagccagtggcccaacgtgggatcagttgcccccattccagtggagtttatcgccgttccgcagcatgcttcacatgggccagcctgatctctggacattctcacccatcagtgtcccatgggactgagactttgcctccacccagttgccttcattctgtgtggccagtagggtcacacacctgctacccaccctttggggctctgtcctcactggactctggtctgtgtggtctcctctgcagggacacaaacccagtaggctcagagctgactccatccccaagtcttctgccctccatcactccttctctctgcccctgtcaccagtgggctggggcttgtgcttggctgtgggcctggtgggattctgggcgccattttcctagtgctggtccctcagtgtgtgtgtgggggacattgatagggcttatcattgctgtcactactagcctgcgggcccatctcctcagggagcagtccatcgtccccttctctggcagct

SEQ ID NO: 2537 - DNA, 1924 bp, Cricetulus griseus
gaggagcagcataaaaggagtccgggcccttccatttcctcgtcaagagtgagaggcccagtgctcaacatttgctccaaatccagccctgtctccaagcctgccccacctccacccattttcctaccccttcttcccaatctggtggatatgccctgccttcagtcttgttcctgaaagattgtggtctttatctccttttgcctctttttcatgaggaaaatgaagagggcctttatcgccctattatgggccatctccagagctggcctcggaaaaactgactctgtctgtctttgggaggaaaaaaggagattcctgttacttttcaaggggaagaagacatatacccaagcctttgatcatgactattgcctagcccaccaggggagactacttttgtctgactgcacatgaagccccatgatgatcttcaagaatttgcctgtattttgaaagacctgtggaacattatcaccatagctataactgggttccagcaggtacaaacccacctcctagaaattcaaagtacctgccacattgataactctggctttctttccccatctgaggtcttagtctgaagaagacttcaggattcaaatcttcacccttggacctttactcttccagaccacaggccaacattcaagcctattgcatataggctattcaagtctgaatttagaaacgatgcccatctgtaaagtagcagatcttctgatccactttttttctcctctcctttgtgattgtcaccattttccagacagtgcccccacctccctttgtcttgccttactggcaatctggacttaatggagactgccccctccaaacaacccattttggcactgcccaagtgggagtgtcctctaccttccactggtcctcaccccagcttgcctagtgcttctggggagtttaacagctatgatgcagaccacggggaatttgtgaggcctctgtgttatctttatgtttgtgtccatccttcttggaatcaggggtactttagcatattgctttttctaccttggggaccccaggggccaagcagtcctcctttagtcacaccaaaggcaaaaggcctggctacctcccccttagcacgtgaggtccctactcccctcctttctactcagctttgcttatctcggagatttcaaggcagtagtggggaagtaagggggaagcaggagaagcctctgaccctatatgggcaacttcctgactaaaggctgactgttgtcaccaaaaacaggtccccagcccttgcatccattgaaactccctcttgatctttcaaaggcagctaattgctagcacctctccccacccattccaggcctcttttccctctgtttctttgttagaaggttctgtggagctgaaacccagcctctgatggggcttgtttagtttagttgggttctcagagtctcctgttgttttgtgttgtttccaattgaaaagcaagtttaccctcagagttatgcttttccaaagaagctagtgtgtgtgtgtgttgttgttgttgttgttgttgttgttgttgttgttgttgttttgtttttatgtttcaggttctaagtgaagtgaggtggagaggagttgggaataaccaaggtttagaacatggtgagatagttacttctgatctgcaatccccagcagagagctggggtaggataaggagggcagagaggatttctattcacctttaatatatttttaacaaaaaaaacaaacaaatttaaaaacaaacccaccgcttctgtacatgtctaaatatattttagaagtgggtaggattgtgatttctgatgcagggtccttttttaataaaataggttagaatagcatcatccagtttttagtaactccctttcctgtagagataaaagtagatttattcttg

SEQ ID NO: 2538 - DNA, 1923 bp, Cricetulus griseus
gagctcgggacaacctaagcgctgctcccgcgacatggctttcaattttggggctccttcgggcacttctgggcacctctgcagctaccgccgcacccgcgggtgggtttggaggatttggaacaacaactacaactgcaggctctgcattcagcttttctgccccaacaaacacaggcactacaggccttcttggtggcactcagaacaaaggttttggcttcggtactggttttggcacagcgacaggaactggcactggtttaggtactggtttgggcaccggcctgggatttggaggatttaatacacagccccagcagcagcagcaaactactctaggcggtctcttcagtcagcctacacaggctcctgcccagtccaaccagctgatcaatactgccagtcgccctttctcgctccaacgttattgggagatgagagagatgccattttggcaaagtggaaccagcttcaggctttctggggaacaggaaaaggctatttcaacaataatattcctcccgtggagtttacacaggaaaaacccttttagtccgatttaaggctgtaggttatagttgtatgcccaataataaagatgaagatggactggtggtcttagttttcaacaaaaaagaagcagacattagaagccagcaacaacagttggtagaatcattacataaaggtttgggaggaaaccagacccttactgtcaatgtggagggcattaagacactgccagatgatcagacagaagttgtcatttatgttgttgagcgttctccaaatggcacctcgagaagggtcccagcaacaacactgtatgctcactttgagcaagctaacattaagacacagctgcagcagcttggggtgacactttctatgaccagaacagaactgtcccctgctcagatcaaacagctcttgcagaaccctcctgcaggtgttgatcctattatttgggaacaagctaaggtggataaccccgattctgaaaaattaattcctgtaccgatggtgggtttcaaagaactgcttcgaagactgaaggttcaagaccagatgactaagcagcatcagaccagattagatatcatatctgaagatattagtgaactacaaaagaatcaaactacaactatggccaaaatagcacaatacaagaggaagctcatggatctctcccacagaaccttacaggtcctaatcaaacaggagattcaaaggaagagcggctacgccatccaggctgacgaagagcaactgcgggttcagctggacactatccagggggaactaaatgcacctactcagttcaaaggtcgactaaatgaactgatgtcccagatccggatgcagaatcactttggagctgtgaaatctgaagaaaggtattacatagatgcagacctgttacgggagatcaagcagcatttgaaacaacaacaggaaggcctcagccacctgattagcatcataaaagatgacctagaagatataaaactggtagaacatggattgaatgaaaccatccatactagaggcggtgtcttttgctgaccatttacagactctgtcagaggttcataaagtcatcttgctacttcaggccttacgatgaccacgtggatgggaaaaagtgcttcagagtgtgaatgtatttcagcttttatatctgtgaggtcatcagtggagagtaaaaaaaatcctaaagtatttaatgatttgtgtggttttccttttgttctatgaagacgtgaagatatatttttatattattttacttatttggaactgacagaacatgcctaaccaattaggatttagcaaaatcactgttttggcaaacttttttcttaactttttatttctaaacatgaaatctataaaataaattgttaatttgcaatttta

SEQ ID NO: 2539 - DNA, 1923 bp, Cricetulus griseus
gatcgaggttgcactggccgaggctacagggagcaggcgcgggtcagcgcagccatggtgaagatcagtttccagcccgcggtggcgggcatcaaggccgataaggccgataaggcagcggcatctggcccggcctcggcatctgccccggccgcggagatcctgctgactccggcgagggatgaacgcccccctcgccaccgctccaggaaagggggctcagtgggcggagtgtgctacctatctatgggcatggttgtgctgctcatgggccttgtctttgcctccgtctacatctacagatacttcttccttgctcagctggcccgagataacctcttccactgtggcgtgctctacgaagactccctgtcctcccagatgcggactcggatggagctggaggaagatgtgaagatctaccttgaggagaactatgaacgtatcaatgtccctgtgccccagtttggtggtggggaccctgcagatatcatccatgacttccagcggggtctcactgcctaccatgacatctccctggacaagtgctacgtcatcgaactcaacaccaccattgtgctaccccctcggaacttctgggagctcctcatgaatgtgaagagagggacctacctcccacagacatacatcatccaggaggagatggtagtgacggagtatgtcagtgacaaggaggctctgggttccttcatctaccacctgtgcaatgggaaggacacctaccggctgcggcgccgggctacccggaggcgcatcaacaagcgtggggccaagaactgcaatgccatccgccactttgagaacacctttgtggtggagacggtcatctgtggggtggtgtgaggcctttcctccaggcccacccctgccctcttctttctccctctggcctctctcaggccttcctcctcctccctttgcttagcttgtaccatgggcacttttccatagatgtgacatgtcctaccatcctttccagccccaccctcctccctgtaccagggctgtgatctctcaaggggacctctgagtctgctggtctttcaagtgtgaggcaggagggaacagttgcccaagctggtttctgtaatccattgttttaagtcagctccccagtggctgggccaaggggaaggactaaagggaggggctggacacgtgaaagcctgggcaggggcaagagcatggatttaaggcttgacacgggattcagaaatagcccccacttttggggaagtcccaaaagacttttttttcttgcacagcacactttttccatcctcctggtccttaggcctaagtgtggactaaggatggggaaatgtgtcctgggttggacccatcagagcacaagagaaggtggctatcctggggtctccccgggactcctgtcagtgccttcatcccaccagcaggagcctggtgtttgagggtgggatgagtccgccaagcacagttctctgagtggaaccaaagaaatgaggagttgggccaccctggcctggtgcctaagaacacaggagcaagtgggtacagaagtcatgggctgtgagcagcaagcccgccctgggcagtggatggagcctatgccttcctccatgccagggctactgtgaaagatggaagcgggagggagagccacctggtacttttgtccccgcttcctttccgttctggatctatccccacatccaggggtgcgtgatgtttctccttctttgcatgtttttactgatgttcgtgcaggccgtcctcagtcctgagcctgggagaggctttggtgcctcgggtcagacttgggttgtccgtggcggtgaagctttcaaatgctttgtatattttctctattagatctcttttcagaagtgtctgtagaaaattaaaaaaaaagaaaaaaaaaaa

SEQ ID NO: 2540 - DNA, 1923 bp, Cricetulus griseus
ggatgtagatgtatctcacggaagccggctttggccctgcggctcctcctgtcgccgcggagaaattgttggagctggcagcctaggaatgactctcttcccggcatctaagctcacttggtcagaaaccttggatgagcctgtgggacccttcctcctagccctgtggtttggatccagtggctttgggactgtgagagaatggacaaagattcccaggggctgctagattcatccctgatggcatcaggcactgctagccgttcagaggatgaagagtcactggcaggacagaagcgagcttcgtcccaggccctgggtactatccctaaacgcagaagctcttccaggttcatcaaacggaaaaaatttgatgatgagctggtagagagcagcctggccaaatcctctacccgggtgaagggggccagtggagtggaatcaggccgctgttcggggagtgagccctcctccagtgagaagaagaaggtatccaaggcccctagtactcctgtgccacccagccctgccccaaccccaggactcactaagcgtgtgaagaaaagcaaacagccacttcaggtgaccaaggatctgggccgatggaagcctgcagatgacctcctactcatcaatgctgtgttgcagaccaatgatctgacatctgtgcacctgggtgtgaagttcagctgccgatttaccctgcgggaagttcaagagcgttggtacgccctactctacgaccctgtcatctccaagctggcttgccaggccatgaggcaattgcacccagaagccattgcagccattcagagcaaggccctgtttagcaaggctgaagagcagttgctgagcaaagtaggatcgaccagccagcctaccttggaaaccttccaggacttgctgcacagacaccctgatgccttctatctgacccgtactgccaaggctctgcaggcccactggcagctcatgagacagtattacctacttgaggaccagacagtgcagccactgcccaagggggaccaagtgctaaacttctctgatgcagaggacctgattgacgacagtaagctcaaggacatgcgagatgaagtcctggagcatgagctgacggtggctgaccggcgccagaaacgagagatccggcagctggaacaggaattgcataagtggcaggtgctagtggacagtatcacaggcatgagctctccagacttcgacaaccagaccctggcagtgttgcggggccgcatggtgcgatacctaatgcgttctcgtgagatcaccctgggcagagcaaccaaggacaaccagattgatgtcgacctgtctctagaaggtccagcctggaagatctcccgaaagcaaggtgtcatcaagctgaaaaacaatggtgacttcttcatcgccaatgagggccggcggcccatctacattgatggccggcctgtgctatgtggctccaagtggcggcttagcaacaactccgtggtggagatcgccagcctgagattcgtcttcctcatcaaccaggacctcattgccctcatccgggctgaggctgccaagatcacaccacagtgaggcgggtagcagaaaccagggcattctttggcctcagtttcccctgtcattccagctcccttgagctgggaactcaggctcctggaaaaccctctacccagagtgggtagtggaggcccaactgctggcccattgatttgagcctttgaagcaaggtgggatcaccatggggatgccaggagaggctaggacccctgtgcctccccagagccagacgccccaccattgccacatcactcctgtgtctccaggggatcagctttagtctccctttttgtttttcgttttgtaaataaaaagcaccaagttaccaaaaaaaaaaaaaaaaaaaaa

SEQ ID NO: 2541 - DNA, 1922 bp, Cricetulus griseus
agattgctgtctcctttgttcgccctcgttgcgcagtcgtcctagcgtcatttctgttccgtttccagactcggcaattgtcagtggtgcggtgctgctcggaaggccccgtgggcgagctcgtaggagcttgagaccgtcgcagccccctcggattcctatcggttggaagaaaaaatggttgaagcagatagaccaggaaagctctttattggtgggctcaatacagagacaaatgagaaagcgcttgaggcagtatttggcaaatatggacgaatagtggaagtgcttttgatgaaggaccgagaaactaacaagtcaagaggatttgcttttgtcactttcgaaagcccagcagatgcaaaggatgctgcccgagacatgaatggaaagtccttagatggaaaagccatcaaggtggagcaagccaccaaaccatcatttgaaagtggtagacgaggactacctccgcctccaagaagcagaggccccccgagaggacttcgaggagcaagaggaggaagtggaggaactagaggacccccctcacgtggagggcacatggatgacggtggctattccatgaattttaccatgagttcttcgaggggacctcttccagtaaaaagaggaccaccaccacgaagtggaggtcctcctcctaaaagatcagctccttcaggaccagttcgtagcagcagcggaatgggaggaagagcccctgtgtcacgtggaagagatagttatggaggcccgccacgaagggagccccttccctctcgcagagatgtgtatttgtccccaagagatgatggctattccactaaagacagctattcaagcagagactatccaagttctcgagatacaagagattatgcacctccaccaagagattatacttaccgtgattatggtcattccagttcacgtgatgactacccatcaagaggctataatgacagagacggatatggccgggatcgtgactattcagaccatcccagtggaggttcctacagagattcctatgagagttatggtaactcacgtagtgctccacctacacgagggcccccgccatcttatggtggaagcagtcgctatgatgattacagcagctcacgtgacggatatggtggaagtcgagacagttactcaagcagccgaagtgatctctactcaagtggtcgtgatcgcgttggtagacaagaacgagggcttcccccttctatggaaagggggtaccctcctccacgtgattcctacagcagttcaagccgcggagcaccaagaggtggtggccgtggaggaagccgatctgatagagggggaggcagaagcagatactaggaacaaacaacttttggaccaaaaatccccattcaaacaaacaaacaaaaatggaaactttctgtcataaactacccaaggactactaaaaggaaaaattgtgttaccttcttaaaatttcctgttctccttaataatttttatgttcttgtgagggaaaaagtaagacatgtttaattttatttgatattatgagttgcttttaacaagcaaatgttaaatgtgtaagccttgacttgtactagtgttgtaattttccaagtaaaagtgtccctgaaggccacttcctgatttttcccagtaaatgaggaaagcaatcctaagatcttccacaaactttcagccatatagatgtcctttggtctccattgagggatgaattgccctgcctatgtagacaagctagctagctattcgagagggttggttgggtgtgctactcttaagatttcagggtgtcttccaactgagatctcaatattcacaagtataagaccatttaagtgtgtgttaaacaactacagaatactaaataaaaagtttggccaaaaccaacaaaaaaaaaaaaa

SEQ ID NO: 2542 - DNA, 1922 bp, Cricetulus griseus
gacaacctcagcaatgtggagaagcctagggcttgccctggctctctgtctcctcccctatggaggaacagagagccaaggccaaagccctgcttgtaagcaacctccagcctggagcataggagatcaaaatccaatgctaaactctgagggtacggtgacggtggttgctcttcttcaagccagctgatacctgtgccttctgcaggcatccagattggaagacctgcgactgaaactagagaaccaaggatattctaacatctcttacatcattgttaatcatcaaggatccccttctcaactaaaacacacacatcttaaaaatcatgtgtcagaccagattgctgtttaccggcaagaagaacaccaaacagatgtctggactctcctaaatggaaacaaagatgacttcctcatatatgacagatgtggccgtcttgtgtatcaccttggcttgccctattccttcctcactttcccatatgttgaagaagctattaagattgcctactgtgagaagaagtgcagaaactgctctttcacgagtcttgaagatgaagacttctgtaaaaatgtgtcctcagctactaagggtaaaacggcggagccctcggaggcacatcaccaccacaagcaccatcacaaacacgggcacgggcttcttgggagcagggaggagctttcagagaatcagcagcctgggctcttcctcctgtaggcttacatcaccaccataagcacaagggcaagcacaggcagggtcacttagagagctgagacatgcaggcaagtgagggtctacagctttcacttgcccaaaggaaactttgtcgaaagggatgcataaaccagctcctgtgtaagttgtctcaggagtccgggacaactaccagtagctgctgctgccactgtcgccatctcatatttgagaagtcagggtctgcaatcacttgacagtgcgccgaaaacctcccatctttatgtagctgacaggggctttttgcggaggagaaagtcattgaatcttgtcagtgtcgatcacctccagctgcctgacagagtcagccactagaccccacaggggccagccccaactgaagctgagataataagatcaaaaagtgaaaatgacgttcaaactaaatatttaaaatgagatgtaaactccctaagtcagcctaaagacacaatttcatttctagaaattttgtaatccacttaattaatcagtgaactaaaagtaggaattggatttgtgtaaacatgataaagctaccatattggcctctaaatttaaaattttatgccacagagaatttgacccaaaccaaatttgtgttaaggggtaactaaaaagtgattgcagcttttggttaatatgtctttctttttctttttccagtgttctatttacattgatgagaacagaaacgtaaactatgacctaggggtttctgttggatagctcgtaatttagaatggagaaagaataacaaagacacattttccagttcttttctttacttaattctcaaaacagtaggaacttgtatctttttaatcttaaatttttaaccaattaaatctttaacagactgtattttaaactccttcttttctttttatatctaagacgactaccagctttacttttactacatacatctgtgtatcttgttttcctcatcttgtgttgtattgttccgaattgtgagtgactgtcttgaaagacgaaatggaagaaaagtatgttgttaatctgcttactgcttaagtcagtatttccataatcaatgatggttcaatagagaaactcagccctatgaacctgaactcttttatggcaaataccattaagcaagaatgcagaagagaactggtcacagtacagacttatctaaataaacgcaattttaaaa

SEQ ID NO: 2543 - DNA, 1922 bp, Cricetulus griseus
ccgggaagtagctgaagaccgggcgatgggaactctggaggtgttgctccggggcggaatcgaggccaccgtgcctccgcggtagagcgagcctgggcgccaggctctggggtcctgaggcatggaggggtctaaggcgtccagcagcaccatgcaggtgagcttcgtgtgccagcgctgcagccagcctctcaagctggacacgagcttcaagatcctggaccgggtcaccatccaggaacttacagctccattacttaccacagcccaggcgaaaccaggagagacccaggaggaagaggctcactcgggagaggagccgtttattgaaactcgccaggatggtgtctctcgaagattcatccccccagccaggatgatgtctacagagagtgctaatagcttcactctgatcggggaggcatctgatggtggcaccatggagaatctcagccgaagactcaaggtcactggagacctttttgacatcatgtcgggtcagactgatgtagatcacccactgtgtgaggaatgcacagatactctgttagaccagctggacactcagctcaatgtcactgaaaacgaatgtcagaactacaaacgctgtttggaaatcctagagcaaatgaatgaggatgacagtgaacagctacagagggagctgaaagagctggccttagaggaggagaggctgatccaggagctagaagatgtggaaaaaaaccgcaaggtagtggcagaaaacctggagaaggtccaggctgaggcggagagactggatcaggaggaagctcagtaccagcgggaatacagtgaatttaaaagacagcagctggagctggacgatgagctgaagagcgtagaaaaccagatgcggtatgcccagatgcagctggacaaactgaagaaaaccaacgtctttaatgcaaccttccacatctggcacagtggacaatttggcacaatcaataacttcagattaggtcgcttgcccagtgttcctgtggaatggaacgaaatcaatgctgcttggggccagacagtattgctgctccatgccctagccaataagatgggtctgaaatttcagaggtaccgacttgttccctatggaaatcattcatatctggagtctctgacagacaaatctaaggagttgccattatactgttctgggggattgcggtttttctgggacaacaagttcgaccatgcaatggtagcttttctggactgtgtgcagcagttcaaagaagaggtggagaaaggcgagactcgattttgtcttccatacaggatggatgtggagaaaggcaagattgaagacactggaggcagtggtggctcctattccatcaaaacccagtttaactctgaggagcaatggacgaaagcgctcaagttcatgctgacaaatcttaagtggggccttgcttgggtgtcctcacagttctataacaagtgacttgttcctcgagggatgtcgcctttaacattttacgtttgtttggtttggaaagatgctttaaattaaatctgggtaatattaaaccacatgtttacaataccaaaagagacaaaagccactttattttaaaatatcttatgacagatagtttccagagctactgtatagcaaacagcccttgccatagttctgactcagccccatgctttcctttcccttttccccttgaaaacaactaatttaaatttgctttttttttttaaagtaagttgaattgacattgatgtgttttcactggattttatctctctcaacttcctgcacttaaaatctgaaacagaagagttctgagatgatgttagtgtgcacagtggggtgacgtggggaaaggacgccatgtcagaagctggatgtctaactctttctcacacagttccagcactgaatgcct

SEQ ID NO: 2544 - DNA, 1921 bp, Cricetulus griseus
gagaccgcgtctgcttcaacctgggccgcgagctgtacttctaccccggctgctgccgccgcgggagccagcggtccattgacctcaacaagcccatcgacaagcgcatctacaaggggacccagcccacctgccacgacttcaaccagttcacggccgccacagagaccatttccttgctggtgggcttctctgccggccaggtgcagtacctggacctcatcaagaaggacaccagcaagcttttcaatgaagagcggctgattgacaagaccaaggtgacatatctgaagtggctgcctgagtccgagagcctattcctcgcttctcacgccagtggccacctgtacctctacaatgtcggccacccctgtgcatgcaccccaccccagtatagcctgctgaagcagggtgagggctttgctgtctatgcagccaagagcaaggctccccgcaacccactggccaagtgggcggtgggtgaggggccccctcaaccgagtttgctttctcacctgacggcagacacctagcctgcgtcagccaggatggctgcctgcgtgtcttccactttgacagcatgcttctgcgcgggctcatgaagagctactttgggggtctgctgtgtgtgtgctggagccctgatggccgctatgtggtgacaggaggggaagatgacctggtcactgtgtggtccttcacggagggtcgtgtggtggctcgaggccatggccacaagtcctgggtcaacgctgtggcctttgatccctacaccacacgggcagaggagaccacgccggccactggtgacggggatcccaggggtgaggaggaggagcctgaagccaccagctcagacacaggagccccactctccccactgcccaaggctggctccatcacctaccgctttggctcagctggccaggacacacagttctgcctgtgggacctcacagaggacgtgctcgcccctcatccctctctggcccgtacccgaaccctgccaggcacacctggggccacgccgccagcctccggcagctctcgggcaggagaggcaggcacaggccccctgccccgctccctgtcacggtccaacagccttcctcaccccagcgggcgggggcaaggctgctgggcccggtgcagccatggagccgggcccaccgttcagcatcggccgcttcgccaccctgaccctgcaggagcggcgggaccgaggagccgagaaggaacataagcgctaccacagcctgggcaacatcagccgtgggggcggcgggggcagcagcaacaatgacaagctcggcggccctgctccccgaagccgcctggacccagccaaggtgctgggcacggcactgtgccctcgaatccacgaggtcccgctgctggagccgctcgtgtgcaagaagatcgctcaggagcgcctgaccgtgctgctcttcctcgaggactgcatcatcactgcctgccaagagggcctcatctgcacctgggctcggccaggcaaggcgtttacagacgaggagaacgaggcccagacaggggaagcaagttggcccaggtcacccagcaagtcagtggtagagggtatctcctcccaaccaggcaactcccccagtggcactgtggtgtgaagctcggatgtcccatgtcccagcctcctagccataaccccccctgcagacctcaaggaccactgtagtaacaagactaatcgtgatgaagggctctgcaagcccccacctgcacaccactgtgcccctgggtgagagggctgcagggggtgtcccctccaagcccacaccccaccccttgctatgatttgtgcttttgaagagtgttaaattatggaggcccacggggccctccttgttccccctggacctcttatttatactaaagtccttgtttg

SEQ ID NO: 2545 - DNA, 1921 bp, Cricetulus griseus
gacctagcgtgggcaagatctggagcaagagcgaggcaggccgtcaaggcacgaagatgaagctgacggtgagcgcgcaaggcatccgcatggtgcacgccgaggagcgagcgctgcggcgcccggggccacctctacctgctgcaccgcgtcacctactgtgtggcagacgcgcggctgcccaaagtcttcgcctgggtgtaccggcatgagctgaagcacaaggcagtaatgctacgctgccacgcggtgcttgtatccaagccggagaaggctcaggccatggccctgctgctctaccagacgtctgccaacgctctggcagagtttaaacgtctaaagcggcgggacgatgcgcgtcaccagcagcaggagctggtgggtgcacacaccatccctctagtgccgctgcgtaagctgctcttgcacggaccttgctgttacaagccgccagtggagcgcagtcgcagcgctcccaagctaggctctatcaccgaggacctgcttggggaacaacaggaggaggagctgcaggaggaagaagaagaggagcacctcgagggctgcctggaggaggaggaagaagaccgtgcgggggatggggacccagcagaggaagacactgaggcacagagggcgctggtggtggctatgcacttggaatgtggggacttgctggacccgctggagaatggccacgaggaggcgttggggggcaacgaagtttcgctgggccccagctccgggacatcacctcctttgccgggctgtgcctccgacatgaaggcccaactgtcgcagcttattagtgacctgggcgaccttagctttggcaatgatgtgcgcaccctggagtccgacttaagggtgacacgcctgctgtcgggcgagagcacgggcagtgagagctctatcgagggtggaggcctggacgccacctctgccacctctggcaaaccctctggtcctgctgatggcaccagcctagatgagccctactccggctaagctcccagacaacttctccgtgcgcctggcaccccacagtggctccccggccatagtactattccccctaacctccaggaaagggaaaattatgcacttgaggtccagacctgagtttggaattcccagggctgcttctctcccatcttgccccagcacttttggctctgagatggttcaggagagacaggcacgacaagcgagagacaggcaggccctcagaggtgggtgagactatggaaatgggagagctggctgaagttggaaaaggcgaagggcgggctagaggtgcccagcagccagtttcctgtttgtgaggcagctggagcttgggaaggaggggtaacttcctctccagaccccccgactgggaggcctctctctgtcatcaatatctcattaacaaagtcactctcataatattggaggctttgctggcactagcttacctgcccccagttcttttgattatgagagcttggactgtttacctcagactaaaaactcttgaaaggatgccaaatttctcaaataactgtactggggaggcagggtatgaaagttgtgttttgtttacagttaaagacatctaatatactaaaaaaaaaaaaaggaattttcctttagaaatacacacctccctcctgtcccaaagagtgtactccatgatgctgtgtaaaatatttttgcacctttgtgaagtatttttgacttttttttttttacataactgttgttctcagagctgaatgtttatatatcttttgctgtgcaaaagatagctgtaaaatgttgttaagttgtatatacagaaatgtgtaataaaactattttgtttatttttttgagcagcattgttttggttccgtatgcatgtcagtggggtgagaataaagaggaaaagctgtcagaa

SEQ ID NO: 2546 - DNA, 1921 bp, Cricetulus griseus
ccggcctgcgctgcgtgtcttcccgctgctccgccgccccgtccttcgccgatcgcaatggaagaagaaatcgccgcgctcgtcattgacaatggctccggcatgtgcaaagctggctttgctggcgacgacgcccccagggccgtgttcccttccatcgtcgggcgcccccggcaccagggcgtcatggtgggcatgggccagaaggactcgtacgtgggtgacgaggcccagagcaagagaggcatcctgaccctgaagtaccccatcgagcacggcattgtcaccaactgggatgacatggagaagatctggcaccacaccttctacaacgagctgcgcgtggcccccgaggagcaccccgtgctcctgaccgaggcccccctgaaccccaaagcgaacagagagaagatgacgcagataatgtttgagaccttcaataccccagccatgtacgtggccattcaggcggtgctgtccctgtatgcatccgggcgcaccactggcattgtcatggactctggtgacggggtcacacacacagtgcccatctacgagggctacgcccttccccacgccatcttgcgtctggacctggctggccgggacctgacagactacctcatgaagatcctgactgagaggggctacagcttcaccaccacggctgagcgggaaattgtgcgtgacattaaggagaagctgtgctatgttgccctggattttgagcaggaaatggctactgctgcatcctcctcctccttggagaagagctatgagctgcctgatgggcaggtgatcaccattggcaatgagcggttccggtgtccagaggcgctcttccagccttccttcctgggcatggagtcgtgtggcatccacgagaccaccttcaactccatcatgaagtgtgacgtggacatccgcaaagacctctatgccaacacggtgctgtctggcggcaccaccatgtaccccggcattgctgacaggatgcagaaggagatcacagccctggctcccagcacaatgaagattaagatcattgctccccctgagcgcaagtactccgtctggattggcggctccatcctggcctcgctctccaccttccagcagatgtggatcagcaagcaggagtacgacgagtcaggcccctccatcgtgcaccgcaaatgcttctagacggactgagcaggtgccaggcatctgctgcatgagctgattctcaagtatcaatttgccctggcaaatgtacacacctcatgctagcctcatgaaactggaataagcctttgaaaagaaatttgtccttgaagcttgtatccaatatcagcactggatcgtagaacttgttgctgatttttgaccttgtattcaagttaactgttcccttggtatatgtttaataccctgtgcatatcttgatttagtccttagtcatgtggcttggtcatttggtggctggggagagcacgctgtggaagagaaatccccagcctggtggatctgtgtgagcaccgtgcagtgatctgtgcagggtattaacagctgacttccaggatttctcgaggctggcaagggttcctgaaccagttaccattccgtcttgccggtctaacagggtgggagagtccgagccttaggacccggtttccgttctggtgttttccctcctgaccgccgtgggttgttacttgccttgagttgggaacgtttgcattgacaactgtaaatgtattcatccttttaatttatgtaaggttttttgtactcaattctttaagaaatgacaaattttggttttctactgttgagtgagaacattaggccccagcaacacgtcattgtgtaaaggaaaataaaaagtgctgcagtaaataaaaaaaaaaaaaaaaaaaaaaaaaaaaaaaaaaaaaaa

SEQ ID NO: 2547 - DNA, 1921 bp, Cricetulus griseus
tcccagttgtgacatgatggaactaaggcgccgttatcagaatttatatattcctagtgacttttttgatgctcagtttacatgggtggatgctttccctttgtcaagaccatttcaactgggaaattactgcaatttttatgtgatgcacagagaagtagagtccttagaaaaaaatatggctgttcttgatccacctgatgctgaccacttgtacagtgcaaaggtaatgctgatggctagccctagtatggaggatttgtatcataagtcatgtgctcttgctgaagacccacaagaacttcgtgatggatttcagcatccggctagactggttaagtttctagtgggcatgaaaggcaaggatgaagccatggccattggaggccattggtctccttcgttggatggaccaaacccagaaaaagacccctctgtgttgattaagactgccattcgttgttgtaaggctctgacaggcattgatctaagtgtatgcacacaatggtaccgttttgcagagattcgctaccatcgccctgaggagacccacaaggggcgtacagttccagctcatgtggagacagtggttttatttttcccggatgtttggcattgccttcccacccgctcagagtgggaaaccctctcccgaggatacaagcagcagctggtcgagaagcttcagggtgaacgcaagaaggctgatggagaacaggatgaagaagagaaggatgatggtgaagttaaagaaatttccactcctactcattggtctaaacttgatccaaaggcaatgaaggtaaatgatctccgaaaagaattagaaagtcgagctcttagttccaaaggactaaaatcccagttaatagctcgcttgacaaaacagcttaaagtagaagaacaaaaagaagagcagaaggaattagagaagtctgagaaggaagaggaagatgaggatgataggaagtctgaggatgataaagaggaggaagaacgaaaacgacaagaggaaatggaacgccagcgtcaagaaagaagatacattttgcccgatgaaccagccataattgtacatccaaactgggctgcaaaaagtggcaaatttgattgcagcatcatgtctttgagtgtccttttggattacagattggaagataacaaagagcattcatttgaggtttcattgtttgcagaacttttcaatgaaatgcttcaaagagattttggagtcagaatatacaaatcattactgtctcttcctgagaaagaggaacaaaaaagaaaaggaaaagaaaagacaaaaaaagaagagaagaagaaaaagaataaaaaaagaaagagatgatgatactgatgatccaaaaccaaaacggaagaaaatcaggcgacgataaagaacaaaaaagaagacagagatgagaggaaaaaaagaagaaaaagaaaagaagattctaaagatgacgacgaaactgaagaagataataatcaagatgagtatgacccgatggaggcagaagacgctgaggatgaagaagatgatagggaagaggaagaaatgaacaaacgagatgacaaaagagatgttaaccgatactgcaaggaaagaccctctaaagataaggagaaagagaagactcagatggtcacagttaacagggatctgctgatggcctttgtttattttgatcaaagccattgcggttaccttcttgaaaaggatttggaagaaatattatatactcttggattgcatctttctcgggctcaggtaaagaagcttctcaataaagtagtacttcgagagtcatgcttttatcggaaattaacagatacctcgaaagatgaagaaaaccatgaagagtcagagtcattgcaggaagatatgctaggaaacagattattacttccaacaccaaca

SEQ ID NO: 2548 - DNA, 1920 bp, Cricetulus griseus
  modified_base (243)..(243): a, c, t, g, unknown or other
cttctgacagagtgtacagtggatgctgaagcctttaatctgagaggccagtcaccactacacattctgggacagtatggcaaagagaatgcagcagacatctttgatctcttcttagagtgcatgcctgagtatcctctggacaaaccagatgcagaaggcaacacagtgctgctcttggcatatatgaaagggaatgccaacttgtgccgtgccattgttcggtctgggctcgcttgggtnaataataaccaaggagtcaacattttcaattaccaggttgccaaccaaacagcttctgtttagattattagatatgctctaggccagtgtagacaatgtgtgacaaatgtgataggaatcagctagcagcacacaaggacatttggagacaatttcccttttggtagtatagcatccatctcagagaattcacaaagtcttcctgcctgggctgacttagaggcagagcctgacagagtagagccacagctgctagatgagagctgattactctagggtggtggctactctaagtggctatggcctttaatgcacagtgttttcataaagataataggaacctcttgccctcaagtcttttctttctttttaaagctaagctgtattttttagtgagctactcctttaaaaaggtgaaatctttctaaacagggttcaaagatgagagctgaaaattgtggccttaacaaccgaaagctttaccaatgttgatactgctatggtgtcagtgcagtggcagtttgacacctagcagctgtctcattctctcgtcttgctgcgtcctgtctgtggagtcctcaattgctgccactggagtgacagaagaaatgcactttgactgtgctgcactttttctaaagctgcatcattggtgaatccaattcaaaatacccccaaccatgccatgttccctgtgctgcacttctgctctgcactgccctggccagaaccagacttactgtgtatctctcctgtgctctctccatgctgaccagacttcaccatgaaactgcttagctgttcttattcagtcttaatcagtaccttgagaactagcagcaaaacaattatttattcattcaaaagttgccagttgcaaatgagcagagcaggaagaataaacttcactgaaacataattgctgcatcagttagcactactgtgcttacctagcttgttttaaagacaggtacaaaccatgtgcttaaactaatttgctatgatcctctaacagtgatgtcccaacaagcttaagtgcctacactgaggactcctttgtttccagttgtctttttactggtatctcactcggtgagtgttagaacacaagttttgggcctattccaccccaataaccaattcagtcaagtctgaatattcactgctcagtttgcctgccatattctctccaagctgtggggtccacgtgatgtttttattctctacctcagagccctgagttgtttctgactacctgtcaacttcctccctttccttgaagtgggctttcagagaactgggtgtgtgtggtctcactgcccttcccagtttgtgcctgacccccatattgaactgttccagcactagtcttatttgtagacaaggggtgggggcaaagcctccatctaggatttccttacctggcaaaaagatgtggctgaactgctacatacttatgtttggatagatctactttggcttccaaaccactggtggtgctcagtgtgggaatgacagcagcatctgggaccatggcgcttagcagcattatttcttttggagtctgtaatggaatgtatttttcaaatattggtatttttcattttctgtaataattccttataataaaaataaggtaaaattgtaaatataataataaaaataaaaaaaagttaa

SEQ ID NO: 2549 - DNA, 1920 bp, Cricetulus griseus
tctggccgtggagtgtctgggtgctggctgacgtacgacggatctcccagaaccatgcccgaggtcgccgacacttgctccttggcctctccagcctcggtctgccgaacccagcacctccatctgcgctgcagcgtggacttcgctcgccgggtgctgaccgggaccgccgcgctcaccgtccagtctcaggaggataatctgcgcagcctgactttggatacaaaagaccttacaatagagaaagtggtgatcaatggacaagaagtcaaatatactcttggagaaagacaaggttacaaagggtcaccgatggaaatctcccttcccatcgctctgagcaaaaatcaagaggttgttatagaaatttcctatgagacctctcccaaatcctctgctcttcagtggctcactcccgaacagacttctgggaagcagcatccatacctcttcagtcagtgccaggccatccactgcagagcagtcctcccatgccaagacactccttctgtgaaactaacctacaccgcagaggtgtctgtcccaaaagaactggtagctctcatgagtgcaatccgagatggagaaggtcctgacccagaagaccccaacaggaagatctacagattcaaccagagggttcccataccgtgctacctgatcgcattagttgttggagctttggaaagcaggcaaattggtccaagaactctggtgtggtctgagaaggagcaggtggaaaaatctgcatttgaattttctgagactgaatctatgcttaaaattgcagaagatctgggagggccctatgtgtgggggcagtacgatctattggttctgcccccatccttcccttacggcggaatggagaacccttgtcttacatttgtgactcctactctactggcaggtgacaagtcactctccaatgttattgcacatgaaatatcccatagctggacaggaaacctagtgactaacaaaacctgggatcacttttggttaaatgaaggacatactgtctatttagagcgtcacatttgtggacgattgtttggggagaagttcagacatttccatgctttgggaggatggggagagctacagaatacgataaaaacttttggggagtctcatccctttaccaagctggtggtggatctgaaggatgtagacccagatgtagcctattcctccattccctatgagaagggcttcgccctactcttctaccttgagcaacttcttggtggaccagaggtgtttctaggattcttaaaggcttatgttgaggaattttcctacaagagtgtaaccactgatgactggaagggtttcctgtattcccactttaaagataaggtggatcttctcaatcaagttgattggaatgcctggctctattctcctggcctgcctccagtcaaaccaaattatgatatgactctgacaaatgcttgcatcgccttaagtcaaagatgggtcactgccaaagaggaggacttaagttcgttcagcatctcggacctgaaggatctctcgtcccatcagctgaatgagttcctggcgcaagtgcttcagaaagcacctctcccattggggcacataaagcgaatgcaagaggtgtacaacttcaatgccattaacaattctgaaatacgattcagatggttacggctctgcattcaatcgaaatgggaggaagccattcctttggctctaaaaatggcaactgaacaaggaaggatgaaatttacacgacctttattcaaggatcttgctgcctttgacaaatctcatgatcaagctgtccgcgcctaccaagagcataaagccagtatgcatcccgtgactgcgatgctggtggggaaagatttgaaggtggattaaggacctgatggttgcttatttaagaaaatt

SEQ ID NO: 2550 - DNA, 1920 bp, Cricetulus griseus
agcatggccgtattccgctctggcctcctggtgctgacaacgccgctggccaccctggccccaacgcctgccccccatcctgacatcggcggcccgtctggtcaatcacaccctctatgtgcacctggcaaccgggcatggacttgggggggccgctcagccccaggccagccctgtgcaggccacctttgaagttctggatttcatcacacacttctacagcggtgccgacctgcacagacaactggacgtcagaattttactgaccaacatccaaaccaagagcactttttttcctgtactgccctcagtccagaatttggcccatcctccagaagtagttatgacggacttccagaccctggatgggagccagtacaaccctgttaaacaacacctagagcgctatgccaccagttgttacagctgttgttcacagttgtctagtgtcttgctgtatccggattatggaactggagagctgcctgtggagtccccgagtgccctcttaccctccaccataaggccagcttcaccggttgccagatctccaaagcagcctgtgcgtggctaccgccgtggggccgtgggtggcacttttgaccgcttgcacaatgcccataaagtgttgctcagtgttgcatgtgtactggcccaggagcagcttgtggtgggagtagcagacaaagatctgttgaagagcaagctgctccctgagctgctccagccttacggagagcgtgtggaccatctgagtgagttcctggtggacatcaagccctccctgacttttgaaatcgtctccctgctggacccctatgggcctgctgggtctgaccccaccttggagttcctggtggtcagcgaggagacctaccgtggggggatggccgtcaaccgcttccgccttgagaatggaaaggaggaacttgccttataccagatacaactgatgaaggaccagaatcacggtgaaaatgaagaggacaaggtcagctcctccagcttacgtcagcggattctgggaaacctgcttcagcctccaaatctgaggccggagctcccatcggggctctatgtgcttgggctgacgggcatcagcggctctgggaaaagctcagtagctcagcggctgaagaacctgggggcgtacatcattgacagtgaccttctgggccatcgggcctatgctcccgggggccctgcctaccagcctgtggtggaggcctttggaacagatattctccataaagatggcaccatcaataggaaggtcgtgggcagccgggtgtttggcaacaagaagcagctgaagaccctcacagatatcatgtggccagttattggaaagctggctcgggaggaaatggacttggctgtgactaagggaaagactgtgtgtgtgattgatgccgctatgctgctggaagccggctggcagaatatggtacatgaggtgtggaccattgtcatccctgagactgaggctgtacgtcggattgtagagagggatggattgagcgaagcagctgctcagagccggctgcagagccagatgagtgggcagcagctggtggagcatagccatgtggttctcagcaccttgtgggagccgcaagtcacacagccagcaggtggaaaaagcctggagtcttctacaaaaaccgcctccctaagactcatcagaccaagagctgaaaatggattttctgtggtgccaaactggccccaggaactaacaaatcccgcggtgaggaggaatgggggctttgatgttcaccctatggcaggcctaaggggcctcaagctaagctgtacaggacgcagagagaaacccggaagtctgcctagcatgctggcatttggccagcagtgaggacatagctaagtggggagcagtcccctcgtagggttctgtcc

SEQ ID NO: 2551 - DNA, 1919 bp, Cricetulus griseus
  modified_base (1860)..(1860): a, c, t, g, unknown or other
  modified_base (1876)..(1876): a, c, t, g, unknown or other
gcattttgggactaagccttttcaagctggcagaacaaaagcgaccactgaggccacggagaaaaggtcggaagaaggtgacagcccaaaacctgtgtgatggagacataaagctgctggtgaacattatccgggcttatgacattcctgtgagaaagcccatagctagcaagttccagcagacatcaagatcttcaaggactttcagtgaaaagcaaactgcttccccaacacacacagtccagtgcacagtactgactacccccttggccaggtcttagtccgtccttttgtagaagtctcttttcaaagaacaatctgccacacaactacagctgaaggccaaatcccagctggaacgaagaacttgaacttccattcagagccccgaatggggactacagcacagccagcttacaggcagtgaaggatgacgtgtacattaacatttttgatgaagtgctgcatgatatcctagaggatgaccgtgaaagaggaagtggaatccatacccgtattgagagacactggttaggatgtgtgaaaatcccatttagtactatctatttccaagcaagaattgatggcacatttaaaatagacattcctccggttcttctgggctatagtaaggagcgaaacattactatggaacgaacatttgattctgcccgaagcttgagtgaaggctcttacatcaccctgtttattaccattgagcctcaactggttcctggagaaccaattcgagaaaagaagtttgatagccaggaagatgagaaattacttcaggcaacagagaagtttcaggatgtgccttacggttcccacagcgtcagtgccttacaacagtaattgacatgagcgggaaaacagtgtttatcacacgttttctcaagcctttaaaccctcctcaggagctcctcaatgtctacccaaacaacccacaggcaactgcggaactggtagctcgatatgtgtccttaatcccctttctttgccggatactgtttccttttgctggtatctgtgacctatggagcacatctgatcaatttcttgatctcctggcaggagatgaagaagagcatgcagtactgctatgcaattactttttgtccctgggtaagaaggcatggctgatgatgggcaatgctattcctgagggtccaactgcctatgtgcttaacttagggaaaaaaaattattatttaatatggaatccctgcagcggacattgttatggacaatttgatacattttgccccctgaaaagtgtgggctgcttaattggtcctgataatatttggtttaatattcaacaccatgattcgccactaaggataaattttgatgtaacaaagcccaaactatggaaatctttttttcacgaagtcttccatatcctggcctttccagtgttcagcccgaagagctaatttatcaacgcacagacaaagtggctgctgctgagctacaggacaggattgaaaaaatactaaaagacaaaatcatggactggaggccacgtcatctgactcgatggaacaggtactgtacctctaccttgcgccactttttgcctctgttggaaagagtcaaggggaagatatagaagatgaccacagggcggaactgctgaagcagctgggagactacaggttctctggatttccccttcacatgccttattctgaagtgaaacctttgattgaagcggtatatagcactggagtacacaacattgatgttcctaatgttgaatttgctttagctgtatatatccacccttatcccaaaaatgttttgtctgtttggatctatgttgcttcccttgtacgtaacaggttaattttttangttggttttttttaanctaccttaaagactactagtatatacattttgaattgtaatgg

SEQ ID NO: 2552 - DNA, 1919 bp, Cricetulus griseus
aacagttcagaggtagcagtagaacatccagattttagtactgagattatgaacgttacagagatggagcaatcacccgatggttctcccagcgtgaatgcatctacagaagaaaatgaaatggcaaatgctgtggaccttccagtgacagaaacagaaggaaacttcctccagaatttgaaaattttggaaaacagtagaaactaatcctcaggattttacaggctgggtatatttgcttcagtacgtagaacaggagaatcacttgacggctgccagaaaagcatttgacaaatttttcatacattacccatattgctatggttactggaaaaagtatgctgaccttgaaaaacgacatgacaacattaaacaatcagacgaggtttatcgacgggggcttcaggcaatacctcttgagaagggaattagcttctgtaaatggacacagtggtgatgatggacctcctggtgatgaccttccatcaggaattgaagacataactgatccagcaaagctaattactgaaatagaaaacatgagacacagaatcattgaaattcatcaagaaatgtttaactataatgagcatgaagttagtaagaggtggacatttgaagaaggtattaaaagaccatattttcatgtgaaaccattggaaaaggcccaactaaagaactggaaagaatacttagaattcgaaattgaaaatggaactcatgaaagagttgtggttctctttgaaagatgtgtcatatcttgtgccctctatgaggagttttggattaagtatgccaagtacatggaaaaccatagcattgaaggagtgaggcatgtcttcagcagagcttgtactgttcatcttccaaagaaacccatggcacatatgctttgggcagcttttgaagaacagcaggggaacattaatgaagccagaactatcttgagaacgtttgaagaatgtgttctaggattggcaatggttcgattgagaagagtaagtttagaacgacgtcatggaaatatggaagaagctgaacagttgcttcaagatgctataaagaatgccaaatcaaataatgaatcatcattttatgctatcaaactagcccgacatcttttcaaaatacaaaaaaatcttccaaaaatcaagaaaggtacttttggaagcaatcgaaagagataaggagaacacaaagttatacctcaatttacttgaaatggaatacagttgtgacctcaaacaaaatgaagaaaatatcctcaattgctttgacaaagccatacatggttcattgcctattaaaatgagaattacattttctcaaagaaaggtggaattccttgaagattttggttcagatgttaataagcttctgaatgcatatgatgaacatcaaacactcctaaaagaacaggataccttaaaaaggaaagctgaaaatggttcagaagaaccagaagaaaagaaagcccacaccgaagatatgtcatcagcgcagatcattgacggggacttacaggcaaatcaagctgcatataattacagtgcttggtatcagtacaattatcagaatccttggaattatggacagtattatcctccacctccaacctgatggaaaaatgtaaatttcagattggttatatgagaaattcagaattatttttttttgaaggatgtaaacatagcataagcttgttgtatttgataatttgtcttcccagtttctgtgtaacatttgtttagttaatagtagaaaatgtcaattagtagtgtaccatagaaactttcctaccatttttaaaatttactttatattggagaacttattttttttatttttactttatctttttttttttttttttttccattaattttactaaaattaaaaaaaaaaaaaaaaaaaaaaaa

SEQ ID NO: 2553 - DNA, 1919 bp, Cricetulus griseus
  modified_base (1734)..(1734): a, c, t, g, unknown or other
ttcccactgtgtgcgcagagcaagcaagaatgggctaggaggccacacctttgaaatgtatgccctaactgtgaagacaccctccccccacggactaattgtggcttagtatcaaacctcccttgttttctgtgacatctggggagtgggaactagggtcaccaagatgtgtggtgcttaggaagtgggtcaagaccctgttctctggttctcactaggggagggaagggtgggttttgtgatctgtccatacagctaatgcttgccctggaaagcctgcatggtgaggcttacacacaggactgtccacactgttcactcctgatgggtgggctggaacacaagtgagaagatgaggaaagaagtctctccttgtgccttctggggtagatcagttctcacatccttctagccactccccagtcccagcccctaagaaaacatgacatgtaggtgactaactgctaacaccagcacccttccctggaagcagctactccagagaagtggagacattggagctgctgctgatagtgtaagcttttccatgccacggttgctgggtgtttgtcagtgttcctgggagtgttcagtctggacacaagtcctgagtcaccagtatttttccagttaatacagcaattggctcttacagttcagagacagtagcttggcacctccacccaggcttcagtgggtgggcctttgcccctttgaaagtagccatgagaaaagggtgatttgtaagttgcagatctatctagttctgccatctcaaattcctgtgactatctctcctttcccttgaaatatattagtaatatatcagtccactaaacctcccattttccccagccctggtaggccaccctggagatgtccctggtaagtatatctttatgagattgtttcagggaccaggtcatttttacttttgattaaggctatatcaatacctggtgtattgcagaatttgtttgaaaattaatatatcttgagcatgcttattgtgcttaatctctgaaagtatcagaaagatctagtgaatttatttgttcactagtcacaggcccacccagacatttctaaatttagtagcttcatggtgggacagtcggacacccagaattcctcagaactggaaacctggtcagtattaatcctacctttgattgccctacctatgtttgcttaagtgtcctctgtgccgtttccctcttgacagtgtgtgttacataccacctctctcctattgagtagcagcattggtttcttgggtacatctgtagtgtccctttggggacacacttttaacctgactttcctgggtactaatttcagattctggtcagattcagtgtctgttgctccttcccctctaggctaaatgggccctcaatggccaggaagttgggatctgtgactcctctaggaagaattggtaattccgtggagtgaaaacaatggcttgtagcatcttcagacctagatctcactttcaggaggcagattgacatgagcttctggctggtcataaagtgcagtttagactgcacagacctgactgccctgcccccaggcacctgatgatcccaccagatatgggctttgggaagatgtgcaagttaaaactgagccatttgaactcaaaaatgtgggcagcaaaagccccctggcccttgcccttcacgtgattgttgggacagtgttagatgtatactccatatatggccnctttaaggagagctgaacccgaggaccaagtacataggttttacaggttttactccaagctttctcgaaagccagcttgccctgttgaatttaaattgcttttaattggcaaattatacttacaccccttgttttcagaacatgtcagctgaataaagttgaagtttatttagaaaacttttaaa

SEQ ID NO: 2554 - DNA, 1918 bp, Cricetulus griseus
cgggttgaaaagtctccgttccaagtttggagaggagagagagaagagcgtctcagacctcgacacccgcgagcggggaggaggccggagagaaggacgcggcgtctggggggagcacccaggcagccagagcacgctcaggctatccgagctacgagtgtgtgacgtgcttggaaaagacaggagcgcctgcgttcgggctgctcttggctagcgagagaagtccgaggcggcaaaggggggcgaacgacccgacgcaagatggcgagtaaagagatgtttgaagatactgtggaggagcgtgtcatcaacgaagaatataaaatctggaagaagaatacaccgtttctgtatgacctggttatgacccatgctcttcagtggcccagtcttaccgttcagtggcttcctgaagtgactaaaccagaaggaaaggattatgcccttcattggctagtgctgggcactcatacatctgacgagcagaatcatctggtggttgctcgagttcatattcccaatgatgatgcacagtttgatgcttcccattgtgacagtgacaagggagaatttggtggctttggttccgtaacaggaaaaattgaatgtgaaattaaaattaatcatgaaggagaagtaaaccgtgctcgttatatgccacagaatcctcacatcattgccacaaaaacaccatcttctgatgttttggtttttgactatacaaaacaccctgctaaaccagatccaagtggagaatgtaatcctgatcttagattgagaggtcaccaaaaggaaggctatggtctttcctggaattctaatttgagtggacatctcctgagtgcatctgatgaccatactgtctgcctgtgggatataaatgcaggaccaaaggaaggcaaaattgtggatgctaaagcaatctttactggccactcagctgttgtagaggatgtggcctggcatctgctgcatgagtccttgtttggatctgttgctgatgatcagaaacttatgatatgggacaccagatccaataccacttctaagccaagtcatttggtggatgcacacactgctgaggtcaactgcctctcattcaatccctacagcgagttcattctagcaactggctctgcagataagactgttgctttatgggatctgcgcaatctaaaactaaaactccatacttttgaatcgcataaggatgaaattttccaggttcactggtctccacataatgaaactattctggcttcaagtggtactgatcgccgcctgaatgtgtgggatttaagtaaaattggagaagaacagtcagcagaagatgcagaagatgggcctccagaactcctgtttattcatggaggacacactgccaagatctcagacttcagttggaaccccaatgagccttgggtcatttgctcagtgtctgaagataacatcatgcagatatggcagatggctgaaaatatttacaatgatgaagagtcagatgtcacgacatcggaactggagggacaaggatcttaaacccaaagtatgaggtgtttctattgaatgtattgctacatgaatgcttgatttatcaagcgccaaaaaggcattgtatagtaggaaatgtaagtgggatggcttatggcgttctttaccctctgattctagcactttcaagtgagctgttgcgtactgtatcatattgtagctattaggggaaaaaaggatgttgcttaagaaaggacatcattattgttttaaaatacacatcgctgggtattgcctttgattaaactgtcattttctcaaacttttaagtgcttgctgaagttcccaaatatgcaaggataacttttacactttttccttccaacacttcttgattggctttgcagaaataaagttttaaaataaa

SEQ ID NO: 2555 - DNA, 1918 bp, Cricetulus griseus
tatggcgggccccgcgccgggtacgattatggctgaagactacttcgggagcgcgccggagtggggcgaagaggcggacggcggccagcaggaagatgattccgggggagaggacgatgctgaggtgcagcaggagtgtctgcataagttctccacccgagactacataatggagccctccatattcaacactctgaagaggtatttccaggcaggaggctctccagaaaacgtcatccagctcttgtctgagaactataccgccgtggcccagactgtgaacctgctggccgagtggcttattcagacaggtgttgagccagtgcaggtacaggagactgtggaaaaccacctgaagagtttgctgatcaagcattttgacccccggaaagcagattctattttcaccgaagaaggagagaccccagcgtggcttgagcagatgatcgcgcacaccacatggagagatctgttttataagctggctgaagcccatcctgactgtttgatgctcaacttcactgtgaagctcatttctgatgcggggtaccaaggggagatcaccagcgtgtccacagcctgccagcagttggaagtgttctccagagtgctccggacctctctagccaccatcttggatggaggagaggaaaacctcgagaaaaatcttcctgagtttgcaaagatggtgtgccatggggagcacacatacctgtttgcacaggccatgatgtccgtgctggcccaggaggagcagggtggctctgcagtgcgcagggtcgctcaggaagtccagcgcttcgcccaggagaaaggccatgacgccagtcagatcacgctggccttgggcacagctgcctcctacccccgggcctgccaagctctcggcgccatgctgtccaggggagcactgaaccctgcagacatcacagtcttgttcaagatgttcaccagcatggaccctcctcctgtggagctcatccgggtacctgccttcctggatctgttcatgcagtcactgttcaagccaggagccaagatcaaccaggaccacaagcacaaatacatccacatcctggcttacgccgctagcgtggtggagacctggaagaagaacaagcgggttagcattggcaaagatgagctgaagtccacgtcgaaggctgtagaaactgtccacaatttgtgttgcaatgagaacaaaggggcctccgagctggtagccgagctgagtacactctatcagtgcattaggttcccggtagtggcgatgggtgtcctgaagtgggtagattggacggtgtcagaaccgagatacttccagctacagactgaccacacaccagttcacctggccttgctggatgagatcagcacctgccaccagctcctgcatccccaggttctgcagctgcttgttaagctttttgagactgaacactcccagctggacgtaatggagcagctcgagttgaaaaagaccctgctggacaggatggtccacctgctgagccgtggctatgtgcttcctgtggtcagttatatccgcaagtgcctggagaagctggacaccgacatctcactcattcgctacttcgtcactgaggttttggatgtcatcgccccaccatacacctcggactttgtgcagctttttctccccatcttggaaaatgacagcattgcaggcaccatcaaagcagagggcgagcatgaccctgtgacagagttcattgcccattgcaaggctaacttcatcatgatgaactgagagcatccagagccgaagcagaacctgctgggcccaattcaggagggctagaggactggttcccgaagctgcttgtgaagaggccaaaccagcctcctggaaggaagccgggtctgctgggagggggcaggcagcttttctaaaagg

SEQ ID NO: 2556 - DNA, 1918 bp, Cricetulus griseus
  modified_base (941)..(941): a, c, t, g, unknown or other
gacaatatgactcacagtaaaggaagatctgtcacttgcaagacaagtggcagtccagatagtggaggaggttttgtagattggactttaaatttaaacacaattcagtctgacaagtttttgaacttacttttaagtatggtgccagtcatttaccagaagaaccaggaagacaggcataaaaaaagcaaatggcatttggcaggatggactgtcagttgcagcccagaccttcagcaagaggtcagagccacatctggactaccacgagttctcagagcaagccttccacagcagcagtgggcatgctccagccagctgcagccccaaatatgacgactatgccagctataactactgtgatgggagggaggcttcagaaaccacagccatgttacaggacgaagatctgtccagtgagggtgatgatgttattgtggaaacaaaccagaagctacccaaggagtctagtggcatcatggctctgcagatactcgtgccattcttgctggctgggtttggaacagtctctgccggcatggttttggacatagtacagcattgggaggtgttcaagaacgtgacagaagttttcattttagtccctgcacttcttggtctcaaagggaacttggaaatgacactggtcttctcgattatccactgcagtaaatgttgggaagatggactcaacccattgaaaagtggaatctaatcattggcaacttggctttaaagcaggttcaggccacagtggttggctttttagcagccgtggctgcgatcatcttgggctggattccagaagggaaatattacctcagccactctgtacttctgtgctctagcagtgtggcgactgccttcattgcatctcttctgcagggataataatggttggtgttattgttggctcaaagaagacaggcataaaccccganaacgtggccacacccattgctaagtcaggtttgtactcctgtcttgagacattattacatttctccattagtttgtgccttttttcttggctttgacacctatttggattataatagctgccaaacatcctgctaccaggacagtgctccactcaggctgggagcccgtcataacagccatggtcatcagcagcattgggggccttattctggatacaactgtatctgacccaaacttggttgggattgtcgtttacacgccagttatcaatggtatcggtggcaatttggtggccattcaggctagcaggatctctacctacctccatttgcatagcatccctggagaactgccggatgaacccaaaggttgttcctacccgtttaggacattctttggttcaggagtgaacaataagtctgcccaggttctcttgctcctagtggttccgggccacctgatcttcctctacacaattcacctgatgaagagcggccacacctctctgactgttgtcttcgttgttgtgtatctgcttgctgctgtgctacaggtgttcaccttgctgtggattgctgactggatggtccaccgcttctggaggaaagggaaggacccagacagtttctccatcccctacctgacggcgctgggtgacttgcttgggacagctctcctggccttaagtttccatttcctctggcttattggagaccgtgatggagatgttggggactaatggatcctagaagctgttgtggggtcacccaggaggagaacacaaggcagccactgctgcccttccccaaagctctttatctggcttgtggcttgtgccagggtagtctgcggttcaccctgactccataaatggccttaatatatttttaaggaatatgtgttgaaatcacaatgaatggtatatgtgctgctttttgtagaataaataatttgacacagacatagatacaagctc

SEQ ID NO: 2557 - DNA, 1918 bp, Cricetulus griseus
ttggaacttcacacccaagatcctatatctctgccaatgtcactggcttcaaatgtgtgacgggaatgtcttgtttaatgaggaaggatgtgctagatcaggccggagggctgatagcctttgctcagtacattgctgaagattactttatggccaaagcaatagctgaccgaggttggcggtttgcaatgtctactcaagttgccatgcaaaactctggttcatactcaatttctcagtttcaatccagaatgatcaggtggaccaaattgagaattaacatgcttcctgctacaataatttgtgagccaatttcagaatgctttgttgccagtttaattattgggtgggcagcccaccatgtgttcagatgggatatcatggtcttcttcatgtgccattgcctagcatggtttatatttgactacattcaactaaggggtgtccagggtggcacactgtgtttttcaaaacttgattatgctgtggcttggttcatccgagaatccatgacaatatacattttcttgtcggcattatgggaccctactataagcttggagaactggtacgcttaaaaaataactatatatatatatatatatatatacacacacacacatcactacacaggattttttttttttgttctcactgcaatgaaccaaaaagtaggctgagattggtttttaattcctaaccatgaattgaaggagtggatgttttgatagttgtaaggaaaatgcatttcagacacagttcacaggagctattttcttacccagtatgtctgtattgttaataagaatgtaatttcatgatataggtatttaatatcttttttaagtaagtaaatattctagctatcagtaaataattacagtagagaattaagagaggacatgatgaggtttgctcttaaaatcagtatctaactgagtctactgtgtgtgtgttgtttattttggtgtttttttctttttttctacaatagtctagtcttatttaaattgggtttttgtattccgtttgtatgaccgtagactaggccagcctagttataaatgcatgcttacttcgctctcttctctcccatcactcagctaaacttgcttgtcagcttgtgcttaacttgtggtgaactggacttttgtttaaaataagcaaaaaatgtaagggacagtgcatcggcctttttcctactcccctatgttttttacatacaatcttgcttttccttctgaacttggtggcatgttgtccatctgatgcctgctgctaacaccagcactatagcagcttcacatcctatgttattgtggcttccgtgtccgtgcatagcgtgtagcctattagcaataacttcctactgatagagaacacttcatcctactgagccagtccatttgcctaacgactatacacatggtctaaactgcaatatatctgtaaatgtgtatatactataaatatataccgcacttaacatttttctgggccaaactgcatttgaaataggtaatattgtcccccgaggagagttgcacagtgaaaaccagtctggttatgacccactatgtgttattttttttatcactctttcatgagttgaggtttgctgagcatgtttgtcatttgtccattgtgtagtggagtttggtagatgccatcctttgcactgctgaagtgaaatcttgctgactacttagcttttttgttgatctcagtatgggcaaagaaacaaaatccaaatggctggacaaacttcttgtgttctgtaaatatttttaaaaagtgttctgtatgtgttttatgtggtcatggagtatttccttaaagcggagcttcaagtatgcagagagtaactctttgttcagcaagtttggagtgaagataaaatagtaagaaatactgtaaa

SEQ ID NO: 2558 - DNA, 1917 bp, Cricetulus griseus
cacagccaccatggggccctggggggagccagagctcctggtgtggcgcccagaagcaatagcttcagagccctcagtgccagtggggctggaggtgaagctgggggctctggtactgctgctgctgttgacacttgtctgcagcctggtgcctgtctgtgtgcttcgaaggccaggcgctagccatgaagcctccgcctcaggccagaaaatcctaagcctagtaagctgcttcgcaggaggtgtgttttttggtcgacctgtcttctggacctgctgcctgactacctagctgccatagatgaggcggttggcggccctgcatgttgacgcttcaattcccttttgcaagagttcattctggccatgggtttcttcctggtcttggtgatggagcagatcacactggcttacaaggagcagtccagtccaccacatccagaagagaccagggctctgctgggatccgtgaatggcgggcctcaacactggcatgatggaccagggatcccccaggccagcggaactccagcagctccctctgccctgcgtgcctgtgtactggtcttctctctagccttgcactcagtgtttgagggcctggctgtggggttgcagcgagacagggctcgggcaatggagctgtgcctagctttgctgttccacaagggtatcctggcagtcagcctgtccctgaggctgctacagagccacctacgggtacaggtggtagctggctgtgggatcctcttctcatgtatgacacctctgggcattgggctgggtactgctctgtcagagtcagctgggcctctgcaccagctggcccagtctgtgttggagggcatggcagctggcaccttcctctatatcaccttcctggaaatcttaccccaggagctggccacttctgagcagaggatcctcaaggtcattctgctcctagcaggctttgccctgctcactggcctgctctttatcgaaatctaaggtgcttaaagagaaagggcaggggaggtagactgtcaggtgcccctgtcctctctattctccctgaccttcccagtttgtgggaagtagaaagaaagtagtgaggaccagtgagttctctgaaaggtagggatgggacatttggactgtgaataatgagaaggccgggcgactacatctagagacaagctgacagaagaactggagaaaccggcatccagtggcttggagataagacacagagggtataagtcaaagtcagtaccctgctggttctagctcatttttagcactctgccaattgaagtggttcctcctactttcttgcctcctactcttctatatctctctttttctaccaagggactagtgccaaatggtctctgccacgtttttataatttatctggccttgagtgtcctcacttttttctttttttttttttttttttttttttttttttagacaggtctttctttgtcagagatccgactgcctctgcctcctgagcactgggactaaaggtgtgtgccaccatgtatggctcaccagctccttttctgaaagcacagttgggtggcactgggccctgcccagcacctcagtggagacctatttgctctaaatttgagccccacaatttgggtggggcagaaatgtttgctgaactggtctggagtaaagggaaagtaggtacaacttttgacaccaaccactacagaaggtggacatggtgccccacacctagataagaaacattgacctgccaaaactttttatatctgggggggttgaagatctccccaccctgccccaggattattttgggggagggagggctgtgcataggggcgtactctgtagaatctattttactaactgacctattttgggacatgttacccaaataaaagatatttctataca

SEQ ID NO: 2559 - DNA, 1917 bp, Cricetulus griseus
ccccggagcccagagcggcaggacttctcgcttctttctctacggtggccccagagcctctgcgtgcgctccttctcccgccatgaatgaggaatacgatgtgatcgtgctgggcaccggcctgacggagtgtatcctgtcagggataatgtcagtgaatggaaagaaggttcttcacatggatcagaacccgtactatggaggagaaagcgcatctataacaccactggaagatttatacaaaagatttaagttaccaggacaaccaccagcatcaatggggagaggaagagactggaatgttgacttaattcccaagttccttatggccaatggtcagttggtgaagatgttactttacacagaggtcactcgctatatggatttcaaagtgattgaagggagctttgtctacaagggagggaaaatctacaaggttccttccactgaagcagaagcactggcatctagtttaatgggactgtttgaaaaacgccgcttcaggaagttcctagtttatgtcgccaactttgatgaaaaagatcctagaacttttgagggcattgaccctaagaagacctccatgagagatttgtataagaagtttgatttgggccaagatgttgtagacttcactggccattctcttgcactgtacagaacagatgactacttagatcagccgtgttgtgataccattaatagaattaaactttacagcgaatctttggcaagatatggtaaaagcccatacctttatcccctctatggccttggagaattgccacaaggatttgcaaggttaagtgctatatatggaggtacctacatgttgaataaaccaattgaagaaatcattgtgcaaaatggaaaagtggttggtgtaaagtctgaaggagagattgctcgctgtaagcagctcatctgcgaccccagctatgtaaaagatcgggttgaaaaagtgggccaggtaatcagagtgatctgtatccttagccaccctatcaagaacaccaatgatgccaattcctgccagatcatcattccacagaaccaagtcaaccggaagtcagatatctatgtttgcatgatctcctttgcacacaatgtggcagcacagggcaaatatattgccattgttagtacaaccgtggagaccaaggaaccagagaaggaaatcagaccagctttggagctcttggaaccaattgaacagaaatttgtcagcatcagtgacctctttgtacctaaagatttgggaacagagagccagatctttatttcccgtgcctatgatgcaaccactcactttgagacaacctgtgatgacattaaagatatctataagagaatgacaggatctgagtttgactttgaagaaatgaagcgcaagaagaatgacatttatggagaagactaacagcagtacatattatgtaattaggacaaacttaaaatttggcaaataatgtatattatatgaaatcaatattgcaagcccgcttttatgatcaaaatggagattgaagagtgctataccagtaaatactccttcccttcacttttctaatatcatgtattaacttgttttcatggaatggctagtcagaattggttgtttctgtttagtttaaccagactgccttttgatacagtacttgtatcttttaatacagttgtagcctttgcgattgtgttgcctctgctcaagagctagatctatacaatttgtgccatcctgatattgggactctaaattgaatcctttggtttgggaaaacattcaaagtttttctctattttgttatgaagctgcaaatgcagtattgatttgacagagccttgattcaatgatgtctgtctcaaaatggctccaaatgatttctgtactgacaaaataaagccaaactctggaaa

SEQ ID NO: 2560 - DNA, 1916 bp, Cricetulus griseus
gcttgctctgccgctctccgggtccctggtcagctctccaccctgtagtctccttgggtaacccagcaggcatcgaagtcgccatgttcagctggctgaagaagggcggagctcggggccagcagcctgaggccatccgcaccgtgacctcatccctcaaggagttgtaccgcacaaaacttttgcccctcggaggaacattaccgcttcggggccttccattcaccagccctggaggatgctgacttcgacggcaaacccatggtgctggtggccggccagtatagcaccggcaaaaccagcttcatccagtaccttctggagcaggaggtccccggctcccgagtgggaccagagcccaccaccgactgcttcgtggctgtcatgcatggcgagacggagggcaccgtgcccggcaatgctctcgtcgtggacccggagaagcccttcccgcaaactcaatccttttggaaacactttcctcaacaggtttatgtgtgcccaactccccaaccaggttctggagagcatcagcatcattgacacaccgggtatcctgtcgggtgccaaacagagagtgagccggggctacgacttcccagctgtcctgcgctggtttgcagagcgcgtggacctcatcatcctgctctttgacgcccacaagctggagatttccgatgagttctcagaggccatcggtgccttgcgtggccacgaggacaagatccgcgtggtactcaacaaggcggacatggtggagacgcagcagctgatgcgtgtctacggggcgctcatgtgggcgctgggcaaggtggtgggcacgcccgaggtcctgcgcgtctacatcggctccttctggtcccagccgctccttgtgccggacaacaggcatctcttcgagctggaggaacaagacctcttccgtgatatccaaggtctaccacgccatgcggccttgcgcaagctcaatgacctagtgaagagggcgcggctggtgcgggtgcacgcttacatcatcagctacctgaagaaagagatgccctcggtgttcgggaaggaaaacaaaaagaagcagctgatcctcaagctgcctgtcatctttgccaagatccagctggagcatcacatctcccctggggacttccccgactgccaaaagatgcaggagctgttgatggcccatgacttcaccaagttccactcgctgaagccgaaactgctggaggctctggacgagatgctgacccacgacatcgccaagctcatgccgctgcttcggcaggaggagctggagagcgtggaggccggcgtgcagggcggtgcgtttgagggcacccacatgggccccttcgtggagcggggccctgacgaggcgctggaggacggcgaggagggctcggaagacgacgccgagtgggtggtgaccaaggacaagtccaaatacgacgaaatcttctacaacttggcgccggccgacggcaagctgagcggttctaaggccaagacctggatggtgggcaccaagcttcccaactccgtgctggggcgcatctggaaactgagcgacgtcgaccgagacggcatgctggatgacgaggagttcgccctggccagccacctcatcgagtccaagctcgagggccacgggctgcccaccaacctgccccgacgcctggtgccgccttccaagcgacgccacaagggctcggctgagtgaagaacacagccgccgttgccgggcctccctcccactttgccctgctgtggctccccagctccagttggctacactggctacacgcagatcccggctctggcccactcaccctgcctgcccaccctgcctggctgtaaggacttggggggggcgccactcccccacaccagacatttcagtcaaagcacttatcgaggac

SEQ ID NO: 2561 - DNA, 1916 bp, Cricetulus griseus
gatgcctcaaaagaagaagaagtgcaaagattataagaagaaactgtctctgcagcagaagcagttggattggagacctgagaggagagctggaccatcccggatgcgacatgagcgagttgtcatcatcaaaaatatgtttcaccccatggattttgaggatgatccattggtgctcaatgagatcagagaagaccttcgagtagaatgtgccaagtttggacagattaagaagctccttctgtttgataggcacccagatggtgtggcctctgtgtccttcagggaaccagaggaggctgattattgtattcaaactcttgatggaaggtggtttggtggccgtcaaatcactgctgaagcctgggatgggactacagattaccaggtagaggagacctcaagagagagagaggaaaggctgagaggctgggagtccttcctcaatgcccctgaggccaacagaggcctccagcggatggattctgtctctgcttcagaacaggcagggccttccagaggaaggcattttcagagcacctgagcatgtctaccacaggtgctcaggaagctacaactggaatagcacttgaagagcctatcgatgaaaagaagtttgaaaaagcagaagatgggggagaatctgaaggagatgcttctgaaaaagatgctaaagaaggtgggtacgaggaaggccaccccaagagagagagtgaagagggctaccccaagagagagagtgaagagggccaccctgagagcaagcttgaagaggggaatcctaaaatgggatctcaagagaatggccctgacagagaatctaagaagaaaggcaaagataattatgaaaagaatggcctggcaaaagagtctgaagacaatgagctcagcagagagtcagaaggggaagagagcctcaagaaagagtctgaagatgatgactcagaggaagaatccaaggaagactgcccagaaaagctgtatgaagatgactctgacaaggaattagaagaaaatggtgttaaaaaagatttcgaccaggatacctctgacaaggagttccctgaaaatgttgagaaagagtcagaagaaaatgacactgacaaatcagaaggtgatgaaggctctgaaagagtgttaggtgaggaaggctctgagagagaatttgaggaagactcagatgaaaaggaggaggaggaggaagaggaggaagaagaagttgtatatgaaaaggtttttgatgatgagtctgatgagaatgaggatgaagaagaagcagaagaaaaggagtgtgaagatgctgatgacaaagaggaagaagatgacacagatgacaagctctttgatgactccgatgaaaaggaagatgaagaagatagagatgtaaagcaagatgaagataccaatgacaagctatttgaagataattccaatgagaagttttttgatgaggaagaagatgccagtgagaaattgtttgatgattctgatgagagagggactatggggaatgtgaaggaagatgggtctcagtccaccgacagcagctttgccctcagtagtgatgatgatgatgaaatgtaatcctttccacttgctttttagggagagccctgcgtctctgtttgcctgtgcttcaggatcagtagtagtgttacatcaacaagtgcatagtggtaggatgccatcagactaatgtctcgaaggtttttgttcttacctataacaatgaatttaaatgtgtctattggttcttcagttaaaacttcatagtttaacgcaaggaaactggatacctgtcgttttgttggatttgttaaatgcatgcaaaagaatatttttaaagtatcctaattggagtttgtgatattcagaaataaagataaattgataatatgcaagaaaaaaaaaaaaaa

SEQ ID NO: 2562 - DNA, 1916 bp, Cricetulus griseus
  modified_base (1907)..(1907): a, c, t, g, unknown or other
agcaagctggcgaccccagaggacaaacaggacatcgacaagcagtacgttggctttgccacactgcccaatcaggtgcaccgaaagtcagtgaagaagggctttgacttcaccctcatggtggctggtgagtcgggcctggggaagtcgactcttgtccacagcctctttctgactgacttatacaaggaccggaagcttctgagcgctgaggaacgcatcaaccagacagtcgagattctgaaacacaccgttgacattgaggagaagggagtcaagttgaagctcaccattgtggacacacccggctttggtgatgctgtgaacaactctgagtgttggaagcccatcaccgactatgtggaccagcagtttgagcagtatttccgagatgaaagtggcctcaaccggaagaatatccaagacaaccgggtgcactgctgcctgtactttatctccccctttggacacggattgcggccagtggatgtgggtttcatgaaggccctgcatgagaaggtgaacatcgttccacttattgccaaagctgactgcctggttcccagtgagatccgtaagctgaaggataggatacgggaagagattgacaagtttgggatccatgtgtaccagtttccagaatgtgattcagatgaagatgaagacttcaagcaacaggaccgggaactgaaggaaagtgcgcccttcgctgttatcggcagcaacaccgtggtggaggcaaaggggcagcgggtccggggacgactgtacccctgggggatcgtcgaagtggagaatcaggcgcactgcgattttgtgaagcttcgaaacatgctaatccgaactcacatgcatgacctcaaggatgtgacatgcgatgtgcactacgagaattaccgtgcccactgcatccagcagatgaccagcaaactcacacaggacagccgtatggagagccccatccctatcctcccgctgcccaccccggatgcggagacggagaagctcatcaggatgaaggatgaagagctaagacgcatgcaggagatgttgcagaagatgaagcagcaaatgcaagaccagtgacaccccgccccaggcccacaacgccatggatagacggcggttcccgggctggcccctcttacccctggatcccagactgtcctggattctaccctgggttcatctggatctcagacggcctggacctaacccttacccaaagtggctttgaccagacaatgttcagacctggagccacggagccacagcccccagatgaccctaatttattctcagcacccacccttcctggtcatttgtatctgcttctgagtggtctgaaccacagcccctccccaacctcctgccgcccccgaccccacccccgcgcactcccgcctgtcgtaagggaacaagttgtgcataatctccaagatctcccttcctaaaaggtcgctgccccagcgggccaataaaccagggtagagggacatggatgcaggatctcaggcctattacccaagctagtgccgcagagtggagttgggaggtcccctctgcgagttccagtgggcaacgaagcatatgctaatgtcccactgtgtgtggaagcaggccggatcctccctagaccgctcacgctccttcctgggtcaacccgaaggacaccaggggcggcaggaacggggtgtcccctactttcatctacttttgggtcaaggtcttctcctcccagcagcactgttgcgctggggttccagcccttggcctcctccatctctccacccgcatgattcctccctttacaccccattttccgttttgttcagttgtgaatgcgcatcctgtcctggtgacaggagaacaaagttggtgaacgtcaaaaaaaaaaaaaaaaaaanaaaaaaaaa

SEQ ID NO: 2563 - DNA, 1916 bp, Cricetulus griseus
gtcggcccgaacgaggggacgcaacggaggcaggtcggagccgctgccgtcgccatgacccgcggtaaccagcgagagctcgcccgccagaagaacatgaagaagcagagcgactccgttaagggaaagcgccgagatgatgggctttctgctgccgcccgcaagcagagggactcggagatcatgcagcagaagcagaaaaaggcaaacgagaagaaggaggaacccaagtagctttgtggcttcgtgtccaaccctcttgccctacgcctgtgtgcctggagccagtcccaccatgctcgagtttcttcctgtagcgctcacaggtcccagcaccgatggcattccctttgccctgagtctgcagcgggttccttttgtgcttccttcccctcaggtagcctctctccccctgggccacacctgggggtgagggggttaccccttcccagtgtttttattcctgtggggcacaccccaaagtattaaaagtagctttgtaattccttgagcgcctggtttgactggggattggggggatggggatggaggagtgactgccctttcccattaaaaggggagagttcttttagcacctaagagattgaggaatcctataagaactatagagacttcttttctgtgatttttatgccccactcagaccttgaacactgtctccatgatggtattgagggctataagaggggaaggatctaagtttatgtctcttcctcattctttgcttgaaagttggccaaagggggggaaaaatctgctcaccaacttccggtggtcagctgctctcaagtgctcacattctcttctgtctttcctcatggaacgaaggtatttttttgtcttccagtttctttgacctcaagatcgggattaaaacccgtggtagcctctgctccattcttctatgccctggtttgttttgtggttctgggcttcttacatccctgtgcccagggctggaccacttgttttcttttgattgccaagggcaaacccaaatcttcagtctctgttggtctttccctgccccttatctccagctctggagctaggaaggggctggtgccacactgctaggatcagctaaagcttctgagtttactgatttgggagttagactcttgagcttaaatgaagggtcgtggtgattctgagtgggaagtctacagagtggtgccaggagcaaccccacgatagtggaggacacatgcccagcatgaggcaactttgacccagaaggtagcccggctaccctttagggaagggtcttctccagttctgcttcctcatagctgtgaaaccaaaaggctgattagagattctgcagggccttagcttttgggctgccctgcttcccccataaccaaagttttccttaaaatagctaggttttcaggagagtgtcttatgtctgctttcatcctacctgaacccattggtaagggtgaccatgacatagagcgaaacaaggatggaggtgaagtggaaggcagagtagctgtagggaagatgctgcctttgcgcctgagccgctggtggggtctctgggccagctggcctggctgtgctgctttgccctggggagagaaaacaaagcaacctgttttgaaatggcttcaagacaatgtgagggtactaatttagaaaattttccctttgaaaagattgggtgtaagaagtggaggcacacctggcttcaaattcttgctccagcatataagtggctatgcaaagtttggtaagatgtttaatcttttgtgcctcaattcctccatttgtgaaatggagcaaatacctacctcacagggttgttgtgaggattaaattaaatgagattatgtatgtatctagcacagtgccaagcacattgtgggtacttaataaaaggaaatagc

SEQ ID NO: 2564 - DNA, 1916 bp, Cricetulus griseus
  modified_base (556)..(556): a, c, t, g, unknown or other
  modified_base (1100)..(1100): a, c, t, g, unknown or other
gctgccagcaggagctctgacatccatcaagcgcaggtaccacagtggtaccgactgattcatctcttgggtgagaagatcttaggcagcctccagcaggcatctgcaacaggtcaccagcttgggcttcacacagcaaacaacaaatgggacttggggaacccacctggcaacttgtccacagttgcagcgatgcctgtgtctgaggatgtgcccctacctgcctttgctctggaactccagccctcagtgccattggtcctgtcctgctactgaccagtgacaacatcaaacaacgccttggttctgctgctctagacagtatccatgagtaccggctatccagctggctggggcaacaggaggacatccaccggattgtgctatatcaagcagacagcacactcacaccctggacccagcgctgcatccgtcaggctgactgcatcctcattgtgggtttgggtgagcaagagccagcggtgggtgagctggaacggatgctggagaacacagctgtgcgcgcccagaagcaacttatcttgctgcacaaagnggagggtccagggcctgcccgcacagtggagtggctcaacatgcgaagctggtgctctggccacttgcatctccgctgcccacgccgtgtcttctctaagaggagcttgcccaagttggttgagatgtacacacgcattttccaacgatccccagaccgtcactcagacttttcccgcctggcacgggtgctgacaggcaatgccattgccttggtacttggagggggtggagcaagaggctgtgcccaggtaggtatcctcagggccctagcagagtgtggcatcccagtggacatgatcggagggacatccattgggtctttcatgggtgctctgtttgctgaggagcggagctacagccagatgcggatccgggccaagcagtgggcaggagggtatgacatcgatgatgaaggctgtattggacctgacctaccggacggacacctgctgatggatggggttacatcaacaaacctcccagcggatgtggcaagatccatgatggcagagattcagacacgcctggcgtatgtgtgctgngtccggcagctggagatggtgaagaacagtgactattgcgagtatctgaggcctcccattgacagctaccgcaccttggactttggcaagtttgatgagatctctgaagttgggtatcagcatgggcggacagtgtttgacatctgggtccggagtggtgtactggagaagatgctgcaagaccagcaggggacaagcaagaggaaggactgtggggcattcacctgccccaatgcctccttcacggacctcgctgagattgtgtcacgaattgagccagccaagatggctgtagtggacgatgaatctgactaccagaccgagtatgaggaggagctggcagacatccccaaggaaacatacgctgacttccagagcactgggatggaatcagactctgactcggaggatgagccttcactgtggcaagagccctcaggcgtgacttccccagaacagtcccaggactcttggctccctgatcaagaagagcaggggtcaaaactctaatgccattcctgcctggacaaatacaatatagcacggtcctccgttgggcctgacccctagactgaggctgcaccctctcgttggaggctacttaagttgcctgagacgatcaagctgggtggtgtatccatctggtttctcccagggactcgggctgtattagaggagtcatgggcctcttctcttcacagacacaccttgtaccccacagcaagcaatacttggggggctcgtgaagcctctatgaggcatgggagcgtgggattggcaatgttaataaaagccaatctgattgtgtggatattt

SEQ ID NO: 2565 - DNA, 1915 bp, Cricetulus griseus
gagaaccgcacctaccaggcatccagccctgatgaggtggcactggtgcgatggacggagagtgtcgggctcactctggtcagcagggaccttgcttccatgcagctgaagacccccagtggccaggtcttgacctactgcatcctgcagatgttccccttcacctcggagagcaagcggatgggcatcattgtcagagatgaatccacagcagaaatcacattctatatgaaaggtgctgatgtcgcaatgtccaccattgtccagtacaatgactggctagaagaggagtgtggaaacatggcacgcgaggggctgcggacccttgtggtggcaaagaggaccctgacagaagaacagtaccaggactttgaaagccgatacagtcaagccaaactgagcatccatgaccggacactgaaagtagctgcagttgttacgagcatgaacttgtggagctagcctgccaactgccctgccgttgtctgctgccgctgctcacccacccagaaggcccacatcgtgaccctattgcgccagcataccagaaagcgcacctgtgccatcggtgatggtggaaatgacgtgagcatgatccaggctgctgactgtgggatcgggatcgaagggaaggaggggaagcaggcttctctggcagcggacttctccatcacgcaattcagacacatcggcaggctgctcatggtgcatgggcggaacagctacaagcggtctgcagcacttggccagtttgtcatgcacaggggcctcatcatctccaccatgcaggctgtattttcttcagtcttctactttgcatctgtcccgctgtaccagggattccttatggttgggtatgcaactatctataccatgttcccagtgttctccttagttttggaccaagatgtgaagccagaaatggcgattctctacccagagctgtacaaggacctcactaaggggagatccctttccttcaagaccttcctcatttgggttttgatcagtatttaccaaggtggcatcctcatgtacggggccctggtgctctttgaggcagagttcgtccatgtcgtggccatctccttcacagcgctgattctgactgagctgctcatggtggctctgaccatcaggacatggcactggctcatggttgtggccgagttcctcagtctgggctgctatgttgcctcacttgcttttctaaatgagtattttgatgttgccttcatcacaactgtgaccttcttgtggaaagtgtcagccatcactgtggtcagctgccttccactctacgtgctcaagtacttgaagcgaaagctgtctcctcccagctactccaagctgtcctcctgagtatgacatgaggccaggtagagacactcctgcgctgggcagcatgagggactggcactgctggtgggctgagggctgagctcacctcagatgcagttttgcttttcagtggacaccacacacttaacaagcccaagtggccaagcggtgacacttctgatatcctaattccgttgcagctatgaatgtaaaccattcctcgaggcactgccgttagctgatacatttttatatctgtaaaaccatattcaaaactgtttacgtagaactcagctgtcctgtgcaactcacagcaccacaatgctttgcttcctcagtaggtgtccctaggccatgtggctactctcagtactctgagcttgtgatggcagatcccctgtcgaaggctgcactgagggctgatgggagttccttagagggatgctggacttaattcaccccaaagtattgtgtgcgtgcagctctgcacattgtgtgtggccgccacacaatgacctgtgacctcagctcttcacactgtacagcaggctgtgggagtctcctttgcactagt

SEQ ID NO: 2566 - DNA, 1914 bp, Cricetulus griseus
gactgagcaaccatagtgacaggagccgaggcagcagctcaggttgtccccgtttcccctccccttcccttttccggctgacttccccgggccctgcactgcacagtcccggtcctgccatgtcccagaaacaagaagaagagaaccctgcggaggagactggcgaggaaaagcaggacacacaggagaaagaaggtattctccctgagagagctgaggaggcaaagctaaaggccaaatatcccagcctaggacaaaagcctggaggctccgacttcctcatgaagaggctccagaaagggcaaaagtactttgactcaggagactacaacatggccaaagccaagatgaagaacaaacagctgccgagtgcaggaccagacaagaacctggtgaccggtgaccacatccccaccccacaggacctgccccagagaaagtcctcgctcgtcaccagcaagcttgcggggtaacctgggcccctctcttccccttcctcacccactggacctttatatacaataggcagggaatgggcacctagtcagagctcagcttgccatccagggaagacattctgctgggggcttaggttgaggaggggctctgagttcatttctttgggtaatttgaaacttctacaccctcactgtagcccagtagagacccaaaagtaggaaagagaagactgtatagcactgcagctatttctgtgctgagaaatgtgaggcctcctcctttgggaggagcaagtccttggacaggctgagtctagagcggtgtggtaggttcagtgtcccaaggctgagctgacgtgttggaaaggtagagtgaaggagacgctctctgtgcttctaagtgtgttgtcccttaggctctgtgcttcgtgttcccatcgtgggtgtttagagaaacttcaaagaggagaagggatttgcttgcctaaaaccacagtgcccacctaacctctgctgtgtccctccagctattgccctgcttctcaaggaatgtaaagttttgctatgtgggaagagagaaagtttgagatttaagggccatccttcagaatctcataggtttcatagccttcttgagagaggatggggagagagaacaaacctgaagaagctagccttggaagttttttgactctacccgttttcctgggtctacagttgaccctagctgctacaaagctgctctggcagcagattggatgggcctgaggaaataggctcagtcatgtggcattcttgcttaagatgtatgtaaggcatggaggaggaagggatgaacagagttggcccccaggagttagtgctcctaccagctggagcagctggtccttagcagatgattcactggtggaggctggagagagggtgtggggaggggaggcagcagcctgtcttgctgtgtcatcactagtttggcctggatcttactgaataccacctgcttgttatcgagaggacctgagtgagaactgctaaaagagcagaagatgcagtcagtctcccctttacagattccagtgtttccgtagaatgtctggcgagtttgttgctgtgtgtgtcagggaagagcatgtaaatatgctgtcctcctgactggccgcactggtctctgactctcattcagattggataggagcaggttggtgaggaaggagtggagagagcaggatccctggtctccctggcccctaaactccttgactctcatttgtaattgtatataatttttgtgttttttgctccattttctcatgctgtcatcctcaagctaaagtccatgtggggaggggacaatgctgaacatcattgtatagtttcttcagtgtcccagccatgttgtacatagatatgtcatgttattatatatataaatatatatataattttagtacgtttt

SEQ ID NO: 2567 - DNA, 1914 bp, Cricetulus griseus
  modified_base (1412)..(1412): a, c, t, g, unknown or other
tgacccccttgctgccaacttggagggagctgtgaccttcgaggctcctgacctcccagaagagaccctcatggagcaagagcacacggagaccctacacagtctgcgcttcacacttgcgtttgcacagcaagttctgggagattgcagccctgaagggtagtgccagcgaggcggcagggggacctgagtaccagcttcaggaagtggtggtgggccgaccaggatcagtcagttgagcagaacagctggtactgtacttgaaggtggctgagcttctatcctcaggcctacagactgccattgaccagatccgagctggcaagctctgcctttcatctactgtgaagcaggtggtgcgcagattaaacgagctgtataaggccagcgtggtgtcctgtcagggcctcagtttgcggcttcagcgcttctttttggacaaacaacggctgctggatgggatccacggtgtcactgctgagcggcttatcctcagccatgccgtgcagatggtgcaatctgctgctctggatgagatgttccagcaccgagagggctgtgtcccacgctatcacaaagccctgctacttctagagggcctacagcacacactcacggaccaggcagacattgagaacattgccaagtgcaaactgtgcattgagcggagactttcggccctgctgagtggaatctgtgcctgaatgcctgctgctaacctgcagggtagggtctgagacctggcagactgtctttcttgtcactgatgtgatggtgctgagactgctgcccgccagctccagcaaggatgcttcatggtggacctgtgcagactggtgcaactcttgcttcctaggttgccagtctctggtaggtggaggtcaaaatgccagggaaagcttccttgcccactgggacagaagtttctgagcatatccttcccagctggctcccttggcaggcatgtgtggggcacctgccacctgcagagccctggcagccctgtggacaggcaaagtcctgagactgttgctgacttcaagccaaagcgagctttttctcacagctcacttgccccattgctcgtccaggaaaaaaagggtgtggccttttggcctcctgatctctaggaacctctccctctgaggctacccacccagctttgtaagtcaccggagcactttatgcagacagagactggagaacctcagccagcagttcaaactgctgggaacccacctcccctccctggctcttgctctccaagatgctgtacagatgcagaccatgtctacgtgtataaatagcccagtgtgcacctccacctgtgtctggtctttggaggaaaacacaggcttgcctcataggggagaaacagtcctcctgttcaaatgttcattagggacagggcngaaagggcagtgcccagacgccatcctcgtgcagtgggcaggtgtgggtggaaaataacatatgcaaaatgtcccccatggagctctcctgtcagtctggcctcctgtgcttgatggccttcagggtctgtgctgaagcttgtcttccaggctccagggtggacacaagctaataccttcccagcctcccaggtctgctagtcctttgtcactgctctgtccatgtgtacttgaaagttacaagaaaagcagatctctaagactagcctcctccctagtcaccccatgacctcccttgcatgtaacatgttgtatttattgctttgtggccaactggaatccagagccaccagagaggctggtgcaggggtccctacctaccacctggttcctaatggctcctggtggcttgtatgtgtgtggctggctgtgtgtggcatgagccaaacctgctgtccaaagcagggctcagcccctgtcaattttcagatgtaattttgtg

SEQ ID NO: 2568 - DNA, 1914 bp, Cricetulus griseus
gggatgccgagtcctggaagtggagctccgcgctgggactggttccttcgcagccattttctgtccaaccaaacagccgattggagacgggagccaaccagggctgcattggaggttaaaattgggcaaggatccaacaccttttgacaggtgtttgagagcaccactagtacacagttctgacagtgtttcatgacaatggatggcgacagttccacaaccgacgcttctcaactagggatttccgcagactacattggaggaagtcattatgttatccagcctcatgatgatactgaggacagcatgaatgatcatgaagatacaaatggttcaaaagaaagtttcagagaacaagatatttatcttcccattgcaaatgtggctaggataatgaaaaatgccatacctcaaacaggaaagattgcaaaagatgccaaagaatgtgttcaggagtgtgtgagtgagttcataagcttcattacgtctgaagcaagtgaacggtgtcatcaggagaagcggaagaccatcaacggagaggacattctcttcgccatgtccactctaggcttcgacagctacgtggagcctctgaaattgtaccttcagaagttcagagaggccatgaaaggagagaagggcattggtggagcggtctcggctacagatgggctaagcgaggagctcacagaagaagcattcactaaccagttaccggctggcttaataactgcagatggtcaacaacaaaatgttatggtttacacgacgtcctatcaacagatttctggtgtccagcaaattcagttttcgtgatctgaagaaatgatggaaccgggctctggagagattccaaccaagtctggaacaggcattgggaggaagtgagggcgaagactcctctgtgtaaaataagtagctgtaatgtagcttcctgacgcttgactaattgaggtgttaattctgacttgagaatctttttcatgaatgattttaaagaaaaaattggattttaaaggtattaaaatatttttgttttgtacgagagtttgttgctctgtatgacgcctgtatgcattgtatattgcaatttattactgtcagagatttgtagacagtttcttattttcatattgaatcatgttattttgtaattcaagtaagcagctgggttaattcatgatgtttgcccttttaataaaatgtaagggtagagttcattttgaatgagagttgcctttattataaatttgtcttggctatattctatcttgcatgataagctagctagatttttagcatttattctatttattgaaatttaatttttttggtaaaacagtcatagcttaggcagtgtcatttttttaaagctatctgcaataaactaacaatagatgttgtagctttgtacagtatagtagtgtgtgttcgggttcctttttaaactaaagatttctatttttctcatctattctttttggtaataattactttgaatttttgtgtatgtggtggtggtagtttagctctatccaaaaatggcttattgtacagtttgtccagaagggaatttgtggggctccaagggacgaaggggagcagtttcctaattacaagatgaatggtaatggccactctgccaggagtcttgggggatatgtcctctggctattcagaggttaagtagctccctcctgtcctaccccttttcaataataatctttatgtagaaaatgcacacaggaaagaaagggagaggatggttaagcaaaatcaacagccacctactgtgttgaaataaccaatgttaatattttgataaattcatttgtccttttactttgctaatatgtatattttataaaatggctcatgttgtgcacacggttttgtaagcggctttttcactta

SEQ ID NO: 2569 - DNA, 1914 bp, Cricetulus griseus
  modified_base (1464)..(1464): a, c, t, g, unknown or other
  modified_base (1468)..(1468): a, c, t, g, unknown or other
cggaagtagctgttgggaggtttcagacgctttaaattcctgcggggtggaggcctcggctttctgctggagtctggctcctcactcgcatggctgtggacgtgaagtctcgagcgaagcgctatgagaaactggacttcctcggggagggacagtttgccacggtctacaaggccagagataagaacaccaaccaaattgtcgccattaagaaaatcaaacttggacacaggtcagaagctaaagatggtataaatagaacagccttaagagagataaaattgttacaggagctaagtcatccaaacataattggtctcctagatgcatttggacataaatctaacattagccttgtctttgatttcatggaaactgacctggaggttataataaaggataatagtcttgtgttgacaccatcccacattaaagcctacatgttgatgactcttcagggattagaatatttacatcagcattggattctacatagggatctgaaaccaaacaacttgttattagatgagaatggagttctgaagctggcagattttggcctggctaaatcatttggaagtcccaatagggcttacacgcatcaagttgtgaccagatggtaccgggcccctgagttattgtttggagctaggatgtatggtgtaggtgtggacatgtgggctgttggctgtatattagcagaattgcttctacgggttccttttttgcctggagattcagaccttgatcaactaacaagaatatttgaaacattgggtacaccaactgaagagcagtggcctgacatgtgtagtcttccagattacgtgacgtttaagagtttccctgggatcccactgcagcacatcttcattgcagcaggagacgacttgcttgatctcatccaaggcttgttcttatttaatccgtgtactagaattacagcttcacaggcattgaagactaaatacttcagtaatcgcccagggccaacacctggatgccaacttccaagaccaaactgtccagcggaagccctaaaagaacagtcaaatccagccatggcaacaaaaagaaaaggacagaggccttagaacaaggaatattgcccaagaagctaattttttagttacagcgaacaatggacagtgtttcacactgaaagaaataatccaaaaaggcaaataatggaagaaaatagggagcattaaatgccatagaagagaacttgtatatattcaacacatgtaaaatatgtaaaagtatgggttattttattaaatgtaattttaaaagaaattttgtttgtttgtttgtttgtttgtttgttgagacagggtttctctgtgtagccctggctgtcctggaatttgctctgtagaccagactgaccttgaactcggagatctgccttcctctgcctccgaatgctgggattaaaggtgtgcaccattaacttttttntttntttactacatttaagacagggtttctctgtgtagctttggagcctatcctggcacttgctctgaagaccaggctggcctcaaactcacagattaatgccttttggtttgaaacagggtctctacaatatatagcccaaggtggcctcaaactctgcctcccaagtgggattacaggcatgcgctaccacgccaggccactaacgggcttttgtattgcttagagccttgataaccgtttgagattcctgtactagccttaacacatctgtaagcacttcctgcctgtgtgcaggattagatcctggctggatcagatacaagctttgcagatttttaacctttagtaaaaaaaaaaaaacaaaaaaaaaaacaacaaacctgtaaatcacatatgccttttttgtttcttttttttttgttatatttgttattttgtttattttgt

SEQ ID NO: 2570 - DNA, 1914 bp, Cricetulus griseus
acaaagtgtaccaggccatagaggaggctgacttcttcgccatcgatggggaattttcaggaatcagcgatggaccctcagtcactgcattgacaagtggttttgacaccccagaagagagatatcagaagcttaaaaagcattctatggactttttgctgtttcagtttggactttgcgcttttaagtatgaccacacagattccaagtatataacgaagtcatttaacttctatgttttccccaagcctttcagtaggtcctcaccagatggcaagatgaaaaacgttctcaggccaatggggcaggagctctggcaaaatgtcctgtgacaatccctgaggatcagaggaagtttattgaccaagtaatagagaagatagagaatttcctacaaaataaagagaagaagagcttggatctagagccatgcactgggttccaaagaaaacttatttatcagactttgagttggaagtttcccaaaggcattcatgttgagacattagagactgaaaagaaggagagacacatagttatcagcaaagtggatgaagaagagcgcaagagaagagagcaggagaagtatgcaaaggagcaggaggaattgaatgatgctgtgggattttcaagagtcatccatgccattgctaattcgaggaagctggttgttggacacaatatgctcttggatgtcatgcacacaattcaccagttctattgccctctgcctgcagacctgaatgagtttaaggaaatgacaatatgtgtcttccccagactcttggatactaagttaatggccagcacacagccttttaaggatatcattaacaacacatcccttgcagagttggaaaagcggttaaaagagacaccgtttgaccctcctaaagttgaaagtgcagaaggctttccaagctatgacacagcttctgagcagctgcatgaggcagggtatgatgcttacatcacaggactctgcttcatctccatggcaaattacctaggttctttactcggacctccaaaagtgtgtgtgtctgccagatcaaaactcattgaacccttttttaacaagttatttcttatgagggtcatggacattccatatttaaacttggaagggccagacttacagcctaaacgtgatcatgttctccacgtgacattccccaaagaatggaaaaccagtgacctttaccagctcttcagcgcctttggtaacatccagatatcctggattgatgacacatcagccttcgtttctctcagccagccagaacaagtacaaattgctgttaataccagtaaatatgctgaaagttatcggatccagacctatgctgagtatgtggggaagaagcaggaagacaacaagcaggtcaagaggaagtggaccgaagacagctggaaggaggtggacagaaagcaacccaaagtgtcaagcccctgttcccataccaacagcttcacagcaactggcatgactggaaagagaaatctgagtcctgacccagaggaagctggctcggaggacaaagaattggaggagatatctgactctgagcttgaacagatagattcctgtgcagacccttcccagagggaagaagaaaggtcaagaagttaaaaagaatgaagaaagaactttccttggcaggaactgttgcagatagccctgccatgctcttcgaagttcccgacacatggtagtgcaggtgtgtgtgttattaactagttagttcctgatccttgtgtgtgtgtgtgtgtgtgtgtgtgtgtctccatggcagaactacagcatgcatcaaaccctcattgagacaggagacacagtggcaaagcattgtgttcctttaggacactccagcagacacttctggatatgtaatgtttttgtatcatgaaaat

SEQ ID NO: 2571 - DNA, 1914 bp, Cricetulus griseus
ctgctcagcaagaggctagtggactggctgcgctacgccagcatccagcaagggcttccatcctcagcaggtttcttctctacacccaggacccggcagccaggtcccatcactgaggtggatggagcagtggcttctgacttcttcacggttctctccacgggccagcactttacagaggaccagtggctgaacatgcaggccttctccatgcttcggaaatggctgctacacagtcggccccgaggacccaggcagtccagatgcagatgacaagtcagagctggagggctccaccctgtctgtgctctctgccgcctccactgccagccgactgctgccccctcgggagcggctgagggaggtggccttcgaatactgccagcgcttattggaacagagtaaccggagggccttgaggaaggcggactctgacctacagaaagcttgcctggtggaagctgtgttggtgctggatgtgttgtgccggcaggaccccttccttcctttaccgcaccctctcctgcctgaaggccctgcataggaggctgggtgaagaccctggcagcgagcgggcactggtcgccccttgcccagttcttcctgaaccatggggaggcagccgccatggatgcagaagtcatctaccagcacctgctcagcaggctcccttcccacatcctcagccttctcaggttgagcttccctagtctgttcaagttcctggcttggaacagccctccccttacagccgagtttgtggtactcctcccagctctggtggaggctggcaccaccgtggagatgttgcacgccctgcttgacctgccctgcctgaccgctgccctggacctacagctcaggtccacacagactccatcggaaaggccgctttgggatgtctctctcaggattcccggctgcctggaggccttccgggacccacagttccagggactcttccgccacctgcttcgtaccaaggccagcggctcaatggagagactgacgccacttcaccagctgctgaagcccatggccagctgtgcccgggtaacccagtgtgcagaggcagtacccatcctgcttcaggccttcttttcgactgtgacccagcttgctgatggggccctgatcaaccagctgctgctcctggacagaagtgactccctctaccaggccctcagtatgaggcccgtgtgcacagggtgctgaatcccagttcctggcgctgtgcaagctgaagccatccctggtggtggaggctggtcacgagagcttctggagtttgtggggaacgtgagcagcatctgcagccgagccagcatgttcacctgtgtggtatgggccattggcgagtacctgtcggtgacctgtgacaagaggtgcacagtggagcaaatcaacaagttctttgaagccctggaggccctgctgtttgaagtcacccagtcccgcccctcggctgacctgccttgctgtccaccacaggtggtcactgcactcatgaccacgctgaccaagctggcctcccggagccaagacctgatcccaagggtgtcactgttcctatcaaaacttcggaccctggcccagaacccagccaccagctccgtgcacagtgaggaggatgcagaagccatccgtacccgggccacagagctactgactttactgaagatacccagtgtggcccagtttgtgttcacacccactgcaggcgtgtgccagccccgataccaccgagacgccaacacggccctgcctctggccctgcgcaccgtcagccggttggtggagaaggaggctggcctcttgccaggttgaagggacagtcaccatctgaacactggctatagcttaagagcctgggtggtcagcccaatatcagagttgagctgcaggctggggtga

SEQ ID NO: 2572 - DNA, 1914 bp, Cricetulus griseus
gttgtgggagatttaggaccacaggtgtcatgcatcctttacaatgtgtcctccaagcacagaggtctctaaaatgggggccactgagctctgtgtcctggctgctgctcaggacctgcagggcacatagcagtgtccccagctcttcatgtcttagttcagaggggcagagctcagaaggtgttgagaaggatttcagctccaggctagccgccggaccaacttttcagcattttttaagaagtgctttcggttcttcaagagaaaccatcttttccagaagtggaggacccaccccgtatctcacaggggatgaacttctaggaaggcagagaaaagtctacctcgagacctatggctgccagatgaacgtgaatgacacagagatagcctggtccattttacagaagagcggattcctgcggaccagcaacctccaagaggctgatgtgatccttcttgtcacgtgctctatcagagagaaggctgagcagaccatctggaaccgtttacatcagctgaaggccctgaagacaaaacgatcacgttcccgggtacctctgaggattgggattctaggctgcatggctgagagactgaagggagagatcctcaacagggagaaaacagtcgatctcttggctggaccggatgcctatcgagaccttccccggctgctggctgttgtggagtcaggtcagcaggcagcaaacgtgcttctctctctggatgagacctatgcagatatcatgccagtccaaacaagccccagtgccacttctgcctttgtgtcgatcatgcggggctgtgacaacatgtgcagttactgcattgttcctttcactcgtggccgggagaggagtcggccggttgcctccattctagatgaagtgaggaagctctctgagcaggggctaaaagaagtgacacttcttggtcagaatgttaatagttttcgggacaattcagagatccagttcaataatgcagtgcctaccaacctcagtcgtggcttcactaccaactataaaaccaaacaaggggggcttcgcttttcccatcttctggatcaggtttcaagaatagaccctgaaatgaggatccgtttcacctctccccaccccaaggattttcctgatgaggttctacagctgattcatgagagacacaacatctgcaagcagatccatctgccagcccagagtggaagcaaccgtgtactggatgccatgaggagaggatattcaagggaagcttatgtggcattggttcatcatatcagagaatgtatcccaggtgtgagcctcagcagcgacttcatcactggcttctgtggagagacagaggatgatcacctgcagacagtgtctttacttcgagaagttcagtataatgccggttttctctttgcatacagcatgaggcagaagacacgggcatatcataggctgaaggacgatgttccagaagaagtcaaattaaggcgtttggaggaacttattactatcttcagagaagaggcgtcaagagccaaccagacctcagtgggttgtacccagctagtattggttgaagggttcagcaaacgttcttccacagacctgtgtggccggaatgatgcaaaccttaaggtgatcttccctgatgcagaggtggaggatgtcactaactctgggctcaaggtcagagctcagcctggggactatgtgctggtgaagatcacctctgccagttctcaaactctcaaaggacacattctctgcaggaccactttgaaagactcatcaatgcattgcttgacctgagtggatggcttaacagtggacttggccagtttttccttatgctttggagacaaggcagtgatcatgaagcacctttgtaccaaatggaagagcacatttctttgttgtc

SEQ ID NO: 2573 - DNA, 1913 bp, Cricetulus griseus
aagctctcacaggagtatgagtctatcgaccctgggcagcagttcacctgggaacattcgaacctggaaggccaaccaagccgaagaaccgctacgccaatgtcatcgcctatgaccattctcgtgtcatcttgcagcctcttgaaggcatcatgggtagtgattacatcaatgccaactatgtggatggctaccgtcggcagaacgcatacatcgccacacaggggcccctgcccgagacctttggagacttctggcggatggtgtgggaacagcggtcggccactgtggtcatgatgacgcggctggaggaaaaatcacggatcaaatgtgaccagtattggcctaaccgaggtacagagacttacggcttcatccaggtcaccctgctggataccatggagttggccactttctgcgtcaggaccttttccttacacaagaatggctccagtgagaagcgtgaggtgcgccatttccagttcacagcctggccagaccacggggtacctgaataccccacacccttcctggcattcctgcgcagagtcaagacctgcaacccgcctgacgcgggtcccgtcgtggtccactgcagcgcgggcgtgggccgcactggctgcttcatagtcatagacgccatgctggagcgcatcaagacggagaagacggtggatgtgtatggacacgtgactctcatgcggtctcagcgcaactacatggtgcagacggaagatcagtacagcttcatccatgaggcgctgctggaggccgtgggctgtggcaacaccgaggtccccgcacgcagcctctacacctacatccagaagctggcccaggtggagccgggagagcacgtcaccggcatggagctggagttcaagaggctcgccagctccaaggcacacacttcacgcttcatcaccgccagcctgccttgcaacaagtttaagaaccgcctggtgaacatcctgccatatgagagctcacgagtctgcctgcagcccatccgtggcgtcgaaggctctgactacattaatgccagcttcatcgatggctacaggcagcagaaagcctacattgcgacacaagggccgctggcagagaccacggaggacttttggcgtgcgctgtgggaaaacaactccacaatcgtcgtaatgctcaccaagctccgagagatgggcagggagaaatgccaccagtactggccggctgaacgctctgcccgctaccagtacttcgtggtggaccctatggcagagtacaacatgccgcagtacattcttcgtgagttcaaggtcacagatgcccgggatggccagtcccggaccgttcgacagttccagttcacggactggccagagcagggtgcacccaagtcaggtgaaggctttatcgacttcatcggccaagtgcacaagaccaaggagcagttcggtcaggatgggcccatctcggtgcactgcagtgctggagtgggcaggacaggagtgttcatcaccctgagcattgtgctggaacggatgcgctacgagggcgtggtggacattttccagacggtgaaggtgcttcggacccagaggcccgccatggtgcagacggaggacgagtaccagttctgcttccaggcggcgctggaatacctgggcagctttgatcattatgcaacataagccatgggccctgcccaatgccagaccctgcgccacgttcccggatgtgacccaggccccgcagggcatgaggaggcccagaaacaaaatcgtgccagtcaaactttgaaacaaacaagatagagcgggtcagctctgtccgtgccgttttttgggcagaagcagcgggctctgcccctgtatgtagataaaccgactttgtattaaaggaagattcgtaccgaaaaaaaaaaaaaa

SEQ ID NO: 2574 - DNA, 1913 bp, Cricetulus griseus
agggtcaccagacaggagccctgacttggaacttgcttcttggaaggcacactcgagcgattcctgataccaggctgggtgacagccacctcttccagggtcctgtttctctagggataaccatggctccaaaacgaaagtcttccgtgcagcctgagggctccaagaagaggccacagggggacagggggaggaggacagtttccgatccaccgctgaggctctcagagcagcccctgcagatcagcgcatcatccgtgtggaccccgccgtgtccactcagccgcaaccccagaactcaggtccacgaggactatgactgtaccttgaaccagaccaacatcggcaacaacaacaacaagttctatgtcatccagctgctggaggagggtggccacttcttctgctggaatcgctggggccgggtgggagaggtgggccagaccaagatgaatcccttcacctgcctggaagatgcaaagaaggactttgagaagaaatttcgggagaagacgaagaacaagtggggggagcgggaccactttgtggcccatcccaacaagtacacacttatcgaaatgcagggagaagctgagacccaagaggccgtggcgaaggtggatggacgcccagtgaggactgtggttaagccctgctccttagaccctgccactcagaggctcatcaccaacatcttcagcaaagagatgttcaagaacgccatgaccctcatgaacctggacgtaaagaagatgcccttgggaaagctgagcaagcagcagattgcgcggggctttgaggccttggaagctctagaggaggccataaaaacccccacaggcggtggtcagagcctagaggagctgtcctcccgtttctacaccgttatcccacacaactttggccgcagccggcccccgcccatcagctcccctgagattcttcgggccaagaaggacatgctgctggtgctagcagacatcgagctggcccagaccttgcaggcagcccctggggaggaggagaaactggaggaagtgccacacccactggacagagactaccagctcctcaggtgccagcttcaactgctggacaatggggggctggagtacaaggcgatacagacctacctggaacagactggcaacaactacagatgcccagctctgcaacatgtttggaaagtgaacagagaaggggagggagacaggttccaggcccactccaaactgagcaaccggaggctgctgtggcatggcaccaatgtggccgtggtggctgctatcctcaccagcgggctccgaatcatgccgcactccggtggccgtgttggcaagggtatctattttgcctcagagaacagcaagtcagctggctatgttactcccatgcattgtggggaccaccaggtgggctacatgttcctgggcgaggtggccctaggcaaagagcaccacatcaccaccgatgatcccagcttgaagagtccaccccctggctttgacagtgtcatcgcccgaggccaaacagagcctgatcccacccaggacattaaactagagctggacgggcagcaggtagtggtgcctcaaggtcgacctgtgccgtgcccatcgttcaaacgctcccacttcagccagagtgagtacctcatatacaaggagagccagtgtcgtctgcgctacctgctggagattcacctctgaactgcttgcgctccccggacctgctaggctgggccgtgatcttgatcttcacactcctctgtcaggctcccatacggccattggcttcccaagaatgtaatatatgccagacacattggtgcacacctatggcctcatctactcaggaggcagaggcaagaaaaacactaccctgggagttggaggccagcctgggttacatag

SEQ ID NO: 2575 - DNA, 1913 bp, Cricetulus griseus
cgcggttggcgctttatccgtgtctaagccgagttctttgagaggaccgtggctgacgccctgtgtgccgcgatggctcggcatcggaacgtccgaggctataactacgatgaagattttgaagatgatgatttgtatggccagtctgtggaggacgattattgtatttcaccatcaacagctgctcagtttatttactcacgacgtgacaacccctgtagaagaatatggttatgaagatcggaaagaatcttctaattctcttctgaatcaccagttaaatgaaattgatcaagctcgtctttattcatgccttgatcacatgagagaggtcctgggagatgctgtgcctgatgacatactgactgaagcagttctcagaaacaagttgatgtccagaaggctctgtcagtagttctggaacaagatagtctggcaagctgaggcagcagatagacgtgaaggcagagctggagaagcggcgagggcgggaaggcagctgctcaacttagtggtcattggtcatgttgatgctgggaaaagtactctgatgggccatatgctttatcttctgggtaatgtaaacaaaagaaactaatgcataagtatgaacaagaaatctaaaaaggctggcaaggcttcctttgcatatgcatgggtcttggatgagactggagaagaaagggaaaggggagtaacaatggatgttggcatgacaaagtttgaaaccacaaccaaagttattacattaatggatgctccaggccataaggatttcattcctaacatgatcactggagcagcccaggcggatgtagctgttttagttgttgatgccagcagaggagagtttgaagctggatttgagacttggaggacagactcgagagcatggccttttagtacgatcggtaaattggcaacaagaaagatttcaagagattactggaaaacttgggcactttcttaagcaagcaggttttaaggagagtgatgtagcttttatccctacgagtggtctcagtggtgaaaatttaatcacaagatcacagtcgagtgagctcaccagctggtataaaggatcgtgtttattagaacaaattgattccttcaagccccctcaacgatccattgacaaaccttttagattatgtgtgtcggatgtcttcaaagatcaaggatctggcttttgtgtgactggtaagattgaagctggttatatccagactggtgaccgactgttagcaatgccacccaatgaaacttgtactgcaaaaggaatcactctgcatgatgaacctgttgattgggcagcagcaggagatcacgttagtcttactttggttgggatggatatcatcaaaatcaatgttggctgcatattttgtggccccaaagaacctatcaaagcttgtactcgattcagagcccggatcctcatcttcaatattgaagttcctatcactaaaggatttcctgtgctgttacactaccaaaccgtcagtgagcctgctactattaaacgattgattagtgtcctaaacaaaagtactggtgaagtcacaaagaaaaagcctaagctgctgaccaagggccagaatgcgttggtagagcttcagacacagagaccagtggctctggagctctacaaagacttcaaggagctggggaggtttatgctgcggtatggtggctccacaatagctgctggtgttgtcactgagatcaaagagtgatgggcccaccatgtttccaaatgcagtgagacagtcagccacagaggggcgtccagtgtgcagttatggaaacagtgtgcagttgatgatgttttgtagacacgagaacctaaagctataattagctgccaagaagtattaataatcactcctgcaaaagttttgagttgccaactg

SEQ ID NO: 2576 - DNA, 1913 bp, Cricetulus griseus
ctcgtgctaaagagcgtttgaaacgtgaggaacgacgtagagaggagctttatcgtcagtattttgaggaaatccagcggcgctttgatgcagagaggcctgtggattgctctgttattgtggtcaacaagcaaaccaaggactatgctgagtctgtggggcggaaggtgcgagacctcggcatggttgtggacctgatcttccttaacaccagaggtgtcattgtcacaagcgctggaggatgtcagcaggggagggtctcacctcactgcagaggagaccgacagggtcactcgactacctgcgtgggcggaacggagcggctcggagcagcgccgccgacgctctgcctggcccgattttcccgccacgccactcggggcggcctcgggtacctcgctgaagacacaatcaagttcccaaccgcttcagagtggccaagtgcttcccctctgccacacccactccagcccgcacccccaacctcccagcaagagcttcaggccaaaatcctcagcctcttcaacagtggcacggtctcggccaacagcagctctgcatccccctcggttgctgccgggagctcccagaaccagaatttttccacagcagcaaacagccagcctcagcaaagaccacaggcctcaggaaatcagcctccaagcattgtgggacaggcagggtctgctcggaacatgggccccaggcctggggctccttcccaagggctctttggtcagccttccagtcgcctggcacctgccagcaacatggctagccagaggcctgtatcttccacaggtattaactttgacaatccaagtgtacaaaaggctctggacaccctgatccagagtggccctgctctttcccacctggttagccaaactgctgcacaggtggggcggccccaggcccccataggatcataccagaggcattactgaggctccaccagtccactctccctagtccccttttcccctggtccctcccacttcatcctaagtagagatgtttggaagtgttcttcgcactctctgggtcagcatcagatatcctaagtttcttgcaccgctccttcctgcggctgttgcttaccacttaacagaatcagaacttagactgctttcgggactgtatcttttgtttggatagaaataagtatttctggggtctaggctcagcttctttctgatggggtagctctggccccagcctggatttggaggaataaagaaagaagccaaaccccagctgcctcagtttgaacaccacttatggagtcagtggtgacagcctttgtttccacctccacacgtcatccagaattgagctgcctggctcgcatagaagcaggttggccttggcaggcagtgtcatcactgtcccatcaagagaatggaactccacccaggctttcgttctcatccatactcttgttcccttgtctgatgagcaggaggtagggaccatttgatgttagactgtagtagttggatatgttctgagacggacagcattcataacttttgagacaaagtgacacttggaaggctctggatgccaccctgaatggatccaaaggataactccttttcctttgggaaagactgctcatttagaaccctgtggatcaaatctgtgagaaagagggacctagaagagcaagcaagagtggtagctccagctgagtccctgccaggggctaagcaaaccagattcaaaacccaaggtccccaaacggcagcagtttatgttctgatctgtttgttatatggtggggtttttccccccccctttggaactcttgtgttgttgataaaatgaaataattactttttaattaaaataagaaagtcaaaaaaaaaaaaaaaaaaaaaaaaaaaaaaaaaaaaaaaaaaaaaaaaaaa

SEQ ID NO: 2577 - DNA, 1912 bp, Cricetulus griseus
tgcctcccagaggacaaggtcccctatgtcaacagtcctggggagaaatacaggataaaagcaactcctgcaccagctgcccccacatgacagtgaggcacagtactgcaccgccctggaagaggaggagaagaaagagttgcgagccttcagccagcagcgcaagcgggagaatctgggacggggcaccgttcgaatcttcccagtgaccattactggggccatctgtgaggagtgtggaaaacagatcggaggtggagacattgctgtatttgccagtcgagcaggccttggtgcctgttggcaccctcagtgctttgtgtgtaccacatgccaggagctgctggttgatctcatctacttctaccattctggcaaggtctactgtgggcgccaccatgctgaatgcctgcgccctcgctgccaagcatgcgatgagatcatcttctctcctgaatgtacggaggccgagggccggcactggcacatgggtcacttctgctgcttcgagtgtgaagcttcattaggagggcagcgctatgtcatgcgacagagccgtccccactgctgcgcctgctatgaggcccgccatgcagagtactgtgatggctgtggggaacacatcggcctggaccagggccagatggcttatgagggccaacactggcatgcttcagatcgctgcttctgctgtagccgttgtggtcgagcactgctgggccgccctttcctaccacgccgtggcctaatcttctgttcacgagcctgcagccttggggctgagaccactgctccagggcccggccgccggagctggagcgcaggcacagtcaccgcacagctcacagcttccacggcttctttcccagctgcagaggggacatccgagacagccagcaaaggcacctgtaccaaggcagagcctgctgcaggctccgatgagccctcccgctttctgagaggggccccccaccgccactctatgcctgagctggggctccgcggtgctcctgaaccacccacagaaactcctggacatcctgccctgaacccagatgataatgcctttggtcgccagagtacgccccgtgtcagctttcgcgaccctttggtgtctgagggaggcccacgccgaaccctgagtgcacctccagcccagcgccgcaggccacgaagtcccccacctagggcccccagctgccgccacccgccaccggcgtcgcagacaccgacgccgagggagccaccatcaccaccaccgtcctggcagacatggccaccatcgttgtaacgcgggatcaggttctgattcaggatcctgttccagctcaccctctagccctagttcagagtcctctgaggatgatggtttcttcctgggggaacgcatcccgctgccccctcacctgtgcaggtccaggaccactcaggatgctgcaaccgaaacctttaacaacccagccccgccacttgtccaggtgtctcacccagtgatgcctcgccatacacgagacaagaactgcatcgtggcttgaaggcaggcaactttagcaggaactctactatccagtcagcataaacaatgattcccccaaactaagtcatagtccctgttgttccaccttctgtttgtaatagtgaaacaatgcaatttaactttttttttatagatcttaacaatctgtttattatttatttagcccttcacagctcaccccacacagagaaaaggttatttgtagtgggtcactctttttgtagcttatgtgggggaatggttcaagcagaactcatgtcagctgctggtactgcagagcaaaggggggaccgaggcacacccataaaggtgaccacacccaggagggttgattggcaggctggaagacaaaactctcccaacaaaggcactttt

SEQ ID NO: 2578 - DNA, 1912 bp, Cricetulus griseus
gatacacagtcccgaagatactattcctgagtgaggaggtggagggtaatgaacttcagcagcagtgcctggatctggagcggcagcttgtgctcctttcagaggagaagcagaatctggcacaagagaatgctgccctacgggaacgggtgggccgctcggaagtggagagtgcctcaggcctcacggctaagaagctattgctcctgcagtcacagctggaacagctgcaggaggagaacttcaggctggagagcagcagggaagatgagcggctgcgctgcatggagctggagcgggaggtcactgagctgcaacaacggaaccaagcactgaccagcctatcccaggaggctcaagcgctaaaggacgagatggatgagcttcggcagtcctctgaacgtgcaaggcagctggaggccactctgaacagctgccgtcgccgcctgggtgagctgcgggagctcaggcggcaggtgcggcagctggaggagcgtaatacgagccacgctgagcgcacgcgacagctggaagaggagctgcgcagagcaggatccctgcgtgcccagctcgaggctcagcgcagacaggtgcaggagttgcaaggccagtggcaggaagaggccatgaaagctgagaagtggctatttgaatgccagaacctagaggaaaagtgtgacttggtgacaaaggagaaggagcggctgttgacagagagggactccctgagggaggccaacgaggagctccgctgtgcccagctgcagccgaggggattggctcaggctgacctctctctggatcctaccccttctggcctggaaaacttagcagcagagatcctgcctgcagagctcagagagacgctcctgcggcttcagctggagaacaagcgactgtgccagcaggaggcctcagaccgcgagcgacaggaagagctgcagcgccacttggaggaggccaaccgtgcacgccatgggctggagactcagcacaggctggatcagcagcagctgtctgagctgagggcccaggtagaagatctacaaaaggccttgcaggagcaggaaagcaaggctgaggaccccaccctgctgaagaggaaactggaggatcatctgcagaagctgcatgaggctgatctggagctgcagaggaaacgagagtacattgaggagttggagcctcccactgacagcagtacagctcgtcggattgaggagctacaggacagccttcagaagaaggatgcagacttgcaggccatggaagaacgctaccgccgctatgtggacaaggcacgcatggtcattcagaacctggaacccaagcagaggccgcccactggggtgtccccagaactccataccctgaggacacagctctgggagcggaacatgagaatacggcacctggagatggactatgagaagagtcggagtcagcgggaacaagaggaaaagctgctcatcagtgcctggcacagcatgggcatggccttggagcaacgggctggggaagagcagtctcctgcccatgcccagtcattcctggcacagcaaagactggcgaccaatgcacgccgaggacccctgggacgcctggcttctctgagccttcgccccactgataagcactgacagacctcaacttcctgctgcctgctagagtcctccagctcacatggtacccggcttggggcgttgaccttgattgaggctatgacttctgccctttgcttccttagatgggagagaaggggagaggctggtatcaggtgtaggcctattccttttagcaatgtgattcttatccttgattcttctcctgggcctcatgaactccttgggaagagcctgatttttatatttgaaaagaataaagactttaaatctgtcaaaaaaaaaaaaaa

SEQ ID NO: 2579 - DNA, 1912 bp, Cricetulus griseus
  modified_base (1033)..(1033): a, c, t, g, unknown or other
  modified_base (1900)..(1900): a, c, t, g, unknown or other
ccgagagatggctgttgactgccctggagatttgggcaccaggatgatgccagtgcgaagaagtgcacaattggagcgtattcgacaacaacaggaggatatgagacgtaggcgtgaggaagaagggaagaagcaagaacttgacctaaattcttccatgagacttaagaaactagctcaaattcctccaaagactggaatagataaccctatatttgacacagaagaaggaatcgttttagaaagtcctcactatgctgtgaaaatattagaagttgaagacttgttttcttcacttaaacatatccaacacactttggttgattctcagagccaggaggatatttcactgcttctacaacttgtaacaaaacaaagattttcaaaatgcgttcaagatacacaatgctgtcacagtacacatgaacaaggccagtcctccatttcctcttatctccaatgtacaagaccttgtacaagaggtacaaactgtcttaaagccagtccatcagaaggaaggacaagaattaactgctttgttaaatgcgccacatattcaggcacttttactggcccatgataaagttgctgagcaggaaatgcagctagagcccattacagatgagagagtgtatgaaagtatcggccaatatggaggagaaactgtaaaaatagttcgtatagaaaaggctcgagatattccattgggtgccacagttcgtaatgaaatggattctgtcatcattagccggatagtgaaaggtggtgcagcagagaagagtgggctcttacatgaaggagatgaagttctggagatcaatggcattgaaatccggggaaaagatgtcaatgaggttttcgacttgttgtctgatatgcatggtactttgacatttgttctgattcctagtcaacaaatcaaatctcctcctgccaaagaaactgtaatccatgtaaaagctcattttgactatgacccctcggatgatccttatgttccatgtcgagagttaggtctgtcttttcaaaaggngatatacttcatgtgatcagccaggaagatccaaattggtggcaggcctatagagaggggacgaagacaaccagcctctagctggacttgttccaggaaaagctttcagcagcaaggagccatgaagacaaaccataatgacaatgaagagatcttaacatacgaggaaatgtcactttaccatcagccagcaaataggaaaagacctattatcttgattggtccacagaactgcggccagaatgaactgcgtcagagactcatgaacaaagaaaaagaccgctttgcatctgcagtccctcatacaactcggaataggcgagaccatgaagtagctggtagagattaccacttcgtttcacggcaagcatttgaagcagatatagcagctggcaagttcattgaacatggtgaatttgagaaaaatttgtatggaaccagcatcgattctgtacgacaagtgatcaactctggcaaaatatgtcttttaagtctgcgaacacagtctttgaagactctccggaattcagatctgaaaccatatatcatcttcattgctccaccttcccaagaaagacttcgggcattgttagccaaagagggcaagaatccaaagcctgaagagttaagggagatcattgagaagactagagagatggaacaaaacaatggccactactttgacactgcaattgtgaattcagatcttgataaagcctatcaagaattgcttaggctcattaacaaactggacactgaacctcagtgggtgccatctacttggctaaggtgaaggaaacagctgttttatcccatgtcatcatgttgaactttatttggccaaaaccaccaaatatttcttaaaanaaaaaaaaaaaa

SEQ ID NO: 2580 - DNA, 1911 bp, Cricetulus griseus
  modified_base (43)..(43): a, c, t, g, unknown or other
gtgaagaagtatgtctacttcccaggtacagggacgtgaatgnaccccctgggtcccgggaacctcagacaagaaaagagtcagtcactcttctaaaggagccgatatcttggaacaagctctgtcagtgaaggatcctgaggaaggcagacctgctcctggggtggagcaaagcaatggccttgggaaggcctctagggagctcaatggtggtgaggctgtaccaggagctttccccagtaaaactgacgagaaggatacctggtccctcacccgggcctctccgaccagcagtcccggtggccatgggctgacagaaccttccgatctcccagtgtcttgtgaatgggataatcggaccacaccaggagtacagcccactcagggagactccacccaggatctgaattttgacttgtccagtgacagtgagagcagtgagagcagcacaaaatacgacagatacctcaagaaggagctagaggaagctccagatatacggaaaattgtgcccgagctcaagagcaaggtgctggcagatgtggctgtgatattcagtgggctgcacccaacaaacttccctgtggagaagactcgtgaacactatcatgccacggccctgggagccaaggtcctcactcagctggtgctgaaccctgatgcccccgacagggccactcatctcattgctgctagagctggcacagagaaggtgcgccaggcacaggagtgtaggcacctacatgtggtcagccctgactggctgtggagctgcctggaacgctgggacaaggttgaggagcagctcttcccgctcatagacgatgactgcccgggcacacagaggtaaccagccctgcagcccttccagacagacagaatgtgctcccagcagccttgttccacccaacacccatccattccaaggcccatcctggccccgaggttcgaatctatgattccaacacaggcaagctcatccggatgggcacccagggtcctgcaccagctccctccagcgctccacttattcatggggagccttcctccttcagagcggttcagccacagcagcagcagatgtttggtgaagagctgccagaagctcaagatggagagcagcctggccctgctagaagaaagcgacaacccagtatgtcagagacaatgccgctgtatactctctgtaaggaggacttagagagtatggataaagaggtcgatgacatccttggagaaggcagcgacgacagtgacagtgagaagaagaagccagaataccaagaaaatgaacaggagagagcaccaaagtccaggaagcccaggaaccccagggatccgaagagagcaaacctctaggcttgtcctcatcctggcgagaggagcgccactggcatgcgtggacccagaggccacaagagaaaactgaatgaggaagatgctgccagtgagtccagtggagaatccagcaacgatgatggaggagggcaggcagttcggaagcagatgagaacatacagaaacacattattttacagaaataagtgtttgtaagaagttttactataggaaagtctacttttttaagcgacaaagtgttatgaggagttggtgtgctatgccaaagagctcagcagggcctcccgtggcgagagtggatgtgtgatgtctggtcatgtagtgagaggccttggggacttccctttgaatacatcagcatatttagtgtgagggctggggggacccagtgagactcagagagcaatgtagcaaaaacctggcatcttgggcttttttttctgctgacactatgagaactttgaaggtatttttccattgaaatggcagtgtacatacatgtgtataggacaccaagactcacaggcaggcctgggagccccagccaccctt

SEQ ID NO: 2581 - DNA, 1911 bp, Cricetulus griseus
cctgggccgcgagaccctgagggactttttcaggcggcctgagaaagtccgggcgcccagggcatcccgaggtcaccccgcccggcgccatgtcctggatgttcaagagggatcctgtttggaagtatttgcagtctgtccaatatggagcccatggaaattttccaagactttcatatccaactttctttccacgttttgagttccaagacgttatccctccagatgacttcctaactagtgatgaagagctggatcccattttatttggaactttgagaggtcaagttgttggactgcgctattacacaggagtagtaaataataatgaaatggtttctttacaacgagagcctaataatccatatgataagaatgcaattagagtaaataatgtgaatggagatcaggttggccatttaaagagagatcttgcagctgccttggcctatatcatggacaacaaaattggcacaagtggaaggggtagttccttatggtgcaatctagtttctgccctaaaagaagaaaaattagccgttcagtacattgaaagcagtgattcagaggaaatggaaactagtgaaccgccacagacaatgaaaggcaagctgaaaaatgcacagtcagatactaaaagtagagtaaaaggatcatctaaggttaaagaagatacagaatttgcccgtgcacttacttcatctgcctctgcaacaaagaagaaaatgttgaaaaagggggcatctgtgatggaggtctcaaagaaatgtgacactggagagaggacaagaacaacactgatcatctgtccactctctgtgctgagcaattggattgaccaatttggacagtgttttgtaaaccttgtatctgccaggtcattcagagtgaacagccacatgctaaatgccctttatgcagaaacagtatacatggagtataatttattagaatgccctccagaagaattggcatgtgacggtgagaaaaaatccaaaatggaatggacatccagttcaaagattaatgctctaatgcatgctttgattgaattacggacagagaaccccaacataaagagtttagttgtttctcagtttaccacattcctgtctttaatagaaacaccacttaaagactcgggatttgtgtttactcgtttagatggttccatggctcaaaagaaaagagttgagtcaattcaaagttttcaaaacacagaagcaggatctcccactgtaatgctactgtccttaaaagcaggtggagttggcttgaatctttgtgcagcttctcgggtgttcttaatggatccagcctggaatcctgctgcagaagatcagtgctttgacagatgtcatagacttggccagaagcaagaggttgtcatcacaaaattcattgtaaaggattctgtcgaagaaaatatgttgaaaatacaaaaacacaaaaagagaacttgcagctggagcttttggaactaaaaaaacagatgctaatgaaatgaaacaagctaaaatcaatgaaatcagaactttaattgatttataatttgtgggattttgtaaggtcagttcaagcagatacctaagtttatacacatgaaaaatacagatttaagaatgagatctagaaaatactctatttggcatatttatattaataaagtgatataactgatacatctcttctacatatgaatcttattttattttagtgaagtggtactacattcattatttaaatgcagtggtggaagcataaggtgtaaatagtctgtaggggtgagggaacctgttctaccaagatatataaaccactggaatgaaaaattttatgctatgctgtcttattacttagaaatatattgaaaatactgtatttctaattgtgtttcaaactggatttttc

SEQ ID NO: 2582 - DNA, 1911 bp, Cricetulus griseus
gattgatttcatgtcagagattcttaagcagaaggacacagaaccaaccaactttaaagtggctgctggcaccttggatgccagcaccaagatctatgctgtccgtgtggatgctgtccatgccgatgtatacagagttcttggagggctgggcaaagatccaccatctcaagaagaagcagagagccttggtacagatggaagtgctgttgaaccaggaacaaccaaaaaggctgcaaagccaaagaagaagacgtcctgcaaaaccattgagcagaatctaagcaacatcaatgtctctgaagcagatcggaagtgtgaggtggatcccatgtttcagaagactgcagcctcatttgatgagtgcagcacagccggggtatttctctccacccttcactgccaggactatagaagcgagctgcttttcccttctgacatgcagactctctcctcggaagaacctctcgaattgccagacttaggttgtgtagacatgacagatttaaaagcacccttgcagcagtgtgtggaagaccgccagctctgcccttctctggccgggttccagtttactaaatgggacagtgaaacacataacgagtctgtctcagccctgatggacaagtttaagaagaatgatgaggtatttgacatcaatgctgaggttgaagatgatgatgaggatgtccctgatgggcccctgatggatgactttgatgacaatgatgagccagaccctcctgcagctggggatcatgaagagttggggagctggaaggagctctgccaggtccagagcagccaggaagaaattgtttccctcagggacagagacatccaaaccatgtgctcctttttatccatgaaacctggagaatactcctatttcagtccccggaccatgaagatgtgggctggcccagatcactggttctttcggcctcgacccaagcaagatactgcctcccacgtggagaacaaaaagaagagttcaaagaaagactttgaaattaattttgatgatgatattgattttgatgcatattttcggaaaacaaaggctgccaccactctgaccaagttcactttggagaaccagaattggaaagtcaccactcttcccacagatttccactatgaaacagatgctctcgtccagctccacctcaaaccaggcataaggttacttaagatgggccaggaccagaaggcaaagactgagcactatgaggaaattgaagactatgattacaacaatcctaatgatacctccaacttttgtcctggacttcaggctgctgacagtgatgatgaagagtcagacttattttcgggaccaattgggacctttgacctcgattctgatccaaagacagcacaggagaatggtcaaacatcttctgaaaaccaaggagtagacatcacaacttacagagagtcgaacttggtggctgagcctcagaaggtgaataaaatagaaattcattatgccaagactgccaaaaagatggacatgaagaagctgaagcagaacatgtggagtctgctgacagagttttctagacaggagactgacacagaggtaaaccacagtgtcaatggaaaagaaggggcccctgagcaagtggctgatgagaagatgctcagtgggctcacgaaggacctgcagaagaggctgcccccgctcatggctcagaacctctccatacccctggcttttgcctgtctcctgcatttagccaatgaaaagaatctgaagctagaaggcacagaggatctttctgatgttcttgtgatgcaaggagactgaggccactcgagatggctgcagtgggagacccacagtgttccagcggcggcggagagatgctggttgtggtgtggctctggccaactgccacagtgctg

SEQ ID NO: 2583 - DNA, 1910 bp, Cricetulus griseus
tcatctgtcacagttacctggagagactcctgaatgtcgaagtgcctcagaaagttggtctggagcaggagcccattgaggaggctgaatctgaggaggcagcagaggagacagaggtctccaagaacagtggctgtacctcaaagcgccacagtgccaccaagattgtgattagtacgcctaccttgaaagccctgtggccagtggccaggcagcatccattgaagagcagcaagaagccaagcctgaccaaacagatggacacagaaaagcacctcagagtgtcagaaggaaacgcagctacaagcaggcaatgagtgaaccggatgaggagcagccagaggatgaggagcttcaacccccccagaacaagaccccttccccaccctgtccagccaacaaggtggtacgacccctccggactttcttgcacacagtgcagaagaaccagatgctcatgacccctactttggcttcccgtagcagtgtcatgaagtccttcattaaacgtaacactcccctccgtgtggaccctaaggagaaggagcgccagcgcctggagaacctgcggcggaaggaggaggctgagcagctgcgcagacagaaagtggaggaggacaagcggcggcgtctggaggaggtgaagctgaagcgtgaagagcgcctccgcaaagtgatgcaggcccgtgagcgggtggagcagatgaaggaggaaaagaagaagcagattgagcagaagtttgctcagattgaggagaagacagagaaggctaaggaggagcggctggcagagaaggccaagaggaaggcagctgccaagaggatggaggaagtagaggcacgcaggaagcaggaggaggaggcgcgcaggctcaagttgctccaacaggaggaagaggcgcggcgccatcaggagacgctgcagcggaagaaggaggaggaactggagcggcacagggcagctgaggccaggcggctggcagaacagcgtgagcaggagcggcagctggctgagcaagagcggcggaaggagcaggagcggagcaagagcggcggaaggagcaggagcgtcttcaggcccagagggagatgcaggagagagagaaagctctgcggctacagaaggaacaacttcagagggaactggaggagaagaaaagaaggaagagcagcagcgcttggctgagcagcgactgcaggaagagcaggcgaagaaagccaaggaggcagcagcagccagcaaggtcttgaacgtgactgtggatgtgcagtctcctgtttgtacctcatatcaaatgactccacaaggacccagatcccaccccaagatcagcacagataactatgggatggacctaaacagtgatgactccacagatgatgaggctcatcccaggaaacccattccttcctgggccagaggtacccagctcagccaggccatcatccaccagtactaccaacccccgaaccttgcagagctcttcggaaccattctcccactggacttggaggacatctttaagaagagcaaaccccgctaccacaagcgcactagctctgctgcttggaactcaccgcctctaaaagccagtagggtccccagcagcctggcctatagcctgaagaagccctgaggcaggtcctcagtcctcctggcaggactgggcctatgtgtgtctgtctgtctgtctgtctgtctgtttctgtgttgggctggtgctcttctgtctgatatgccattgctcaggtggatatcaatatcctctgcttgtcaggtgctgccagccctgtttggaggatgggcttggtgggtggctatcgaaagaactagggtcacattgattggtctgtaggtagtactctgtaaataaattgttacagttcagttgaatacttttagtttctag

SEQ ID NO: 2584 - DNA, 1910 bp, Cricetulus griseus
  modified_base (1873)..(1873): a, c, t, g, unknown or other
cttgcttatccctccttccagtgactgaggcctcagaatgcagtcggctaatgttaccagatgatactccaaaccacactaactcctccaaggaggtcccttctctgttttgaggagccttcaggtgaacgtgggcccagacggagaagagacaagggctcagactgtacagaagtccccagagtttctgtccactccagagtcgcctagcttgttgcaagatctacagccaagtgatagcacttcttttattctccttaacctaacaagagcaggtctgggctcttcagctgagcacttcgtgtttgtgcaggatgagacagaggattcaggcaatgacttcctctctggtgagagcacagacagcagcattccatggttcctccgggtccaggaattggcccatgacagtttgattgctgctactcgtgcacagctggcaaagaatgcaaaaaccagcatcaatggagaaaatgtccaccttggttctggcgatgggcaacccaaagattctgggccccttcctcaagtggaaaagaagctcaagtgtacagttgaaggctgtgaccggacatttgtgtggccagctcatttcaagtaccaccttaaaactcatcgaaacgagcgctccttcatgtgccccgcagaaggctgtgggaaaagcttttatgtgctgcagaggctaaaggtgcacatgaggacacacaacggggagaagccgttcatgtgccatgaatctgggtgtggcaagcagttcaccacagctgggaacctgaagaaccaccgtcgcacacacacaggagagaagcctttcatttgtgaagcccagggatgtggccgatcctttgctgagtattcaagcctccggaaacacctggtagttcactcaggagagaaacctcatcagtgccaagtctgtggcaagaccttttctcagagtgggagcagaaatgttcacatgagaaagcatcacttgcagctgggagcatctgggagtcaagaacaggaacaacctgctgagccactaatgggcagtagtttgcttgaagaagcttcagtacccagtaaaaacctggtgtctatgaatccccagtccagccttggtggagagtccttgaatctaccaaataccaattctattcttggagttgatgatgaggtgctcactgaaggatcctcacgccctctgtcttcagtaactgatgtgacacatcatttggtgaccatgcagtcggggaggcagtcctatgaagtttctgtcttaactgcggtaaatccacaggagttactaaaccaaggagatttaactgaaagacagacatgagtttgctggctcctggaggaggggatctgtctgaccccagagtgcatgatgggaacagatctaaaggctcacattctgccagaactaaaatgaatgtgtgaaggacaaagacctcgcctcgcctgtgttgtctgaaggcttcggttcaacctccatctgatccagaaaaagaatgaggcagtgactatgggctggatacctgtagctgcttcactttctactgcgaagttttggggtagacttctctcaaaagcaagtttaatgatgtgttggatgaagattttcattgtgactgttcaggttttccttcgaagagttttcatgctagacccagctatctttccatattgtttaatcatgtcctgcttccaaccaggacattgaattttcaagatgccttgttgctttgaagaagggagtgatgccaattatgttgtgacattcttcctttagcaacctgagtaaaagactctcagccattgggctagtaaaaataaaattacttgaatcctccccttcggcccaggctgaggtaacaaaaaaaaaaanaaaaaaaaaaaaaaaaaaaaaaaaaaaaaaaaaaaaa

SEQ ID NO: 2585 - DNA, 1910 bp, Cricetulus griseus
  modified_base (1903)..(1903): a, c, t, g, unknown or other
gtgaaacaagtagaatttcaagtttgccaccaatgaagctattcaaaggacagaggcttatgagtatgctcagtctcttggggtgcacacctgctcgttacctaacttccaggtgtttaaattcatctacttgtgccgcctggctgaaatgggactagccacacaggccttccactactgtgaggtgatagccaagagtgtcctgacacaacctggtgcatactctccagtgttgattagccagctgactcagatggcttcccagttacgcctctttgatcctcaactgaaggagaagccagaggaggagtcctttgtggagcctgcctggttggtgcagctgcgacacgtggagaggcagatccaggagggcactgtgctgtggaatcctgatggagctgacccccagcagtgtcacatcacatcaggctctgaggtagagcacttggatggcccaggactcagccagcaggcagggctgagggccgacaatcctctactgatgccaagcactgagcccttgatgcacggcgtgcagctactgcccacagctccgcagacattccctgatggccagccagctcacctcgccagggtgccgatgttcccagtgccaatatcccggggtcccatagagctgggtactacctatggacccccagggtccacacttggcttcccagagtcctccagatctgatcctgcagtgttgcaccctgggtcagccctgccacccactacaccatgtctccaggaaagtgggcctccactccaggaggccagaagcccagacccagaaatggtgccacgggactcacctgtcagacacttaccttcagagctcaatgaagaggagtttggtggaaacttggctgacctgggttcctccagaacagcacaggacttggagacctccccagcgtgggatcgtggcagctccagtctgacacctgctctgtctctgacacctgccttccgaagggaagaaagctgcacaagctgtctagaaaagcaggtggggtccagagctcgctatgtggatgttctaaacccaactgggacacagcggagtgagccagctcttgctccttcggatttctttgctccactagccccgctcccatcccttctaacttgttcataccaaacccagatcagatggggctcagtctaaggtagagcccaccctggaacccaagatgataagctctacagcattacctcctggacctgaactcttaccctccaagctagatggctcccagggaggagaggctcctggagatcactgtcctgcaggggccactccaggcgggtctgtgcccttttacaaccctgctcagttggtgcaggcttctgtcacctcggggaattcaaggccagggaggattggccaaagaaaatacacagcattgaactaggattgccgctggatttgtagttggaaccctgagatgactagataactgttctccaccaagaaccgaactagctgcctcaagtctcgtgggtcccagatggacatggcagtaacccagagccggtcatactgtgtgtctccctccttgcagcccatgtatatgaattactgaaaaattgattccatggttcctttcagatgctggatagaatgaatctaaattcaaagtcttttatgtaaaagaacaatgtttctttcttagtcactttagacaaattaaggcctgtccctgtgggtcagtagcaacttatgtccttgctgggaccaggcaggacctttgcctctggtgcaaccctgcccaggctctgtgttgactgccaaccacttttgattcaagaagcttcctccctgggagctgctatttttcctaaattcaaattgttaaataaaatattttgggctctcaagtaacttaaaaaaaanaaaaaaa

SEQ ID NO: 2586 - DNA, 1910 bp, Cricetulus griseus
gatgtcttccgccaggcaatgaaatcccccagtgtggtcctccatgtgcttctgcctcaaaaccgtgagcagtatgaaaaagcagtcattggaccactgaacatctttggcaacagtgatggggcttcaagaacaaaggttccacctcctacccgtgggaaaccaggattaaaggcagtaactctgacaggaacaaacagtcctgaagcagatgagtcaacttccccgcagcaaagcaaaagcccccgagttccaagaataggaagaaaagcttcatctccctcactctaatgattccggctcagctggcctcggggttagcttgaaagggaacaaatccagagaaactggaactgacttggggatttttatcaaatctatcatccacggaggtgctgcttttaaggatggccgtctgagaatgaatgaccaactgattgctgttaatggggaaactcttctgggcaagtccaaccatgaagccatggaaacactgaggagatcgatgtccatggaaggaaacatccggggcatgatccagctggtgataattaggaggctggagagaccactggaggagcttacagagtgtggggcactttccagaccatgttttgaaaactgtcaagaagctctgagcccctccaggcgaaatgatagtagtgcgtcatatccatttggcacttacagtccacaagataaaaggaaagacctattgcttcccaatgatgggtgggccgagagtgaagtatcgccatccccaccaccgcatcctggtctggaatgggcccttgaagattacagccacagctctggggtggattccacagtatattttccagatcaacatgtcaatttcaaatctgtgataccagccatgcaacctgaatcaattaacctgaaaatctccaagagcatggaccttgtgccagatgaaagcaaagctcggtcattggctgatcgcagattggactctccaagcaatgattttggtccgacgttgggtctgaaaaagtccagttccttagagagcctgcagactgctgtggctgaagtcaggaagagtgatctgcccttccacaggcccagaccacacatggtgcgaggccggggctgcaacgaaagcttcagagctgccattgacaaatcttacgatgggccagaagaagtagaagctgacggtctctctgataagagctctcattctggccacggagctctgaattgtgagtctatccctcacccccacccaccacacacacacacacacacacacacacacacacacacacacacacacatgaaagtgtgtgtgtgtgtgtgtgtgtgtgtgtgtgtgagctaaatctatcttgtgaaggaaatcttcctgcaactttagaatcagagagctggttcctctgttccctagtccacagagggaccaagactataaagagtaattacttttcccctcactgaaaatcaacagcatttggctttgtttgcttgctgcttagtgtttgagcaatgttactgggctgcaggcctgtggaaggaatggaaaagtggttgataaaggaatatttctctgtaaaattcccatctgcattaaactctgagatccattgtgagtttgagcccatctcttgatcttcagaaactgttccgttccatctgcaatgctatttactactggaatataaaacaaaacctgttgtttataccctcactttctctagtctttcctgttcttttatgattaccaagtcatctgttcttacattctaaagataaattatgtgaaatcatattttgtcatatggggatggagagtgaattctttacaaactttttaatatgatcccatttatatcactgaagacattttggatgttattgtatatgagtatataaattttcatgtttta

SEQ ID NO: 2587 - DNA, 1910 bp, Cricetulus griseus
gaggaagagcgtcttcgaggcgagcgggaacatcagcgtgtgacccggctgtgccagcaggctgaagctcgggtccaggccctgcaaaagaccctccgacgggccattggcaagagccgaccctactttgagctcaaggcccagttcagccaaatcttggaggagcacaaggccaaggtgacagaactggagcagcaggtggcacaggccaagacccgctactcagtagctctgcgtaacctggaacagatcagcgagcagattcatgcccggcgccggggcttgcctcctcatcctctgggctcgcggcgatcttcccctgtgggggctgaagctgggcctgaaggcattgaggatggggacagtgggatcgaaggggcagagggtgggggcctggaggagggcagcagccttgggcctggtccaggcccagatacggacacgctgagcctattaagccttcgcaccgtggcctctgacctgcagaagtgtgactcagtggagcacctgcgtggcctctcggaccatgccagtctggatggccaagagctgggaccccagagccggggacgccggggaagtgagctggcttgacttcttacttatgggcaatcagggccccacaggcctttttctcctcgagtcctgtctgccccagatttggtctgcagccttccctgggcaaggtcagctgtgtctcagtcctgtctccctagctttctcacagtcccttctttcaggaggcagctctctctttgccttacccacacccagaaggcttgcgctctggccctgtctccttgtcccctcctggcacttgagtctctctgatgctctctgattttcctcttctgacctgacttctatctgtctggcttttcccctcagggaacttggtctagaagacacagaaaggtcacatgagaacacatgtcctagcccaagtggttggacaggtcctcacctgttgactactggtactgtcttcccagaaggcagctcccagggtgccctgggtatgctgctgagtcccggcagcctgtgctcttgtcctgtcctagcttgcctgtgagcaatgtgtaaaatgtccatgtgcctctggaagacaccaccttctgtcagtgcaccccttgtgaccttagctgctgttctgtgtccataattcagtgtcaggtgggggagccaaaccctgttatcaatgcggcgattaggaccaactccaaatggcccctgtctgtgtggtttgtcttcagttgggctgggcccttatcattgccaaggtgctagtagctccctgatggggtctatgctggaggatagagacatgagattctcaaggctgagaccgtgccaaccccacctgcccccttgtgtggctctgggcttggttttttttggtggaggttgaactggagcttggcaccctcctccagggtggcattagggaacttggtgctcaattgctctctatcgctcttcctcacaccagatagtacctactccaggaacctctgggaagcgctttaagcatggctgcaaagcctcccttttgtgggaggagttgacctgaagtgaggggtcccagcctcaaagatcacctctgggtgctggtgctcctgggttgtatgaagggaaaccacagcagatcttggtgccttggaggagctgctgacctcctgccccaccaggaggatggggagagtgctcacccaggggtgggagaagagggcccatgtctcaaatgggatctcccaattttcaggtttgaggatggtcacaatgagaacctgtggggtttgaggtggctgttcagaaagaagagaaatgaggacacgagtgtgtgagtgcatgtgctggtgtgtgggaaagggtcagtcctggtttatttaaataaaatagtttatgtaaca

SEQ ID NO: 2588 - DNA, 1910 bp, Cricetulus griseus
ctcgggtctccgggcacttcgagctgggttgcaggatcgttccgccgtcgccaccgccgctgcactgggagctggcagggatggagcgggaggcgtcgtcgtggggcctcgagcccggggatgtgcacggtcctgacggaatgggcagccccgaagggtctctcaaagttgaaccacaaagccctgggtttgaatcccagagtcccaggtttgagcctgaaagcccagggtttgaatctcgaagccctgggtttgtgcccccaagccctgagtttgcacccagaagtcctgaatcagacccacagagtcccgagtttgtatcccagagtcctaggtatgggccccagagccctggctatgaccccaagagtccaggctatgaacccggcagccctaggtttgaacccaaaagccctggatatggttcgaagatcccagaatttgaatctcaaagtcccgggtatgaatcccagagtcctgaggatgcaccacagaactctggagatgaagctcagaatcctgagttcaaaacccatagccctgaatttgaaactcaaagttccaaattccaggaaggcgcagagatgcttgtgaaccctgaggaaaagaatccactgagtatccccttaggagttcatcccctggactcctttactcaggggtttggggagcaacccacaggagcactgcctccatttgatatgcctacaggggccctgctggccacaccccagtttgagatgctccagaaccccctgaatctgacagggacccttccgtggtccaggccgtaggggtgggccgggccaggggtgggcaaggcccccggcctaacatctgcggcatctgcgggaagagctttgggcgaggctctaccctgatccagcaccagcgcatcccataccggtgagaagccttacaaatgtgaggtgtgcagcaaggcgttttcccagagctctgacctcatcaaacaccagcgtacccataccggcgagcggccctacaagtgtccccaggtcgtggcaaggccttcgctgatagctcttacctacttcgacaccagcgtacccactctggccaagaagcccctacaagtgcccacattgtgggaaggcctttggcgacagctcctacctcctcccggcaccagcgcacccatagccacgagcggccctacagctgcccagagtgtggcaagtgctatagccagaactcgtctctgcgcagccaccagagagtgcacactgggcagcggcctttcagctgcggcatctgtggcaagagcttctcccaacggtcagcactcatcccccatgcccgcagccatgcccgtgaaaagcccttcaagtgcccggaatgcggcaagcgctttggccagagctcggttctagccatccatgcccgcacccatctgccaggccgcacttacagctgccccgactgtggcaagaccttcaaccgctcctccacactcattcagcaccagcgctcccacacaggcgagaggccataccgctgcgccgtgtgtggcaagggcttctgtcgctcctccacgctgctgcagcaccatcgcgtgcatagtggggagcgaccttataagtgtgatgactgtggaaaggccttctcacagagctccgacctcatccgccaccagcggacccatgcagccgggcgccgctgacgagtcaagggtggggaggtgatgggcagaagaggaggagtcagggaaggaaaagctggaggagaatagaaggatggaatattctagaagatgggtcagggtgcaggaagtcacatgccctcaagaagtatgagaagtgggctacgaagaggggttgcagggaggctaagcaggcaacaggaagcaaataaaccctttatgtgcaaaacaaaaaaaaaaaaaaaaaaaa

SEQ ID NO: 2589 - DNA, 1909 bp, Cricetulus griseus
caggcgactggttctcctttgatctcttctgttcccgctggtcccagatttggctgtttggaattgcctttttctgtcttctgtgacagttccaattttagataatgcctcccatctctgctccccggggacctcctggagcccccatgatccggaagaagacagcttgaacacagaaatcccttcactcttttcctagccctcaagtcaggatgttgcggaggctgctggagaggccctgcacattggccctgcttgtgggctcccaactggcagttatgatgtacctttcactagggggcttccgaagccttagtgccctgtttggtcgagatcagggcccaacatttgattactctcatcctcgtgatgtctatagtaacctcagtcacctgcctggggctccggttgctgccggggcttctccagctgaagctctacccttttgtccagagcgatctcctttcctagtgggtcctgtgtcggtatcatttagcccagtgccatcactagcagagattgtggagcggaatccccgggtggaaccagggggccggtaccgtcctgcaggatgtgaggcccgctcccgaactgccataattgtgccccatcgtgcccgcgagcatcacctgcgcctgctgctctatcacctgcatcccttcctgcagcgccagcagcttgcatatggcatctatgtcatccaccaggctggaaatggaatgtttaacagggcaaagctcctgaatgttggggtgcgggaagccctgcgagatgaagaatgggactgcttgttcttacatgatgtggacctccttccagaaaatgatcataacctgtatgtgtgtgacccccggggaccccgccatgttgctgttgctatgaacaagtttggatacagcctcccatacccccagtactttggtggggtttcagcgctcactcctgaccaatacctgaagatgaatggcttccccaatgaatactggggctggggcggtgaggatgatgacatcgctaccagggtccgcctggctgggatgaagatctctcgaccacccacctctgtgggacactataagatggtgaagcacagaggggacaaaggcaatgaggaaaatccccacagatttgacctcctggtccgtacccagaattcttggacacaagatggaatgaactcactgacataccagttgctggctaaagagctgggtcctctgtataccaacatcactgcagacattgggactgatcctcggggtcctcgggctccctctggtccccgatacccaccaggttcctcccaggccttccgacaagagatgttacaacgccggccccccgctaggcctggtcctctgcctactgccaaccacacagctccccatggttcacactgattcttctttgcccactttagtcatgaaactaaatcagaggggtcgtatcccccacacctgctcctcactgctttcagaggggtgtgagggatctcaattctagtgctgtgctgggggcagggacctctcctcactgctagacaggagctgggctcctccagacctggaggttcctctttctagggggtcacctctcagggcttatgactgtgaatccttgatgtcattttatgcgacaaatcctggtaatcccctgcccccagggtaggagcagggctggaccctaagccccttcctcgtctgtgaacatcactcttttccaagagtgacctggcttctcctgggacctctgtgaatatttattctatttatggttcccaagaagctgtctggtggaggaagcctctaccagggcatttcctgccagtgctggagtagcttcctttggtcttgggtccgagggggcgggggctgggattttgaatatcttttactaataaaggactttg

SEQ ID NO: 2590 - DNA, 1909 bp, Cricetulus griseus
catgtacgggctgcaccagggtgtgcatcacttcaacgccttcgacaaggtgcagagcctcccgctgctgctcagccaggctggagtgcgcacaggcattatcggaaagaagcacgtgggtccagagaccgtgtacccctttgactttgcgttcacagaggagaacagctctgtgctgcaggtgggacggaacatcactaggattaaggaactagtccggaaatttctgcagactcaggatgacaggcctttcttcctttacgtggctttccatgacccccaccgctgtgggcactcccagccccagtatggaaccttttgtgagaagtttggcaatggagagagtggcatggggcgcattccagactggacaccccagacctacgaccctcaggatgtgatggtgccgtactttgtcccagacacaccggcagcccgagcagacctcgccgcccagtacacaaccatcggccggatggaccaaggggtagggctggtgctccaggagctgcaaagtgccggtgtactgagtgataccctcatcattttcacatccgacaacgggatccccttccccagcggcaggaccaacctgtactggcctggtacagcagaacccttgttggtgtcatccccagagcacccacaacgttggggccaggtcagcgaggcctacgtgagccttctagacctcaccccaaccatcctggactggttctccatttcatatcccagctatgccatctttggctcaaagactatccagctcacaggccgatccctgctgccagcgctggaggcagagcccctgtgggccactgtcttcggcagccagagccaccacgaggtcaccatgtcctaccccatgcgctccgtctaccaccacaacttccgtctcattcacaatctcagcttcaagatgcctttccccatcgaccaagacttctatgtgtcgccgaccttccaggacctcctgaacagaaccacagccggccagcccacgggctggtacaaggatctccaccattactactaccgggaacgctgggaactctacgatgtcagccgggaccctcgagagacacagaacctggccacggatccactattctcacaagtactggaggcgctgaaagcccagctggccaagtggcagtgggaaacacatgacccctgggtgtgcgcccctgacggggtcctggaggaaaagctcagcccgcagtgccgaccccttcacaatgagctctgacagtccctggggcacctgccagccttcctctactcagacacacaaagggagagaaaaacaacagccccaccctccgcacacccgcccgaggagagcccctctgtagtgcgggatgccactcctgcctctggggaggacactcaggcatgcactccccatgttgtcctccatcagtccaggccatactgtgtgattgtggtgttgttcatttacaccttgactgctgtgagcacatgccggtcaaacccaggccaggaaggaagcaggcttgtttgctgacaacactgacagcagagtggaggtcacagtccccagccaggtctgggcctcagcaggggctctcttctgtccataccactttcttctgctcatctgcaatggccaggcgcacgcgagctgagcagactgtccgggtcactccagctgtcagaggctaggctgctgtacagacagggcactctgtccagttccccctcctcctgccgggccgcctcaaggaactgctcctccgatgtgccgagccgctgcaggcccttcctgcaaagcagagactgtcagccctaggacagcactggaagccaggagagaacacagtggggctttccatacagagcactgtagggggccaggccagactttgtagagaggactcagcatgca

SEQ ID NO: 2591 - DNA, 1909 bp, Cricetulus griseus
  modified_base (1902)..(1902): a, c, t, g, unknown or other
gttaaaacagatgaacaagaagtaatcaactttttattgacaacagagataatccctttgtgtttgcgcattatggaatctggaagtgaactttctaaaacggttgccacattcatcctccagaagatcctcttagatgacactggtttggcttatatatgtcagacgtatgaacgtttttcccatgttgccatgatcttgggtaaaatggtcctgcagctatccaaagaaccatctgcccgtctattgaagcatgtagtaagatgttaccttcgactctcagataatcccagggcacgtgaagcactcagacagtgccttcctgaccagctgaaggacacaacctttgcccaggtgctaaaagatgacaccaccacgaaacgctggcttgcacaactggtgaagaacctgcaagagggccaggtcaccgatccccggggaattcccttgccccctcagtgatcctccctattccctcccactactcccataagttggggagtagggttggaacctctgaggaaaacagctcaggttttattgccgactgggaatagacaacctcaatgctgaaccgcactggagaaaaggggcaaggtatcccgctgaggtgtgtggactgactggaggtcccggatacagcagtctgccgccaccagccccacggagggtgtcaacaccagcaaatgctgtaatttgcagcatgcccaagatgaccctgctcctgaacttctacctagccactggtagagaggagacatggtaatagcagcaacactctaggcatggtgagcgcctgggaccaagccatgtggcttccctccttttttttttaaactttgccttcctggaagactcaagatgtgtgtctcttctctctctcttggtatttgtttactttgggtttttgtttttaatctcaagagagagctgtgtttaatggacacaagctgtagttttcagcaaaactgtcaattggcactgtttacaagtctgttagctgcataagctcaataaaaagttggtctgggcattgcatccactctggcagaccgatagctgcatcaggctattggatggaatgggaggcaggggaagaggaaagtcaaaggacaagcaggaactcttccacctgttgccctctgctaccgttctttcatttccaagcctggctgccatgaggatcttaatgtgggtctagctttggctactagctttttcaaatttcagtgctttccccttcttttaaccacttaagcagatgtcttaatttacccaacttccctgaaagagtattatactgggtcaggagggatggaagtcttcattgttagttggcttctgtctctagagccaagaaagtagtaattaagtaacctagatttaggaaggatagaataagcacttaattccttgccttccaatttgaaaaggagaacctgggctcaggcctgaagaggaaaggtcttagagaaaatagaagacagcatcaacttgatagctattttgactcactccagtttgtgacctgaaaaatttaactagggtaccctgatatttgaaattcgccttcctactgagccaaagtttctcattcctccccactgggggagcagctgaggcctggggccttgctccctgggacattccatcttttggtgcattggccatgttattgtgccaatcatgtcttaatttgtgtcccatttatcctcagatggccttggaacctgcataggatttggacggggaggggtgcaatgggtcttattccctgtggttggtcctgatgtatgtatgttatatagagacccttccccttattatgtgttttccgcccctctccctcaacaggattaaaataaaacatgctctagcttttaaaaaaaaaaaaaaaaaaanaaaaaaa

SEQ ID NO: 2592 - DNA, 1909 bp, Cricetulus griseus
tgcgagggtcgcggctctgtgaggtcagccggcgctggcaaatcgcgcccaggatgtagagctggctgttcccgacggcgtttctgacgctaagttgggtggggtagagagtagggggcggtagtcgggggtggtgggagaaggaggaggcggcgaatcacttataaatggcgcccaagcaggacccgaagcccaaattccaggagggtgagagagtgctgtgctttcatgggcctcttctctatgaagcaaagtgtgtaaaggttgccataaaggacaaacaagtgaaatactttatccattacagtggttggaataaaaaaagtgctgtgaggcccaggcgctctgaaaaatctttgaagacacgtgaggatattgtagccctttttcctgttcctgaaggagctccctcagtacaccaccccctcctgacctctagttgggatgaatgggttccagaaagccgagtcctcaaatatgtggacaccaatttgcagaaacagcgagagcttcaaaaggccaatcaggaacagtatgcagagggcaagatgagaggggctgctccgggaaagaagacatctggtctgcaacagaaaaatgttgaagtgaaaacaaaaaagaccaagcagaaaacacccggaaatggagatggtggcagtaccagtgagacacctcagcctcctaggaagaaaagagcccgggtagatccaactgttgaaaatgaagaaacattcatgaacagagttgaagttaaagtaaagatcccggaagagctgaaaccatggcttgtggatgactgggacttgatcaccagacaaaaacagcttttttatcttcctgccaagaagaatgtggattccattttggaggattatgcaaactataagaaatctcgaggaaatacagataataaggagtatgctgttaatgaggttgtggcagggataaaggagtacttcaatgtaatgctgggcactcagctactctacaaatttgagagaccacagtatgctgagattcttgcagatcaccctgatgcacccatgtcccaggtgtatggagcaccacatttactgagattatttgtgcgaattggagcgatgttggcctatacacctctagatgagaaaagccttgctttattactgaactatctacatgatttcctcaagtacctggcgaagaattctgcaactttgttcagtgccagtgattatgaagtggctcctcctgagtaccatcggaaagccgtgtgaggggcgtgctcacgctctctcactcgtgcttggatctctgtaaacagtttgattcttagtccttctcttgtacaaatgctgtactttgaagaccattagtgtataacaattgatgtttgttttctgtttgatttaaacagagaaaataaaaggagtcagtgctccttttcttctttcttttcatttcaaagtttctaccagtgtattcagtgatggacaacagagagacatgctgtagagtgttttattgcctagttgacaaagctgcttttgaatgctggtggttctgttcctttgacactacgcacttttataatatgtgttaatgctctatgacaaaatgctctgattcctagtgccaaaggttcacttcagtgtatataactgaacactcatccatctgtgctctttttttttttttaatggtgcttaaagagcccatcctttgcaagtcatccatgttgttccttaggtattttatctttgcttaattgttaaaaaatggtggcttgtttcatggtttttgtatttgtgtctaatgcacgttttaacattatagacgcaatgcatcgtgtagctacagttttatggaaaagtcaatcttgtaggagttgtttttcagatcttcaataaattttttctttaaatttcaa

SEQ ID NO: 2593 - DNA, 1909 bp, Cricetulus griseus
gtggaagacctgagtcctgaccacccagttgttttggagaatcatgtcgtgacagatgatgatgaacctgctttgaagcgccagcgactagagatcaattgccaggatccctctataaagtctttcctgtactctattaaccagacgatatgtttgcggttggatagcatcgaggccaagctgcaagctctcgaggctacttgcaaatctctggaagagaagctagacctggtcaccaacaaacagcacagtcctatccaggtccccatggtggctggttccccacttggtgccacccagacctgcaacaaagtgcgatgcgtcgtcccccagactacagtaatactcaacaatgatcggcagaacgccattgtagccaagatggaagacccattgagcaacagggcaccggattccctggaaaatatcattagcaacgctgttcctgggcgtcggcagaacaccatcgtggtgaaggtaccaggtcaggatgacagccacaatgaagatggggagagcgggtcagaggccagtgactccgtgtctaactgcggccaaccaggaagccagaacattggaagcaacgtcacactcatcaccctgaactctgaagaggactatcccaatggcacctggctgggtgatgagaataaccctgagatgcgggtacgctgtgccatcatcccttctgacatgctgcacatcagcactaactgtcgaacagctgagaagatggcactgacgctgctggactacctgttccaccgagaggtgcaggctgtgtccaacttgtcgggccagggcaagcatgggaagaagcagttggaccccctcactatctatggcatccgatgtcacctcttctataaatttggaatcacggaatctgactggtatcgcatcaagcagagtattgactccaagtgccgtactgcatggcggcggaagcagcgaggccagagcctggcagtcaagagcttctcccggaggacaccgtcctcatcctcatatagtgcctcagagaccatgatgggtacccctccacccaccagtgagctacaacaatcacagccacaggccctacactacgcattggccaacgcacagcaagtgcagatccaccagattggagaggatggacaggtgcaagtaggccacctccacattgcccaggtgcctcaaggggaacaggtgcagatcacacaggacagtgagggcaatctgcagatccatcatgttggccaggatggacagtcgtggggcctgtgccagaatcccattcctgtcagcggtgactcagtggcccaggctaatccctcccagctttggcctctgggaggagacacacttgatctgcctgctggaaatgagatgatccaggtactgcagggtgctcagctcatagccgtggcctcttcagaccctgctgctactggagtagatgggtcgcctctccagggcagtgacattcaggttcagtacgtccagctggcgcctgtgagcgaccacacagctacagcacagacggctgaggcattgcagcccactctgcagcccgaaatgcagcttgaacatggagccatccagatccagtgagaccaggcattgtaggagaaccacaccacagctgctcactgacactgccctatgtcctgctctcctgcttcagcagggcaactgtggattctgcagggcacgtgagagttcctcctcttgggaaaggtcctggccacccctgctggaaggcacctcaggactgagtcctactgctggtctccagaggagaagcatagtgcagagcgtgttgagtacattcagaaaaacaagaactacaatattttgtttaaacagctttttttaatttgctatggtgtttataacaaaaaagaaaatggaaaaaaaaaaaaaa

SEQ ID NO: 2594 - DNA, 1909 bp, Cricetulus griseus
ccaccagccagtcagcccacccctagtccccacttggtgccttcacctgccccatcgccagggcctggcccagtaccttcaaggcctccgacagcagagccaccaccgtgtttgcgccgaggcgctgcagctgcagacctgctgtcttctagccctgagagccagcatggaggtcctcagcctcctgggggtggggcagcccctgctgcagcctaccaaggtagatgcagctgagggccggtcggccaccaggccctgcggctgattgagcaagacccctatgaacgtcctgagaggctgcagcagttgcagcaggagctggagaacctttcggggaacagctggggagaggcaggggcgactggataccgtctggagagagctgcaagaggcacaggaacatgatgcccgaggccggtccattgccattgcccgctgctactcactcaagaaccggcaccaggatgtcatgccctatgacagcaaccgtgtggtgttgcgctcgggcaaagatgactacatcaatgctagctgtgtggaggggctctcgccgtactgtccacccttagtggccacccaggccccactgcctggcacagctgctgatttctggctcatggtgcacgaacagaaagtgtccgtcattgtcatgttggtgtctgaggctgaaatggaaaagcaaaaggtggcgcgctacttccccactgagaggggccagcccatggtgcatggagccctgagtgtggcactaagcagtgttcgcaccaccgaaacacacgtggagcgagtgctgagcctgcagttccgagatcagagcctcaagcggtctcttgtgcacctccacttccctacttggcctgagttgggcctgccggacagccctggcaacctgctgcgcttcatccaggaggtgcacgcacattacctgcaccagcggcctctgcacacgcctgttgtcgtacattgcagctccggagtgggccgcacaggagcctttgcactgctgtacgcagcggtgcaggaggtagaggctgggaatgggattccggagctgcctcagctggtgaggcggatgaggcagcagagaaaacacatgctgcaggaaaaactgcacctcaggttctgccatgaggcgctggtgaggcacgtggagcaggttctgcagcgccatggtgtgccccctccaggcaagcccgtggccagcatgagcatcagtcagaagaatcacctgcctcaggactcacaggatctggtcctcggtggagatgtacccatcagttccatccaggctaccattgctaagctcagcatccggcccctaggtggcttggattccccagctgccagccttcctggccttgtagagcccccaggtcttccaccagccagccttccaccagagcctacccctcttccatcctcctctcctccccctctctcttcacctctgcctgaagccccacagccagaggaggagccaccagtgcctgaagcccccagcttagggccccctcctcatccctggagctgttggcctctctgactccagaggcattttcactggacagctctttgcggggaaagcagcggatgagcaagcagaactttctccaggcccataatggacagggcctgagggctgccccgcctacagatgaccccctgagcctcctggatccactctggacacttaacaagacctgagtgggctttgcctaccgggtccttacactacatctcccatccccgctgccttcagctctgccagatggagttgtactgcaggcctcaggtcaggctctgctcctttgtggcacctgatagttttcagctctgggtcactgaaataataaacctagtctgtggaccaaaaaaaaaaaaaaaaaaaaaaaaaaaaaaaaaaaaaaaa

SEQ ID NO: 2595 - DNA, 1909 bp, Cricetulus griseus
ctcggtgggcgagttgaagaatttctcagcaaagatatcagttatcttgtttcaaataaaaaggaagcaaagtatgcacaaacactgggtcaagtttctcctgtaccaagtccagagtctgcatatactgcagaaaccacctcacctcatcccagccatgatggaagttcctttaagtctccagacagagtatgtttgagccgagggaagttattagctgaaaaagctgtcaaggatcatgattttattcctgctaatagtatattatcaaatgccttaacatggggagtaaagattcttcatattgatgacattagatactacattgaacagaagaagaaagagttatgttcactcaagaaatcaagtacttctgtgagggattcgggaaaaaaagctggcactacaatacaaaaggcgagaacagggagactcaaaaagccttttttaaaggttgaagatgtgaaccggtcttacaggccattctaccttcagctaaccagtgtgccttctataaactatgctacgcacaagccttgcagcccatttgacatagagaagccatccagcgtccaaaagcaagctcagcctaaacccagacctaatacggatggtgataaatgtggtggaaccccagttcaactccaattgaaggaaaagagaaaaaaaggatattgtgaatgttgcttacagaaatacgaagatcttgaaactcaccttttgagtgagaaacacaaaaacttcgcacagagtaaccagtatcaagttgttgatgatattgtatctaagttagtttttgattttgtggaatatgagagagacacacctaaaaagaaaagaataaaatacagcgttggctccttttcttctgtttctgcaaatgtcctgaaaaacactgaaccaaaggagaagctacagttggagcccattttccagaaggacatggtagaaagtaatggacaactgcctgaggagatttttcagtgtgaagatatccagaaacctgaacaaaggcttgtgttggcttcagaacccatgtcctactcttcaacgggattgaaaggacgtgatgagaaagcagccagcatgttaaatgccagtgaacctgacataaaacagaagtttacacagctacctcgtcatgtgtacaagtttctcatctcagtccagaaaatagtctaccccaaccaaaattaacagcagatactacacatttttcagcaaaagatttacaagaaaaggaccttcattttgtgtttggtcatgattctgatctggtgacattaaatacatcaaaagaacagctaacagtgaaggccggaacgccatcctgtggtcctcagcagcccaatgagtgtgacacggagaatacagataacttgccttgtggtaagatccagcggaaagtgagactgttattagggcagaagaaaaaaatgtggacccaagtgctgaattggataaaaaaagaactgagtttcttcctatgtgtgaagacagaacttgtgggtcaccagtacagtctctactggacctttttcaaacaagcggggagaaatcagattttttggggtttaccagctacactgaaaacagtgggctatgtgatgttttagatgtttgggaggatgaaaattcaagtagtctgctctcaacatttttctcttccccttcagcttctacattcattggattttagtatttaatgtgtttttcagaagtgacagttttattcttggaatttttataaatacatatataattcttaggagtctgctttttggtttggtttgttctttgccagctttgttgctagaaccatatgtaaatactaagatgatgtttataattttttacagaattgagtagctgttacaaattatacaataaaatcttgtgatttatttta

SEQ ID NO: 2596 - DNA, 1909 bp, Cricetulus griseus
gataccatttcctccccgggcccgcagcaaggagcgccgaaacccagttcctgggccaaactccgtgttacgacctttgcctcccaggccaggtcccccggatgaaaggctcaagaaagtggagctgggtcggggtcggacctcaggctctcgtcctagaggcccccttcgagcagatcatggggtccccttgcctggctcaccacccccaactgtggctctgcctctcccatcccggaccaacttagcccgttccaagtctgtgagcagccgggacgttgcgtccaatggggattgccttgggaggggcgaccgtgggcactggcgagctaggggccgcactgagccgcttggcactccgacctgagccacccactttgagacgcagcacttctctccggcgtcttgggggcttccctggcccccctaccctgctcagcatacggaccgagccccctgcttcccatggctcctaccacgtgttacctgcccggccctctgagccattctactctgatgacaagatggctcgtcacacactgctcctgggctctggtcatgttggcctccgaaatctgggaaatacatgtttcctcaacgccgtgctacagtgtttgagcagcactaggcctctccgagacttttgtcttcgaagggacttccggcaagaggtgcctggaggaggccgagcccaggagctcacggaagcctttgcggatgtgattggtgccctctggcaccctgactcctgtgaagctgtgaatcctactcggttccgggctgtcttccagaaatacgtcccctccttctctggatacagccagcaggatgcccaagagtttctgaagctactcatggaaaggttacaccttgaaatcaaccgacgaggccgccgggcaccaccaatcctggccagtggcccggttccctctccacctcgccgaggaggggctctgcatgaagaacctgaattgagtgatgacgatcgagccaacttaatgtggaagcgttacctggagcgagaagacagcaagattgtggacctatttgtgggccagttgaaaagctgcctcaagtgccaggcctgtgggtatcgctccacgaccttcgaggttttttgtgacctgtccctgcccatccccaagaaaggatttgctgggggcaaagtgtctctgcgggattgtttcagccttttcaccaaggaagaagagctggagtcagaaaatgccccagtgtgtgaccgatgccggcagaaaacacgaagtaccaaaaagctgacagtacaaagattcccccgaatcctcgtgctccatctgaatcgattttccacctcccgaggctccatcaagaaaagttcagtaggtgttgacttcccattgcagcgactgagcctaggggactttgccagtgacaaagccggaagccctgtctaccagctgtatgccctctgcaaccactcgggtagtgtccactatggacactacacagccctgtgccggtgccagactggttggcatgtctacaacgactcccgtgtctcccctgtcagtgaaaatcaggtggcatccagtgagggctacgtgctgttctaccaactgatgcaggagccacctcggtgcctgtgacaccaccttgaagccctggcacctgtgaaaaccttttcaacaccctcaagcccccagctccccatttacctcagagacgtctatttttgtgtctttaatctaataggggaggggggttggttgtagctcccattattttttttattaagaagcacccttccaccttgtttcctgtcccttgtacagagctcaccaggcccttgaccatgtacagcccccagaacctctgcaatctcactttttttgtgaataaatttattaagaaaaaaaaaaaaaaaaaaaaa

SEQ ID NO: 2597 - DNA, 1909 bp, Cricetulus griseus
ggaaggatagaggaccccgggaagggcggggctggacatgaggaggcggctgcgcttttgccgggatgcgtggctcacgctgctgctcagcgccgccctcggcctcctgctctacgcgcagcgtgacggggcagcccccacgaccagaaccaccaccagcgcgaggacagtccccccgcggcccacttctggtctccggggacgcgggctccccaacaacgcccgcgcggccccgccggcctatgagggcgacaccccagtgccgcccacacctacgggcccctttgacttcggcagatatctgcgcgccaaggatcaacggcgcttcccgctgctcattaaccaaccgcgtaaatgccgcagagacggcgcatctggcggcccgccggatctgctcatcgcggtcaagtctgtggcctccgacttcgagcggcgggaagccgtacgtcagacttggggcgccgagggtcgcgttcagggagcactcgtgcgccgagtgttcttgctgggcgtgcccaggggcatcgactctggcagggcaggcacgcggacgcactggcgcgctctgctggaagctgagagccgtgcttatgcagacatcctgctctgggctttcgaagacaccttcttcaatctaacgctcaaggagattcactttttggcttgggcctcagctttctgtccagatgtacgctttgtttttaagggcgatgccgatgtgttcgtccatgtgaggaacctgctgcagttcctggagccgcgggatccggcacaggaccttcttgcaggtgatgtgattgtgcaggcaaggccaattcgctcaagagccagcaagtattttattcccgaggctgtgtatggactgccggtttacccggcctatgcagggggtgggggctttgttctttccggagccacgctccgccgcctagcagaggcttgctcacaggttgagctctttcccatagacgacgtctttctggggcatgtgtttgcagcgcctgcggcttacacctgagcctcatccagcgtttcgcacctttggcatcgcccagccttcagctgcaccgcatcttcgcacctttgacccctgtttctaccgagaactggtggtagtgcatgggctgtctgcagctgacatctggcttatgtggcgcttgctgcacgggcctcggggcccagtgtgtgcacatccacaacctgtagcaacaggtccgtttcaatggaacgcttaactacatatcacagtatcaagcctctctcactcagctccagaagagaacattaaagagcacaaaagggtttcccatgtgggataatggtgtacacggctttccttcagatcactcacacacaactatgtcaatgtacttatgaagctgacccatcccttcccaggagtcctaagattcctctactataatatttcccatattcttcaatcacagcttcaagaaaaccaacagttcacattttcgtacaaacaccccagcagcagcacatggcaagctgtcactgagggcataggtgctttattggaaagggatgaggaagtttcctctgttcaagaggatgggaacagtcctggctaccctgacagtgggatgtgcagggtctctggccagaccaaggtccaaatgggaagacacctgtcaatcagagtcatggaagtgccacacaggcctggctgtaggcccaggaaccatacagacagctggggcaggatcccctgcacattcatcatgaactatacaagatgaggctgtacatgagttaattaacaaaagtcattatttacaaaaatctgtacacacatttgaaaaactcaacaaaattgtcatctatgtatcacaagttgctagaaccaaaataataaaaatggaataaaattaaaaaaaaaaaaaaaaaa

SEQ ID NO: 2598 - DNA, 1909 bp, Cricetulus griseus
agatgatcgcaggggactggcgcccgtctagtatcgccgacctggttttcacctactgagcccaccgtcagcggggcgcgcacgcccccaaaccagctgtttacatacaggaatcaggtattggggcccctcggaggccgaggctggcaccccatctcccgcgcagcctcccccctcctagttgtgcccatccccccccgcagatccagacataacccctcccccgcagacacaccccaaggcagcccaacccccactttctccctgacatcaaagccctccccatccagtcttgtcccgcgtagccaccagcagccagcccccctcggaaacacctcccgtttccccgacatacctgaacccctcccccccactttgcacacgcccctcctcgtggccgggcggcacgccccttcgctccagaatccctccgcccttgcccgggcctgccttggttaagggggcgctgcggtctggcgctccgccgctcctcccagtcccctcctctcctggaggggggaggaaggaagggcctccctcccttccccacaagatcgagagccccacacctcagcttcaaccgttcaaccgtcctcttcttgcgcatgcttgatgcttcttggagggggctggtcccagttgagctgcaggcctctgtcgctaacttcgaaagggagggggctaatatagagtgatcctaagaaatcctttgatcccggagcccgtggcttcctctcgacccaacggggcgtgactgccttaatgggaggcgcactcaaagggagagatagaaactagctagccctaaactctgcaagtgtcaaccccttttctatgatggggtcacccacgcccaccaccaccctccaccgcgtgactgcctttacagcccatcttggttgccggaaacttcctttccccgagtgggaatttggtctttgtctggaaatccaagatgggattgtccaagagaactcagaaccaagacacctactagtctggggacggagttcctgctgcccctcaatccccctcctcgggaagcgccctatcagctcagggcatcctctctgcctgggctcctccctaagtccatcgccccttcctatcactcagatccagtctcaacaatcacagctgcagtattcagtgggagaacctgaagcacgtcgttgctagggtttaggacaggcataccagcagacaggggtggcaggaatgaggcccacgtctaaacagtggcttgaggagagaccaggccagagcgactggggacagagctgagctagtggacatggttgctttgcgtctcggtcttcccttgtgagaaataggggtggcactgctgcagttaggaggaagctgtgttgagattaggttgccaactctgctccactggtctcccgctctagccccgcccctccggcctccccatccccctctgccttcactacctgtatctcaccggcgtgtgctcaccttctgggtggcgcacacacactcattcacacacacacaaatctcaggaacaaacggtcccagagtcctcctcgacccctgtcctgggtctccgcaggtctctgccccacgcgttcccttcgctgacaaagccaccagctgcctccttaaagcttggtgctccggctctgggcctttcttgcgctctttctctctttctctttcccttttgttgttttttttttttctttttttcttttttaagtaaactaaaactaacaaaaagacaatgaaaaaaaaccggaaaacgtcatgtgagtagaagagatgtcactgtctgtggtctttggagaactagtctcgtagctgagaggagggatcctcctctggggcactggcacccacagcaggacttgccagtctgatgccaggactgaataaagtgtatttg

SEQ ID NO: 2599 - DNA, 1908 bp, Cricetulus griseus
  modified_base (437)..(437): a, c, t, g, unknown or other
  modified_base (531)..(531): a, c, t, g, unknown or other
tcaagagactagtggagagccgcagacagcaaatcctaaaggagttgaagagctccacaggaggctggatgaggaacagcagactctcctttccagactggaagaagaagagcaggacattctacagaggcttcgagaaaatgctgctcaccttggggccaagcgccgagatctggcccacttagctgctgaagtggagggcaagtgcttacagtcaggcttcgagatgcttaaggatgtgaaaagtaccctggaaaaatgtgacaaggtgaagaccatggaggtgacaacagtatctatagagctggaaaagaacttcagtaatttcccccggcagtactttgccctcaggaaaatcctcaaacagctaattgcggatgtgaccctggaccctgagacggctcatcctaaccttgtcctgtcagcgtttcactttntacccttgtgtcttggctactgaaggcttcacctcaggtcgacactactgggaggtggaggtgggagacaagacccactgggcatgggagtatnccgggactctgtgagcagaaaggcgaattgactccactccctgagactggctactggagagtacggctgtggaatggggacaagtatgcagccaccaccacacctttcactcctttgcacatcaaggtgaaacctaagagggtgggcatattcctagactatgaggccggcacattgtctttttacaacgtcacggaccgctcacatatctataccttcactgacacttttactgaaaaactttggcccctcttctacccagggatccgggctggccggaagaatgctgcaccacttactatcaggcccccaacagattgggagtgacaagacatggagcctaagtttgggggtgaggcagggtgaagcttggtgtcaacgtggttccagtcctcagccatcttgagaaaccacctggtctctgggatgcattgtgtgaacgagtagagacaggactgggctgcctgacagcacagatgagtgtccctacttaactgtagtgggagagtgagccccaggggattgtaatctctgaagtccagcaggtttcctactgcacaatgactgattgtaaagaaaaggcctctctagaaatagaaagtcgacatgaaagagtcttaacttgcttaaagtgcaggagacagaaacctttaagaggcttctgtgactcaagggtagccttgtccttgagggagcacatagggatttgtgtacctctgtgttggaaagatgagtggctgctgctgttatgattgtagaattgagaggcttttctgagggcagagattgggcattcagttcaggagtaggatcagggaagaggtttcccaagggaacttggggtaagagtcagctattggaggaaagagaatggtgtgtccaaaagccctggccttaaagatgttaaaagtagttattcccaagttgtctgccatgacccctggcttaggtgtttaagcgagaaaggaagaaaggtcatggagtttttctcgccccgtgagaacagggtagaagagggtagtttttgtagcaaaaggcccagagagacagcttcattcgcctctattaccatcctttgacattccccttttcagagaatgtaaatcattttaagttaggccaaaataaacaacccatagggtacatatgttgtcacaaaaggtgatgagatgcatgccaaaaccaaacaacctggattacctgctgcttgggtaacaagactgagacgagaaactgcatcgagggcatttccgttctcccacctcaaacaggacattgtccactctcttcttaccttttgtgccttgactgtggttctttgtggcaagatatattttgaccaaccaaaaatatggaacaaaaggatccactgatgtg

SEQ ID NO: 2600 - DNA, 1908 bp, Cricetulus griseus
gcttcgtggcccgcgcgcgcgcttctctccggcgcgggcaccggcgcgggccatggcttcatcctctctgttatccgcgttggctgtgcggttgctgcgccccgcgcccggctgccacccgcgcctgcagcccttccacctggcggcagtgcgaaatgaagctgtcgtcatttctggaaggaaactggctcagcagatcaagcaagaagtgcggcaggaggtggaagagtgggtggcctcaggcaacaagcggccacacctcagtgtcattctggttggtgacaatcctgccagtcactcctatgtgctcaacaaaaccagggcagcagctgaagtgggaatcaacagcgagacaattgtgaaaccagcctcaatttcagaggaagagctgttgagttcaatcaggaaactgaacaatgatgaaaacgtagatggcctccttgttcagctgccactcccagagcacatcgatgagaggaagatctgcaatgccgtttctcctgacaaggatgttgacggctttcacgtcattaacgtagggcgaatgtgcttggaccagtattccatgctaccggcgaccccgtggggcgtgtgggagataattaagcgaacaggcatcccaaccttagggaagaacgtggttgtagccggcaggtcaaaaaatgttggaatgccaattgcaatgttgctgcacaccgatggagcacacgagcggcctggaggtgatgccacagttacgatatctcaccgatacactcccaaagagcagctgaagaagcacacgatccttgcggacattgtaatatcagctgccggcattccaaatctgatcacagctgacatgatcaaggaaggggcagctgtcatcgatgtgggcataaacagaattcaagatccagtcactgcaaagcccaagttggttggagatgtagattttgaaggagtcaagaagaaagccggttacatcactcctgtccctgggggtgtcggccccatgacagtggccatgctaatgaagaataccattattgctgcaaagaaagtgctgaggcctgaagagctggaggtgctgaagtccaagcagcgtggagttgccaccaactagctgtactccataccagtctgagaggcaaagtgggccaagaggaatgcagtatttttaatttattctattgaaatggtttaaaatgatgttgtatttattgaaagcttcaacgggtggatgtgtgtgcgcatggctctgcagaacctcaccagggtgcccatcagtgtcctgccactgacctggtgacgcatgggagacatcctcacactgagaacggatgctgaacttcatcaaaaaaacctgcctttttaggctctcatttcccaagtgctattccaatacgagttgatgactcatctgaggtgccaagccttctgagttcagctttcaaaccaaaggaaaacttactagagcaaaataggggaaaggaagaaacggcagcacctagctgtccctgcctgcggctgagtcactggggaaggtttaggatttccccacttgctgttacccttctgtgagcttgccctattccagttttctagaatcaaaaagatcattttataaatgatgtgtgtcattgtcacgttcggcttttgcggcacatttcaactttaaatttccaactgttagagtgtgtgtgtctgttttctttggcataagctttgaggcctattttttgaaaaacaaaacttgtcgtgataatcatgagggcagattgggtgaaacttacttgccaccaaagaactcacggcggctgcctgcctgcgtgtctttcacgtaccctgttggctttcctaaaaggtactgaggagcttgagttaatataagattaaacagattttcttattaaagggttttgttgc

SEQ ID NO: 2601 - DNA, 1908 bp, Cricetulus griseus
gcccgccgcgcgcgcgcgcgcgcaccgaggcttcgaggccgagaaggcccgctgggaggccgagcgcgccgagctgcaggctcaggtggcaagaagacatggaaccctaagtttaccctccgctcacactacgatggcatccgctccctggccttccaccacagccagtcagcactgctcactgcctctgaggatggcacacttaagctgtggaaccttcagaaggcagttacagccaagaaaaacgctgcactggacgtggagcccattcatgctttccgcgctcacaggggccctgtgctggccgtcaccatgggcagcaacagcgagtactgttacagtgctggagctgatggccgtatccacagctggaagatccctgacctcaacatggacccgtacgatggctacgacccaagcgtgctgagtcacgtcctggaaggccatggggatgctgtgtggggtctggctttcagccccatctcccagcgactagcatcctgctccgctgatggcaccgttcgcatttgggaccccagcagcagtggtccaagctgcctctgtaccttccccatgtctggagaacacggaatccccacctcagtggccttcaccagcaccgagcctgcccatgtcgtggcctcctttcgttctggtgacactgttctttatgacttggaagctggcagtgccctcctcacattggagtcccgagggagcagcggcccaacacagatcaaccaggtggtgagtcaccccaatcagcccctcagcatcacagcgcacgacgacaggggcatccgattcctggacaatcggacaggtaaatccgtgcactctatggttgcccacctggacgcagttacctgcctagctgtggatcccaatggcgtgttcttgatgtcaggaagccatgactgttctctgcgcttatggagcctagacaataagacgtgtgtgcaggagatcacggcccaccgcaagaagcacgaggaggccatccatgcagtggcctgccatcccagcaaggcacttattgccagtgctggtgctgatgctctagccaaggtcttcgtatgatcccacctggcctcgccctggctacacagtggcagagagcggggccaggccagtggggctgaggcagcccccggcctccctcgagagtctcagagtctcggcctctttcatcttcctggagcctggtggtgctaatggccctttccccaggaatcccccctcaaggatggcctctggactttctgctcatgccccagccctaagtcctgatacagctgtcctccagagttgggcatagccagggctgggtgtccttggggatctgtttttttccaagacagtagacggtgccaggctccgctctagagtgccacccctccctcacccgtcagatgaagggctgcgctgagaggggtctcctgtggccctcttgtgtgggccccccacggctgtcctctgggacctcagtcccttcctcctgctttccaacactaaccaagccctctgaggccagggcctccctggggagagcctccacacatctgggggccctctcccagccacaggccctccttgagatggagagggtggcgtgggccctgggcccctagctcattgtctatctgtataaatgaatgggattttcatggcgccaacccacccaccccgcgttatcactgtgtgatagtctgtcagtctcctcccagctccacactccgcctctatttatttcactctttattatttgggttctacttttgtgcccttggttcccccttcaggttcctgtttataagccccatcccttttgcccccaacttgtacgtgaaaaaattgtctcaataaaccccttgaaagtaagaaaaaaaaaaaaaaaaaaaaaaaaaa

SEQ ID NO: 2602 - DNA, 1907 bp, Cricetulus griseus
atgtcaatccggctacttttctagcatgttcagtggtcttggaaagaatccagcatgaatattattgaactggagattcctgaccagaacattgatatagaagcactgcaggttgcatttggatcactgtatcgagatgacgtcttaataaaacccagccgtgttgtcgccattttggctgcagcgtgtatgctgcagttggatggtttaatacagcagtgtggtgagacaatgaaggaaacaattaatgtgaaaactgtgtgtggctattacacatcagcagggacctatggattagactctgtaaagaaaaagtgcctcgagtggctgctgaacaacctgatgactcaccagagtgtggagcttttctaaagaactcagtataaacgtcatgaaacagctcattggttcatctaacttatttgtgatgcaagtggagatggatgtatatacagctcttaaaagtgggtgttccttcagctggctccttcctggaatggatctttgaagcagcttttgacagagacagatgtctggttctcaaagtggaaaaaagactttgaagggacgactttccttgaaactgaacagggaaaaccgtttgcgcccgtgttcagacatttaaggctacagtacattatcagtgatctggcttctgcaaggatcattgagcaagattctctgtctgtcagcttacagcctcgaaggagcatagcatttagattgcgattggcttcttttgatagtagtggaaaactcatatgcagtagagcaactggctaccaaatactgacacttgaaaaagaccaggagcaagtggtgatgaacttggacagcaggcttctggtcttccctttgtatatctgctgtaacttcttgtacatatcaccagaaaaaagaccgaaagtcatcgtcaccagaaaacccaggaaactgaggcactcgtcagtggtgaaaaagtatctgtcaaaccatgtatgttaaaaggatatcaactcttattttaacttagtagcagtagaaaattgctgtgggtaaatttctcatttctttgcaacaaaatatagatttaattttgagcttgaattttgatcctacctagtgttagtgaacttcactttttcatctgtaaatttgttcctattttgttaagagaatgctaagggcatagtttgaatggccaattataaatgctctttagttggtgcctttaaagctgtccttttttttcagtcgctcgttagtcttatgtttagtctgataccttcccagttttttaatctaaatttaagcatttttcatatttttaaactttaactttcctataattttaattgatgacaacaacaacaatcagctttaggacttgaaataaacttgaataagggaaatcggttggattctgaggatattccttcgccttatgtgtgtggtcttgtctgacactctgtgttctctgttatgaattatttatgtacaatgccacattttcaaacatttcctgttctctgattgttggaatttatgttcaaattttagttgggaatcttgtttcctacttgagctcaggactttgtaacctctgaactgagtgcctttgagtcacacacgcaaacagatttcgtggtgaatgtacaggaggagctgggaacgaagcgttcgtgtgaaaacaacttattttgtcaagaatgagatgtatgcatgtcatggtttgtatacattggtttcttgtgtttattgctattttaaaaattgccactctcattttcctccagtcagagtaagtgcttttgtggttgatgtatgtttttagtatttttttaaattggaatcatttttatgtatctgttcaaataataaagtgctcatttaggaaaaggaaaaaaaaaaaaagagaaaaaaaaaaa

SEQ ID NO: 2603 - DNA, 1907 bp, Cricetulus griseus
gcaggattcgagccgtctcactgaccacaggccgtgtcgtgtcaccggttctgcaggcaccatgagccaggacaccgaagtggacatgaaggaggtggagctgaacgaactagaaccggagaagcagcctatgaatgcggcggccggggcggcggccggggagaagaacggtctggtgaagatcaaggtggccgaagacgaggcggaggcggaggccggggccaagttcacgggcttgtccaaggaggagctgttgaaggtagccggcagccccggctgggtgcgcacccgctgggcgctgctgctgctcttctggctcggctggcttggcatgctggcgggcgccgtggtcatcatcgtccgggctccgcgctgccgtgagctgccggtacagaggtggtggcacgagggcgccctctatcgcgtcggcgaccttcaggccttcgtaggtccgaacgcgggaggcatagctggtctgaaaaagcatctggagtacttgagcaccctgaaggtgaagggcctggtgttgggcccaattcacaagaaccagaaggatgacgtcaatggaaccgacttgaaacagattgaccccagtttaggctcccaggaagattttaaagaccttctgcaatctgccaagaaaaagagcattcacatcattttggacctcactcccaactaccggggccagagtgcatggttcctccctgctcaagctgactgggtggccaccaagatgaaggaagctctgagttcttggttgcaggaaggtgtggatgggttccaatttcgggatgtggaaaagctgatggatgcatccttgtacttggctgagtggcagaatatcaccaagaacttcagtgaggataggctcttgattgcagggactgactcctccgacctgcagcaaattgtgaccatactcgaatccaccagcgacctgctgttgaccagctcctatctatcaaattccagttttactggggagcatacaaaattgctagtcactcggtatttgaatgccactggcagtcactggtgcagctggagtgtgtctcaggcagggctcctgacagcctccgtcccagctcagctcctccgactctaccagctgatgctcttcactctgccagggacccctgttttcagctatggggatgagatcggcttgcaggaagctgtcgttcctggacagcctgtggaggccccattcatgccatgggatgaatccagcctcccccaaactccgggacacataagcacgaacatgacagtgaagggccagaatgaagaccctggctccctccttacccagttccggtggctgagtgaccttcggggtaaggaacgctctctgttgcacggtgacttccgtgcactgacctcctcacctggcatcttctcctacgtccgctactgggaccagaatgagcgttacctggtggtgctcaactttcaggacgtgggcctgtcagccaggctagaggccgccaacctccctgctggtataagtctgccagccagcgctaacctattgtttagcaccaacagtacccggctaggccaagagcagggtacttctctgagtctggaaaacttgtacctgaatcctcatgagggcttgctgttacatttcccatatgtggcttgaccctacctgtctaagacctaccaccctcctctcttttcccctggccttttgaattatttttttctctccttttgtgtttctctttttttttttttttatttttttttttttggtttttcgagacagcgtttctctgtattgttttggaggctgtcctggaactctgtagaccaggctggccttgaactcaaagagatccacctgcctctgcctcctgagtgctgggattaaagacgtgcgccaccaatgcccggcc

SEQ ID NO: 2604 - DNA, 1907 bp, Cricetulus griseus
  modified_base (145)..(145): a, c, t, g, unknown or other
caacatcatgtagcactgataggaatgaaggacttatggcattagaatactcaagatggggaagagtctgaatttgaaggtggaaaagcaactgtgaattgcagtaccacaccgattgctgagagatttttcaccagctctaccnctttgactctgaagcatgctgcgtggtatccaagttgagatgctggatccccatatagtgctgttgacgtcagacaatgtgataagaatttactctctccgtgagcctcagacacccactaaggtgattgtactttcagaagcagaagaagaaagcttaatactcaataaaggaagggcatatacagcatctctaggagagactgcagttgcatttgactttgggccacttgcaacagtctcaaggaatatatttggacaaaaaggcaaagaagaggtagtggcgtatccactgtacatcttatatgagaatggggagaccttcctgacctatgttagtctgttacacagccctgggaatattgggaagctgttgggaccattgcctatgcaccctgcagctgaagataactacggttacgatgcctgtgctgtactctgtttgccctgtgttcccaatatcttagtaattgcgactgagtcaggaatgctgtatcactgtgttgtactagagggtgaagaagaagatgatcaaacatcagaaaagtcctgggatcccagagttgacctcatcccttctctgtatgtgtttgagtgtgttgaattagagcttgccttgaaactggcatctggagaggatgatccctttgcttctgacttttcctgtccaattaagctgcacaaagatcccaagtgtccttcaagataccactgtacccatgaagctggtgtgcacagtgttgggctgacttggattcataaacttcacaagtttcttggatcagatgaagaagataaggatagtttacaggaacttgctgcagagcagaaatgctttgtagagcacattctgtgtacaaaaccactgccatgcaggcagccagctccaattcgaggattctggattgtaccggacatcctggggcctacgatgatctgtatcaccagtacctatgaatgtctcataaggcctttattaagtacagtccacccagcatctcctcccctgctgtgtacccgagaagatgctgaagtggcagagtctccactgcgtatcctggctgaaaccccagactcctttgagaagcatattaaaaccatcttgcaacgtagtgctgccaacccagcatttcttaaaatcgtctgaaaaggatttggctccccctcccgaggaatgtcttcagcttatcagcagagccacccaggtgtttcgagaacagtacattctcaagcaggactttgccaaggaagaaattcagcggagggtcaaattattatgtgaccaaaagaggaaacaactagaagacctcaattactgtcgagaagagaggcaggaaaagtctacgggaaatggctgagcgcttagctgacaagtatgaggaagccaaagaaaagcaagaagatattatgaacaggatgaaaaaagtgcttcacagttttcatactcagctcccagttctctctgacagtgagagagacatgaagaaagagttacagctgatacctgatcaactacgacatctaggcaatgccatcaaacaggttactatgaaaaaggattatcaacagcgaaagatggaaaaagtgctgagtcctcagaaacctaccatttctctcagcgcctaccagcgaaaatgcattcagtccatcctgaaggaagagggtgaacacataagggaaatggtgaagcaaatcaatgatatccgaaatcatgtcaacttctgacaccacctgaagttaacacaactgaaggcttacaaaca

SEQ ID NO: 2605 - DNA, 1907 bp, Cricetulus griseus
actgcctacagagcaggtcctgccagcctcgctggagaggatgcccccgtgtccgtgatgggctgtgggacaagcaaggtccttcctgagccacccaaggatgtccagctggatctggtcaagaaagtggagccctttagcggcgctaagaatgatgtatacaaacacttcatcacagaggtggacagtgtcggccctctcaaagctgggtttccagctactagtcaatatgcacctccctacccctggtgttcccactactggccacacagagcctccttcagaaccaccacgcagggccagggtggccaaatacagggccaaatttgacccacgtgtgacagctaagtatgatatcaaggccctgattggccgaggcagctttagccgagtggtacgagtggagcatcgggcaacccgacagccatatgctatcaagatgattgagaccaagtaccgagaagggcgggaagtgtgtgaccctagccaagagcagtctttcttcatggtgccaccaggaaccccttctagcccccagaattgccaggacctcttgtggtaggactgtggcaggaccttatctttagactccagcctctctatgagagagatcctgcctgtcggcctctgtacctttgcagagctgagtattgtctccctcttcctacttggatgtccatttcattccccagctgcctccttcccaactgtgaggggttaaagggagatccactgctgctacctgggggatggatgttcctgaaaagggttctcctcagaattccatttgtcaaccttcgttttatctttgggtattgccctttgctggttcctttctaaagctgccatgccctctttacagctccacaatggcaccatctagtgtctggtctgggtataggtggccgggggaggggtggtgactggtgcacacccttgcaacccacaaccgtcgaaaaggaagaggaaagaaaggagttgctgaactgggggagagtcctgggctgctcaactccccttctgctcagcttcttcaaacctcaccctggaacttagccgtactgtgttacctgcctctgaaccccgggtgccttgggtgctgaccttgctgtaagagctggccttgccctatctgccctgtgtccacttcttttcatagcattaactttccaggttggccccactgagtcaggctgggtaggtagggtaggtgttgcaggggctgctttcccagagaactgagccacagcagttcctatagttgtcatggtttccctaccaccacattaggctggaatccaagctccctccctctgtagctgctctctgtgggtaggaaggggtcagacagagccttgctttagccttagctagactaagcaagcctctgtcagcaggaagtctgattcccacttagctcctttcagtaggcagccttgggctaggccctctttctacgatgccacctccattgggataccaaagagaccactctgtgccaagtcaactgtgccttctttaccctctccttacatcctcctgcccctgaacaggaggcggtggacctgagcctcacagcctcagaatccttttcccccactagttccccaggaatctctgtgggtgtgaaccactggggatttattttctttcttgcccaaaatatgtctggttgtgaggatagggcagagggagtatgtgccttgggcctttgataggtccaccaggccttcatgccatggaccatggatggagaatgtgtagttatttattttgtgtactctgtaaatgtatcttctgtatccaataaacaggcgcctccccagggaaggctgccatttttttctgaaaaaaaaaaaaaaaaaaaaaaaaaaaaaaaaaaaaaaaaaaaaaaaaaaaaaaaaaaa

SEQ ID NO: 2606 - DNA, 1906 bp, Cricetulus griseus
  modified_base (1881)..(1881): a, c, t, g, unknown or other
agaaggcattacgaccggatatgggctataataccttagccaacttccgaatagaaaagaaaattggtcgtggacaatttagtgaagtttatagagcatcctgtctcttggatggagtaccagtagctttaaaaaaagtgcagatatttgatttaatggatgccaaaagcacgtgctgactgtatcaaagaaatagatctccttaagcaactcaatcacccaaacgttattaaatattatgcatctttcattgaagataatgaactgaacatagttttggaattagcagatgctggtgacctctccagaatgataaagcattttaagaagcaaaagaggctaattcctgaaagaactgtttggaaatacttcgttcagctctgcagtgcgctggatcacatgcattctcgaagagtcatgcatagagatataaaaccagctaatgtgttcattacagccactggggtggtgaaacttggagatcttggacttggtcggtttttcagttcaaaaaccacagctgcacattctttagtgggtacaccttactacatgtctccagagagaatacatgaaaatggatacaacttcaagtctgacatctggtctcttggctgtctgctatatgagatggccgccttgcagagccctttctacggtgacaaaatgaatttatactctctgtgtaagaagatagagcagtgtgactacccgcctctcccgtcagatcactactcagaggagctccgacagttagttaatatatgcatcaacccagacccggagaagcgaccagacatcgcctacgtttatgacgtagcaaagaggatgcatgcatgtaccgcgaacagctaaactgcaaaatcatgaagaaggcaaccaaaataacttaaaaagtatttttgtgcaaatcatacctccctgtttttgtctgggtgttaagattaatatgtcagagttaatgtgctttgaatccttaaccagttttcatataagcttcattttctaccaggctcaatctcctaaatgtgagtcagacactgagttttgtgttttcatgcctttgaaagtcttttttgcatttaaatggtataaatgagtccattttaaaagtggttaaggatttgtttggctggtgtgatagtcatttttaaagttgcacattgcccaaggctttgtgtatttttattgtacatttgaacaatattcttggaataatcgtgcagtaactataattcagtttctttataaatctaaatacatttaactcatgactgtacactgtaatataaacatatgttcttattcatagattgtagtgaagattagatccccttcagaatattttttattcaagttcaagttatttatattgtgtgtgcattttatccattaatgtttcaggttttctgagagcataattcccttttgaaaagatatttggtatgccaacacttttcttagattgaaacttttttttcttttaacttctgggccactcagtgtgtgtgtgtgcgcgtttatcttgttaggagggaagatgtgtattacaatgtgcctatgaatgtcgatagttctgagtcatttgccgacaaagatataattttagaatatgtttaggacatgaagactggcccttgctgcagacagaactgttacgagagtaacatttcagtggagatgctttggagcaaactactggtggtggcacacacctttaatcccagcactctggaggctgagacatggatctctgtgagtctgaggctagcctggtctacatagtgagttccaggacagccagggccacacagagaaatcctgtctcaaaaaacaaaaacaaagaaaactttactaatatgtctcaaaaaaaaaaatggnggggttattggacagggactgctca

SEQ ID NO: 2607 - DNA, 1906 bp, Cricetulus griseus
ccaggggcaagaacaccttccaggaagaggacttccctgccttggttttcctcagcacccaagcccagcaatgccccctccagcctcatctcagcttggaacagcagctgcagcaagaaaggggaacctacctacaccaggggcccaggctgtagttggtggcagccagcctcccggaaggcagggaaggggagcaggggtggccggaagggtggcccagccccagtagatgaggaggagggtggtggcctcactgtgcaggagcttcggagtgtgcccaccacagtggctgtctcttctttgctggcaccagcagccacccagagctccaccaaggttggcaagaagaagaaagtgggctctgagaagactggagccacatcatccccactgttgccccctgatcatatcccaaagccctctggggctgagcaggtccttgaattctcttcaagcaaagctgaagtgccagtaaccatcgtcaatggacattcagaggggccagccctggcacggagcaccccaaaggaacctccagggctcccaaggcccctgggtcccctcccctgtcccataccacaggaagacttcccagcacttggaggcccttgtccacccaggatgcctcctcccccaggctttaacaccgtggtgctcttgaagggcacagcgcctccacccccactcccaccaggcctggtgcctcccatcagcaagccaccccctggcttctccagtttcctgcccagctcccactcaacctgtgtccccagtcccaccaccaccaccaccaccaccaccaccatgaaagcaccccgactaacacccacaccacgagcctacttagttcctgagaacttccgggagaggaacctacagctcattcagtccatcaaggactttctgcagagtgatgaggcctgcttcagcaagtttaagagctattcaggggagttcagacagggaatgatctctgcggctcagtactacaaaagctgccgagacctgctgggggagaacttccagaagatcttcagtgagctgttggcgctcctgccagacacagccaaacagcaggagctgctgtccgcacacactgacttctgcagtcgtgagaagcctcccagctccaagtctaagaagaacaagaagaatgtgtggcagactaacacccaacagttgggcctggactgctctgtgtgccccacctgccagcaggtactggcacaaggtgacatcagcagccaccaggcactgcacgctgcccgggatgaggacttcccctcccttcaagccattgccaggatcattacgtagcttctgctggtgagagcaagagctgtcacaccctagcgcctcttttctccttccttcctcttcccagctgccaggcagctaggttgggccctgggaaggctgaggctcaggcctcctggttggtcaggcctgccaggacgacatcaggaatggtctacctgtgcaccatcgctcatgagttctgtcccctacttggcagagagccagtcttggtttgtattcttgtgattttggaatgtgccaggggaggggagggctaggatgttgggacctaagctagatgtctcagtggcctgaagagagtcctcctgagtcaagcctacagccccagagctgacagcttcgggttcactggtgctggagtcagatgttgtgttgtgtaaacaattggctgtttcagagagaaagtttcagattaaaaagagacacaaaattgtgctacttgaagttcaattctttttatgagacaagttaactcttaaagatctcaaattgcctctgacattttataaaagacagtttatcttcaaataaatttattttgcagtactgcaaaaaaaaaaaaaaaaaaaaaaaaaaaagtaaaaaa

SEQ ID NO: 2608 - DNA, 1906 bp, Cricetulus griseus
ccccgccgcgccgcccgccggcccccgcgaccctgacgtgctgctcttcgccacgccgcaggcgccccggcccgcgcctagtgcaccgcgtcccgctctcggccgcccgccggtgaaacggaggctggatctggaaactgaccatcagtatctggctgggagcagtgggccgttccggggcagaggccgccacccaggcaaaggtgtgaaatctccaggggagaagtcacgatatgagacatcgttaaatctgaccaccaaacgcttcttggagctgctgagccgctcagctgatggggttgttgacctgaactgggcggctgaggtgctcaaagtgcagaaacggcgcatctatgacatcaccaatgtccttgagggcatccagctcattgccaagaagtccaagaatcatatccagtggttaggcagccgcaccatggtggggatcagtaagcggcttgaaggcttgacccgggacctacagcaactgcaggagagcgagcagcacctggaccgcctgatgcacatctgtaccacacagctgcagctgctttctgaggactcagacagccagcgcctggcctatgtgacctgccaggaccttcgtagcatagcggaccctgcagaacagatggtcatagtgatcaaggcccctcctgagacccaactacaagctgtggactctgcggagacatttcagatctctcttaagagcaaacaaggccccatcgatgttttcctgtgtcctgaggagagtgcaggggggatcagccctgggaggaccccatcccaggagacatcctctggggaagacaggaccactgaccctggcactgcagggcctccaccaccacctccctccacatccccaaccttggatcccagccagtccctgctaggcctggagcaagaaccagtattgtcacggatgggccacctgagggcccccatggaagaagaccatctgtcaccgctggtggctgccgactcactcctggagcatgttcgagaagacttctcggggctcctccctggggagttcatcagcctttccccgccccaagaggcccttgactaccactttggccttgaggagggtgaaggcatcagagatctctttgactgtgactttggggacctgacccctctggatttctgacagaagtctagggagccagggtgtctggagatgcccaccctgtctgcagctttggagcctcctgccctgggccatccttcctgcctcattggaaaagcacgacttatactctcttctctgtgcagtggcttctgggtctggggtttggctgctgccagattgagcagagcaaaaggggaaggattttgtgtggggtctgtgtgtgtgtgcgcgcgcatgcgcaaatgtgcaccccatgactgcgcactgtgtagttgggtgtattctgtgtgtgtgtgtgtgtgtgtgtgtgtgtgtgtgtgtgtgtgtgtgtgtgtgtgtgtgtgtgtgtgtgtgtgtatgtgtgtgtgtgtgttgtgtaccggggaatgaaggtgaacacatctgtatgtgtgctgcagacacatcctgctgtgtccacatgtgtgcatgaattcatgtgtgcgcattggggtgggggtggggctctaactgcacttttggtgtccttgctgcagaggccttgtgaggcccagggtggctgcctgctcccagaatcctgtgtgtcagcctggccaggtggggtagcttggctggctgcatttgcagggcagcaatagcactgcttaaaggtttcccgatcgaagctttaatggagcgtttatttatttatcgaggcctctggccagcctggggaataagctaagggttggagtgagattgggctaataccccaacttcctatactctgagcaagggcagggtccc

SEQ ID NO: 2609 - DNA, 1905 bp, Cricetulus griseus
tgtgtccgagatgtggaaaataatcatggtggaagagtttgtggagggagggccattggatctcttcatgcaccggaaaagtgatgtacttacaaccccctggaagttcaaagttgccaaacagctggctagtgccctgagttacttggaagataaagacctggtccatggaaatgtgtgcactaaaaacctcctcttagcccgtgagggcattgacagtgagattggcccattcatcaagcttagtgatcctggcatcccggtctctgtgctgtccaggcaagagtgcatagagcggatcccctggattgctcctgagtgtgttgaagattccaagaacctgagcgtggctgctgacaagtggagctttggaaccacactctgggaaatctgctacaatggcgagatccccctcaaagacaagaccctggtggagaaggagagattttatgaaagccgctgcaggccagtgactccatcttgcaaggagctggctgaccttatgactcgctgcatgaactatgatcccagtcagagacccttcttccgggccatcatgagggacattaacaagctggaagagcagaatccagacattgtttcagagaagaagccaacaacagaagtggatcccactcattttgaaaagcgtttcctgaagaggatacgtgacttgggagagggccactttgggaaggtcgaactctgcagatatgatcctgagggagacaacacaggggaacaggtggctgtcaagtccctgaagcctgagagtggaggtaaccacatagctgatctgaagaaggagatagagatcttacggaacctctaccatgagaacatcgtcaagtacaaaggaatctgcatggaagatggggggaatggtatcaagctcatcatggagtttctgccttcgggaagcctaaaggaatatctgccaaagaataagaacaaaattaacctcaaacagcagctaaactatgccatccagatttgtaaggggatggactatctgggttcacgacagtatgttcaccgggacttagcagcaagaaatgtccttgtcgagagtgaacaccaagtgaagattggagactttggtttaaccaaagccatcgaaactgataaggagtactacacagtcaaggatgaccgtgacagcccggtgttttggtacgctccggaatgtttaatccagtgtaaattttacatcgcctcggacgtgtggtcttttggagtgacattgcacgagctgctcacctactgtgactcggattttagtcccatggccttgttcctgaaaatgataggcccaactcatggccagatgacagtaacacggcttgtgaacactctgaaagaaggaaagcgcctgccatgtcctcccaactgtcctgatgaggtttatcagctcatgagaaaatgctgggaattccaaccatctaatcggacaacatttcagaaccttattgaaggatttgaagcacttttaaaataagaagcatgagtaacatttaaattcccatttatcaggtccttctctcccaagccaatttaaaaacttttttttaatgaaaaagtttgtattctgcctaaaaagccactcaacaaatacttgagtcactggtacccactgtgggacaaactggttctgcacctggcaatagacactctgcatgttactttttagtgcaactgtacagttgccatttaaattgtcaaacctgtggcctgctctatatgcactttgtttactctttatacaaataaacatactaaagacttcacatgcatatgccttttaatattaagtctgcattttgaaagcatttcaaaccattagctaacatagaaaaataacagcctagatttggggtgtagtaatgaccttgtactaacatcact

SEQ ID NO: 2610 - DNA, 1905 bp, Cricetulus griseus
ggtctcatgggcatgtgtgttaacgagcgccgtcgtctcattgtgcctccccacctgggctacggcagcattggtgtggcgggcctcattccccctgatgccaccctctattttgacgtggtcctgctggatgtgtggaacaaggcggacacggtgcaaacgaccatcctcctgcgccctccttactgcccccgcatggtgcagaacagtgacttcgtgcgctatcactacaacggcactctgctggatggcactgactttgacaacagctacagtaggggaggcacttacgacacctacatcggctctggttggctgattaaaggcatggaccaagggctgctgggcatgtgtcctggagagaaaaggaagattgtcattcctcccttcctggcttatggggagaaaggctatgggactgtgatacccccgcaggcctccctggtcttctatgtcctgctgattgatgtccacaacccgaaggacacagttcagctggagacactggagctgccccgggactgtgtccggcgagccgtggcaggggacttcatgcgttaccactacaatggttctttaatggatggtaccctctttgattccagctattcccgcaaccacacctacaatacctatgttgggcagggttacatcatccctgggatggaccaggggctgcagggcgcatgcataggggaacgaaggaggattactgtgccccctcaccttgcctacggggagaatgggacaggagacaagatcccgggctcagccgtgctcatctttgacgtgcatgtcatcgacttccacaacccttcagaccctgtggaaatcaagacactgttccggccacctgagaactgcaacgagacatccaagattggggacttcattcgttaccattacaactgctctctgctggatggcaccaggctgttctcttcccacgactatgaggcccctcaacaggccacccttggcgccaacaaagtgatcgaaggtctggacaggggcctgcagggcatgtgtgtgggagagaggcggcagctcattgtgcccccacacctggcccatggggagagtggagcccggggtgttcctggcagtgctgtcctgttatttgaggtggagctggtatcccgagaggatggcctgcccacaggctacctgtttgtgtggcaccaggatcctgcagccagcctgtttgaagacatggatctcaataaagatggagaggtgcccccagaagagttctcctccttcatcaaggctcaagtgaatgagggcaaaggacgcctcatgcctgggcaagaccctgacaaaaccataggagacatgtttcagaaccaggatcgaaaccaggatggcaagatcacagccgaggaactcaagctgaagtcagacgaggaccgggagcagatccatgaggagctctgagggccagagtctcaggtctgacctcagacgcaaaggcactcggccaggggacagtggcaggggaactggctgacaacagcacccctccctcagtggggataactgtgggagtcactggatgtcatcagagactgcggtgaccttctcactggccgtggtttccagtccacaacacagacctctgcatttttctcttcccagccctacacctcttccttaaggttcttgacgtaataaatccaatctggggaggggcactggtgtttggttcgggtcgttgctgaccccacacatctatacctcccacccacacactagactcagcaagggtgagctccccggtccttcactttcccaaatgtgccctttattggtacatgtctgtccccattccctgggagggagggaggcagagttctgggctctcaaaggctaaactgatccaatccttctccttgtgacaataaa

SEQ ID NO: 2611 - DNA, 1904 bp, Cricetulus griseus
ggccaggatgcggggcagcccggcgcccagctccgcctcgtcgtcggcctccgacctgagccgcagccccgcgcacagccgctcggacctgcggcccggcacgtcgggcgactacaacctgagcgtcagcctgtcggcctgcacgctgctctccgagggggctgtggaacccatgcagattgatgtggatccccaggaagacccccagaacgcacctgatgtgaactacgtggtggagaaccccaccctggatttggagcagtatgcagccagctacagcggcctgatgcgcattgagcggctgcagtttattgcagaccgatgccctccactgcgggtagaggccttgaaaatggccctgtcctttgtgcagaggaccttcaatgtggatatgtatgaagagatccaccggaagctctctgaggccactagggagctgcagaatgcgcccgatgccatccccgaaagtgcagtggagcccccacccctggacacagcctgggtggaggccactcggaagaaggccctgctgaaactggagaagctggacacagacttgaagaattataagggcaattctatcaaagagagcatcaggcgcggccatgatgacctgggtgaccactacctggactgtggggacctcagcaatgccctcaaatgttactcacgagcccgggactactgcaccagtgccaagcatgtcaccaacatgtgcctcaatgtcatcaaggtcagtgtctacttgcaaaattggtcacatgtgttaagctatgtcagcaaggcggagtccactccagagattgctgagcagcgtggagagcgggacagccagacccaagccatcctcaccaagctcaagtgtgctgcaggcctggctgagctggctgcacggaagtataagcaagctgctaagtgcttccttctggcttcttttgatcactgcgacttcccagagctgctgtcccccagcaatgtggctgtctatggtggcctgtgtgccttagccacttttgaccggcaggagctgcaacgcaatgtcatctccagcagctccttcaagttgttcctggagctggagccacaggtcagagacatcatcttcaaattttatgagtccaagtatgcttcatgcttgaagatgttggacgagatgaaggacaacctgctcttggacatgtatctggccccccacgtgaggacactatatacccagattcgcaaccgggctctcattcaatacttcagcccctacgtgtcagctgacatgcacaagatggctgcagccttcaacacgacagttgcagccctggaggatgagctaacgcagctcatcctggagggtctcattaacgcccgcattgactcgcacagcaagatactgtacgcacgagacgtggatcagcgcagcaccacctttgagaagtccctgctgatgggcaaggagttccaacggcgcgccaaagccatgattctgagggcagctgtgctgcgcaaccagatccatgtgaagtctcctcctagagaagggagccaaggggagctaactccagccaacagccagtcacggatgagcaccaacatgtgaaaggcatcgccctgaccctcacaggatggtctgcactcctgccccgcccatggaagcagcacctgcgcctcctgcctgcttcctcaagaggaggctccagactatgtgtggttcattagagcagcctggccacttggatgccagttcactgcccttccactctgaggtattctctgctgtggtaggcaggctgcccattgtggccactcaggcctgactctaggtttctgtctcaatgaaacagaccgtgtgcaatgcccaggtaggggtacctcaaacccctcctgtccgtgtgtagttctgactgcagcagtgt

SEQ ID NO: 2612 - DNA, 1904 bp, Cricetulus griseus
agcctaccctaccaggacaagtatggactcccatggcaatcctgtcacactgctgaccatggaccggcacggggagcagaacctctattctccacagacccccacctacatccgtggctacccacccctgcacctggaccatactctggcccctcatcgctgcagcctggaacaccgggcctactcaccagcccatcccttccgcaggcccaagttcagtggccaagcttctccaaggcagcttgcttctcccagtatgagaccatgtaccaacactactacttccagggtctcagctaccccagagcaggaggccagccaatacccagcctcacacccaggggcccatcccgtgccttcccaccaagtggtggcagtagcctgctcttccctactgtggtgcacatggcccctcccacccacgtagagagcggcagcacctccagcttcagctgctaccatgggcaccgctctgtgtgcccgggaagaggaacaggctccatgctgccaagcggaggtgccgactgcagcctggttgctctccagaggaggcagatgcttccagggctagcctctccattgccccccaggacactcaggagtcccatgccctggctgctgaggcttcaggaccaggatctggcccatgcatcggtacgggagcttgagctcagaaggaactcttgtgtaaaaaatcggaaaactgtatggagacttcaaagtctggcttccttcaaaactacacacacacacacacacacacacacacacacacacacacacaaatatatatatccacacatcttctggccaaaccctgtcaggcctctgcctagtggctgcagtagctcacctcaccagcagaggtctgctagcctatctgcctgatgcactatatgtacttattctccacgggacagactgtcagatagctcagacccaaaggggaggcatgtgtatatttttttccagcctcttcttttttaaggggaaggcagagtttttttaaaagcaaaccatttttggttgtttgttattgttgtttttaagattgttttgtttgtttttaaaagggagagataatctatttaaaactacttcagggattgtaatcctttttgtccaatatagttcttgttcttaaaaatgttttcttttccttagaggaaactaattgtgtcggccctgtgtcagtaactcttctggtcacttttattcattgatttagcagataccttttgccatctgaaagtgtttggcctagtaggtctgaaagctcagttacagaatgggaacctttacttttttttttttttttttttttttttttttgtgtgtgtgtgtctgtgtgtgtccatcttcagtcctgtggttcaggccctccctctgtcttctggtctcaaagttcacacaggactaatgcttttaaaatgtggtctataaaagaattagttgaaagtatcatcttttaaactgacctacctttttcttatccttacataaactttttgtattgttggtctaacaagacacttttttttctcccatagcacttaagatttttgtaaagactttgctgtaaaggctttgtgataaaatggtctaagggctcttttcaacattaccatttgaaaaactttttaaagctagaaaacaacttatgtatattctgtatatgtatagcaacacatttcatttatggaaatatgttctcagaatatttatttactaatatatttatcttaagccatgtcttatgttgagagtgtgacattgttgaaataatcattgaaaatgactaacaaggccctgtaaatacatgataattgcacacagattttacattatttgcagaaccaaaaatgaatttaaagcaagttgtagtcttctattggttttgtaac

SEQ ID NO: 2613 - DNA, 1904 bp, Cricetulus griseus
gcgggtgcgcttctcggcggggccggccagggcggtcgcctggcgttgaggaagcgctcccggggcgggcgccatggccaccagctagggcggcgggcgggagaaaaggccgaagcccaagatgctggagcgacggcacggctgcgcctctgccatcgtagatgctgaccatctttctgtggtagaatctccatggcctgaacatttcttgacaataattttgagcaaaatacatgtttaaaaagaagataaccacatcaagatggtgggaaagctgaagcagaacttacttttggcgtgtctggtgattagttctgtgacagtgttttacctgggccagcatgccatggagtgccatcaccggatagaggaacgtagccagccagctagactggagaaccccaagacaactgtgcgaactggcctggacatcaaagccaacaaaacattcacctatcacaaagatatgcctttaatatttatcggaggtgtgcctcgaagtggaaccacgctcatgcgggctatgctggatgcccatcctgacatccgctgtggagaggaaaccagggtcatccctcggatccttgccctgaagcagatgtggtcccggtccagtaaagagaagatccgcctggatgaggctggtgtcactgatgatgtgctggattctgccatgcaagccttccttctggaggtcattgttaagcatggggagccagcaccttatttatgtaacaaagatccttttgccctgaaatccttgacttacctttctaggttatttcccaatgccaaatttctcctgatggtccgagatggccgggcatcagtacattcaatgatttctcgaaaagttaccatagctggatttgacctgaacagctacagggactgtttgaccaagtggaatcgggccatagaaaccatgtacaaccagtgtatggaggttggttataaaaaatgcatgttggttcactatgaacagcttgtcttacaccctgaacggtggatgagaacgctcttaaagttcctccatattccatggaaccattcagttttgcaccatgaagaaatgatcgggaaagctgggggagtgtctctgtcaaaagtggaaaggtcaacagaccaagtcatcaagcctgtcaatgtcggggcactgtcaaagtgggttgggaagatacccccagatgttctacaagacatggcagtgattgcacccatgcttgccaaacttggatatgatccatatgccaatccccctaattacggaaaacctgaccccaagatccttgaaaacaccagaagggtctataaaggagaatttcagctacctgactttctgaaagaaaatccccagactgagcaagtggagtagctgaggctggacctttccacagcaagggacgactgctgccttttctacagaagggagatctctggaactgctgtcttctgctgggagaagtggggtatcctaaccacctgccagcctcatccctgagggtggtgtcacacagccagcctcctttagtgatggctcttgagcccctgacatgcaccaccctcgaaatgaggaatccagcagggatagagttctgttacagctcctcttgtgaatgtcttttcttaccagattctagtcttagtttcaagagcggaagactttaaaagatggcattctgttaacaaacttggcagtctcgttcagaataggtgtacacgttccagcgttttgtacaatacccgcgcctgtttaaatgtattgatgcggattatagaaataccttaattatttaaataattcagtgcattgtttcagagacgttgggaaattactgtacacatttacaacctaatgacttttgttattttatttttcaaaataaaagcttaaatgtgaagca

SEQ ID NO: 2614 - DNA, 1903 bp, Cricetulus griseus
  modified_base (1882)..(1882): a, c, t, g, unknown or other
cgagcggccattgggcggcctcgagggacacttccggtgtccaggtgctgggctcgcctgcaggaagatgaagatgggtgtccgcctcgccgcccgtgcctggcccctctgtgggctgctgctggctgcgctcggcggcgtctgcgccagcggcccccgcaccctcgtgcttctggacaacctcaacgtgcgggacacgcactcgatgttcttccgcagcctgaaggaccggggctttgaactcaccttcaagaccgcagatgaccccagcttgtccctcattaagtacggggagttcctctatgacaacctcgtcatcttctccccctccgtggaagattttggaggcaacatcaacgtggagaccatcagtgccttcattgacggtggcggcagtgttttggtagctgccagttccgacattggtgaccctcttcgggagctgggcagtgagtgtgggattgaatttgatgaagagaaaacagctgtcattgaccatcacaactacgatgtctcagaccttggccagcatacgctcatcgtggctgatactgaaaacctgctgaaggccccaaccattgttgggaagtcatctctgaaccccattctcttccgaggagttggaatggtggctgaccctgataatcccctggttttggacatcctcacgggttcttcaacctcctactccttcttcccagataagcccatcacccagtacccccatgcagtggggaagaacactctcctgattgcgggcctccaggccaggaacaatgcccgggtcatcttcagtggctccctggatttctttagcgatgccttcttcaactcagcagtacagaaagccacacccggtgcccagaggtattctcagacaggcaactatgagctagctgtggccctctcccgctgggtgttcaaggaggagggcgtcctccgagtggggcctgtgtcccatcatcgggtgggcgagacggctccacccaatgcctacactgtcaccgacctagtggagtacagcattgtgatcgagcaactctccaatggcaagtgggtcccctttgatggggacgacattcagctggagttcgtgcgcattgacccctttgtgaggaccttcttgaagaggaaaggtggcaagtacagtgtccagttcaagctgcctgatgtgtatggtgtgttccagtttaaagtggattacaaccggctaggctacacacacctgtactcctccacccaggtgtcagtgaggccactccagcacacacagtatgagcgcttcatcccctcggcttacccctactatgccagtgccttctctatgatggctggcctcttcatcttcagcatcgtcttcttacacatgaaggagaaggaaaagtctgactgagccagaacctgggactcctccatacagcagggagatggcaagaggattccactggatgggttgggtttttgttgttgtttttttaaaggccatgggaaaatggcacagccttacctcagtgagtgatgactatggggtggggggcagggaatagttgtttgtttgttttttctgtaagttttcccactttaagtcactctgtggcatttttcatatttgcagccacccccatttctaaaataaagagaaccactgccctcacccatccgttggcccctcacacttcatgatggtagggctgctgtttagggagaggacccaggttcaattcccagcacctacatggcagctcacagccatctgtaactctagtcctaggagatctgatgccctcttctgacctctcaggccaccatacattcaagtggcgcatcttacattcaggcaaaacaaccaaataaagcataaaataaattcctgtaaaaaaanaaaaaaaaaaaaaaaaaaaaa

SEQ ID NO: 2615 - DNA, 1903 bp, Cricetulus griseus
aaaatagcagccgtgtgaatgagaaaccagaaaggtccccatctgtcctcaccgtacctggtctgacagagacagcggtcttcagctgtgaggcccacaatgacaaaggtctgacagtgtccaagggtgtgcagatcaacatcaaagcgatcccctccccaccaactgaagtccacatccttagcaggacagcacacagcatccagctctcctgggtcccaggttttgatggatactccccatttcaggactgcagcattcaggtcaaggaagctgacctgctgagtaatggctcagtcatgacttttaatacctctgcttcgacacatctgtatgaaatccagcagctgcaagccctggctaattacagcatcggtgtgtcctgtcggaacgaaattggctggtctgcagtgagcccttggattctggccagcacgacagaaggagctccatctgtagcacctttaaacatcactgtgtttcttgaacgaatctaccaataagcgtggaaatcagatggatgaagcctccaattaagcgccaggatggggaactggtgggcgtacaggatatctcacatgtgggagagttcggagacttcccagagagagctttccgaagaagtcggccagaatggtagctgggctcagattcctgtccaaatccacaatgccacctgcacagtgaggatcgcagccatcactaaagggggcgttggacctttcagtgagccagtgaaaataagcattcctgaacacagtgattgccatagagagcctggcagatcgtgtctacacaagcaaaagtgatgtgtgggcttttggcgtgaccatgtgggaaatagcaacacggggaatgaccccctatcctggagtccagaaccatgagatgtacgattaccttctccatggccacaggctgaagcagccggaggattgcctggatgaactgtatgacatcatgtactcttgctggagtgctgatcccttggaccgacccaccttctcagtgttgagactgaagctggaaaagctctccgagagtttgcctgatgcacaggacaaggaatccatcatctacatcaatacccagttgctagagagctgcgagggcctggcagacgggccctccctcgctgggctagacatgaacattgatcctgactccatcattgcctcttgcactcccaagcaccgccaccagtgtggtcacagcagaagttcatgagaacaaccttcatgaggagagatacatcttggatggggtcagtgaagaatgggaagatgtggcctccactccttttgctgcagccacatctggaaaggatggtgtcttaccagaggacaaactcaccaaaaatgggatctcctggtctcactgcagtacgctacccttggggagcccatcagcagatgaacttttgtttgcagatgactcctcagaagactctgaagtccccatgtgaggccagctgagtggaggcatgaaaggaccaggcacatactgctccatgggatctggttgccttagctattttactattgctgttatgaaacaccgtgagcaaggcaacctatgaaggaaagtatttagttaggtttacagtgtcagggggttagagtccatgattgcagaaggaagctgggaaatggcaccattctttggaaacctcaaagcctgctcccagtgacacacctccttcaataaggccacacctcctgatccttcccaacagttccaccaactgaagaccaagcactctaacatatgagcctataggggccatctctgttcaaggccgcacactggttataactgatgctttggcattctttttccttacctactttacttgtaaagtcatggcctgacagcaccaggtgaatgctgtcaagtcagtttt

SEQ ID NO: 2616 - DNA, 1903 bp, Cricetulus griseus
tacaatgggcgcagtgggtacttgctgaagcccgagttcatgcggcggccagacaagtcttttgaccccttcactgaggtcattgtagatggcatagtggccaatgccttgcgggtcaaggtgatttcggggcagttcctgtctgacaggaaggtgggcatctacgtggaagtggacatgtttggtctcccggttgacacaaggcgcaaatagtcgtacaaagacatctcaggggaattcattcaaccctgtgtgggatgaagagccctttgacttccccaaggttgtgctgcccacgctggcctcacttcgcattgcagcctttgaggagggtggcagatttgttgggcaccgaatccttgcctgtctctgccatccgctcaggataccactatgtctgcctgcgaaatgaggccaaccagccattgtgcctgcctgccctgcttatctacactgaagcttctgactacatcccagatgaccaccaggactatgcagaggccctgattaaccctatcaagcatgtcagcctaatggaccagcgggccaagcagctggttgctctcattggggacagtgaggctcaggccagtacagagacatatcaggagacgcagtctcaacagccagggtcacagctctgccccaaccccacacctaacccactagatgcctcacctcggtggccccaaggtcctaccacctcccccactagcacctccctcagcagcccagggcagcgagatgatttgattgccagcatcctctctgaggtgacccctacccctctggaggagctccgaaaccacaaggctatggtgaagcttcggagccggcaggaacgagacctgagggagctgcataaaaagcatcagcgcaaggccatggcccttacccgccgtctggatggcttggctcaggccagggttgaaagcaggtgccggtcctcctccagtgccctaggcagagccactaatgcggaggacgttaaggaggaggaaggggaggccaagcagcatcgagagttccagaaccaacaggtccagagcctgctggagctgagacaggcccaggcagatgcagaaactgaacggaggctggagcacctgagacaggctcagcagcggctcagggaggttgtcctggatgcacacacaacacagttgaagagactgaaggaactgaatgaaagggagaagaaggagcttcaaaagatcctggacaggaaacgcaacaacagtatctcagaggccaagacaagagagaaacataagaaggaggtggaactaacagagattaatcggcggcatatcactgagtcagtcaactctatccgacggctggaagaggcccagaagcagcgccatgagcgcctcatggcagggcagcagcaagtcctccagcagctagcggaagaggagcccaagttgctggcccagctgacccaggagtgtcaggaacatcgtgacaggttgccccaggagatccgtcgatgtctgctgggcgagacatcagaggggctgggagatggccccctggtggcttgtgccagcaatggtcatgcacctgggagtggtgggcacctgtccagcgctgactcggagagccaggaggagaacacccagctctaaactggctgagcaagaggtggccactggactggggggggctcgtgggcaagtgggtagaagacacttacttgctttttttttttttttaaccttttacctttagaaattttatttttttaaaatctgagacaaatgcctcactgcctcacactaactccattttcttggggactccagtcctcagcctctccttctaacctcaggcctaggaaaaaggctggggcttgtaccccatagcacttacccaagatgggtattcccccactcccaag

SEQ ID NO: 2617 - DNA, 1903 bp, Cricetulus griseus
gaacccgatgacagggttgtggttgctgccacccggctggatagccggtcctttttctggaatgtggccccaggggcagaaagtgctgtagcctcctatgtcactcagctggctgcagctgaagctttgcacaaggcatccgatgtggccaccctaccccgcaatgtgatgtttgtcttcttccagggggaaacttttgactacattggcagctcaaggatggtctatgacatggagaacggcaagtttcctgtgcggctagagaacattgactcatttgtggagctgggacaggtggccttaagaacttcactagatctctggatgcacacagatcccatgtctcagaaaaatgaatctgtgaagaaccaggtggaggaccttctggtcactctggagaagagtggtgctggtgtccctgaagttgtcctcaggagacagaatcagtcacaggcccttccaccatcatctctacaacgatttcttcgggctcgaaacatctctggtgtggtactggctgaccactctggttccttccataaccggtattaccagagcatttatgacactgctgagaacattaacgtgacctatcctgagcggcagagcccagaagaggatctgaactttgtgacagacactgcgaaggcactggcgaatgtggccacagtgctggcacgagcattgtatgagcttgcaggaggaaccaacttcagtgactcgattcaggctgatccccaaacagttacacgtctgctctatgggttcctggttagagccaacaactcatggtttcagtctatcctcagacaggacctaaggtcctatttggatgatggacctcttcaacattacatcgctgtcaccagccctaccaacacgacttacgttgtacagtatgccttggcaaacctgactggcaaggtgaccaacctcacccgagagcagtgccaggatccaagtaaagtcccaaatgagagcaaggctctgtatgattactcatgggtacaaggccctttgaattccaacaagacagagcggctccctcggtgtgtgcgctccacagtacggctggccagggccttgtcccctgcctttgaactgagtcagtggggctccacagagtattctacatgggccgagagccgctggaaagacatccaagctcggatattcctagttgccagcaaagaacttgagtttatcaccctgaccgtgggcttcggcatcctcatcttctctctcatcgtcacttactgcatcaatgccaaagccgatgtccttttcgttgctccccgagagccaggagccgtgtcttactgaagaggactccagctctccctgccagctttggacttcatttcctagatcagttgttccactaggaacaaagcactaattttcactggactgtctctgggtctgtcttagactgggattgacacatggatgactgtgaggggagaccctttcctatgtgttcctccttctctaataccaggaattacgataaaagcttcctgctcctgttttaactccccagttgcccaccctcatctgccttttcttgggatacctcttatctttgcatcctgtacctctctctgatcccactgtcaccctaccctcacccccgtacccagccacctgctggaccaggaagaacgatgtgaaggattgagcatcagggtcaaaccacccgcccgaacccttggagagaagaatgggttctctctggctgagccagctgtgtctttctcactgtcatttccccgggtccccagatgacatgttaaggtgggcatgctgttaggtgggtatcccacctctagcccacagtgctcagttgtactttttattattaaactgtaatataactactttttttttttttttgtaagta

SEQ ID NO: 2618 - DNA, 1903 bp, Cricetulus griseus
gagctgacagccagatgcctcccagggagtgcggaccccgaagcaggcagaccatgtggaccctggtaagctggctggccttcatggcaggcctggtggctggaacacagtgtccagatggtcagtcgtgccctattgtctgctgcctggaccccggaggagccagctacagctgctgcaaccctattctggacacattgcctatggtaatgagcgatcgtctaagtggcatctgtcaggtccatgaccactgtcctggaagttactcgtgtctcctcactgtgtcagggacttccagttgctgccctttccctaagggtatatcttgtggtgatggctaccactgctgtccccggggcttccactgtagttcggatgggacaacctgcttccgacattcagatagcctcctgagggctgtccagtgccccggtagccaattcgaatgtccggaatcctctacctgttgcgttatgcttgatggttcctgggggtgctgccccatgccccaggcctcttgctgtgaagacaaaatacattgctgtccccatggggccttctgtgacatgattcatacagaatgcatttcacctaggggcacccaccccctgttaaagaagttccctgcacaaaggaaaagcagggcagtggctttgcatttttcggtggtgtgccctgatgcccagacccagtgccctgatgattctacctgctgtgagctacccagtgggaagtatggttgctgtccaatgcccaatgccgtctgctgttccgaccatctgcactgctgtccccaggacactgtgtgtgacctgatccagagtaagtgcctatccaagaagtccaccacgtacctcctgtccaggctgtttggaaacccagtgaaggaggtggagtgcgactcggaggtgagctgcccagatggatacacttgctgctaccttaccatcgggtcctggggctgctgtccatttagcaaggctgtgtgttgtgaggaccatatacactgctgcccagaagggtttcattgtcacacagagacaggaacctgtgaaatgggaggcctccgggtgccctggatgaagaaggtcaaagcccccctcagcctgctagatgcagaaatcttccagagtgatgtcccctgtgatgacttcactgtctgtcctcctgacaatacctgctgcagactcagttctgggggctggggctgttgtcccatcccagaggctgtctgctgtgcagatcaccagcattgctgccccaagggcttcacatgtacagcggaggggtactgtcaggggggaaacagaatggtggctgtcctggagaagatacaccctcacgagacatttctgtcccaaattggagataacaattgtgaccagcacaccagctgtccggtggggcagacctgctgccctagcctgaagggagactgggcctgctgccagttaccccatgctgtgtgctgtgaagaccggcagcactgctgcccgactgggtacatctgcaacgtgaaggcaaggacttgtgagaaggctgtgaattccatccagattcctgtccacctgaccttaggccctcaggttggggaagtggagtgtgggacagggcattactgccatgatggccaaacctgttgtagaaacagccaaggaggctgggcctgctgtccctacctagagggcacttgctgtgcagatggccatcactgttgtcccattggcttccactgttcagtcaagggaaccaagtgttttcgaaggaagatccctcactgggacacatctttgacgaatccagccccaagacagctgctgtaaggaggggctaaagactaaagaactccacagccctggggtcaccccatcaccatgggaggtgggacctcaactaagacctt

SEQ ID NO: 2619 - DNA, 1902 bp, Cricetulus griseus
gagaaaggaaagcgcgaggagacgccgccaccgccgccagcgcagctgtgccagagccgcgaggagaccagccgcccgacttcccccctcgccggccgccgcgtcctcggatttgttccaacaatctgttaaaacatggtggattactatgaagttctgggcgtgcagagacatgcctcacctgaggacattaaaaaggcgtatcggaaacaggcacttaaatggcatccagacaaaaatcctgaaaataaagaagaggcagagcggaaattcaaacaagtagctgaggcatatgaggtgttatcagatgcaaaaaagcgggacatctatgacaaatacggcaaagaaggattaaattctggaggaggaggtggaagtcattttgacagtccatttgagtttggcttcacattccggaatccagatgatgtcttcagggaattttttggtggaagggacccattttcatttgacttctttgaagacccatttgatgacttttttgggaaccggaggggttcccgaggaaatagaaaccgaggtacaggctcatttttctctgccttcagtggatttccttcttttggaggtggatttcctgcttttgatacaggattcacttcgtttgggtcactagggcatgggggtctcacttcattctcttcagcatcatttggtggcggtggaatgggcaacttcaaatcaatatcaacttctactaagattgttaatggcaaaaaaatcactacaaagagaattgtggagaatggtcaagaaagagtagaagttgaagaagatggacagttaaagtccttgacgataaatggtgtggccgacgagaacgcccttgcagaagaatgccagcggagaggccagcacataccagctctggcccatcatggcccggccccagcaacagtccgggtcccctccccggcccggcccccggccccgtctccagccccgacttcagccccgtctccagccccgacttcagccccgtcttcggccccttctgtcagcacccgcccacagaagccacccaggcctgccccgatggccaaacttgtgtctaaaagcaactgggaagatcaagagcaggacaggcagcgggttcctggcaactgggatgcccccatgacctcagcagggctcaaggaaggtggcaagaggaagaagcagaagcagaaagaggactcgaagaagaagaagtcgaccaaagggaaccgctaggctggacttggcggcagccgcagccgccgctctcgtgtggggtgttggagatggaggtgacaatcccgggtggcctgtatagtataagctagtagtgacatagcctcagccttgtaactgtttcccccaacactaagtccttagcgtttttcctcttgagtcgtaaggatctgcctcattcttttcagcagtctaagccctgctcccacaaccaggtatttgtagctgtaggaggccagtagggtccatagggagctgggtacgcattcatgactgtctcctggcggcggcggtactaggtgcagttttagtacatcggaacttacaggtaatatcagctgcgccttgagccatgggtgttagggtgcttttgattcagtactctggcaacacataggccaccgtgagctacttcagatgtagactctttgcttgtatttattgttctactcttaatcgtctcctggtagtcaagatttgacaccaaatatagtttagtttttgggaaatcttgtcttttcttcttggagaaatatttgtccttcagtcaaaaggttttacgtagcaatatcgtttctagctttcgtaggtcagggccacctggctattcacacagacacacagcacacacagctgcgtgcagaatagtcagctatccagcaagaagct

SEQ ID NO: 2620 - DNA, 1902 bp, Cricetulus griseus
ctcctccagaagtttggcaaggtgaagcaatttgacttcctgttccacaagtcgggtggctttggaaggccagccccgagggtactgttttgttaactttgaaactaagcaggaagcagaacaagccattcagtgtctcaatggcaagctggcactgtctaagaagttggtggtacgatgggcccacgctcaagtcaagagatatgatcataacaagaatgataagatcctccccataagccttgagccatcctcaagcacggaacctactcagtctaacctcagtgtcactgcaaagataaaagccattgaagcgaagctgaaaatgatggcagaaaatcctgacgcagagtatccagcagcacctgtttattcctactttaaaccaccagataagaaaaggactactccttactctagaacagcctggaagtctcgaagatgatggtgaattaccagagcagcaaaagcaaatggtctccatgtttgaagtccttctcctttgtactttgtagatgtgaatggtactgccaacagcacagtcacatgttagggctgctaacataacatgtttggtattcatatggatgtgtcttccctgaactatgtgtggaactgagcatcatccagaataaataggaatgtgtccaaactgtgatttgaacactgagctgctctagttggctgctttgtttggatttgtaactccagaaacacagtgtgccagagagaaaaacaaacatacaaagttgttctttaaatcaggaaactaaatttattaacatccaccaaaaacttttaaccttttatgtatacacatcttttcaacataaaaaataaggatgagggcgggaagtgagagacatcttcagtcatttttagaactgtttgagaatttactgtggaaatccttcagttgaactaaaaagaattcttggcaaaaagcaactgatcccttgagtgaatgttgtagcaatctgtttaagaattatgctttttatttccaaatctcaattaggaaaatgtggtgtatgtcttaaaattgtttatgtcaacaaagtatagaatcaaatttagcattttataccacagcagataatctatttggaaatccagcttttattctttggcaatcatggttttaagtctgagtaaccttgccttctgtaataccaaatgttattactaacctggattttaatacacttattacctgagaccattttatagcatgaggttgttccagttagaatcaaatcatgatcaatctaagtagaaaagcaaaatttcttggaaaacctaaagtttactatattggtcactctccagcattactttctaacagttctgtggggttgtgagaagtggctgagtgaccttatgcagctaaggagggcagtgcagtaagcactaggagtcagcagccagtgcttgggcactaagaccataataacagccacatattttatgtcattttggaagactacacggcttaaagatgagccttattctgacagcatgcttcccccagatatctttgtctctttggacatattgaatatgatagtatagagacatacataaacagagagccttgggtatgtgtttcttcagctcagtgcatccaggaaagtgggaacactggctcccatttgtctggtgatttcttagtatagtattcaccgtttcatccttaggttctcaaagggttgtggtggaatagaacttgaagccaatagccttctatttttaataggaacctagaaaatacttaggattatctagagttgtttctttagaaactagaactatttatttgtatttaaacaatgtctgtgatttgtaccaattctcacccctctatgtgaataaacgcaagacgacagtaaaaaaaaaaaaaaa

SEQ ID NO: 2621 - DNA, 1902 bp, Cricetulus griseus
aagatggatactacagtggtgaatttgtggactcactttgagcagcttgtgcgccggttggagattatcaatgaaggaaatgagagcattgaattcatccaggttgtgaaggacttcgaggatttccggaagaagtgtcaaagaacaaaccaggagctggagaaattcaaagatctgttgttgaaagcagagactgggctagtgctctggacgttaagctgaagcatgcacgtaatcaagtagatgtagagatcaaacggcgacagcgagctgaggctgaatgtgcaaaactggaacaacagattcagctgattcgagatatactcatgtgtgacacatctggcagcattcagctaagcgaggaacaaaaatcagctctagcttttctcaaccgaggacaggcatccagtggcaaccctgggaacaatagactgtcaaccattgatgaatctggttccattttatcagatatcagctttgacaagactgatgaatcactggactgggattcttctttggtgaagaatttcaaaatgaagaaacgagaaaagaggcgctccaacagcagacagttcatcgatggccctcctggtcctgtaaagaaaacctgctccattggctctacagtagaccaggcaaatgaatcaatagttgcaaaaactacagtgactgttccgactgatggcggacccattgaagctgtatctacgattgagacattgccagcttggaccaggagtcgggggaaatcaggtcctttacaacctgtgaacagtgactccgcactgaacagcaggccactggagccaagaactgagacagacaattcaggcacacctcacaataatggaggcatgcgcctacatgactttgtctcaaagacggttataaagcctgaatcttgtgttccctgtggaaagcgcatcaaatttggcaagctgtctctcaaatgtcgagactgccgtttggtctctcatccagaatgtcgggatcgatgtccccttccctgcatttctcccctggtgggaactccagttaagattggagagggaatgttggcagattttgtgtcccagacttctccaatgattcctgctattgttgtcagctgtgtgaatgagatagagcagcgaggcctgactgaggcaggcttatacaggatctcaggctgtgaccgaacagtaaaagagctgaaagagagattcctcaaagtgaaaactgtacccctcctcagcagagtggatgacatccatgccatctgtagcctcctgaaagactttcttcggaacctcaaagaaccccttctgaccttttggctaagcaaagcctttatggaggccgcagagataacagatgaagacaacagcacagccgccatgtaccaggctgtcagtgagctaccccaggccaacagggacacattagccttcctcatgatccacttgcaaagagtggctcagagtccgaacactaagatggatattgccaatctagctaaaatctttggccctacaatagttgcccatacagtgcctaatccagacccagtgacaatgttccaggacatcaagcgtcaactcaaggtggtggagcgcttgctttctctgcccctggagtactggaatcagttcatgatggtggaacaagagaacattgacatccagcgtggcaatgggaactcaacaccacggacaccagacattaaagtgagcttcctggggcctgtgaccactcctgaattccaacttgccaagactcctttatcaagttccctgtcacagagattgtacaacctctccaagagcactcccagatttgggaacaaaagcaagtctgccaccaacttaggtcaacaaggcaaatttttccctgctccatacctcaagtaaagccatttctgcc

SEQ ID NO: 2622 - DNA, 1902 bp, Cricetulus griseus
tgacactcatctcaaagaccatccagactctgggcagcttgtccaaatccaagtctgccagttttaaggagtcgtacatggcaacattctatgaattcttcaatgagcagaaatacgcagatgccgtaaaaaatttcctggatttgatctcatcatcagggagaagggaccccaagagcatagagcagcccatcctgcttaaagaagggttcatgattaagcgggcccaaggaaggaaacgatttggaatgaagaatttcaagaagaggtggtttcgcctgacgaaccatgagttcacttaccagaaaagcaaaaggtgatcagccccttgcagcatccccatcgagaacatcttggctgtggagaggctagaggaggagtccttccgaatgaaaaatatgttccaggttatccagccagagcgtgcactgtacatccaggctaacaactgtgtggaggccaaggactggatcgacatcctagacacagctgctggctcgtactccctgcactggcgggctcccagcaacaatccagctggacattgatggggaccgtgaaacagagcgcatctactctctctttaacctgtacatgggcaagctggaaaagatgcaggaggcctgtggcagcaagtctgtgtacgacggccctgagcaggaggaatactcgacgttcatcattgatgacccccaggagacctacaagacactgaagcaggtcatcgctggggtggggaccctcgaacaggagcacgcacagtacaggagggacaagttcaagaagacgagatacgggagccaggagcaccctattggagacaagagcttccagaactacatcaggcaacagtctgagatttccacccattccatttaaagtcatggcagctccccagaacacatacatggggaggaaccatgttcaccagttcccacaggtcctaccaagctggtggcgccactgcgagccaagcatgctcttccccagcaggaactgttgcctaggctgtgcactttccttggctgccagcacaggtggtctgagccgttctggaatgtatgatcatttgtcttttttttactactttggttttatggggacccaggggtctgttaaatattatggaagtgtagactgtgtctaaatccgttcctcatggcccaatctctcttcgcagaggcacggctggttcattcatggctatgtgcaccttctgtagtgtacactgtctcttgttctttgcctgctgacctctgtggctctgcatccatgtagcagtctggcgctagccctagaaatcctacttaatccttgttgctctatttgatccctatttgggatgttagaagtagcatttccggggcagccagcaggcagccagtcttcctccttagcttgtgttggtttgttcctagctaaagagtcattttgtggctgggatgggcaggacagcacaggaagcctttgatctttggggacattggagagggagggcgtgtgggaaccagtcttcactaggtggccatcaacccacagtttgggcacatgtctagagaccaggtaagttttaaaactagaatccacatgcttgctaccctggtggaagtttgggaaagatttttaaaatgtgcatttttcaagctgtttttcttaaagtttttaaaggactgtttttaatagcattttgatataaggcagtttggaacgtcaacacctatatgcattaaaggggatggcacagggaaaccctaagggaacagtatttgttttctcacaaagccaaagggtcctgagggacagagacctgggctgggggctgcatcaccagcaataaaggccaaacatgctgtttcacatgcctgtgtctctgtgggcccaacaggctacacatggcaatgt

SEQ ID NO: 2623 - DNA, 1902 bp, Cricetulus griseus
tttcccgtccctgacacacccacctggccgcctcggctccgcagtctcccagctgccaggcaatatgaagcctaaactgatgtaccaggagctgaaggtccctgttgaggagcctgcgggagaactgcccgtgaatgaaatcgaggcctggaaggcagcggagaagaaagcccgctgggtcctgctggtccttatcctggcggtggtgggcttcggtgccctgatgactcagctgtttctatgggaatacggggatttgcatctatttggacccaaccagcgaccagccccctgctatgacccctgcgaagccgtgctggtggagagcattcccgaaggtctggagttccccaacgccaccacgagcaacccctccactagccaggcctggttgggcctccttgccggtgctcacagcagcctggacatcgcgtccttctactggaccctcaccaacaatgacacccacacgcaagagccctctgcccagcagggtgaagagattctccagcagctccaggctctggctcctcgaggtgtaaaggttcgaatcgctgtgagcaaacctaacggacctctggctgatctgcagtccctgctacagagtggtgcccaggtccgcatggtggacatgcagaagctgacccacggggtcctacacaccaagttctgggtggtggatcagacccacttttacctgggcagtgccaacatggactggcgctcgctgacccaggtcaaggaactgggggtcgtcatgtacaactgcagctgcctcgctcgagacctgaccaagatttttgaggcctactggttcctaggccaggcgggaagctccattccttcaacctggccgcggccgtttgacacccgctacaatcaagagacaccaatggagatctgcctcaatggcaccccggctctggcctacctggcgagtgcaccgccaccactgtgtcccagtggccgtaccccagacctgaaggctctgctcagcgtggtggacagtgcccggagtttcatctacattgcagttatgaactacctgcccaccatggagttctcccatccacgcaggttctggccagccattgatgacgggttgcgacgggctgcctatgaacgaggcgtcaaagtgcgcttgctcgtcagctgctgggggcactccgagccatccatgcggtccttcctgctctccctggctgctcttcgtgacaaccacacccactctgacatccaggtgaaactgtttgtggtccctgcggatgaagcccaggctcgaatcccctatgcccgtgtgaaccacaacaagtacatggtgactgagcgtgctgtgtacattggaacctccaactggtctgggagctacttcacagagacagcaggcacctccctgctggtaacacagaatgggcacgatggcttgcgcagccagctggaagatgttttcctgagagactggaattccctatacagccataatcttgacaccgcagctgacagcgtgggcaatgcctgtcgcctgctttgaggtcccgcccaatgcagaggccaaagcttcccagggcccccttggactcaactctgggtcccggttttgtctccatgccccttgcctctgtcttctgtgcgcctcagtctccccaccacactcctgttgctacctccacctctgctggcctgacaccctggccccctgtagacctagcagagctaggggaggatcaggccccaaagtagtggggctgcatgctgggcccggacctttggcccaccccctctaaggggccaagattatgataagtaaataattgtctgtaaaaaaaaaaaaaaaaaaaaaaaaaaaaaaaaaaaaaaaaaaaaaaaaaaaaaaaaaaaaaaaaaaaaaaaaaaaaaaaaaaa

SEQ ID NO: 2624 - DNA, 1901 bp, Cricetulus griseus
cgacggcggccaggacagcggcggttgctgcggcgcccggtactggggtcgcggcctgaggcgcaggcgcggtggactcagcccgccccgggctgcggctcgctgtgggctcgtcatggcgacggagcagaggcctttccacctggtggtgttcggcgcctctggcttcaccggccagttcgtgacggaggaggtggcccgggagcaggtggccacggagcagggctcccgcctgccgtgggccgtggcgggccgctcccaggagaagctgcagcaagtgctggagaaggcggccctgaagctgggaagaccatcactgtcgtctgaagttgggataataatatgtgatgtctgcaatccagcctcgcttgatgagatggctaaaaaggcagtgcttgtcctcaactgcgtaggaccttatcgattttatggagaacctgtagtaaaagcatgtattgaaaatggaacaagttgtattgacatctgtggggaacctcagtttctggaactaatgcatgcgaagtatcatgagaaagctgcagagaaaggggtttatatcattggaagcagtggctttgactccatcccagcagatctaggagtgttatacaccagaaagcaaatgaacggtactttgactgctgtggaaagcttcctaacgatccactcaggatgtgaggggttgtgtattcatgatggtacctggaagtcagcgatttacggttttggagataagggtactttaagaacactacggagtacattatgtctgaaacctgtcccaattgttggttcaaagttgaaaagaaggtggccagtttcctattgtaaagagctgaactcatattccattccttttttgggatctgatatgtctgttgtgaagaggactcagcgttacttacatgaaaatttacaggagtccccagttcagtatgctgcatacgtaacggtgggaggcatcacctctgttattaagctgatgtttgcaggacttttctttttattctttgtgaagtttagcattgggagacaccttctcataaaattcccatggctcttttcctttggttatttttcaaaacaaggtccaacacaaaaacagatggatggctcatcatttacgatgacattctttggtcaaggatacagccatggtttttgtcctgagaagaacaaaccaaatatcagaatctgtacccaagtgaaaggaccagaggctggctacgtgactactccaatagccatggttcaggctgccatgactcttctgaatgatacctctgatctccctaaagggggcggtgtctttacacctggagctgctttctccagaacaaagttgattgacagactcaaccaacatggcattgaatttagtgtcattagcagctcggaagtctaaacatttgaagattagctgaatcataagatgcacgaacagcttctgtatttgctattatgtgaaatcttctataaacctatctgactgtatgtggaagactgtcaggtctaaaatatctatacattaaaagcaggaaattatactagcttatcctaaacttcatacctcagctgtttttatgattttattgcttgtgagagaaaactgatattctccttacctgtttattgacaaatgaactggaaggtcggatagtgaaggtccctgtttgtgtcccaacagcattccttagtgatggggctcgactggtgttaggctatggcagtgacttctgccttccttgtaaggtgatgtggaacctctccctcctgggggctcctctgcatagtgagagcatctgctaagtaaactgtactttttctatttcactctgctttctcatccatctacatggactgattttggattgtttacctaagttgaataataaagggtt

SEQ ID NO: 2625 - DNA, 1901 bp, Cricetulus griseus
ccgggatccgcggtgctcccgggccgcacggccacagccggcgggctctccgagcgggtcctcctgaccctccaccccggctctccagagtcgtccggatctacgtcgcaatagtggcgaaggtgaggaggacagtcttctgtactgctctgtccccgccaggggaagacagcaagttgtgctgcgcccgggacccgttagggaccgtggccgccgcccggccgggggccaccatcattactacaaagtatgagcctcattgcattgcctggtgaaagatggcatccagcctgacttgtaccggagtaatctgggctttgctctccttcctttgtgctgccacctcctgtgtggggtttttcatgccttactggctctggggatctcagctgggcaagcctgtgtcctttggcactttccggagatgctcgtatcctgtgcatgatgagagtcggcagatgatggtgatggtggaagaatgtggtcgctatgcctccttccagggcatccccagcgcagaatggaggatctgtaccatagtgacaggcctgggctgtggcctgctcctcctggtagctctcactgcccttatgggttgctgtgtatcagagctcatctccaggacagtaggaagagtggctggaggaatacagtttctgggaggcttgttgattggtgctggctgtgccctctaccccttaggctgggacagtgaggaagtccggcagacttgtggctacatctctggccagtttgacttgggcaagtgtgaaattggctgggcctactactgcaccggggcaggggctgcagctgctatgctgctgtgcacgtggctggcttgcttctcaggcaagaagcagaagcactatccctactgagaccaggccctcgggagcaagctgaggagagaacggaccacgggggattgaaggggccaaagcatcagctactttcacaaggtggaatagtggttctaacccagtacaatgttaatgcaatgaaatctgattgaatctggaacattctctaggaagggagggtggtggggaagttgtcaaaagcatggagaatgtgggacaatggaggaaaatggaccaaaggctaaaactactgcaggacattgggtgtttctattccacaagtatcgttaatgtatgtcacagcaaatctatatatgcaaatgaggatctcatttttgttctccttcaaaaagatgaggactaggggagtcaaaagggctagtagaaacagtagtatcttaggaagcaggacaagtaccctgcagacattccctgaagatgaggactgagcctgaaagcacataatcacatgcacacatacacacacaccataatgcacacatacacacacaccatacacatgttatcacactactgcacagggggtcagctgtgcactgttgatcctgattttttaaaaaatagtcatcagtacagtatcatcactttataaaagcatacattaagcctagtccatggaccaataaaccactcttatcagtatttttgatatcctgcataaagctttatgctcacagtgtatcttcagtgattatgcatatctttagtggtaagcctttgtattcaatgttattcaaagacacagtagtgatctgagtagcttctgctgtaatatccttgtgaagaaatgggacagcttttgtccatgataggtgggaattcagttgcagattgagagtgaagagaagtctttctccaattattggattttgttttctttttttcattattctactgtgctataccacaattatttcaatattcattttgtaaagggaaaaaaagtactattttgtttgtatttgaaaagctctgtgaataaattctctttgatcaataaaaaaaaaaaaaaaaaaa

SEQ ID NO: 2626 - DNA, 1901 bp, Cricetulus griseus
agtgggaacccggcacagccccgctgctgcagtcgtactcccgacgccccggcggtcctgggtctgctccgcccgcaccgctgtcaccttcaggtggcctcgggccctcacagagggggcggtgggaagtctcctggcttcccagggcctgggctccaagagggcactgcgcgctgtaggaatccgatacccgcaggatcccatttgtcaactctcaagcttttatagaatgctgtgaaaatttgccaaagttgtttttcaaaagagagagaggttgcagcttcttcttaggaacagggacgtctgcaattgctttcgatgcctaacgttgcagaagctggaagatccaccgattctggacatggtgagcacaaatccaagaacaagtccccagaagaggatctacacggtgctgtacaatctttttgcacaagtgcctcaggagcacctgtgggcccccagaggagatggtcattatccttcgagttgtccagtgatttatgccatctgttctgattatgccttcctcaaccaggcaacctcagtctacaaaactcccaacccagcccgctcttcttgcctccctgacaataccttgctttctgctgaaagtagttcagcatacattggtattccaactagtgcatcagaaataatctataatgaagaaaatagcttggagaacttatccaccagcctgggaaaactacctctcgcatgggaaattgataaatctgaatttgatgcggtgaccacaaatttgaaacacaaatcaggcagtgcaaagaaacaactttccaagaaaaaagcttcagataaaaaagggcggcatcagagggagtgtccccagtattctgctcttgaagatgttaagcagcggaaagtgttagacctcagacgatggtactgcataagccggccacaatacaagacttcatgtggtatctcctcattaatttcttgttggaatttcctatacagcacaatgggagctgggaatctcccacctataacccaagaagatgctttacatattttgggcttccaacccccatttgaagatattaggtttggccctttcactggaaatacaacactcatgagatggtttagacaaattaatgaccacttccatgtaaaaggatgctcttatgttttatataaaaagaaggttggtggaaatttgcattgcatcatagcattccagagactcagttggcaaagatttggcttttggaactttccatttggaaccattagacaagaatcacagcctcccacacatgcccagggaattgccaaatctgagagtgaagacaatatctccaagaagcagcatgggcgtctgggcaggtccttcagtgctagtttccaccaggactcagcatggaagaagatgtctagcattcatgagagaaggaacagtggctaccacagctacagtgattacaatggcaatgactgacaatgctgggaactgaaccactggtgttacccacacagctgttatgtacaggactgctttaaggcagaggatggtttataagtctatcaataggaacagatcttttgtgaaacagccaaacaattagttgtttgaaggatgtgttaaatatttcagaaatgtgaattcaatacttgagctcctctttagtttctgtcgttttttcttcttgctgccaatgtgtgactcacagacttctaggatattgttctttcatgtattaggctcattccaggactcaaatcagtaacttggtgatcacaaggtgctgggtatgttgtaaccatattgcaatacacctcaaggggaggtttcagatttttattttaaaaattttcatttttttctcttgaattttatatccatttatccactcatacatgtctagcctacagaa

SEQ ID NO: 2627 - DNA, 1901 bp, Cricetulus griseus
gcctcttagctccccttcagttcccttttccgccttgtaaaatcggttggaaagtccctcctggtgtcagtccgcaatcctttccccctgatttgcagctctgctgctttaggagaggcttccactgacaggagatccccaaggaagacaatcatgtgctcgtcctgaagctgtcccctcgagagccaagggctactccaggaggcaccatgtggggctgtcggctggggctgctgttgctgctgctggctggccaggctgccctggaagccaggcggagtcgctggcgcagggagttggctccagggttgcacctgcggggcatccgggacgcaggtggccggtactgccaagagcgagacatgtgctgtcgtggccgagctgacgactgtgccttgccctacctgggagccacctgttactgtgatctcttctgcaatcgcaccgtctcagactgctgccctgacttctgggacttctgcctcggggtgccaccccccttccctcccatccaaggatgcatgcacgggggccgcatctacccagtcttcggaacctactgggacaactgcaatcgatgtacctgccaggagaaagggcagtgggagtgtgaccaggagccatgtctagtggatccggacatgattaatgccatcaatcggggcaactacgggtggcaggctgggaaccatagtgccttctggggcatgaccctggatgagggcattcgctaccgcctgggcacaatccgcccatcttcctctgtcatgaatatgaatgagatttatacggcgctgggcagaggggaagtactacctagggcctttgaggcttccgagaagtggcccaacctgatccaggagccactggaccagggcaactgtgcaggctcctgggctttctccacagcagctgttgcatctgaccgggtctccatccattcaatgggacacatgacacccatcctatcaccacagaacctgctgtcctgtgatacccaccaccagcagggctgccgaggtgggcgtcttgatggtgcttggtggttcctgcggcgtcgaggggtggtatctgacaactgttacccattcgtgggccgtgagcagaatgaagccggtaccagttctcgatgtatgatgcacagtcgagccatggggcggggcaagcgccaggccacttcccgctgccccaatggtcaggttgattccaatgacatctaccaggtcacgcctgcctaccgcctaggctccgatgagaaggagatcatgaaggagctaatggagaatggccctgttcaagcactcatggaagtacatgaggatttcttcttgtaccagagtggtatctacagccacacacctataagccaggggaggccggagcagtaccgcagacatgggactcactcagtcaagatcacagggtggggagaagagaagctgccagatggaaggacgatcaaatactggactgctgccaactcgtggggcccgtggtggggtgagaggggccacttccgaattgtgcgtggcaccaacgagtgtgacattgagagcttcgtgctaggcgtctggggccgtgtgggaatggaggacatggggcattaatgagtggcagccactaggtgggatccacagccatggaagaggccttaggggccacgcccaatgaagcagcaacttgggtgcagtcaggggaaccaggtgctaattcacatacacacagatccacgaatgcaacacccgatctgggagccaaagatgcatgaggctggtggaggtcccagacatcacagccggaactggacagggcctggtatggaaactgcagggagggaatgtagatcccaggtccctggtctgccagcccaggaccacaggagctaagacaccccaatcctc

SEQ ID NO: 2628 - DNA, 1901 bp, Cricetulus griseus
gggtctgaggtgcaggcgcgaggagagcgggctgcaggcgcttgacatggcggcagtggcggcgactgcggcgaccaaggggaatgggggcggcagcggccgagccggggccggcgaaggcggcggcacgcggaagaggaagggccccgggcctgtggccacggcgtacctggtcatctacaatgtggtgatgacggccgggtggctggtgatagcagttgggcttgtgagagcatacctggctaagggcagctaccacagtctttattattcaatagagaagcctttgaaatttttccaaacaggagccttactggagattttacattgtgctataggaatcgtgccgtcttctgttgtcctgacttctttccaggtgatgtcaagagtttttctaatatgggctgtaacacacagtgtcaaagaggtgcagagtgaagacagtgtccttctgtttgttattgcctggacaatcacggaaattatccgttactccttttacacattcagtctattaaaccatttgccttacatcatcaaatgggccaggtacacacttttcatcgttctgtacccaatgggagtaacaggagaactactcacaatatatgcagctctgccctttgtccgacaggctggcctgtactccatcagcttacctaacaaatacaacttctcctttgactactatacattcctgattctggtaatgatctcctacattccactttttccccagttgtacttccatatgatacaccagagaagaaagatcctttctcgaactgaagaacacaagaagtttgactagctctccacaccactatcccaaaccaaacttttccatgatcaaaaaatgctgcagactttttgagttcccagtatatttaagtcctttaggaaggttgaaggagacaggcaaactcgagttactgccctgcccactgctcctcacggcgcactcagcacactctgcttttaaaaatagaaagcaagggttttgataaaatgccaggcccaagtttagatgtgcacttgactttaaacagcacattaatagaatcacttcccttgttttctttcttctttttttctttgtttatcttaagactttaaaaatcttgccattgttatttagcatataattgtcccaatcaaaagaaaataatgaaaactatattttcaaacctgtgttttcataggagctagaaaagctaatgcaggcaggtgtgtaataagtttttgtcaaagggaacattagaattctgcctcgagtcagctctcttgacttgacttgtgttgaaatcagaatctattctggtatttgatagacaaatatgtgggaaaccataatcaaaggccccgtggagttagtcatagaataaagcactgtcctggacggaaaagcccctctaaaagcaaactgagcaagaggacaatgtgactgacaccagacccaagaggcagatgaggggtcagtcacgctactgcctttctcctgggtttgctttccatttctaataaaagcctgatgttgctgttgtccaacctgaaaatcacattcagttctgagtttcagataaaccattataaaacatcaaagtcagtacatactgctcctttgaaatttgcgtaaaaaattatacaaccatatatatatagtcatttttgtatttttctatgttgtgaaagccaaaattgtaattttataagtctttgattcactaaaattatataatttaaatgtatttttgtatatttagaaataaggagctcaaagactatgcttaactttctatgcatgcatttgaaagctgtttttatctgatgttaatgtagtaagttatactcataaaacactgatctgcgttgcattagaaaataaactggtgtgtgctctg

SEQ ID NO: 2629 - DNA, 1900 bp, Cricetulus griseus
tggaggtctcagagacaccgaaggctgaaaaggcaccagaggtctcagaggctgcaaaggtccccaaagcctctgggaacccgaaagccacagaggtctcgaaggccccagaggattctgaggcagctgccacccagccttcaactaccacacagctgactgatacccaggttctggcagctgaaaacaagagcccagcagctgacaccaagacgcagaaggctgacctgcaggctatgacaatgcctgcaacccagaccaaaaaggtcagctgtgttactgatccgaaggtcagtacaaaggcccctgagactgaggctgctgactctcaggctggagcagatgaaccagagcctgagggtgcagctgtccaggtccaggagaatcaggatactcggcccaaggtcaaagccaagaatacccaaaaggtgaaacacttggatggggaagaagatggcaacagtgatcagagtcaggcttcggaaaccacaggtggtcggagggtctcaaaggccctaatggcctccatggcccgcagagcttcaaggggacccatagccttttgggcccgcagggcatcaaggactcggttggctgcttgggctcgcagagctttgctttctctgaggtcacctagagctcggagaggcaaggcccgaagaagagctgccaagctgcagtctgcatcccaagaacctgaagcacccccacctagagatgtggcccttttacaaggaagggcaaatgaattggtgaagtacctgttggctaaagatcagacgaagattcccatcaggcgctcagatatgctgaaggacatcataaaagaatatactgatgtataccctgaaatcatagaacgagcaggctattccttggagaaggtatttggaattcagctgaaagaaatcgacaagagtgaccacttatatattcttctcagtaccttagagcccactgatgcaggcatactgggaacgaccaaggactcacctaagctgggtctcctcatggtgcttcttagcatcatcttcatgaatggaaatcgatccagtgaggctgtcatctgggaggtgctgcgcaagttggggctgcgccctgggatacatcactcactctttggggatgtgaagaagctcattactgatgagtttgtgaagcagaagtacctggactatgccagagtacccaatagcaatcctcctgaatatgagttcttctggggcctgcgctcttactatgaaaccagcaagatgaaagttctcaagtttgcttgtaaggtgcaaaagaaggatcccaaggaatgggcagctcagtaccgagaggcgatggaagcagacttgaaggctgcagctgaagctgctgctgaagccaaggcgagggctgagattagagctcagatgggcattgggctcggctctgagaatgccgctgggccctgcaactgggacgaagctgatattggaccctgggcaaaggcccggatccaggcaggagctgaaactaaagccaaagcccaagaaagtggtggtgccagtgccggtgccagtaccggtaccagtgttggtactggtgctagtgccagtgccagtgccagtgctggtgccagtggtggtgccagtggtggcttcagtaccagctccaacctgactgccactctcacttttgggctcttcgctggccttagtggagctggggccagttccagcagcagctctggtgcctgtggtttctcctacaagtgagattcagatattgctatattcacagcatcttcttctcaagccagggtgtgctttcggaaacgtactcaacacagcactctaggcagccactatcaatcaattgaagctgacactatatattaaatctatttgccatttctaaaaaaaaaaaaaaa

SEQ ID NO: 2630 - DNA, 1900 bp, Cricetulus griseus
ctggcatccaaatatccagattttaagcagcatattcagataaatctgagtgggagagtaagtcttaatttcaaagaccctgaagcagtcagagctctgacttgtacgctcctaagagaagactttggactttctattgatattcctttagagagactaattcccacagttcccttgagactcaactatattcattgggtagaagatctgattggtcaccaggcttctgacaaaagtactctccgaagaggaattgacataggtactggggcgtcctgcatctatcccttacttggagcaaccttaaatggctggtatttcctggcaacagaagtggatgatatgtgcttcaattatgccaagaaaaatgtggaacagaataacctatctgatctcattaaagtggtaaaagtgccacagaagacactcctaatggatgcgcttaaagaagagtctgagataatctatgacttctgcatgtgcaaccctcccttttttgctaatcaattggaagcccagggtgtaaactctcggaattctcgaagacctccacctagttccgtaaatacaggaggcatcacagaaatcatggcagaaggaggtgaactagaatttgtcaaaaggataatccatgacagtttacaacttaaaaaaagattaaggtggtacagctgtatgctggggaagaagtgcagtctggcgccactgaaggaagagctcagaatccaaggggttcctaaagtcaccttcacagagttctgtcaaggccggacaatgagatgggccttagcttggagtttttatgatgatgtcacagtaccatcacctccaagtaaacgaagaaaattagaaaagccaaggaaacccattacatttgtggtgttggagtctgttatgaaagaattatccctcaaagcctcatctttgggctctgagacggtggaaggcataggagttgtgacaacgtggatagaaagaattctcactgatctgaaggtccaccataaacgaattccgtgtggaaaagaagaagttagtattttcgtgacagcaatagaaaactcttggattcatttaaggcggaggaggagagaacgagtgagacaactaagggaggtgccccgagcacctgaggatgttatcctagccttggaggagagaaagtccacgcccaaagagttgagtggtagccaagatgtggtcccatgctcccaggagagtgccttgtgtggccttgctgtaccagaaggcgagtctgccactgttggtggccattgcctcagccaggagtcattttgccaggaggaaactccagaagccatggaagatgaaaggagtgaggaaagggaaggaacggaggtcatggaaagttgtaagggctctagcaatggagcccaggacggagaggcttctgagaagggagaccgcctggatggagccgctggacgttacctgtttaagtgcctgatcaacattaagaaggaagtagatggcgccttagttgaaatgcattgggtcgagggccagaacagggatttgatgaaccagctctgcacctacatacgtaaccaaattttgaggcttgttgctagttaattcttaatttcttctacagttagaaaagcgtctgtatatggctgggggtatggtgcaatgactgtgtgtgcttagtatgcagaaggcaccctgggttgagtccttaacatctagcatcaattacaaaaaaaaaaaaaaaatctaataacatagctttggaggtggagccttttgggaaatcagaagaatttcaccactggtccattagtgacaccatgtggaatcatgttacaaagcagaaatttagttgaatgtgatctctaacacttataatcccaatgtttggaggctgaggcaggatgat

SEQ ID NO: 2631 - DNA, 1900 bp, Cricetulus griseus
gcggcagcagcagcagcggcagcagcagcgggtgcaggcactcagaaatattcagaatgagtacgacaaggtggacaccttgttcttaagggcaattcatgaccttgaaaggaaatatgcggagctgaataagcctctctatgataagcgttttcagatcataaatgcagaatatgagcctacggaggaagaatgtgaatggaactcggaggaggagttcagcggtgatgaggaaatgcagaatgacacacctgatgaaatgccgcccttagagggtgaggaggaagaagaagcccgtaaagaagaggctggagtaaaggaagaaggaaagaatgttccaaatgaagttccctgacgcaaaacttgaaggtgaagctcccaaaagaaagtcctgaggtgaaaactgaagaagaaaagaagaccccaaagaagttccccaagcaaatgcagaaaataaagatcagcctacagaagaatctaagccaagggctccccttaagagaggctcaaaaaagagttcctgagacaaggcctgaaagagggcatgttaaaagggctcgaaagggaaaacctaagagagaagatcctaaaggtattcctgactactggctgactgttttaaagaatgttgataagcttgggcctatgatccaaaagtatgatgagcccattttgaagttcttgtctgatgttagcctgaagttctcaactcctggccagcctgtaagttacacttttgaatttcatttcctgcctaacccatacttcagaaatgagctcctgatgaagacatacataataaggtcaaaaccagatcactatgaccctttctttgcttggggatgggaaattgaagagtgcaaaggctgcaaaatagattggagaagaggaaaagatgttacagtgacaaccgccccgggtcgcccagctgctactggagcaattgaagtccagccaagattggttcctaatgcatccttcttcaatttctttaatcctcctgagattcctttgattgggaagctggaaccaagagaagatgctatccttgatgaggactttgaaattggtcaaattttgcatgataatgtcatcttgaaatcaatctattacttcacaggagaaatcaatgatccctactaccatgatgtcagggattacggaaacaggaagtactacaagtgaaaagggcaagctgaaagatttttcaagaatgttaaaaagtcaagaagcaagcagaagtaaaacagattcacctaaccttgtaaaagataaaacttgtcctataacctgaacactactactccttattgtaatattcttcaaaatatgtaaagtgctgttaatgttccaaagcatgttttgtttggtgctacagtgttggttttgtgaagtccttatgtcatgttcctattagattgtacctgtgcaaattgtcagacttgttagacaaatctttgcctgaaaaagcaaaacttaaatgccaatgtatatgtgttttctctttcttttttcagcccagaagattaaggacttaaatctgcttgcactagttgtgccttcattactttgccatagaaatgtagtaataatgctaactaaaacattctattgtgaaatgtagttgcttgagaaaaaagatgataatatatttaaaaatatctgtcagtaccacattagacttttgtgggtttgtttatgtgatgtactggtctataagcaaaagtattatttaaggtgttaaatatgatacagtattttaaagagttgcatcattgtatattgtgtaattgaaaagaaaagaaagtatattttggttgtattgtgttttactttgtccttttaaataaaatgtaatactataaaaaaaaaaaaaaaaaaaaaaaaaaaaaaaaaaaaa

SEQ ID NO: 2632 - DNA, 1900 bp, Cricetulus griseus
gtggttattcatgacttcgagttacctgatgaagactttgggcctcttaagcttaaaaagttgaagtcctactcagaaaagctgattgagcctcctaacttaaaaaactatggagagaggcttccttgggaaagaaatcatgccactctggaggaactagcaaataagaattacagaaataggaggacttgaaagaggaactaccctcgctccatcaagagaggaacagcatccagggccaaccctgaaaaggaagcctaccagcaagggcctttcttcatccgtgctgcttttcactcctacagatacggctgcacctaactacagtggcagatctactgcctacctgtgttcacctgctttccctgtcttaggcgtgactccagcttttgcctcccaagcaaccagtgagaatgtagccactgaaattaggcagacttgctctacatcccagccttctcacttgggagacacaagcagacttgctaataacaaacaatgcaacagttcagccagctcaccaaaactggataccaacctgcatgtgtcaggtaggcaaggacaacctgcctgtgacagtgactctggcccccaagcaacacctctacccattgagtcattcactttcagagaaaatcagctctgtggaaatgcatgcctcaagttacatgaatattccactgaacagactgaaatcacagacctccctgcttgtgacagctggaaccccggcagcctacacttggtctcaaagttcaagaacccttctagttcctgttctgtggatgtgagtgccgtgtggtgggaaagagctggtgttaaggaaccatgtatcataactgcttgtgaagatgtagtttctctttggaagcccttggatactttgcagtgggaaaaagttcatacctggcaattcacagaggttccagtgttacaaatagttccggtgcctgatgtttataatctcatatgtgtggctttgggaaatttggaaatcagagaaatcagggcattgctgtgctcctctggtgatgaaagtgaaaagcaagtactactgaaatctggaaatataaaagctgtgcttggcttgacaaagagaagactagttagtagcattggaaccttttgcaatcaacaaatacaaatcatgacatttgctgaagatggaggtagcaaagatgaacagcttttgatgccccctgatgagactatattgacttttgctgaagtccaggggatgcaggatgctctgcttggtaccaccactgtgaacaacattgtgatctggaatttaaagactggccaactcctgaaaaaggtgcacattgatgactcttaccaagcttcgatctgtcacagagcctattctgagatggggctcctgtttgttgttctgagtcatccttgtgccaaagagagccaggcctttggaagccccatgtttcagcttctggtgattaaccctaagacagctcagagtgtgcgtgttctgctatgctgtcttcctcaagggcaggctggaaggttcctggaaggggatgtgaaagatcacattgcagcagcagtcctgacttctgggacaattgccatttgggacttgcttttgggtcactgcactgctgtcctcccacctgtctctgatcagaattggtctttggttaaatggtcaggtacagactctcatttgctagctggacaaaaggatggaaatatattcatataccgctacttttaagaggcaatagtttcctgggtatttggctcttaatagttttttttgaaaaagaatacaatatctaaaagacatttgacctgattgcttgaatgagttcccacaaacttaattttattttgatggtgtcactactgacaatatttgtttgtgaatgttattaattat

SEQ ID NO: 2633 - DNA, 1900 bp, Cricetulus griseus
tgcgctgcaacgagtttgagatgcgcctttcggagcctgtcccacagacaaatgcccatgagagcaaagagtggtaccacgcaagcctgaccagagctcaagctgaacatatgctgatgcgcgtgccccgtgatggggccttcctggtacggaaacgcaatgagcccaactcatatgccatctctttccgggctgagggaaagatcaagcactgccgagtacagcaggaaggccagactgtgatgctggggaactctgagtttgacagcctggttgacctcatcagttactatgagaagcaccccctctaccgacaaaatgaagctgcgctaccccatcaacgaggaagcactagagaagattgggacagctgaacccgattatgggcactctatgagggccgcaatcctggcttctatgtggaggcaaaccctatgccgactttcaagtgtgtgtaaaagccctgtttgactacaaggcccagagagaggatgagctgacctttaccaagagtgccatcatacagaatgtggaaaagcaaggatggtggctggtggcgaggggactatggtgggaagaagcagctgtggttcccctcaaactatgtggaagagatgatcaacccagtcatcctagagccagagagggagcacctggatgagaacagcccactgggggacttgctacggggggtcttagatgtgccagcctgtcagattgccattcgtcctgagggcaagaacaaccggctcttcgtcttctccatcagcttggcatcggtggctcactggtccctagatgttgccgccgactcacaagaggaactgcaggactgggtgaaaaagatccgggaagtggcccagactgcagatgccaggcttactgaggggaagatgatggagaggaggaagaagattgccttggagctttctgagcttgtggtctactgccggcctgttccctttgatgaagaaaagattggcacagaacgcgcttgttaccgggacatgtcctcctttccggaaaccaaggctgagaagtatgtgaacaaggccaaaggcaagaagttccttcagtacaatcggctacagctctctagaatctaccccaagggacagagactggactcctccaattatgatcctctgcccatgtggatctgtggtagccagcttgtggcactcaattttcagactccagacaagcctatgcagatgaaccaggccctcttcatggctggtgggcactgtggctatgtgctgcagccaaacaccatgagagacgaagcctttgacccctttgacaagagcagcctccgaggtctggaaccttctgtcatctgcattgaggtgctgggggccaggcatctgccaaagaatggccgaggtatcgtgtgtccttttgtggagattgaggtggctggagcagagtacgacagcaccaagcaaaagacagagtttgtagtggacaatggactgaaccctgtgtggccggctaagccctttcacttccagatcagtaaccctgagtttgcctttctacgctttgtggtgtatgaagaagacatgtttagtgaccagaacttcttggctcaggctactttcccagtaaaaggcctgaagacaggatacagagcagtgcctttgaagaacaactacagtgaagacctggagttggcctccctgctcatcaagatcgaagttttccctgctaaggagaacggtgacctcagtcccttcagtggtacatccctacgggaaagggcctcagatgcctccagccaactgtttcatgtccgggcccgggaaggctccttcgaatcccgataccagcagccatttgaagacttccgcatctcccaggagcatctcgcagaccattttgacagtcgggaacgaag

SEQ ID NO: 2634 - DNA, 1899 bp, Cricetulus griseus
aagaggcggaagatcacctccaactgtaccataggtcttcgtggactgatcaacctgggaaacacatgctttatgaattgcatcgtgcaggcgctgacccacacaccgcttctgagagatttcttcctgtcagacaggcaccgctgtgagatgcagagccccagctcctgcctggtctgtgagatgtcctctctcttccaggagttttactcggggcaccgctccccgcacattccgtacaagctgctgcacctggtgtggacgcacgcccggcacctggcaggttatgagcagcaggacgcacatgaattcctcattgcagccctggacgtcctccaccggcactgcaaaggtgatgacaatgggaagaaagccaacaaccctaaccactgcaattgcatcatcgaccaaatctttacgggtgggctccagtctgatgtcacatgccaagtctgccatggcgtctcaaccaccatagaccccttctgggacatcagtttagacctgcctggttcttccaccccattctggcccttgagcccagggagtgagggcagtgtggttaacggggagagccatgcctcaggcaccaccactcttacagactgcctgcgaagatttaccagaccagagcacttaggaagcagtgccaagatcaagtgtagcggttgccatagctaccaagagtccacaaagcagctcaccatgaagaagctgcccattgtggcctgcttccatctcaaaagatttgaacactcggccaaacttcggcggaagatcaccacatatgtgtcttttcccctggaactggacatgacaccctttatggcctccagcaaagaaagcaggatgaatgggcagtaccagcaacccctggacagtctcaacaatgacaacaagtactccctgtttgctgttgttaaccatcaggggaccttggagagtggccactacaccagcttcatacgtcagcacaaagaccagtggttcaagtgtgatgatgctatcatcaccaaggccagcatcaaggatgtgctggacagtgaagggtacctactcttctaccacaaacagttcctggaatatgagtagcctcctgccctgctggtcaaggaaaaagaggagactgcattgcattgtgtcacccacttgcctctgctctgtgtttggctgtagtttcggttttacagccaagataaaaaaaaggacttagtgaccagttctgctgacagggtcaatcatgaagtttcttgtaagatattttgcatgtgtctttggacaaggcttaggttgtctatttctaagagattaaaatctagggtcttagtgtcttctcttttatgccgctgccttttcagtggtgtttgcccaggagcctattggcacatcactcacaggagtttcaggaccagcaagtattccctaagatccaggctctgagctgtaggtctacagcaggtatcatgtgcatcattcatgcacagcaagtacagctgtactttttttttttttttttactatttgacacttgccatgctctcctctgttgcgttcctattctgcatttaaagaacaaacctgaagcatgttttagaagaaacccctttgagagaaacatgggtgagcccagattctcaggcatggaccggtgtttgtgggactcagctgtggagctgcctttggggaatcatattcctctgtttgtgaacacccataggaaaggcttcactgcagttggcctagaggagccagagcccaaaactcctcatgaaggcctgcctccttgtcactctggtggatggggcatccagaagcaggggaaatgagcaggtgtgctggccaggcctgcttcctctgtccccacagcacatagcccatctctacctgaatttggggcac

SEQ ID NO: 2635 - DNA, 1899 bp, Cricetulus griseus
cagaaaaacccagctcagcagatctgggcactactagctgcaagcaggagcagtcaagaggctgtggtcagaagcattgtgacctggcctgcagggcctgctttttctgccatggcagcccaaggatatggctattatcgcactgtcatctttgcagctatgtttgggggctacagtctgtactacttcaaccgcaaaaccttctcctttgtcatgccatccttagtggaagagattgctctggacaaggatgatttggggctcatcaccagcagccagtcggcagcctatgccatcagcaagtttgtgagtggggtgctatctgatcagatgagtgctcgctggctcttctcctctgggctgctcctggttggcctggtcaacgtagtcttctcttggagctccacagtaccagtctttgctgctctctggtttctcaatggcctggcacaggggctgggctggcccccttgtgggaagatcctgaggaagtggtttgagccatcccagtttggcacttggtgggctgtgttgtccaccagcatgaacctggctggaggtctgggacctattttggcaacaatccttgcccagagctacagctggcgaagcacactggccctgtctggggcactgtgtgtggctgtctccttcctctgcctgctactcatccacaatgaacctgctgatgttggactccgaaatctggaccccaccccctccaagggcaaaaaggattcatcaaaggaagagagcaccctacaggatctgctgctgtccccctatctatgggtgctctccactggctaccttgtagtctttggagtaaagacctgctgtacagactggggccagttcttccttatccaggaaagagggcagtccgcccttgtgggtagttcctacatgagtgctctggaggttggcggccttgtgggcagcattgcagctggctatctgtctgacagggccatggcaaaggcagggctgtctgtgtatggaaaccctcgtcatggcctgttgctgttcatgatggctggcatggcagcatccatgttcctcttccgggtaacagtgactagtgactcacccaagatctggatcctggtgttgggagctgtgtttggtttttcttcttatggtcccattgccttgtttggagtcatagccaatgagagtgcacctcccaacttgtgtggcacctctcatgctattgtgggactcatggcaaatgtgggcggatttctggctgggttacccttcagcaccatcgccaaacactatagctggagcacagccttctgggtggcagaagtgatatgtatagccagcacacttgtcttcttcttgcttcgaaatatccgcaccaagatgggccgagtacccaagaaggcagagtgaagagagtactcactatggagcatccccaacctcagcctccccggcagggcataaaaaaggagaagctgctctggttagcatagaccctttgccattctgtgtctacaatgtctccttggacctccatggtgctgcaagttatcagtggctaatgaggtcccaattccccatcctatgctctatttaaatgtttgtttttagactccatcagcttcaatttctaccttctaacagacagacaactcctgtattcagggtgtctcctgtacccttcttcctttcctaggtcctgattaatgcctgtggtttgttgtaccccaaggcttcttagcaggcagcagagttattgccaatacctcagtccccaagggaagagaggaagccaccattctcatcaataccctgggacaaaaggggggaatatagcaggcaagccgacttgttatagattaataaaactagatttgatactaaaaaaaaaaaaaaaaaaaaaaaaaa

SEQ ID NO: 2636 - DNA, 1899 bp, Cricetulus griseus
gggtcagtgtcaggtaccggcctggaacccgtggcccgagccccatctgtgcgcagtctcagtctcagcctggctgactcaggtcacctgccagatgtacgtggattggacagctacacaggccatcgcaccctgcagaggctcagcagtggctttgatgacattgacctgccctcagcagtcaagtacctcatggcctcagaccccaacctgcaggtgctaggagcggcttatatccagcacaggtgctacagtgatgcagcagccaagaagcaggctcgcagccttcaggcggtgcctagactggtgaagctctttaaccacgccaaccaagaggtgcagcgcgccacaggtgcctatgcgcaaccttatttacgacaatgcagacaacaagctggctctggtagaagagaatggcattttcgaactgttgcggacacttcgagagcaggatgatgagctacgcaaaaacgttacagggatcctgtggaatctgtcctccagtgaccacctgaaggaccgcctagcccgagatacactggagcagctcacagacctggtgctaagccccctgtcaggggcaggggggccccccctcatccagcagaatgcctctgaggcggagatattctacaatgctactggcttcctcaggaacctcagctcagcctcccaggccactcgccagaagatgcgtgagtgccatgggctagtggatgctctggtcacctacatcaaccatgccctggacgtgggcaagtgtgaggacaagagtgtggaaaatgctgtctgtgtgctgaggaacttgtcttaccgcctctatgatgagatgccaccatcagcactacagcggcttgaaggccggggccgcagggacatgacgggggcacctcctggtgaagtggtgggctgctttacaccacagagtaggaggctgcgcgagcttcctctaacagctgatgcactcacctttgcggaagtgtctaaggatcccaagggccttgagtggctgtggagcccccagattgtggggctgtataaccgactgctgcagcgctgtgaactaaaccggcatacaacagaggcggctgcaggggcactacagaatatcaccgctggtgaccgcaggtgggcaggagtgctgagccgcctggccctggaacaggagcgcatcctgaacccattgctggaccgagttcgcactgctgatcacaaccaactgcgctcactgactggcctcatccgaaacctgtctcggaatgccaggaacaaggatgagatgtccacaaaggtagtgagccacctgattgagaagcttcctggcagtgtgggtgagaagtgtcccccagctgaggtgctggtcaacatcatagctgtactcaacaacctggtggtagccagtcccattgctgcccgggacctgctctactttgatgggcttcgaaagctggtcttcatcaaaaaaaagagggacagccctgacagtgagaagtcctcccgggcagcctccagtctcttggccaacctctggcagtacagcaagctccaccgtgacttcagggcgaagggctatcggaaggaggacttcctgggcccataggtgaagcctcctggaggtgaagtgattcagcttccaacagataggctcagctcctactgttccacagtccatggaagagttgctgatggccacaggaactctctatctctggcgttgcaactggggattgataggcttctgcagggcaggggaagggggtggggcttgagctgctctggtgctccgggtggtgatttagtcacaatggcacggccagtggggctgcctgtggcctggcagccttgtgacagtgacactgggaataaaagtggttttgaacataaaaaaaaaaaaaaaaa

SEQ ID NO: 2637 - DNA, 1899 bp, Cricetulus griseus
ctacctcagccgctttccatcacagcctaactcagaatttactaaagagtttacagccaggaactcagcatgcagcaacactttcccactctactctgcctacacacttacagcaagcatttaatgatggaggccaaagtaaaggggacactaagttaccacggaaatctcagtgacttcccggccatcaagagaggaatcctttggctgactattgggaccgacctgatggggagtctgatgtggtcacagggctgctgcttctgtccatgtttacaatctcgtcccaagcactgtggtgaggaaggaaaactcattcagagcctcggaaataaatgcaagcaataatttctgttaaaatttaaataatattaaattctcatgcttctgagaacagagtgagaaatcatgatttttaaacattctggagaaaagatttagagaaaaagaagcccaagtttttctgtagtaacatgctttgaagaaatcaagccgattcaattagtccattttttcatgcccaccacccctttgatggatgttattagcctaaattatattgttttgtgtcatagacactgaataaggcttatttgggtcccaacactgggaaaagaactgggcatatacctgtttgaagactgtgggtttgacacctgcttggaaacagcttattggaactgatcttaacccaggatatttttcccaaagcagatctaaattgtttaatttccttaaacttacttttattcttagggggatatcacttaaccttcgtgcctcagattgcccatgagacatttgggtataataataatagcctacctcccagggaatatcagagactttactatttcaaaaatattttgagtttttctagaacatcctatataattatagtattatcttcctgcagaggttgaaaaacaaatgttttccttatagtggatataaagagcaccctatggtctttatgttttaaaaaaaatcactggaatttaatttagatacatatttgatatttaaacataccatatttgtagtgtagtagaattattagtttcagattaaatcaaaggagatgacactaactttcttaactaccaatagattttttttttaaagtctttatgatgttattacttatcatctgttttcctttgttaaacagtgtcagacttcaaggagaggaaaagaaatctctggctggtgaaattttgccccctaaataataacgttattaagtctaacctaggtgattaagagatggatgttttctctctttgcttgtgagcaaggtttataattttaagaattactgtggaactgcaaacctatttgctataactggaaaacaagagtctgaattttagtctggtgaagcacatatttccaactcaaagtttagataaggggagactgtggtttagtagcagaaggaaaaatgattatttataccatgagtgtccactctgcagagctgcttcccaccagggaaccagttcctcctcttccgtaagctctaccctacacagatgctaacgtgttcacaagccagtctctgagaaaggaacctgagacgttgatggggccttaggtaaaggcccccagttactttgctgcatctgcttgtcggaaggtgtatttttgctaacttgaaggaatatatgctgtatttcaaataagtgtgtgacttaatactttgggatttttttttccttctaaaaactgtacctgaacacaagctttgagttggtatttgtaataatctcaggacctgaaagattgtagcatttagtgtgtcttaaaaattatgtactgtaccagccatggagttttgtaaataatacctgtctccctttttttgtattattttagtaaataaataaatttaataaa

SEQ ID NO: 2638 - DNA, 1899 bp, Cricetulus griseus
tgcagtcgtgctctcctgttgcacgcaacctagggcgtctttcaaggcggacgtggctggtttcgggacttaggcactctgggggcatgaccatggctgctggtccgggctcccaggagccggaagggctcctgatagtgaaactggaggaggactgcacctggagccaggaagttcccccgccggacccagagcccagcccggaggcctcccacctgcgttttcgacggttccgctttcaagaggccgctggaccccgagaggcccttagccagcttcaggagctttgccacgggtggctacggccggagatgcgcaccaaggagcagatactggagctattggtgctggagcagttcttgactattcttccccaagagattcagagcagggtgcaggagctgcgcccagagagcggcgaagaagcagtaacccttgctagagtcttgcattcctggtcaggaggtcataagcacccaggtggaacgaaggagggaagccgtgggaccctagtgtgcagagctgcaagggaggcaggagccccagagacccagttccaggggtagacaagtttgagaacccagagagaagtgttgagtctgtttctcctgaaagtgcccatcctccggtactgctacctgggccaggccagaagggaggtgccctggagtcctgagcagggaagacctgatgacagagaagaaggacattgggaatgtcccccagaggacaaaatagaggagtccttagtgggaaccacaaattgtagaggactggtacaaccaaaggaacagcccaagaaactccatttgtgtcccttgtgtggcaagaatttttctaataactcaaacctaattaggcaccagagaatacatgcagcagaaaagctgtgtatggatgtagagtgtggtgaagtctttggtgggcacccacatttcctgtcactgcacaggacacacataggagaggaagcccataagtgccttgagtgtgggaaatgcttcagccaaaatacccacctcacccgccatcagcgcacccacacaggtgaaaagccctatcagtgcaatgtttgcggaaaaagcttctcctgcaactccaaccttcacagacaccagaggacacacactggggagaagccctacaagtgccctgagtgtggggaaatctttgctcacagctccaacctgcttcggcaccagaggatccacactggagagaggccctatcggtgtagtgagtgtgggaaaagtttctctcgaagttcacatcttgtcattcatgaaagaacccatgagaaagagagacttgaccctctccctgagtgtgggcaaggaattaataatgacagtgccacctttcttacaaaccacagagtggagaagaaactctttgaatgtttgacttgtgggaaaagtttccggcagggcatgcaccttaccagacatcagagaacacacacgggagaaaaaccgtataagtgtaccctttgtggggaaaacttctctcatagatctaacttaatcaggcaccagagaattcacaccggagaaaaaccctacacttgtcatgagtgtggagacagtttctctcatagttccaaccggattcgtcacctgagaacacatacaggagaaagaccatataagtgttctgaatgtggagaaagtttctctcggagctcacgccttacaagtcatcagagaactcacaccggttagaaacagtggtgtttctttcagctccagtttggcagaaagttgtcttatccggagctggtattctttgtccatgtggtgtattttgctggtaattaatataaagagaaagtgaacttattttaagggaggtgcagaggtgaagaactagcttaaaactaaaaagttcagtctccagaag

SEQ ID NO: 2639 - DNA, 1899 bp, Cricetulus griseus
cctgcaggaacaagaaattgagcatcatttggcatcaaacattcagcggagccgtctggtacagcatgatctgcaggtggctaagcagctccaagaggaagacctgagagcccaagctcagctccagaagctctacaaagaccttgaacagcatgattgtgaaattgctcaggaaattcaggagaagctgaccattgaggctgagagacgacgaattcaggagaaaaaggatgaggacatagcacgccttttacaagaaaaagagctacaagaagagaaaaagaggaaaaagcacattccagagcctgttgggggccgagcttttggagatagctattatcatgaagatggaggaacaaaaccaagaggaataaaagaagctgttggtactcctgcacgagtgacccacagggaccaggaatggtatgatgctgaaattgctcgaaaattgcaagaggaagaacttttggaaattgctcgacttttgatggccgaagaaaagaaagcttataagaaagccaaagagcgagaaaaatcatctttggacaaaaggaaacatgaccctgagtgcaagtcaaaagcaaagtcaacacactcaaaatcaagagagaatgaagaagcacaccgttccaagattgacaggccatcacgaccaccaccacctacagtgatggaccctgaggatctggaccacacccattttgcaaaccatcacagtgccactcgtcatttctcaaagtcggagtcctcacataaaggtttctataataagcagtaaaaaaatagaaacaaaacaacaacaaaaacgaaacaaaaatggaaacctgccttgaaaatggatttgctgtagcacgtattaactgaacgatacaaaatgcattccacattggctgttctccttctatgtgccattcctgggaattactctcaagtgttttcctaattataaaaaaaattaaagaacaaacaaggcttgcatttaggcaaaacaggcagcatcttttgccatatttttgttttataaacgtttatttttctatcataaaataatcacttttactttgaaaatgcatttcttttgcctttcatagatttcattttgttatatttattactgtaaaatgaacatatttcagtttgaaaaatgccacgccacttaaccagaatactggagtcttacttgtttcagtgggtggccagaggcagagctgcccagatgacagccagcttgacatcagtattggaaaatttgttacttttcaaaagttgttttttaagagtagaattttaaaatattttgtttattttttgtaaagtgaacagtttttaagactattagtaattactacttatgactaagaagatagaaaatgtacttaattattcttagttaatattctcaaatttttggctatcactcaaatagtgcattctttgagatgataggagccgctaaacagctcttaatggactgctactcttcactgtgggttttgcttcttttaatttgtctatttcctctctctctctctctctctctctctctctcgttgcttctgctatgtaactcatcagaaatgctcaaatttacttgtagaggctccaaaaaaagcaagaataagctaggaaatcattaatgatagagtcacttttctgatgagccctgcactttatgtcagcaatgtctgtgaaaatcagtttttgccttaaattactttgagtccaactgaggccattgtgttttgtgtatatgaactcctgtgagccctccattggcatacaattcataaaaccaaagtattatatgagtaagtgtgtgtgcttttttttgttggaaggtttgagctaaacacatatcttgtcttctcttaataaagtcgtccttttaattacaatcaa

SEQ ID NO: 2640 - DNA, 1899 bp, Cricetulus griseus
cgttgtcctgagctctgccgactgctcttccctcaggtctcgtctgctttagcggttccgaaactagcctgcgcggtgtagcgatggacgaggacaacctggagacggccctgcagacctaccgggcccagctcgggcaggtagagctggcttcttggtgctggcctggacgcttccgagcttgcggacctgcgccagctgcagggcgatctgaaggaactgatagagctcaccgaggccagcctgttgtcggtcaggaagagcaagctgctggctacagtggacctggagcaccaggcagaggaggacgctgagtacttggctttccagaaggctgtggcggaggaaggggagggcacccgtcgcccccgtgggatgactcggagactgtccctgggagcgtggtgcggcctggacccacctcccctgcacaggaggaagacgaggaggatccagatcaggaggagctgagcggtgctaaagtgaatgccccttaccacagcgcttggggcacgctagagtatcacaacgcaatggttgtgggcactgaagaggcagaggatggttcggcatgcgttcgcgtactctacctgtaccctacccacaagtccctgaagccctgcccgttcttcctggagggaaaatgccgcttcaaggagaactgcaggttctcccatgggcaggtggtctctgtggatgagctgcgccctttccaggatccagacttgagcttactgcagactggctctgcttgtctggccaagcaccaggatggcctttggcacccagcacggatcaccgatgtggacaatggctactatactgttaaatttgactcactgctgctgaaggaggctgtggtagagggagacagcatcctgcctcctctgcgcacagaggctacagagtcatctgactcagacagtggtgatgcaagtgactccagctatgccagagtggtggaaccaaacaccgtggacaccggaacctgcagttctgcctttgctggttgggaggtacatacacgaggcattggctccaaactcctagtcaagatgggctatgagtttggcaagggtttgggtcggcatgcagaaggccgagtggagcccatccatgccgtagtgttgcctagagggaaatcactggaccagtgcacagagatactacagaagaagacaaagggaggccaggctgggaccaataggcctccaagatgtcggaggagtggtggtagacccgagggccgcccaccccctcggaatgtgtttgactttctgaatgaaaaactgcaaagccaggcgcctgagaccccagatgctggggtggacactccagggaaaaggaacaaggacatgtatcatgccagcaaaagtgccaagcaggctctgagtctgcagctcttccagactgaggagaagattgagcggacccaacgggacatccggggcatccaggaggccctaacccggaatgctggccggcacagcatggcaacagcccatctgcaggagaagctggagggagcccagcggaaactgggtcagctgcgtgctcaagaagctggcctacagagggagcagcggaaggcagatacccacaggaagatgacagagttttagcagccctgcctatattgtggacagagccctgggaccaactccaaactgcgttggcagaaagacggctggcaccctgacacttgaacctggaagagggttcagcccattccaaggctgtcccttgttcagccttgtcagcctaacgtgtatgaatactactgagtagacatggggtgtcagggttgattttgaacatttatttgcccaccaagcccatctaccagtgtcttggggtagctccttaggacattaaagtgatttcatcacaatttctctc

SEQ ID NO: 2641 - DNA, 1898 bp, Cricetulus griseus
tccgctctcttccctcttcccggtttctggagcgctgtagccatgtcttatcccgctgatgactacgagtctgaggctgcgtatgatccctatgcctacccgggggactatgatatgcacacaggagacccaaagcaggaccttgcctatgaacggcagtacgagcaacagacctatcaggtgattcctgaagtgatcaaaaacttcatccagtacttccacaaaacggtctcagatttgattgaccagaaagtgtacgagcttcaggccagtcgtgtctctagtgacgtcattgaccagaaggtgtacgagatccaggacatttatgagaacagctggaccaaactaactgaaagattcttcaagaatacaccatggcctgaggcagaagccattgcaccccaagttggcaatgatgctgtattcttaattttgtacaaagaattatactacaggcatatatacgccaaagtcagtgggggcccctccttagagcagaggttcgaatcctactacaactactgtaatctcttcaactatattctcaatgctgacggacctgctcccctagaactccccaaccagtggctgtgggacatcatcgatgagttcatctaccagttccaatcatttagtcagtaccgatgcaagactgccaagaagtcagaggaggagattgacttccttagatccaaccctaaaatctggaatgttcacagtgtcctcaatgtgcttcattctctggtagacaaatccaatatcaaccgacagctggaggtctacacaagtggaggtgacccagaaagtgtggctggggaatatggacggcactccctctacaagatgctgggctacttcagcctggtggggcttctgcgcctgcattccctgttgggggattactaccaggctatcaaggtgctggagaacattgagctgaacaagaagagcatgtattcccgtgtgcctgagtgccaggtaactacatactattatgttggctttgcatatttgatgatgcgtcgctaccaggatgctatccgggtctttgccaacatcctcctgtacatccagaggaccaagagtatgttccagaggaccacatacaagtatgagatgataaacaagcagaacgagcagatgcatgctctgttggcaatcgctctcaccatgtaccccatgcggattgatgagagcatccaccttcagctgcgggagaaatatggggacaagatgctgcgcatgcaaaagggtgacccccaggtctatgaggaactgtttagctatgcctgtcccaagttcctgtcacctgtggtgcccaactatgacaatgtccatcccaactaccacaaggagccttttctgcagcagttaaaggtgttttctgatgaggtgcaacagcaggcccagctctccaccatccgcagcttcctcaagctctacaccaccatgcccgtggccaagctcgccggcttcctggacctcacagagcaggagttccgcatccaactgcttgtcttcaagcacaagatgaagaacctggtgtggaccagtggcatttctgccctagatggcgaattccagtcagcctcagaggtggacttctatattgataaggacatgatccatattgcagacaccaaggttgccagacgctatggggatttctttatccggcagatccacaaatttgaagagcttaatcgaaccctaaagaagatgggacagaggccctgaagacactcatgcaggagtgaagaacctgttttgatattgtagatgggaagcattcttgtcatcaagaagccttacctaagtcagccatcagctgagttgaaacttgttcaaatcaaggactggatgttttagggagctctcagtaaagggtctttgttgga

SEQ ID NO: 2642 - DNA, 1897 bp, Cricetulus griseus
ccattttaggtggtccgcggcggcgccattaaaagcgaagaggaggcgaagagtggccgccgctgctacttaaatcttttttttttcagtgcggccggggcagagtgagagtgcgcgccgcgcgagagtgggaggcgaggggggcaggccggggagaggcgcaggagcctttgcagccacgcgcgcgccttgtcttgtgtgcctcgcgaggtagagcgggcgcgcggcggcggcggggatcactttgctgctagtttcggttcgcggcagcggcggcagcggcgggtgtcgtctcggcggcggcagcagcactatgtcggaggagcagttcggaggggacggggcggcggcggcggcaacggcggcggtaggcggctcggcgggcgagcaggagggagccatggtggcggcggcgcagggggcagcggcggcggcgggaagcgggagcggcggcggctctgcggccggaggcaccgaaggaggcagcgccgaggcagagggggcgaagatcgacgctagtaagaacgaggaggatgaaggccattcaaactcctccccacgacacactgaagcagcgacggcacagcgggaagaatggaaaatgtttataggaggccttagctgggacactacaaagaaagatctgaaggactacttttccaaatttggtgaagttgtagactgcactctgaagttagatcctatcacagggcgatcaaggggttttggctttgtgctatttaaagagtcggagagtgtagataaggtcatggatcagaaagaacataaattgaatgggaaagtcattgatcctaaaagggccaaagccatgaaaacaaaagagcctgtcaaaaaaatttttgttggtggcctttctccagatacaccagaagagaaaataagagagtactttggtggttttggtgaggttgaatccatagagctccccatggacaataagaccaataagaggcgtgggttctgttttattaccttcaaggaagaggagccagtgaagaagataatggaaaagaaataccacaatgttggtcttagtaaatgtgaaataaaagtagccatgtcaaaggaacagtatcagcaacagcagcagtggggctctagaggagggtttgcaggaagagcccgtggaagaggtggtggccccagtcaaaactggaaccagggatatagtaactattggaatcaaggctatggcaactatggatataacagccaaggttacggtggttatggaggatatgactacactggttacaacaactactatggatatggtgattatagcaatcagcagagtggttatgggaaagtatccaggcgaggtggtcatcaaaatagctacaaaccatactaaattattccatttgcaacttatccccaacaggtggtgaagcagtattttccaatttgaagattcatttgaaggtggctcctgccaccttgctaatagcagttcaaactaaattttttctatcaagttcccgaatggaagtatgacgttgggtccctctgaagtttaattctgagttctcattaaaagaaatttgctttcattgttttatttcttaattgctatgcttcagtatcaatttgtgttttatgccctccccaaccccccagtattgtagagcaagtcttgtgttaaaagcccagtgtgacagtgtcatgatgtagtagtgtcttactggttttttaataaatccttttgtataaaaatgtattgactcatttgtcagcaggtaggtgtgtgtgtgtgtgtgtgtgtgtgtgtgtgtgtgtgtgtgtgagagagagagagagagagagagagagagagagagagagagagagagagagagagatttttaatttttttttttttaaagaaagaaagaaa

SEQ ID NO: 2643 - DNA, 1897 bp, Cricetulus griseus
gaagttcggagacatctagtggaagcagccagcagagaaaacctgcccatcaggatgagtatggggagagtcacaccagggcagctcatgtcctatattcagctcttcaagaataacctcaaagctcttacaaatcactgtgggctcctacagcttgggatggccacagttcaaaccctgaagcatccacagactgccaagtgggataacttcctggcttttgaaaggctccttctacagagccttggggattcaaccatggctgttgtgctaaatcagctgctacctatgattaagtccccaagccagagaaccagtgatgactacagctccgaggaactgttaatcctcctcatatacatttactctgtcactggagagtttgtgctggacaaagacctgagagaagctgaagacagggtgaagaaagcattggcccatgtcttctcggaggagtcagagttgtcccctttgctacagaaaatcacaggctgtgactctgcaattaacctgacatttcccaaatcacaacttgctgtgaatgatatatttacgtctctccaagagattgctggagctaggaccctcatgagacagtttaagtctgtctatgttcctggaaatcatacccatcaggcatcctataaaccactgttgaagcaggttgtggaggaaatatttaatcctgagaagccagatcctactgacattgaacatacatcctcaggcctcactgatctccttaaaactggattcagcatgttcatgaaggtgagccggccccatcccagtgaccatcccctcttgatcctctttgttgtgggtggcatcacagtctctgaagccaaaatggtcaaagaccttgtggcatctctgaagacaggaacccaggtgatggtgctgtccacaagactcctgaagccacttaacattcctgagctgctctttgccactgaccggctacacccagaccttggcttctgacatctaagagaagataggacctgtatgaactggaaataccaatacccatctgtcaccattccagatatgcctccaaatccagtgtctgcattactaattataggtatgacttaattcgaccagagcagtcttcataaccatgcagaaggcagtgtttggactgcccccgttcttcaaaagtgaaataaagacttgcgtgtgcatcattcttttctaaaggtgtcaagctgtctttagctgacttcacctacaggccctcatttaacctctcccctattgtaatcttcctggagctgcctgcaagtcccttagctctgggtagaaacctgccggcaagtagtagtagagataagcattatggtttggagttagtcaagggaagttgggatgccacagacagaccctgggattgtgtttctctccaactccaagacatttctgaaagacaaggaaaggggggacagcctgaccagcactagcctggtggcctccatgagtggtaaatcacctcaggagtaacaaagggctgctttgttccagctggttcaaggagcagggcagccctccacttggaacagcagtgggagggacagcgagggagaccagagggctgtccctgatgaagatggtttactcctgtccagaggaagccccaagcagaagacattccctcccagggagtgtaggctggaaccccaaccccaaaatctgaaatctgtgatttcagattcctactgaaatagaaagccttcatctgagaccttacatttttttttggtcataacagaaaaacccagacgcatctagtgaaattatatgagcactctagggaaaaggaaagaaagaggaaggaaggaagagaaagacagaaagaataaaataaagaaaagtaaagtaaaaaaaaaaaaaaaaa

SEQ ID NO: 2644 - DNA, 1897 bp, Cricetulus griseus
aggaggcacagcggccggcggcccagcactgcggagcgagccagcgggccggcgccagcgcctagcagccgccaggggccgcaggaagcaccccgggggagcggcggcggcgtgtgcgtgtggcccgggtgcgggcggcggcgcgggagcagcgcggagcggcagccggttcgggcgggcgtcatcatggacgagaagttattcaccaaggagctggaccagtggatcgagcagctgaacgagtgcaagcagctctccgagtcccaggtcaagagcctctgcgagaaggctaaagaaatcctgacaaaagaatccaacgtgcaagaggttcgatgtccagtcactgtgtgtggagatgtgcatggacaatttcatgacctcatggaactctttagaattggtggtaaatcaccagatacaaattacttgtttatgggagactatgtggacagaggatattactcagttgaaacagttacactgcttgtagctcttaaggttcgttaccgtgaacgtatcaccatactccgagggaaccatgagagcagacagatcacacaagtttatggtttctacgatgagtgtttaagaaaatacggaaatgcaaacgtttggaaatacttcacagacctttttgactatcttcctctcactgccttggtggatgggcagatcttctgtctacatggtggtctgtcgccatccatagacacactggatcacatccgagcgcttgatcgcctacaagaagttcctcatgagggtccaatgtgtgacttgctgtggtcagatccagatgaccgtggtggatgggggatatctcctcgaggagctggttatacctttggccaagatatttctgagacatttaatcatgccaatggtctcacgttggtgtccagagctcaccagctggtgatggagggatataactggtgccatgaccggaatgtagtaacaattttcagtgctccaaactattgctatcgttgtggtaaccaagctgcaatcatggaacttgatgatactcttaagtattctttcttgcagtttgatccagcaccccgtagaggcgagccacatgtcactcgtcgtaccccagactacttcctgtaatgaaaatttaaacttgtacagtattgccatgaaccgtatattgacctaatggaaatgggaagagcaacagtaactccaaagtgtcagaacatagttaacattcaaaaaacttgttttcacacggaccaaaagatgtgccatataaaaatacaaagcctcttgtcatcaacagccgtgaccactttagaatgaaccagttcattgcatgctgacgcgacattgttggtcaagaatccagtttctggcatagcgctatttgtagttacttttgctttcttgagagactgcagaaataggatgtaaacattaacacctgtgagtccagttgacttccacttagctgtagcttactcagcatgactgtagatgaggatagcaaacaatcattggagcttaatgaacatttttaaataagtaccaaggccgcccctcttgttttgtttcttttcagggataccatttaatttaattgtatgatttgtctgcactcagtttatcccttctcaaatctcagccccacattgttctttgttattgtcagaaaacctggtgagttgttttgaacagaactgtttccctcctgtaagatgatgttactgcacaagtcaccgcagtgttttcataataaacttgagaactgagaaagtcaggtttgaattgtatcagtgggcacgactggtgctgtttattaaacaagataaatcaattgatcaattttggaatttgtagaattccaggtaaagaaaaataaagatcaaggccactgtgtaacctctctggc

SEQ ID NO: 2645 - DNA, 1897 bp, Cricetulus griseus
gggtggaatgcttgtggacaggaagcgcccgtaacaggacgaccattagtacaaccaatagaaaacctaggcgtaggatcctcttacagcaaatctgtggatggtagatgaagtacttgcggtgctctgttatatattgtgcaatttattttatatagtaaagtgattatgtctaactgtgatcaaatgtaactgttaaaagcctctgtgtcagacattaatgaacttgaccattcataactggtatattatgacacggaggcacatctttaagaaagccacgtgagggtgatgctaaagacgtctgtaccaaggagatggcctgggcagacgcagccttgtgtgtgacactaactgctagttccctggattcacctgtaaagcttgaatagaacgaagccctgcccatgctaccgtggacactcttttagcattcactcctgggctgtggagagtaatagaaacacgcacggtgattgcaagactgtaaagctttttaaacccttcttcctttgttttgaattctggggacaatctgactggatgtgacactgcagagtagatttaagtcactgtgtgaatactggctctccagcttcagtttgttttctaaaaaaggagaaacaaaatagttttttactgaattaaaagatgcctattagaaacctccccctttggggttttctctgggccttttggtaataaatgtgttttctgcagcccagattgtgggtttgggtttttgtttttgttttcttttttttttcttatgtttgtgttttatttttttttcatctctatgggaaattttgttatgcactactactttttatattctagaacgttttcagaagttggctgatgattttcgtttatttgtttttaaggaaaagcgcgctttctgactgacctgatcttttgcaatacctcaattttgaaatataggaaagaaaatgatattttctaagtaagtttattcagaaaatatatattaatttaattctgcaagaaaatgatttaacagatgggtaactttatttttttcatgcttatttgtgttttttgaaaatgaagaagttagagctttataactatactattaaatttcccttaatttgtatatttataatcaagtgttgattgtgcgactgaccaggattgtgaaagagctcttctgtttgtatttttttaaagagaacttttttagtttattaaattataacatgttcccttttgtttttgtaaataaatgtcgcccccccccaagttcttaatgttatattaaaagagagggtccttcaagaaaattattttttaaatcacagaggtgttctgccctgcaacttgactgggaagcccctggtaacacaggtcctgccgtggccttccttgatgggacacttgaactaagtggagttttgaaggctgtaactaacctcgactctttgttgttacgtgcaatactgtttatactgtttgtaataaaaaataagaaaaaaaagaaaagaaaaaggcataaatctttattgcagatttattttcattgcagactttagacattgtgactcacggaactcattttctactgtcaatatgtaccttttcctcatgctggtattttttcaatagtaacgtagcctttgtactgagacaaattttcattgttatttttagaaagattttttgctaagaaaaaattaaacatatttacatatttttcattttatttcgtattttctttaaggagtgctttctcaatcactactggagttgtttctgggagggactttcatatctggtcaacgtcataatattattttgtattttacttggaataaattaatttatgatgctaattctttaaaagtttatttttttctattttctagttattttt

SEQ ID NO: 2646 - DNA, 1897 bp, Cricetulus griseus
ctagcctggagacggaaataccttgaagttctggattggcatctgagcaggggtgtcagaagtcctgacaggcagacacaggaccacagcaattatggcttcagcattcatggcgaatgtaaaggaggaagtgacctgtcctatctgtctggacctgatggtggaacctgtgagtacagattgtggtcacagcttctgccgagcctgcatcacactgaactacgagtccatcaaaggcaaagagggagagttcatctgccctgtgtgccgagttacttacctgtttgggaatctgaggcctaatcgacatgtggccaacatagtggagagactcaaagggttcaagtccagtccagaggaagagcagaaggtcagtgtctgtgcaaagcatggagagaaactccagctcttttgtgagaaggacaaggtggccatctgctggctttgtgagcgatctcaggaacaccgaggacaccaaacagttctcatcgaagaggtggcccatgagtacaaggagaagctccaggcagctctgaagaagctgatggcagacaagaaaaaattagagaactggaaagatgatcttcagaaggagaaagcttcctgggagaacaaaattcagaaagatgtagaaaatgttcagacagagtttagaaaactagggagacattctggactctgaggagaagagtgagctgcagaaactgatgcaagagaaggaaggacatcatgaacactggcagaggctgaagataaacaatgcccagcagagcaagttactaggagacctcatctcagatgtggagcatcagttgcagtgctcaaccatggaaatgctgcagggtgtggatggcatcatatcatggagtcatgccttttcactcaagagacccaaaactatccccaaggaacgaagaagagtgttccgagcccctgatctgcaaggcatgctgcaagtcctgcaagagctcatagaagcccaacgttactgggttcaagtgacattgattgaaaacaacaatccaaacattgtcattactgcggacaagagacaaataagatatgaagaccatcaaacaagaaatgttgcatctgggggtcagaactgtcgtgaaggtgtcctgggctaccctgctatccaatcaggaaaacattattgggaaatggatgtgtctggaaaaggtgcctgggttctgggattaagtgatggaagctacctcttcaatccgatatttcattcaaatgctgaaagatgcctaaatcctttatttcgtttgggtatcagcaatgactcacattatcaacctaaatatggcttctgggtcatagggttgtggaacaagtttgtgtataatgcttttgaggagtgtactttcacaggcaagcccagggtcttgaccctctcgctgatggttcctccctgtcgcgttggcgttttccttgactatgcagctggcacgctctcgttttacaatatttcccaccatgggactctcatctatagattctgtgcaaattcctttcctgatagggtttttccatattttaatcctatgggatgttcagagccaatgacagtatgctggccagactcttaaaccttcacctgtttctgtgcaggctctctggtgtgtatcttatatgcctgagctcatgggtagcattttaccctttaatatatacatatatctgctgtctctagtcttcctgtatgaacatctttcactgccaaagaggatatagtcatttctttaggctatattctcagttctttggtttttttttagagaggaaggaaggaaggaggaaaaaagaaagaaagaaagaaaaagaaagaaagaaagaaagaaagaaagaaagaaagaaagaaagaaagaagaaaaaaaaaaaaagttaa

SEQ ID NO: 2647 - DNA, 1896 bp, Cricetulus griseus
gtttgtcgtaggatgtgacagagggaagatcctcttcgtctctgagtccgtcttcaagatcctcaattatagccagaatgaccttattggccagagtttgtttgactatctgcaccctaaagatattgccaaagtcaaggaacagctatcttcctcagacaccgcaccccgggagcgactcattgacgcaaagactggacttccggttaaaacagatataacccctgggccatcccgactgtgctctggagctcgccgctctttcttctgtaggatgaagtgcaacaggccttcagttaaggtggaagataaggactttgcctctacctgctcaaagaaaaaagcagatcgaaaaagcttctgcaccatccacagcacaggctatctgaaaagctggccacccacaaagatggggctggacgaagacaacgaaccagacaacgagggctgtaatctcagctgcctcgttgcaattgggcgactgcattcacatgtggttcctcaaccagttgaacggggaaataagggtgaaatctatggagtatgtttctcgacacgccatagatgggaaattcgtttttgtagaccagagggcaacagctattttggcatatctaccacaggaacttctaggcacatcatgttatgaatattttcatcaagatgacataggacatcttgcagaatgtcacaggcaagttttacagacaagagaaaagatcacaactaattgctataagtttaagatcaaagacggttcctttatcacactacgaagtcgatggttcagtttcatgaacccgtggaccaaggaagtagaatacattgtctcaaccaatactgttgttttagccaatgtcctggaaggcggggacccaaccttcccacagcttacagcggccccccacagcatggacagcatgctgccctctggagaaggtggcccaaagaggactcatcccactgttccaggcattccagggggaaccagagctggggcaggaaaaatcggtcgaatgattgcagaagaaatcatggaaatccacaggataagagggtcatcgccttccagctgtggctccagcccactgaacatcacaagtacgcctccccctgatgcctcctctccaggaggcaagaagattctaaatggagggactccagacattccttccactggcctactatcagggcaggctcaagagaccccaggttatccatattctgatagttcttctattcttggtgagaacccccacataggcatcgatatgatagacaacgaccaaggatccagtagtcccagtaatgacgaggcagcgatggctgtcatcatgagcctcttggaagcagatgcgggcctgggtggtcctgttgactttagcgacttgccatggccgctgtagacacattttgctttggcaacagctacagtatcaaagtgcattactggtgaagttttacagtctgtgaagcttactggatagggagagaacagcttttatgtactgactccataaaagccatctcagagccattgatacaagtcaatctaccatgtgtaacttcagacaaagtggaactaagcctgctccagtgttttctcatcatcgagtttgggctagctgtggatagcttgcattaattgtatattttggattttgtttgtgttgaattttttaatcattgtgcacagaagcatcattggtagcttttatatgcaaaatggtcatttcagatgtatggtgtttttacactacaaagaagtcccccatgtggatatttcttatactaattgtatcataaagctgtttattcttccttgtaagaatcctttactataaatatggttaaagtataatgtattagacagttaaatatttttaataaatgttt

SEQ ID NO: 2648 - DNA, 1896 bp, Cricetulus griseus
ctaagatgagcattaccagcgacgaggtgaattttctggtatatcgctacctccaggaatcagggacaagacagcaagcttcgggagaagctcgctcagcagcaagccaatgcagcggctgcagcggcggcggctccccgcagccacagccacaaccacagcagctacaacaccagcagctgctgctcagcaaaacccaccaaagaatggagaagccaccgtgaatggggaagagaatggagcccatgcaataaataatcactcaaaaaccaatggaaatagatggagacgttgaaattccaccaagcaaagcgacagttcttcgaggccatgagtctgaggtgttcatttgtgcctggaatcctgttagtgacctgcttgcttctggatctggagactccactgcaaggatatggaaccttaatgagaacagcaatgggggctccacacagcttgtgctgaggcactgtatacgtgaagggggacatgacgttcccagtaataaggacgtcacctcactggactggaacagcgatgggacactgttggcaacaggttcctatgatggctttgcaagaatatggacagaagatggtaacctagccagcaccttaggtcaacataaaggccccatctttgccttgaagtggaacaaaaggggaattatattttgagtgctggtgtggataagacaactataatttgggatgcgcacacaggagaagccaaacagcagtttccttttcattcagcacctgcccttgatgtggactggcagaacaacactacctttgcttcatgcagcacagacatgtgcattcatgtgtgcaggcttagctgtgaccgcccagtcaaaaccttccaaggacatactaatgaggtcaatgctatcaaatgggatccttctggaatgctgctagcctcctgctctgatgacatgacactgaagatctggagtatgaagcaggatgtatgtgttcatgaccttcaagctcacagcaaagagatatataccattaagtggagtcccacaggaccagccaccagcaacccgaactccaacatcatgttagcaagtgcttcatttgattctactgttcgactgtgggatgtggaacgaggcgtttgcatccacactctgaccaagcatcaggagcctgtctacagtgtggcattcagccctgatgggaagtatttggccagcgggtcctttgacaagtgtgtccatatctggaacactcagagtggaagtcttgtccacagctaccgaggcacaggcggcatatttgaggtgtgctggaatgctcgaggagacaaagtgggtgccagtgcatctgatggctctgtctgtgttttagatctccgaaagtaaacacaaaatgtagaaaacaaaaccattctaatggaccagcagtgaatgtgtgggattgcagcatccttcctatgatgggctccaaactgtgtgaacttgacttgttcgagtctacttggaaatcacctatccctggccacaggattctccctcccccccccttaactctgcatccagaagtttaaaacacaaacaaatacaaagtcatacacatggttgtatcacaggaatatggtttccacctagaatgctcagctggggaaggatgaagccatcagctacatggtgcatggtttggtttccatccagaacaggctctcatgactgaacagggaagaaagaacataaagctgtgccaaaaaataaagaaaaggttttaaaaaagaaaaacaaaaaatgctgtgataaaccaaaagggaggaaaaatctgccccttatggtatttccctcctatcaatttggatactacagttgctctccaaaagaccggtttgtaccaatgaaacgtgtgactttgtaatccc

SEQ ID NO: 2649 - DNA, 1896 bp, Cricetulus griseus
acggactgggaggcctgggcgtttccgggcgacccaactgcggtgcgagccgccgtggggactgcgaagcgggccgggagaccgggatggagcctcccggaggtgcttgaggcgggcgagcgggcggagaggctacccggatcggacacgtcagcgaggacatggctcacctccggggcttcgggaaccagaattctcgtgtggacccagaggaactcttcaccaagcttgaccgcattggcaagggctcgtttggggaggtgtacaaaggcatcgacaaccaaaccaaggaggtggtggccatcaagatcattgacctggaagaggcagaggatgagattgaggacatccagcaggagatcactgtgctcagccagtgtgacagcccttacatcacccgctacttcggctcctacctgaagagcaccaagctgtggattatcatggaatacctgggtggtggctctgcactggacctgctaaaacctggtccactggaggagacctacattgccaccatcttgcgggagatcctgaagggcctggattatctgcactcagagcgcaagatccacagagacatcaaagctgccaacgtgctgctctcagagcagggtgatgtgaagctggcagacttcggtgtggctgggcagctcacagacacacaaatcaagaggaacacgtttgtgggtactcccttctggatggcacctgaggttatcaagcagtcagcttatgacttcaaggctgacatctggtccctgggcatcacagccatcgagctggccaagggggagccgccaaactctgacctccaccctatgcgagtcctgttcttgattcccaagaataacccacccacgttggagggccaccacagcaaacccttcaaggagtttgtagaggcctgcctcaataaggacccacgattccgacccactgccaaggagctcctgaagcacaaattcatcacacgctacaccaagaagacctcctttctcactgaactcattgaccgctacaagcgctggaagtctgaggggcatggcgaggagtccagttccgaggattctgacattgatggcgaggctgaggatggggagcagggtcccatctggacgtttcccccaaccatccggccaagtccacatagcaagttgcacaaggggactgctctgcacagctcacagaagcctactgagcctatcaagagacagccaaggtcccagtgcttgtccacgctagtccggcctgtctttggagagctcaaagagaagcataagcagagcggtgggagcgtgggggccctggaggagctagagaatgccttcagcctggctgaggagtcgtgtcctggtatctcagacaagctgatggtgcacctggtggagcgtgtgcagaggttctcacacagcaggaaccatctgacatctacccgctgaacgacggactgatgcactgctcttacagagagggagaagaaggctttttgttttgagctctaaaaggactgactgggaagccctcttgtgctgcgtcacaattgcaaagacctgccagcctgtaggcttcacgcaccaggtttccttccttcggcccccctgcagctgctagactaaggatgaaagcgactactgggcagctctggctctcaccctacaccagggatgtattgtcctggggctcataggggtccaagatggtcacaacttgccttgtggtgtcaggtcaggcactgtgtgatctcatgggtactctgaatcgttcagagttattttgggccttttctttttttctttttaaaaaaattgaacttgctaagtattctgacagtgttagttttcatagagcattagaaacgccctatcatttcaaataaagacctggattaggaaa

SEQ ID NO: 2650 - DNA, 1895 bp, Cricetulus griseus
ctgctggacactaggaagctgagtcgggatggaactgggtcccctgtgagagccagccctccttctacccctagcagcccggatgacacgttctttaaccttggagacctacagaatggcaggaagaagaaaagatccccaggctggtattgcggatcaatgccatctatgaggcccggagaggaaagaaaagggtgagaggctatctcagtccacagagagcaaactcaggaaaagtgacagatgacaacagcgaatctgacagtgacactgaggagaagctgaaagctcacagccggcgcctcgtcaatgtgaagtcacgcctcaagcaggcccctcggtactcttcacttgaccgggatctcattgagtaccaggagaggcaactcttcgagtattttgtggtcgtgtctctgcacaagaagcaggcaggggctgcctatgtgccagaactcacccagcagtttcctctgaagttggaaaagtcattcaagttcatgagagaggccgaggaccaactgaaggctatcccgcagttctgcttccctgatgccaaggactgggctccggtccaggagtttaccagtgaaacgttctcatttgtcttaactggagaagacgggagcagaaggttcggttattgccggagactgctgcctggaggcaaagggaagcgacttcctgaagtttattgcattgtgagccgcctgggatgcttcagcctcttttcaaagatcttggacgaggtggaaaagagaagaggcatctcccctgctctggtgcagcccctcatgaggagtgtcatggaagcccccttcccagccctgggcaaaaccatcattgtcaagaacttcctgccaggctcggggactgaggtgattgagctgtgccgcccactggactcccggctggagcacgtggattttgagtctctattctcctccctcagcgtccgacacttggtcagtgtttttgcctccctgcttctggaaaggagggtcatcttcattgcagacaaactcagcacgctgtccaagtgctgccatgccatggtggcgctcatctatcccttcagctggcagcacacctacatccccgtgttgccgcctgccatgattgacatagtgtgctcacccacgccctttctcatcgggctgctctccagctcactgccactgctcagggagctgccgctggaagaggttcttgtggtcgatctcatcaatgatcggttcctcagacagatggaggacgaggattccatcctgccccggaagcttcaggtagccctggaacacattctggaacagaggaacgacctggcctgtgaccaggacggaggccccctggactgtgtgcatggccctgagtccagccccttgaatgaagtggtgtccgaagcctttgtccgattctttgtggagattgtgggtcactaccccttgttcctgacatcgggcgaggagaggagcctacagcgagaggccttcagaaaagctgtctcctctaagagccttcggcgcttcctggaggtcttcatggagacccagactttccgtggtttcatccaggaacgggaactgcgcaggcaggatgccaaaggtctgtttgaggtccgagcccaggagtacctaggaaccttgcccatcggagagcacagcggagtgaataagttcctcaagggtctgggcaacaaaatgaagtttctccacaagaaataggcttcatctttgctcaaggaaaacgtcttccttcttccggactggtctatgacgccacctggtggcagagactttggacttcactgttcctgactggggttttttttttttttctgtggggacagtgagagtctgcaagtgtcctgtgtgcagcccagaaaggttctcaggctg

SEQ ID NO: 2651 - DNA, 1895 bp, Cricetulus griseus
ccaagacgctctcggagccctggggcaactgccctggccctgagccagcagcagagcctgcaggagcggctgaggcttcgtgaggagcggaggcagcaggaagagctgctcaaggccttcgagacgcccgaggagaagcgtgcacggcgactggctaagaaggaggctaaggagcgcaagaagcgggagaagatgggctggggtgaggagtacatggggtacaccaacaccgacaaccccttcggcgacaacaacctcctgggcaccttcatctggaacaaggcactggaggaagaagggcatcagccacctagaagagaaggagctgaaggagcgtaacaagaggatccaggaagacaaccggctggagctccagaaggtgaagcagctgaggctggagcgggagagggagaaggccatgcgggagcaggaactggagctgctgcagcgggagaaggaggcggagcacttcaagacctgggaggagcaggaggacagcttccacctgcggcaggccaagctgcgttccaagattcgaatccgagatggccgggctaagcccattgatctgttggccaagtacatcagcgcagaggacgacgatctggctgtggagatgcacgagccctacaccttcctcaacggcctcacagtggcagacatggaagacctgctggaggacatccaggtgtacatggaactggagcagggcaagaatgtagacttctggcgggacatgacaaccatcacagaggatgagatcgccaagctccggaagctggaagcctccggcaagggcccaggtgagcgccgtgagggcgtcaactcctcggtcagctccgatgtgcagtccgtattcaaggggaaaacatacaaccagctgcaggtcatcttccagggcattgagggcaaaatccgtgcaggtggccccaacctggacatgggctactgggagagcctcctgcagcagcttcgtgcacacatggccagggccaggctccgtgagcgccaccaggatgttctgaggcagaagctattcaagctgaagcaggagcagggcgtagagagtgagccgctcttccccatactcaagtctgagcccacggccacgcacagcccggagcctgaagagcctgccccatgcagccccggaccctcagtggaccccacagaagctgagggggctccagcatctggggaggcggaggcggaggcagaaggagacggcgaggcagtgctgatggaggaggatctgatccagcagagcctggccgactacgacgctggccgctacagcccgcggctgctcacggcacacgagctgcccctggacgcgcatgtgctggagcctcacgaggacctgcagcgcctgcagctgtcgcgccagcagctccaagccacaggcgatgcaagcgagagcgctgaggacatcttcttccggcgcgcgcgggagggcatggggcaggacgaggcacagttcagcgtggagatgccgctgggcgggcgcgcctacctgtgggccgacaagtaccggccgcgcaagccgcgcttcttcaaccgcgtgcacacgggctttgaatggaacaaatacaaccagacgcactacgactttgacaacccgccacccaagatcgtgcagggctacaaattcaacatcttctacccggacctcatccgcaagcgcgccactcccgagtacttcctggaggcctgcgccgacaaccgagacttcgccatcttgcgcttccacgccgggcctccctacgaggacattgccttcaaaatcgtcagccgtgagtgggagtactcgcaccgccatggcttccgctgccagttcgccaatggcatcttccagctgtggttccacttcaagcgctaccgctaccgccggtgac

SEQ ID NO: 2652 - DNA, 1894 bp, Cricetulus griseus
acaccttgcgggattgtattggtagcgtgaaaagcacactgagagggtaccatgccggtagaaagaatgagaatgcgcccatggctggaagaacagataaattcaaatacgataccagggctaaagtggctgaacaaggggagaaggacgcgccactcttcaggaactggggcgatccacacaggaaagcatcaaccaggagtagataaacctgatccgaaaacatggaaagcaaattttcgatgtgccatgaattccttgcctgatatcgaagaagtgaaagataggagtataaagaaaggaaacaatgccttcagagtgtaccggatgttgcccttatctgaacgaccttggtgaacatcatagttgtaggacagtcccatctggacagcagcattgaagatcaagagattgtcactaatccgccagacatttgccaagttgtggaagtgaccacagagagtgatgaccagccagtcagcatgagtgagctctaccctctacagatttctcctgtgtcttcctacgcagaaagtgaaactaccgacagtgtgcctagtgatgaggagagtgctgaggggagaccacactggcggaagagaaacattgaaggcaagcagtaccttagcaacatggggacacggagcacctacctgctgcccagcatggccacctttgtcacttccaacaaaccagatctgcaggtcaccatcaaagaggagagctgtccaatgccttacaacagctcctggcccccgtttacagacctctccctccctgccccagtgacccccacgcccagcagcagtcggcctgaccgggagactagggccagtgtcatcaagaagacatctgacatcacccaggcgcgtgtcaagagctgctaagcctttgactctctctggtggttgttgggatttcttagctttgtgttgttatttgtttgtattttatttttctctctgatccctatcttagacaaatcgaagggaaaaagccttgacaatagaatattgattgctgtgtccaactccagggctggagcttctttttaactcaggactccagccccccccttggtagatgcatatctctagaacctgctggatctcccagagctactccctcaagttcatggaccaacagccacaagggcagtggaggtgctgcgttgcctacggtcaaggccagcatggtggagtggatgcctcagaatggacgagaaaatgtgaactagctggaattttttattcttgtgaatatgtacatagggcagtactagcaacgttgcagtctgcttctgcaccttatcttgaagcacttacaatagccttcttgtgatcttgctcttcttcacagcacactcggagccccccttctgtgcccgttacctcactacccacgcctcccttttctctcctcaaaggcaatgttccacatcttggaggaggaggaggagaagaaaattaatttctccacagctgtcccactttaagactgcttgaaaaaaaaaatctttctaatctgctatgcttgaacgccacgcggtacaaaggataactgtcatggaaatattatgcaaattcccagatttgaagatgaaaatactctaattctaaccagagcaagcttttttatttttatacaggggaatattttattcaaggtaaaattctaaataaaatataattgttttttatcttttctacagcaaatttataattttaagattccttttcttgtttatcagcagttgttattacatccttgtggcactattttttttttaattttgtaaaggtgaaaaaaaaaaacttttatgaagctcatgtagcaatcaaattatcctgtggattgataataaatgaatatggtatatagttaaaatttttaa

SEQ ID NO: 2653 - DNA, 1894 bp, Cricetulus griseus
ggatcaagattatccggaggaggggtagtaccagccttccaacggacaagaagagtagtcccacaactaccaccaccaacaaaaaccatcttactcagcgacggagacaggccctccgggggaagactagccccgttctgaggaagactccccacaagggtctgatgcaggtcaccaggcatcggctgtcctgcagcttccaatgtgcacctgcggactccaccctccaataaggtgatcaagacccgctaccgcattgtccaacgaagacccccaaaccttctcccctcaatgctccatcattccccccatctctaccctcctggcgggctcggcgaatttcattatccaggtccctggtactgaaccgcctgcgtccaaccgtcactggaggcgggaaagccccacctggttcccctcagtggcgcaacaaaggctaccgctgcataggaggggttctctacaaggtgtctgccaacaagctctccaagacctgcagccggcccagtgatagtaatagggtcctccttcgcacaggacgactggaccctgccaccaccagcagtcgttccttggccagccgggccgtccagcgaagcctggccattatccggcaggcgaagcagaagaaagagaagaagagagagtactgcatgtattacaaccgctttggcaggtgtaaccgtggcgagcgctgcccctatatccatgaccctgagaaggtggccgtgtgcaccagatttgtccgaggcacatgcaagaagacagatgggtcctgccctttctctcaccatgtgtccaaggagaagatgcctgtgtgttcctactttctgaaggggatctgcagcaacagcaactgtccttacagccacgtgtatgtgtcccgcaaggctgaagtctgcagtgactttctcaaaggctattgtccactgggtgcaaagtgcaagaagaagcacacactgctgtgtcctgactttgcccgcaggggtatttgtccccgtggtgcccagtgccagctgctccatcgtaaccagaagcgacatggccggcggacagctgcacctactgctactccagggcccagtgatggagcccccaaaagcagggcctcagctggccatgtactcaggaagctctctactgttcagcgtcctgccagacagatgtccagtggtctggcctccagaactgaggccccaacctccccaccccctccccaagggtattaacctccacctctaccctgtcttcaaaggccaccgctgcctcctccccttcctcctcctgctctgctagctccccaaccccatctttggaccaggaagaagccacctctgggacaggctcaggaacaggttccagcagcctctgcaagctgccatccttcatctccttgcattcctccccgagcccaggaggccagagtgggtcccagacccccaggagcccccgtaccaaggactcagggaagccgctacacatcaaaccacgcctgtgaggctccctggggatcagcccgcacctacctcagaccctcacccctggagaggatggaggctctacccaccgctgctcctgaggagaagcagcctgccactgagcccaactggggctataagcagggacacatagctcctcacatttggcttatagcctttggagacctttgtgtgtccaagccttgttctcccttaagccaaggccctgtccattccctgttcctcacctctcccccatcagggtgccatgtgaggttcacccccgtctgtctcctgtggtgggtgtggcaatagctgaaggacttgtaccccagccctccctatccaggactcctgcccagggaagaggctactggccaggcttctctggtgggcattttatgttcagcaataaa

SEQ ID NO: 2654 - DNA, 1893 bp, Cricetulus griseus
  modified_base (1010)..(1010): a, c, t, g, unknown or other
ttattacctttgaaacagaagcggatgtctactagtcaggcttacaaataccttcgagaagaagtcagaacttttcaaggaaagccaattaaggctcgtataaaagcaaaggcaatagcgataaacacatttttgccaaagaatggatttagacctctggacatgaacctttacacacagcagcgttatgctacatcattttacttacctccagtgtatagtccccagcagcaattcccctctatatggcctgatcaccccgcagacatggtcaacaacacatagttatctcgatccacccttggtaactccatttccaagtactggatttagattggaactgggcgtgtggagccaagtagtcttgaatcctctcctggttttagggagaggaaggaaaaattcctttggctatcggaagaaacgagaagagaagtttacaagcagtcaaactcagtctccaacaccaccaaaacctccatcaccgagcttcgaactggggctgtccaacttccccccattacctggagctgcaggcaacttgaaggcagaggacttatttgaaaacaggctttctggcttgatcataggatcttcaaaagaaagaaacctcagtacagatgcaagcacaaacactgttcctgtagtggtccccagagagccttccgtgccagcgccctgtgctgtgtcaacagcatttgaacgttccccttccccagcccatttacccgaggactcccaaggtggcagaaaagcagagagaaacccacagtgtggacagactcccttccacccctactacaactgcatgtaaatcagtgcaggtgaatggagcagcaacagaattgcgaaagcccagttatgcagagatttgtcagagaacgagtagagagactccttcctccccattgcaacccccaaaagaacaaaagccaaacactgtcgcctgtgggaaggaggagaagaagcttgctgaacctgtggagagatacagagaaccccctgccctnaagtccactcctctttttttttttctaagttaaagaattctttaatgactttgccttaacttttgtaaaagacagcttagagctcacggagaccggcccctcgggttgggttggggagtggatcggttactcagtcaccgtgctgatctcctggtggtggtttgctgagtacgcttactgttgtacaagagctccagtggtgtttgtgatgtaccctacagatcttcaacagctggtctttttttctagattgttgaaaaccctgtaaatgcaaatagtcgctactgtgttaaatctgtgcacttgggagtgtgctctgcctgtacagtgtaaataatcagaacatatgagaaaggtaccctacagagaagaatctgataaaaattattgatatattataaatgttactgttgagctggatgtagataaactaaatgttgtggtttgagtattattttaatttgttaaggtttttcttttcccccttttactggtgtgttgaactgattttgcctctttgctgcaaaagggaaatggaaagtcttattaaaagcctctggatgttttcatactcttaaagtatgtaagtacatgctaatcatatctgatgtttaagggttttgaaggagagtatagagagcagagactggcaggatcttccaatgaaaataaaaaacagaaatgtactaattaaaatcatactttgctaagcgaattatcctgccagaggcaaagatgcctgatgcatgtgaccatttccttcagagcacctgtcattcagttacataggagtatacgcagtgctatttcaaatgcctgtgaaaggaacataggatgaatttcctcgtagatgtcagatcattgacaaaaaaaaaagaagaaa

SEQ ID NO: 2655 - DNA, 1893 bp, Cricetulus griseus
ccagcagcggctcggaggatgagcgggtggcggtggctgcagctgctgcggcggcactgacaggacacgagctctatgcctttccggctactcattccgctcggcctcgtgtgcgtgttcctgcccctgcaccatggtgcgccaggccccgacggcaccgcgcccgaccccgcccactacagggagcgagtcaaggccatgttctaccacgcctacgacagttacctggaaaatgcctttccctacgatgagctgagacctctcacctgtgacggtcacgacacctggggcagcttctctctgacgctaattgatgccctggacaccttgctgattttggggaatacctctgaattccaaagagtggtggaggttctccaggacaacgtggactttgatatcgacgtgaacgcctctgtgttcgaaaccaacatccgagtggtaggagggctcctctctgctcatctgctgtcaaagaaggctggtgtggaagtagaagctggatggccctgttctggacccctcctcaggatggctgaggaagcagcccgaaaactcctcccagcatttcagacccccacgggcatgccctatggaactgtgaacctgcttcatggtgtgaacccaggagagacccctgttacctgtacagcaggcattgggaccttcattgtggaatttgccaccctgagcagcctcactggtgaccctgtgtttgaagatgtggccagattggccctgatgcgcctctgggagagccggtcagatattgggctggttggcaatcacatagacgtgctcactggcaaatgggtggcccaggacgcaggcattggggccggtgtggactcctactttgagtacctggtaaaaggagccattcttcttcaggataagaagctcatggcgatgtttctagagtacaacagagccattcggaattacacccacttcgatgactggtacctctgggtgcagatgtacaagggcaccgtatccatgccagtcttccagtccttggaggcctactggcctggtcttcagagccttattggggatattgacaatgccatgaggacctttctcaactactacactgtatggaagcagtttggggggctgccagagttctacaacattgctcagggatacacagtggagaagcgagaaggctatccacttcgaccagagctcatcgagagcgcaatgtacctctaccgtgccacaggggatcccactctcttagaactcgggagagatgctgtggagtccattgagaaaatcagcaaggtggaatgtggatttgccacgatcaaggacctccgggaccacaagctggacaatcgcatggagtcattcttcctggctgagactgtgaaatacctctatcttctgtttcacccaaacaacttcatccacaacaacggctccacctttgactctgtgatgaccccccatggggaatgcatcctgggagctggcggctacatcttcaacacagaggctcatcccattgaccctgctgccttgcactgttgccggaggctgaaggaggagcagtgggaagtagaggacttgatgagggagctccactcgctcaagcagagcaggtcaagagctcagagaaagacgacgagctcagggccctgggagccgccagcagggccaggctcaccctccgcacctggaaaacaggaccagccaagggagaagcagcctgccaagcagagaaccccacttctcagctgccctagccagcccttcacttccaaactggcattgctgggccaggttttcctagattcctcataaccactggataattttttaatttttactttttttgagagtaagctataaaataataaatttgcttttggctatcaggtttta

SEQ ID NO: 2656 - DNA, 1893 bp, Cricetulus griseus
aaatctcttgaaccatccttggatcatgcaagattacaactgtccagttgagtggcaaagcaagactcctttgattcaccttgacgaggattgtgtaacagagctttctgtacatcaccgcaataacaggcaaacaatggaggatttaattcattgtggcagtatgatcacctcacagccacctaccttctgcttctagccaagaagtctcgagggaagccagctcgtttacagcttcccactttctcctgtggaatctccagcactactccaaagtcaaagaatctgagcctggaagatatgaccacaagtgatgatagtgtggctggattaatagattctgaactgtatgaagataatttatcagctccccagacaccacaggttaccaagcattgggcagaatcaaatgatgtggtgtctaaatcaccaactccagtagtatgcagagcattggcaaataaattaaaggacaaagagaatgtgtgcactcccaagtctgctgtgaagaatgaagagcactttgtgttccctgagccaaggaccccagttagtaagaaccagtataagagagaaatactcacatcgccaaaccattgcacaccgcctgctaaagctagaaaccagtacctgagagaagctccagtcagaacaccagggaattccacaggagcagacacgttaacgacaagtgtcattagccctgagaggcggtgccgctcaatggaagtggatctcaaccaggcacatatggaggatacccctaaaaggaaaggaaccaatgtgtttggaagccttgagcgaggattggataaggttctcactgcacttactaggagcaagaagaagggctctgccaaagatgggccaagaaagcgaaagctgcactataacgtgactacaactagactggtgaatcctgaccagctcctgaatgaaataatggctgttcttccacagaagcacgtggacttcgtacagaaaggttacacactaaagtgtcaaacgcagtctgattttggcaaagtgacaatgcagtttgaattagaagtgtgccagctccagaaacccgacgtggtgggcatacggagacagcggcttaagggtgacgcctgggtttacaagagattggtggaagatatcctgtctagctgcaaggtgtaactgatggatggtttccatcctgcccggatgcatgtggatgtcatgctgtgtacaagaagacccgtggattggtttttgcctttacaacaaaaatttattttgtggctgaatccagggcaaccaactctctgtcattttcatttactctttaaaatcacgtggctagatatgttagtaactgttgatttttctatgttcacttccataggggattgtcagctcttcctgtggctcattttgatgtacacttttctttttgaactaaaaccatttgtgaatataccgggcttctctttgtatctgattttgatccaaataaaacctcgaatggctttcaagactgttaaatagagactatttggagtgtgttttatctgttatcaaatatgccttgggcagaaaaacagataagaattcatttgcataattttttcctgtctctgatttaagtaggatttattgagatcgttaactaagtcacagctgtggttaccagagttaaacaacacatttaatacgtggtataaaaagcgtattgacttcagtaagtatgtccagtcaacaatgataagtatccgaaccgcaggccccatgaaatgttactttatggtaatctccctaagtctcaatgttggccccaaatttgtatttttatttcattttattggttctctaaaggccagaactcaagttacatttgtatggatttaccaattaaactagttagga

SEQ ID NO: 2657 - DNA, 1892 bp, Cricetulus griseus
ggcggcggactcgcaggccttcgccggcacgtccctctcgccggtccgagtcgcgcgctttccagcgacgcatcatgtcggcggtagtgggtgcgggcgcggaggcaggcttctctagcgaggagctgctgtcgctccgtttcccgctgcaccgcgcctgccgcgacggggacctggtgacactctgctcgcttctgccgcacacgccgcgcgctcacctggccgcggaggactccttctacggctggacgcccgtgcactgggccgcgcacttcggaaagttggagtgcttaatccagttgataagagcaggcgcctcactgaatgtctccaccacccgatatcgcccacgaccccacgcccacattgctgcttttggaggacatcctcagtgtctggtctggctgattgtgagggggaaacgcccattcataaggcggcccgctctgggagcctggagtgcatcagtgccctggtagggaacggggctcatactgacctgagaaatgccagtggcctgacggcagcagacattgcacaaacccagggtttccaagagtgcacccagtttctcttgagcctccagaaccgtcaaatgagccgtttctgtcataatggcaccttgagtggagctcacgagaacacgcttcccaatcacattagcctgggaacaaatcgaaagagatgcttggaagactcagaatctctgggagtgaagaaagctagaaccggagttcccagcctggatcacaccatgccactatcgaatggtgaggctgaagatgacgctgacagaatgcatgttgacagagaatttgctgctgtatcagatgtgaaaaacagtagctccgtgttgaatacattgacaaatggaagtgtcatcaatggacatttggacttcccctgcgtgacccagctcaatgggatggagaacaggagtaacccgtgcttatcaggatctaatggaattagcaatggacagccattttccagtggccagggttctgtgtgtgctaatgggactgaggagccagaaaagaccatgggcgttaaccctgagatgtgtgggtctctgcatctgaacgggagcccaagtagttgtgtggccagcaggccgtcctgggtgggggatgggggagagaatttgcactatggacactaccatgggtttggggacactgctgagagcatccctgaactgagcagtgtgctggagcactcaagctgtgtgcgggtggagcagcgctacgacagtgccgtcctgggcagcatgcagctgcaccatggctcctgaagacagggccttccgtagctccactgcagctgcagcttgaggaagctgcatggcctgtgctggtggtgcctggactttctgagaaagacctatgtagaccacagcctgtgtttccttagaaacaggctctgcctaggatggattagggtttgttgcatttttattccacatttctacttggtctctagatttttttaccacagataatggttttctttatatttagtggaagttgctgtttgtaggaacagtcgggttagaatattttactatggtgacctatttttttgttactgtttttgaggttttctgcttaaatatatataccactatatatccagttaactaagagaattttgaatttctcttattaaaactgcattaaatttatggttttatagaaattagcttttgtttaggcaactagtggttacactgcaaataccgcaatgacttctgatttttgtaataacaatcggtgcagataaactgtgagatgaagaaaccaatgtttttaagagtgtgctagcattttgtttttcaactgttctttacaaattaaaataaaaaaaacctcactgactaaaaaaaaaaaaaa

SEQ ID NO: 2658 - DNA, 1892 bp, Cricetulus griseus
aaggtggataagaagccgggaagtggcatagccaagatccacatcgaagatgatgggagttacctccaagtgaacccagatggaagaacccagaagctggagaaagccaaggtctccctgaatgactgcctagcatgcagtgggtgtgtcacttcagcagagacggtgctcatcacccagcagagtcatgaggagctgaaaagggttctagatgctaataaggtagcagcacccagtcagcagcggctggtggtcgtttctgtctcaccccagtccagagcatcactggctgcccggtttcagctggattcctcaaacactgccaggaaattaacttcattcttcaaaaaaataggggtacactttgtttttgatactaccttcgcaaggaacttcagccttttggaaagccagaaagagtttgtgcagcgattccgagggcaaagcaactctaaagaggccttgcccatgttggcttctgcctgcccaggctggatctgctatgctgagaagacacatggcaatttcatcctcccctacatcagcacagcccggtccccacagcaggttatgggctccctggtcaaagacttctttgcccagcaacagcatctgactccagacaagatctaccatgtgacagtgatgccctgctatgacaaaaagactagaagcatctagacctgacttcttcaaccagaagtaccagacccgtgacgtggactgtgtccttacaacaggagaagtctttaggatgctggaggaagaaggagtgtcactcttggagctggagcctgtgcccctggatggcttaacctgtagtgtgtctgctgaggagcccaccagccatcggggtggaggctcaggaggctacctggagcatgtgttccggcacgcagcccaagagctctttggaatccatgtggccgacgttacctaccaacccatgaggaacaaggacttccaggaagtgacactggagagggaaggccaggtgctgttgcgctttgctgtggcctatggtttccgcaacatccagaaccttgtgcagaagctgaagcgaggtcgctgtccctaccattatgtggaagtcatggcctgcccttcaggctgcttgaatggagggggccagctcaaggccccagatatgcaaggcagggagctcctccagcaagtggaaaaactgtacagcatggtgaggaatgaggcacccgaagacgcacctggggtccaggagctgtaccagcactggctgcaaggtgagggctccgagcaggccagccgcctgttgcacacacaataccatgccgtggagaagaccaactcgggcatcagcatcaggtggtaggaggccttgagaggctgtgagagccccaggggccagcaccaacactcccaggaagaccatgtgtgtatcagcaacggattccacacagagaacacactggagaccttcaaaattcaaggagagctacaaggatgtgttggattgtgtgctaaagtggggcactagctgcatgtgggtccttggcagtacatgacctgcgtgcctctggttggtaatgttgccttttcctgggcgtactcagaagtccccactgcaaggccaggagtgcccggacctggggctgcagtggctccaaagcaagctggaagcgtgctcgctccctgcagagtacctccaggacctgggcaggtgccacttggcctgtgaactcacgaactggatcctctctacagggaagagtatgctggggaattgtgggggctggccagctgcccatgagggtggggcccagcagggcagtggatggaaggaggagggcccttaacaaatgcccttccctggtgccagggacattcagctcaataaataatccctagataccctc

SEQ ID NO: 2659 - DNA, 1892 bp, Cricetulus griseus
tataatgtcccaggaaagcaattatgggaagtggacaatatccagcagtgatgaaagcgaggacgaaaagcccaagcctgacaagccttcaacatcctctccccaccaggctgggcagggagcatcgaaggagtccacgtacacctgctcagaggcccgcaaggttgcacacaagagacagctcttccctgtgaaattcagcaacatagactcagtgttactccccaaaaagcagaagagtgattccacagaaagtctcggctggtgtctgtccagcagtgatgatgaacagcagccagagacaaagcaggagcagcctaataagtacatggtggatcaagagaaaaaacatgtttccccacccaatgtgactactgcccagaaagttatagatcgaagccctcctgccagccataggccccaaagggcagacgatgagtacgagacctcaggggaaggccaggatatctgggacatgctggataaagggaaccccttccaattttacctcaccagagtctcagggattaaggcaaagtacaactccaaagccctccacatcagggatattttatcccctctgtttgggacacttgtctcttcagctcagtttaactactgctttgatgtggactggctcataaagcagtatccaccagaattcgcccaggcaaagccctatgcaaacatttccctctgccaggcaaagctggatattgcatttggaacacatcacacgaaaatgatgctcctgctctatgaagaaggcctccgagtcgtcatccatacctccaacctcatccgggaagactggcaccagaaaacccaaggaatatggttgagccctttatacccacgacttgaccagggaagccacacatctggagagtcgagcacccattttaaagctgaccttatcagttacttgatgtcctacaatgctccctctctccaggagtggatagacaccatccaagagcacgatctctctgaaaccaatgtttaccttgttggttcaacccctggacgctttcaaggaagtcacaaggataactggggacattttaggcttaggaagcttctgcggacacatgccccatctgtacctaaagacgagtgctggcctattgtgggtcagttttcaagcattggttccctggggcctgatgagtccaagtggctgtgctcagagtttaaagagagcttgctggcactgagagaggatggcaggactccaggaaaaagtgcagttcctcttcatctgatctatccttctgtggaaaatgttcggaccagcttagaaggatatcctgctgggggctctttaccctatggcatccagacagctgagagacagaattggctgcattcctactttcacaagtggtcagcagagacatctggccgaagcaatgccatgccacatattaagacgtacatgaggccctcatcagacttcaataaactggcttggtttcttgttacaagtgcgaatctgtccaaggctgcctggggaacactggagaagaacggcacccagctgatgatacgatcctacgagcttggggtccttttcctcccatcggcatttggcctggatgccttcaaagtgaagcagaaattcttctctagcagctgtgagccaacagcctcctttcctgtgccctatgacctgccccccgagctctatggaagtaaagatcggccatggatttggaacattccttatgtcaaggcccctgatacacatgggaacatgtgggtgccttcctgagactgtgtctgatggtcactgtcaacattctcactaaaaagtgttattttcttaattcacttttatatgttcttgaaatcaagccattaaactccatagtgttcaaaaaaaaaaaaaa

SEQ ID NO: 2660 - DNA, 1891 bp, Cricetulus griseus
tagtccctaccattactccagttggccgagtgagacttgctgggtggcctgtaagactttgacctcctccagtcagttccccctcctcgggttccttgacagagctgttggaaaagagcaagtgtttactccctacccagagcaccaagaggtggaccaccttattgagaaagccaccaggccagaggagctgcttgaactgctaggtggtggttatagcctgcaccgcaatcatccggccctcatactcatccggctctcttatctgctgtctgagaagccaaaggaaaaggaccttgcttgtagaggatgctcgctttctgcaacttgtcagtcggattgacagtcaggtttcttccatctggcatgggaccctcgtgaagctgctgaggagcatgtatacactagtgcttcctcagatgtccaaggagctgcggtccgtggaacaggaagtgcgctggcgtctgcgaaggttaaagtataagcacttggtcttcctggttgagtcctgtacctcctacatgcaggagcagcactcccaggagctcctggctgagctgctgatgcacctggagaggcgctggacagagatcaatgacagccgtacagtggtaaccatgatgatgaaggcaggacacctctcagagtcactgatgaaccgcctggaagacaagtgcctggagctggtggagcagtttggccctgatgagctgcggaaggtgttagtgacgctggcagcacagagccggcggtcggtgcccctgctgcgggccatctcctaccacctggtacagaagcccttcccactgacgaaaggcgtgctcctggacctggcctatgcctatggtaaactcaatttccaccagacccaagtgtcccagcgcctggctgctgacctcctgccctttgttcccagcatgacacttggtgaggtagcccgttgtaccaagtcctttgccttcctcaagtggctgaacctgtccttatttgaagcctttactcagcatctcctgagcagagtccaggatgtctccctgacccacctgtgcagcattcttctcgctttcgcccgtctgaactttcatcctgaacaagaagatgagttcttcaaattggtgcatgagaagctggactccatgctggggagcctggagccaaccctgcaggtggacctggtgtgggcactctgtgtgctgcagcaagttcgagaagcagagctgcaaacagttctccatcctggacttcacacacaatttctagggagcaagtctccaaaggaccagagtactttccagaagttggttcacatcaacaccaccgccctgctggagcaccctgaatataaaggccccttcctgccagcctcagctgtagccctctgtccctcatcctctagcaagcagatgacacctcttcagaaggagctgcaggagacactgaaggaactgctggggagcactgaccagggcaggctggatgtggtcacccaatatggctgggtgctggatgcagaggtgctcctggatacggatggccactttctgcccctgagagattttgttgctcctcaccttgcccagccagttgggaaccggccactgcccccaggagctaaaaggatcgctttcctgcgctgggagttccctaacttcaacagccgaagcaaggacttgttgggccgttttgtcctggctcgccgacatgtgctggctgcaggcttcctggtagtagatgtcccatattatgaatggctggatctcaagtctggatggcagaaaggtgcctacctcaaggacaagatgcgaaaagcagtggctgaggagctagccaaatgaccgttcccatcagttcagattgcttcccagagacctggctgctcagtgacccagca

SEQ ID NO: 2661 - DNA, 1891 bp, Cricetulus griseus
  modified_base (1881)..(1881): a, c, t, g, unknown or other
ggagagatggcaacattatgatctgggataccaggtgacaacaaaaaagaatggattttatagacaagtgaatcagatcagtggcgctcacaacactgtagacaagccagaacccccttcaaaacccaagaagaaacaaaattcaaaaggacttgctccatctgtggattcccagcagagtgttactgtggtcctggttcaggatgagagcaccttggtctcagcaggagctgtggatgggataatcaaagtgtgggatttacgcaagaattatactgcttatcgacaagaacccatagcatccaagtctttcctatacccaggaaccagcactcgaaaactagggtattcaagtttggttttagattctactggctctactttatttgccaactgcacagatgacaacatttatatgttcaatatgactggcttaaagacttctccagtggctgtcttcaatggacaccagaactctaccttttatgtgaaatcaagtcttagtccagatgaccagtttttaatcagtggttcaagtgatgaagctgcctacatttggaaggtttctatgccctggcaccctcctactgtgctcctgggtcattctcaagaggtcacatctgtgtgctggtgtccatcggacttcaccaagattgctacctgctctgatgataacacactaaaaatctggcgcttgaatagaggtctagaggagaagccaggaaatgataaacattccatagtgggttggacctctcagaagaaaaaagaggcgaaagctggcctagtaatggtagcaagtagccagactactcctgccaaagccccccgagccaagagcagtccgtccatttcctctccatcatcagcagcttgtactccaagctgtgctggagacctccctcttccttcgaatacccccacgttctcagtcaaatccactcctgccaagacccgctctcctgtcggcagaagaggctccacttctgtgtctcccaagccaccctcgtctttcaagatgtctcttagaaactgggtgacccgaacaccttcctcatcgccacccgtcactccacctgcttctgagacaaagatctcatctccaagaaaagccctcattcctgtgagccagaagtcatcacaagcagatgcttgctctgaatctagaaatagagtgaagaggcgtctagattcaagctgtctggagagtgtgaagcaaaagtgtgtgaagagttgcaactgtgtcactgagcttgacggccaagtggagagtcttcacttggatctgtgctgcctttccagcaaccaggaatcccttagcaaggactccgaaggtcctgccaaatcaagcaaggttgaaggcgctggtacaggcatctcagagcctccttctcctgtcagtccttatgtttcagaaggctgtggaaccttgcctcttcctttgcgaccttgtggagaagggtctgagatggtgggcaaagagaatagctccccagagaataagaactggttgttggccatggcagccaaacggaaggctgaaaatttatctccacgaagtccatcatcccagacacccaattccaggagacagagtggaaagacgtcaccaggcccggtgaccgttactcccagctccatgaggaagatctgtacatacttccgtagaaagtctcaagacgacttctgtagtcctgaacactcgactgaattatagatttctaatcagaaagttaacagaactcgggtctgcaaagatgggtgaaaagtgactttataattgtggtctttaagaaaatggtcattttgtcattttgggaaatatatttgttgtgtgtgtgtgtgtgtgtgtgtgtgtgtgtgtgaataactttttttttntttcaacaaa

SEQ ID NO: 2662 - DNA, 1891 bp, Cricetulus griseus
tgtgtcgtgctccctgtgtgtaggcaggggaaggcaggatggtgactgaggccaggcggagtatgcgtgatggcggaagatgagaggcagcccagcaagaccccagtgggcctgagactgcttccctgtacacagatggatggggaggttggcggctctctgagaatcccactcactggggcagaggtggcgctcttccagtccccaccgagttcctatggggacacttccctttccatgcactctcgaggtttttttcccaggctctctttgagttttgactgttactaggcaactatgatgggagactcgtttctggcctccccaccaaggaagccaccatggtgtgcatgtctgtgtttggccccttgctctcccagctgccctgactgaagtttccaagcagacttagcacccaggcattgggctcacatccatccagtattgttccctcggcttcttgctttgccttcatcatctgaactccatcttcttggcctcccctcttcctcctggctgtgccaagcctacactaaccaaagggtgtggcccctacctatgcaacatctcttctggctccctgtcccttcttcccagggggatgtgggaagccctaattgtggggatgccatgacctatagtcaaataggggttgagctttcaaaccgtatagagatggttgggcgaggagggagggatgtcagagagagagagaggtttgggcagacgggatcagcacagctgcccaccagaattcctgggcagcaatgtccactggcctgccagcactgaaccctctaggaccctgagtttgagtgtgtgtgtgtgtatgtgtgggtgtgtgtgtgtgtgtgtgtgtgtgttgaagcacaggtggtgggggactgtgtgccttgggccccatttcttggccagctggcactggatgtcttgttctcactgtggtggggggcagcctggccacctcacagctccaaggaaggaaggacttggctcattctctgtcatgctgggtccagaaacagagcttggccttggaagaggaggaggaggggaagccctattatttttgcctgaccatttctgcctaggtcttttcatacagacagcctctcacctcccacacatgcacagacttagagagaaagcaattctttggtctcttttcttggcagctttattgattgccagggaaaatgaaaaccagaaaattaattaatctctaaaattaaactttacactgaatgttcttgtttctctaattagaacctctgctagcagctgtggctacacacacacacagacacacacaccctcacaacacacacagacacacacaccctcacacctacatgtttgcactctggaactgtcagagggtgtcaggcacagatgactttaggttgcccggacaggcacacacatagtcactctcaagccccctctggtgctctgctcagcatctgcttgttgcaaagagtccctggagtgcaggccctcctggattgcagctgcagtcacccatctttagtattggtgggctctgggccactccactcaaggagagttgggagataaggggcttggcctgaactggtcagtcagatcctctcatggatctataggctgatgtaattcctatgggtgtagacccagggtgggcagtcacagagtgacagggactcatggagggtacctggaagactgtatgtcctgaggataagggcttgtggggtgggctgggcctggctcgggataagacagatctctgtcaaattgggtgcatcacactgtggcctttttgtcatggaattccaagcgcaaagattgtacaaatcacactggtggataataaaagtgtggatgactcaacaaaaaaaaaaaaaaaaaa

SEQ ID NO: 2663 - DNA, 1891 bp, Cricetulus griseus
atcacagatgatcgcctgtgtgggacagcaagccatcagtggctcccgggtaccagatggctttgaaaacagatctttgcctcactttgagaagcattcaaagcttcctgctgccaaaggatttgtggccaacagcttttattctggcttaacgcctactgagtttttctttcacacaatggctggtcgagagggtcttgttgacactgctgtaaagacggctgaaacaggatacatgcagagaaggctggtcaaatccctggaagacctctgctcacagtatgacctgacagtgcggagctccactggtgacatcatccagttcatctacggaggagatggcttagatcctgccgccatggagggcaaagatgagcctctggagtttaaaagggttctggacaacatcaaagcagtatatccatgtcagagtgaacctgctctcagtaagaacgagctcaccttgaccactgaggccatcatgaagaagaacgagttcctttgctgtcaagacagcttcctgcaggaaataaaaacattcattaaaggggtgtctgagaagatcaagaaaaccagagataaatatggcatcaatgataatggcacaacagagcctcgtgtgctgtaccaattggaccgtatcacccccacccaaatagagaagtttctggagacctgcagggacaagtacatgagggcacagatggaaccaggctctgcagtgggtgcactctgtgcacagagcattggggagccaggcacccaaatgaccctgaagactttccactttgcaggggtagcctccatgaacatcaccttgggtgtgccacggatcaaagagatcatcaatgcttccaaggctatcagcactccaattatcacagcacagctagacaaggatgacgatgcggattatgcccgcctggtgaaaggcagaattgagaaaactctcctgggagagatctcagaatatattgaagaagtgtttcttcctgatgactgctttattcttgtcaagctgtccctggaacggatccgacttctgagactagaggtgaatgctgagacagtgcggtactccatctgcacatccaagctccgagtgaagcctggcgatgtggctgttcatggtgaggctgtggtgtgtgtcacccccagggaaaacagcaagagctccatgtattatgtgctgcagtttctgaaagaggacctacccaaggtggtggtacaaggaatcccagaggtgtccagagctgtcatccatatcgatgagcagagtggaaaggagaagttcaagcttctagtagaaggtgacaatctgcgggcagtcatggccacccatggtgtgaaaggcacccggaccacttccaataacacctatgaggtggagaaaactctaggcattgaggctgcccgaacaaccatcatcaacgagatccagtacacgatggtcaaccatggcatgagcatcgacaggaggcatgtgatgctgctctctgacctgatgacttacaagggtgaagtcctgggtattaccaggtttggcctggccaagatgaaggagagtgtgttgatgctggcctcctttgagaaaacagctgaccatctctttgatgctgcctactttgggcagaaagactctgtatgcggtgtgtctgagtgcatcatcatgggaattccaatgaacatcggaacagggctctttaagctgttgcacaaggccaacagggacccaaaaccacccaggagacccctgatcttcgacacgaatgaattccacatccctctcgtcacatagtttatagcaggagatcaccatacctgatattggctccttgtcctgtcagctgctgaatggaagaactttgtatcccttggacagatgcctgca

SEQ ID NO: 2664 - DNA, 1891 bp, Cricetulus griseus
gccagacagcctctgctcgaggcccgcgtcgccatggccgcggttcccgagttgctggagcagcaggatgaggaccgcagcaagctgagatctgtgtctgtggacctgaatgttgacccttcgcttcagatcgacatacccgatgcactcagtgaaagagataaggtcaagtttacagtacacaccaagaccacactgcccacattccagagcccagaattttctgttacaaggcagcatgaagactttgtgtggctgcatgacactcttacagaaacaacagattatgccgggcttattatccctcctgctcctacaaagccagacttcgatggccctcgagagaagatgcagaaactgggagaaggtgaaggatctatgacaaaagaagagtttgctaagatgaagcaagaactggaagctgagtatctcgctgtctttaagaagactgtgtcttcccatgaagtctttcttcagcggctttcttctcaccctgttctcagtaaagaccgaaactttcatgttttcctggaatatgatcaggatctaagtgttaggcggaaaaataccaaagagatgtttggtggcttttttaagagtgtggtgaagagtgctgatgaagtccttttttctggagtgaaggaggtggatgacttttttgaacaagaaaagaacttccttattaactattacaacaggatcaaggattcctgtgctaaagctgacaaaatgaccagatctcacaaaagtgttgctgatgactacatccacactgcagcctgcttgcatagcctggctttagaagaacccacagtcattaaaaagtacctattgaaggttgcagagctatttgaaaaactgaggaaagtggaaggtcgagtctcatcagatgaagatttaaaactcacagagctcctccgatactacatgctcaacatagaggctgcaaaggatctcctttacagacgcacaaaagccctaattgactatgagaattcaaacaaagctttggacaaggcccggttaaaaagcaaagatgtcaagttggctgagactcaccagcaggaatgctgccagaagtttgagcagctttctgaatctgctaaagaagaactggtaaacttcaagcggaagagagtggcagcatttagaaagaacctaattgaaatgtctgaactggaaataaagcatgccagaaacaatgtctccctcttgcagagctgcattgacttattcaagaacaactgatgtgtctttactctgaagaataccaatgtgaaagccagcatcacttgcacataaatcactattgcaaaagaaatagctttgactagtttaaaaatcatgtgaataaatattttgatttctaaaaatcttaacatttaaccatgttggtttaaaaatattttcattgcatgttacttggacataaactaatcctttttcttaagcatttaatacctcaaagtaggtagaatctaacagattctcctatagactgtcaggaattactaataaatggtatggagatgtgtgccttctggaaaagagaaagcaatagcctggccatgtctgtctcaacatttcctgtgcccctccaaacatgtcaggtgccaattacaacaaatggtaactgcttgtgggcaggtggcagacactgttaggtggatttttactccctcttgtcaagataacttcagatgcttgtacaagtaaaaagcaagcaagatctcatttgtctttatgcaccctttacagttccatttttgtgactgggatataattgcttgaggggaaaggaaaatctagggttctgacactccctgatggtggggcatgtgtgtttgtgctttggatgtttttatataaagtatataataaaataattcat

SEQ ID NO: 2665 - DNA, 1891 bp, Cricetulus griseus
cacccatcaggccagaggttcccaacccccaaggagcctcctggaggctctggagcagcgaatggagcggtaccatgtggctgcagcccaggccaaggccaagggtgaccagcggaaggcacgaatgcatgagcgcattgtcaagcaatatcaagacgccattcgagcccataaggcaggccgagctgtggatgtgactgagctgccagtacccccaggcttccccccaattcagggcttggagagtgcagagcccacccagcagagcctggtgggggtcctggaaactgccatgaagcttgctaaccacgatgaaggctcagaggaggaagaggatgaggctcctaaaaagcaaaacacccctgcttgtgtctgaaccacgccacacagttcacccacctgggcaacattgctgaaactatcaagttcgagaagctggcagaagactgtaagcggagcatggacaccctaaagcaagcctttgcccacagtctacccacacctgctgcccgctttgagcaaaggaccttcagtgtcatcaaggtctttccggacctgagcaacaatgacatgcttctgtttatcgtgaagggcatcaacttgcccacacccacagggctgtctcctagtgatctggatgcctttgtccgctttgacttcccttatcccaatgtggaagaagctcaaaaagacaagaccagtgtgatcaaaaatacagactcccctgaattcaaggagcagttcaaactgtgcatcagccgtggccaccgcggcttccgaagggccatccaaaccaagggcatcaaattcgaagtggtccacaagggggggctgttcaagactgacagggtgctgggcacagcccagctgaagctggatatgctggagacggcttgtgaagtccgtgagaccctggaggttttagatggccgccgccccactggggggaggcttgaagtgatggtccggatccgggagcccttgacagcccagcagttggagactacaacggagaggtggctggtcattgatcacctcccagcagctgtgcccacagtctccgggcccaaagcaaaggtgccttccatagctgccacttggagggaaccagggaacagatcagcacggcccctgcatagccttagtgtgctagcctttgaccaagagcggctggaaaggaagattctggccctgaggcaggcacgccggcctgtgcccccagaagtggcccagcagtaccaggatgtagtacagcgtagccagtggcagagggcacagctggagcaggggggtgctggcatccgcagggagtatgcatcccatctggaacgccaactgaacttctataccgaggctgcccggcgcttaggctatgatggaagcagggaggctgcaaaagaggcactgtaccgccggaacctggtggagagcgaacttcagagactccgcaggtgaggcccatccctggacttcaggccccacggcccaatgccaggcagagctccagggccaccgagcagacaagcagacaatcaacggacagttggttctggactcaccctgtccaggcccccagccccagggatgtcaggacagcaccctcacccaagcctggctggctgggccttggagagtcctgtttgcacatccaggagcatcttgagcaaggagggtggctgggcacaagcccagagggccctgcaagcactttacttcctttccttccccagtcttaaccctacagtcctctccaaagatgccactgaggctgtctaactcagctggctctccagggcttgctgacccagctgtccccctccccgggccaacacaaaaaaaaaaaaaaaaaaaaaaaaaaaaaaaaaaaaaaaaaaaaaaaaaaaaaaaaaaa

SEQ ID NO: 2666 - DNA, 1890 bp, Cricetulus griseus
gctgcctcctctcccgcctcctctggccctagccaccagcgagcagagtgcctgcagttctcctgcaggatgtgtggcatttgggccctctttggcagcgatgactgcctttccgtgcagtgcctgagtgcaatgaagattgcacacagagggccagatgcatttcgttttgagaatgtcaatggatataccaactgctgctttggatttcaccggttggccgtggttgaccccctgtttggaatgcagccaataagagtgaagaaatacccttatctgtggctctgttacaatggtgaaatttacaaccacaaggcgctacaacaacgctttgaattcgagtatcagaccaatgtggatggtgagattatcctgcatctctatgacaaaggaggtatcgagcaaaccatttgtatgttggatggggtgtttgcattcatcttgctggacactgccaacaagaaagtttttctgggcagagatacctatggagtcaggcccttgtttaaagccatgacagaagatggatttctggctgtgtgttcagaagctaaagggctcgtttccttaaagcactccacaactcccttcttaaaagtggagcccttccttcctggacactacgaagttttggatttaaaaccaaatggcaaagttgcatctgtggagatggtgaaataccatcactgcagagatgaaccactgcacgccctctacgacagcgtggagaaactcttccaaggctttgagttagaaacggtgaagagcaatcttcgtatcctgtttgacagtgctgtcaggaagcgcttgatgacggacaggaggatcggctgccttttatcagggggcctggactcgagcttggttgccgcctccctgctgaagcaactcaaggaggctcaagtacagtatccactccagacatttgcaattggcatggaagacagccctgatctactagccgctagaaaggtggcaaattatattggaagcgagcatcacgaagtcttatttaattctgaagaaggcattcaggccctggatgaggtcatattttccttggaaacttacgacattacaacagttcgagcatctgtaggtatgtatctaatttccaagtatattcggaagaacacagacagcgtggtgatcttctctggagaagggtcagatgaacttacacagggctacatatatttccacaaggctccttctccagagaaagcagaggaggagagtgagagactgctgaaggaactctacctgtttgatgttctccgagccgaccgaactactgctgcccacggtcttgaactgagagtcccgtttctggatcatcggttttcctcctattacttgtcactgccaccagaaatgagaattccaaaaaatgggatagaaaaacatctccttcgagagacgtttgaggactccaacctgctacccaaagagattctctggagaccaaaagaagccttcagtgatgggatcacctcagttaagaactcctggtttaagattctacaggattatgttgaacatcaggttgatgatgaaatgatggcaacagcagcccagaagtttcccttcaatactcccaaaactaaagaaggctattactaccgccagatctttgaacgccattacccaggccgggctgattggctgacccattattggatgcccaagtggatcaatgccaccgatccttctgcccgaactctcacccactataagtcagctgccaaagcttagatattctctaaactctagtgtaaaagtgttcttctcactctgaaggcagagaccgtgagacaaacacagtaatgcaaatcaaccatcaactgctcaggcttacataggcatggaaagaaataaaacattacatct

SEQ ID NO: 2667 - DNA, 1890 bp, Cricetulus griseus
gtttaatgtgaacagcgacatcaggtttaaccccaaggcagcagcagagaatccagactggccacatgaaggtgctgaaggagcagaattcttgcctactggtgaggcagcggtggacctctatcctaactggctcaaattccacatcggcatcaaccggtatgagctgtactccagacacaacccggccatcgatgccttattgcaggaccttggctctcagaagatcaccagtgtcgccatgaagtcagggggcacacaactgaagctcatcatgaccttccagaattacgggcaggcgctattcaaacccatgaagcagacgagggagcaggagacgccgcctgactttttttattctctgactacgagaggcacaatgcagagatcgctgcctttcacctcgacaggatcctggacttccgaagagtccctccagtgggctggtaggatgatcaacatgaccaaggagatccgggatgtcacacgcgataagaagctgtggagaaccttctttgtgtctccagccaataacatctgcttctacggagagtgttcctactactgttccacggagcatgccctgtgtgggaagcctgaccagatcgaaggctccctggcagccttcctgcctgacctgtctctggccaagaggaaaacgtggcggaacccctggcgtcgttcctaccacaagcgaaagaaggcagagtgggaagtggaccccgattactgtgaggaggtgaagcagacgccaccctacgacagtggccaccgaatcctggacatcatggacatgactgtctttgatttcctcatggggaacatggaccggcatcactacgagacctttgagaagttcgggaatgagaccttcatcatacacttggacaacgggcgcgggtttgggaaatactcacatgatgagctctccattctagcgcctcttcatcagtgctgcaggatccggaggtccacctacctgaggctgcagctgctggccaaggaggagcacaaactgagcctgctgatggctgagtccctgcagcacgacaaggtggctcctgtgctttaccagctgcatctggaggccctggaccggcggctgcgcatagtactgcaagccattcgagattgcgtggagaaggacgggttgagcagtgtggtggaggacgacctagccattgagcacagagcctccactgagaggtagtgacccatgctgcccatgaggaaggaggagcacagagcctagccacctgtgaattcagtgaattcggatggggtaggtcgtccccatagggtgacctacggcagggagtgtggggtctccctcatggctctgatagggatgtgtgggcctctgggtccagcagagactggacaaagcactctggacatgcagcagaggagggacctttgcccactattttgtacttaacaaaaggctcacactcctgtcgatggagagccacccagaagaccagagatcacctctgggccacctcgaggacctgctgtgatgtgatcacactctggccctcaattacaacccactttctgctctcccttcccagggcctcctccctcagaagctggagagctctagggaggggaagcttggacagacatcatggcctatgtgtgagcagatgaacacccaagagtgggtttttggatacaaatgaccagctatccacttgttttctgctgcacagtagccaggccttactagttgttggtggacactgcccgccttggctgagctctggacaatcggtgtcaaggcactatgcagggtcctatggccctagggcatcaggctaaccctgggacatttttgtggagtagtttgcagtgaggtaacagtgcaataaagatacagcaagcgtg

SEQ ID NO: 2668 - DNA, 1890 bp, Cricetulus griseus
  modified_base (1879)..(1879): a, c, t, g, unknown or other
gacaaaggactgaaaatatgccggacagtcacacaggtagtacctgcagagggccaggagaatgggcagagggaagaggaagaagaaaaggaacctgaagcagagccgcctgtacctccccaggtgtcagtagaggtggccttaaccccacccgtggagcatgaagtaaagaaagtcacgttaggagataccttaacccggaggtccattagccagcagaagtctggagtttccattacaattgatgacccagtccggactgcccaggtgccctccccacccaggggcaagatcagtaacattgtccatatttccaacttggttcgacccttcactttaggccaactgaaggaattactgggacggacaggaactttggtagaagaggccttctggattgacaagatcaaatctcattgctttgtgacgtactacaacagtagaggaggcggttgccgacccgtacagctctgcatggggtcaagtggccccagtccaaccccaaattcctctgtgctgactatgctgagcaagacgagctggactatcaccggggactcttggttgatcggccttctgaaactaagacagaggaacaaggagcaccaaggcccctacatcccccacccccacccccagttcagccaccaacccacccccgggcagagcaaagggagcaggaacgggctgttcgagagcaatgggcagaacgggaacgagaaatggaacgacgggagagaactcgttctgaacgagaatgggatcgggacaaaagttagagaggggccccgctcccgatcacggtcccgtgaccgccgccgcaaagagcgagcaaaatctaaaagaaaagaagagtgagaagaaagaaaaagctcaagaggagccacctgccaagttgctggatgaccttttccgtaagactaaggcagctccctgcatctactggctcccactgactgagagccagattgttcagaaggaggcagagcaggctgaacgggccaaggaacgggagaagcggcgaaaggaacgagaagaagaagagcagaaggagcgggagaaggaagctgagagggaacggaaccgacagctagaacgggagaagcgaagagagcacagcagggagagggaaagggacagggagagggagagggacagggggaccgagatcgggatagggaaagagacagagaccgaggcagggagagggaccgcagagacaccaagcgccacagcagaagccggagtcgaagcacacctgtacgggaccggggtgggcgccgctagctaagaaaacactagagagctgcaggtacctgccactctgccctgggaggttaaaggccacagagggataggtacaatcaccaccaccctggaaccaagggtctctcacaccattgctcagtgctgaactataactgccacccatccccacataccaaatagagcagtggcaacctctccctcccccgacctaactcttggaacttagtcctcctcctttcttcccattaagtctgagaggtaagagctaggttatggaaggaagggtttggccagaagtgggaatagccaagtgccccggacctctcatcttccctccgtcctgctttccacctcccttgggtaccagccttttgggaacagcccggggccaggactgggtcacctatgagctgaatcagcctctcctcctgagtcccagggcccctgcagttcccgagtctgttttgtcctgcagcctcttgccctctggttccactttatatccaccttttccttttgttctaatttttatttttattttttttattattaaatgatgtggtctatggaaaaaataaaaatctgacttagttttaacccaaaaaaaaanaaaaaaaaaaa

SEQ ID NO: 2669 - DNA, 1890 bp, Cricetulus griseus
gagagctcaggcactgagaaggcagaaccacaggagggtggggagccagcccctccaagcagggaattaccccaagaagcaaagccaccagccgagtcagaggtgacccagcaagaggcaagctgtgaggatggctgccgagaagacagaggagaggatgagagagctcctgaaaagaggaaaggacggaggagtgaggctgctcccctgcacctctcctgccttttgctggtgacagatgagcatggcaccatcttgggcattgatctgctaatggatggaacccaggggagtgtaggccagagcccagggactgagaatctggctcctcgggcctatgctctcctttgccatagcatggcctgccctatgggctctggacgacccccgaaagccccgacaacttactgtgggagacgcccacctgcatcgagacctggagagccttgtcccaaggttgggtgtgaagttagcaaaaaccccaatgcggacatggggtcctcggccaggctttactttcgcctctcttcgggctcgaacttgccatgtttgccacaaacacagctttgaagtgaagttgacaccctgcccccagtgcagtgccgtcttatactgtggagaggcttgtctccaggctgattggcgccgatgcccagatgatgtgagtcacagattttggtgcccgagacttgccacttttatggagcgagcaggagaactggcaagtctgcctttcacctatactgcagaggtgaccagcgaaacctttaacaaggaagctttcctggcctctcgggggctcactcgtggctactggacccagctcagcatgctaattccagggcctggtgcccccaggaccccctggggcggcacaccatccctcagccgccttctcaacggtgacccttaccagcttctgcaaggagatgggcctgccttgatgcctccagtgcccctagaccccacctaggagcctctttggttcatggcaggattactacacatggcggggtcttagcctggactcccccatggctgtgcttctcacctacccgctgaccgtttactatgtcatcacccacctggtaccccagtccttccctgagctcaacatccagaacaagcagtcgctgaagatccacgtggtggaggctgggaaggaatttgatcttgtcatggtgttttgggagctcttggtccttctcccacacgtggccctggagttacagttttgtgggtgacaggccttccgcctgagagtgaccagcagcattttactatgcagaggggaggtttctgtgcgtcctggttctggggtatcagcacggctcagctctgggactaaggagaagggagggcgaagggatctgcaaatcagggtgtctacccggccctatcacctgctccagggacccaagcctgacctggttattggatttaactctggctttggtctcaaggacacatggctgagctctctgccccgattacagtctctccgagtgccagctttcttcactgagagcagtgagtatggctgtgtgatggacgatcagaccatggcggtggccacaggagggggcaccagctcgccacagcccaatcccttccgttccccattccgcctcagagctgctgacaactgcatgccgtggtactgcaacgccttcatcttccatttggtctacaagcctgcccaaggcggcccggttcgctcagcccccggccctgcacctcgacccccaactccggctgctcctcctgtccccgctcgaaggcgccgaggagaaaagaaagctgcgcgcgggcccgccgccgcagatgagtgcggagttggcagccactgaatgtcaggacacaaaaggttaaataaaattaccttgtttg

SEQ ID NO: 2670 - DNA, 1890 bp, Cricetulus griseus
ggcaacggagccggtgaccgagaccccctcgcctccgggctgggagatcaagattgacccgcagaccggctggcccttcttcgtggaccacaacagtcgcaccacgacatggaacgacccgcgcgtgctcccgagggccccaaggaaactgcatcctctgccaatggcccttctcgtgaaggctccaggctgctgcccactagggaaggccactccatatacccccagctccggccgggctacattcccattcctgtcctccatgaaggcactgaaaatcggccaccacacctttaccatgcctactcccagcctggagtgcagcgatttcgaacagaggcagcagcggctgctcctcagaggtcccagtcccctttgcgtggtggcatgacagagactacccagccagataaacagtgtgcacagacagctgctgcagctcagccctcggctgcccatggacctgagcggtctcagtctccagctgcctcagatttgctcatcctcatcctcctcagccagcctgccctcctgcaggagcagtctgggtagccatcagctcccccggggctacatccccatccctgtgatacatgagcagaacatcacccggccagcagcccagccctccttccaccaagcccagaagacccactacccagctcagcagggtgaataccagacccaccagcctgtctaccacaagatccagggggatgactgggagccccggcctcttcgggcagcatccccattcaggtcaccggttcgaggtgcatccagccgggaaggctctccagccagaagcggcacaccagttcactccccatcacccatccgtgtgcacaccgtggttgacaggcctcagcccatggcctccacctgtcacccaacctgaaaacaaaacagaaagtaagccaggctcagccggaccagatctccctcctggacacatccccattcaagtgatctgcaaggaggcagactctaagcctgtttcccagaagccgccgcctcctgctgagaaggtggaagtaaaggtctcctctgccccaattccttgtccatctcccatccctgccccttcagctgttccttcttcccccaagaatatggctgcagaacagaaggcagccccaagccctccccctgcagaagctgcagcccccaaaccagaagccgaagcccccgctaaacatcctggtgttctgaaagtcgaagccatactgaagaaggtgcaagggctggagcaggctgtagacaactttgaaggcaagaagactgataaaaagtacctgatgatcgaagaatatctgaccaaagagctgctggccctagattctgtagaccctgaagggcgagctgatgtgcgtcaggccaggagagatggtgtcaggaaggttcagaccatcttggaaaaacttgagcagaaagcaatcgatgtcccaggtcaagtacaggtctatgaactccagcccagcaaccttgagtcggagcagccactgcaggaaatcatcatgggtgccatggcagcagacaagggtaagaaaagtcctgaaaacgaggatccacaaactgaaagccaacagccagaagccaagtcagcctcgtctccaaatcccagcagcacagaagactcagctggtgctatagagacttttaagttgcatgcactgtgggacttgtagtcagttggttcttattattcatagccgcttggtatgcagtaacttggtgtagagggaaagcactaacaaggggggcttttcttctgtattcttatctgtataaataaagaggttgcctgtttcataagtctaagcctgctgcttgtttgagagcactttctgtgcatgagtacggtgagctagccacggctgtgagctatct

SEQ ID NO: 2671 - DNA, 1890 bp, Cricetulus griseus
gggagaccgttactccgcagcaggccggaatccgtgtccatcggtcctcctgaacccgcgcagacgtcgtcaaagttgccatgccggagaacgtagctcccagaagcggggcgcccgccgcggggccgggcagccgcgggaaaggcgcctaccaggaccgcgacaagccggcccagatccgcttcagcaacatttccgcggccaaagcggttgctgatgccattaggacaagccttggacctaaaggaatggacaaaatgattcaagatggaaaaggtgatgtgaccattacaaatgatggtgccaccattctgaaacaaatgcaagtattgcacccagcagccagaatgctggtggagctgtctaaagctcaggatatagaagcaggggatggcaccacatcagttgtcatcattgctggctctctcttagactcctgtaccaagcttctacagaaaggtatacatccaactatcatttctgagtcatttcaaaaagctttggaaaggggtcttgaaatccttactgacatgtctcgacctgtgcaactgagcgacagagaaactttgttaaatagtgcaaccacttcattgaattcaaaggttgtctctcaatactcaagtttactctctccaatgagtgtcaatgcagtaatgaaagtgattgacccagccacggctaccagtgtagatcttagagatattaaaatcgtgaagaagcttggtgggaccatagatgactgtgagctggtggaagggcttgttctcacccagaaggtggcaaattctggcatctcaagagttgagaaggccaagattgggcttattcagttttgcttatctgctcctaaaacagatatggataatcaaatagtagtatctgactatgcccagatggatcgagtgcttcgagaagagagagcctatattttaaatttggtgaagcagattaagaaaacaggatgtaatgtccttctcatacagaagtctatcttaagagatgcgcttagtgatcttgcattacattttctgaataagatgaggatcatggtggttaaagatattgaaagagaagacattgagttcatttgtaagacaattggaaccaaaccagttgctcatattgaccagttcactactgacatgctgggttctgctgagttagcagaggaagtcaatttaaatggttctggaaaactattcaagattacaggttgtacgagcccaggcaaaacagttacaattgtggttcgtggttctaacaaactggtgattgaagaagctgagcgttccattcatgatgctctttgtgttattcgctgcttagtaaagaagagagctcttattgcaggcggtggtgctccagaaatagagttggccctgcgactgactgagtactcaagaactttgagtggtatggaatcctactgtgttcgtgctttcgcagatgccatggaagtcattccatctacactagctgaaaatgctggcctgaatcccatttctacagtaacagaactaagaaaccggcatgcccaaggagagaaaactacaggcattaatgtccgaaagggtggaatttccaacattttggaggaaatggttgtccagcctctgttggtgtcagtcagtgctctgaccctagcaactgaaactgtccggagcattctgaaaatagatgatgtggtaaatactcgataatctggatgaggctgactgactggtaccatatggacaaagtactgtggttgaaaatggagatgatcaccttggtgttccatgtctgggaacttgcttcttcacagtttttggacattgtctcccagttgacatttgtttgaaattgtattgaaacgatttaatgaaaatattaaatatttgattccaaact

SEQ ID NO: 2672 - DNA, 1890 bp, Cricetulus griseus
  modified_base (1883)..(1883): a, c, t, g, unknown or other
cctgaaaggtagagagagaggagagagcagccaaggatccaggccagcaagccatctatgtattcattgttcctgaaagacaaactcaaagaagaaaaacagaaagaaatggctaattctccaggtaaacatgtcacaggggtctgctgacattcagggatgtaacagtggacttctcccaggaggagtggcaatgcctcgactcagctcagaggactttgtacatcgatgtgatgttggagaattacagcaacctggactttgtggagaactatcgaaaatgtgatcctgtccatcagcatgtgaagactgaaaaggagtcttgtcagtgtaatgagcttggcaaagtgcttcatgacccctccacatgtgcactttatagaacaagtgaaactacagaaactccaataactacacatgcagtaatcacagcgatgcctctgttgactttactgaagatcagagtacttgtacaccgtaaagaaaagaacaggcagggagaatatgatgattctttgagcgctgcatacaggcttttgcaacaaccaatctacattggagagacaccacaccagtgtgagaaatgtgggaaatgctacagtactgcctcatgcctcactatccatgagagaatacataagggaattaaaccctacaagtgcaaagattgtagaaaatctttaccagtggtcaagtcttaaaacacatcagagacttcacctttgcccactattctaacttcaggagacaccagaaaatccacactgctgagaagacactataggtgccaagaatgcggcaaagtctttcatcagctttcacacttaaaaagacactacagactccatactggagagaagccttacaaatgcaatgagtgtgacagagccttcacacactattcatcatttagaaggcatcagaaaactcattctctagagaaactgtacaagtgcaaagaatgtggtaagtccttccttgaattatcacatcttaaaaggcattacagaatccatactggagagaagccttacaaatgtgaggtatgtgacaaatcctttaccatgaactcaaatcttaaaagacatcagaaaattcatactggagagaaaccttacaaatgtgaagagtgtgacaaatcctttaccatgtaactcaaatcttagaagacatcagagaattcatactggagagaaaccttacaaatgtagggaatgtgacaaatcttttactcagtactcaactcttaaaacacatcagaaaattcatactggagagaaaacttacaaatgtaaagactgtgacaaatcctttacccagaattcaaatcttagaaaacatcagagagttcatactggagagagaccttacagatgtaaggaatgtgacaaatcctttactaagtactcaaatcttaaaatacatcagaaaattcatactggagagaaaccttacaaatgtaaggaatgtgacaaatcctttacccagtactcacatcttagaacacatcagagagttcatactggagagagaccttacagatgtaaggaatgtgacaaatcttttactagatgctcaaatcttagagcacatcagaaaattcatactggagagaaaccttacaaatgcaaagactgtgacatatcctttatccatatttcaaatcttagaagacatcagaaagttcatactggagaaaaaaatacaaatgcaaagaatgtgacatagcatttatctggcattctctgcctacaaatcctaacagaatacataataaaatataaaggtaagaagcttgtgaatgcctttaatgaagagtttaaatttaaaaaaaaaaaaaaagtttatattgaaataaaattctaaaaattaaaaataaaaanaaaaaaa

SEQ ID NO: 2673 - DNA, 1889 bp, Cricetulus griseus
ctggtggcgccaaggccaagccccagggtggaggtaaaactccgccggcgccgcctccgcgttgcggcccggcgtcggcggcccctgcagctgtctgggacgtctcagcggacctgcgcattgccggggtgaggatgcggctcttctttaggctgctcaagcagccggtgcccaaacagatcgagcgctactcccgcttctctccgtctccgctctctatcaaacagttcttggacttcggaagagataatgcatgtgaaaaaacttcatatatgtttctgcgcaaggagcttcctgtacgactggcgaacacaatgagagaagttaatcttttgccggataacttgttgaaccgcccttcagtgggattagttcagagttggtacatgcagagctttcttgaacttttagaatatgaaaacaagagcccagaagacccacgggttttagataactttctccatgttttgattaatatcagaaacagacacaacgatgttgttcccacaatggcccaaggcgtgattgagtacaaagaaaagttcggatttgatccatttattagcagtaacatccagtatttcctggatcggttttataccaaccgcatctctttccgaatgcttattaaccaacacacacttctgtttggtggtgacactaatcctgctcatcctaagcacatagggagtatcgatcccacctgtaatgtagctgatgtcgtgaaagatgcatatgaaacagctaagctactctgtgaacagtattacctggtagctccagagctggaagtggaagaattcaatgccaaagcaccaaacaaacctattcaggtggtttatgtgccgtctcatctgtttcacatgctatttgagctgttcaagaactcgatgagagcaacagttgaactacatgaaaatagaaaagagggctacccagctgttaaaactctcgttactcttggtaaagaagacttgtccattaagataagtgacttaggtggtggagtcccacttcgaaaaatagaccgtctttttaactacatgtattccactgctcctcgacccagcctggagcctacaagagctgctcccttggctggatttggttatggcttgccaatttctcgactgtatgccagatattttcagggagatctaaaactgtattccatggaaggagtgggtaccgatgctgttatttatctgaaggccctttcaagtgaatcatttgagaggctgcccgttttcaataagtctgcatggcgccattacaagacaactcctgaagctgatgactggagcaatcccagtagcgaaccaagggatgcatcaaaatacaaggctaaacaggacaagatcaagactaatagaactttgtagaaaatcgagtgctgtggtcgtctctgaagaaagattatcttcttctgcaagttaaccagagacccttattctaccaactcttaaccgtggcactattgttattcccaatgcttgaatatgttgcttcctttatattggctcagtgtttccatggagcccttcctatagttaatccacttgtatcttccactaaagttgtaacctgagccatttttcatggcgtctttctgtggcatcatttgcacccatcacaggagagcccagaacctcctgcatcagtggagtacatcttgaaaatacagttccaggggttcttccctgtcctcttatatgcattcccacttcactcactgatttagacttttgctgacttccatctgactgtattctcagtgtgaggtgtggtactttcatgttagaacctattcatttgtattatttttactttaaagttcatttgcatacttctgttccatcgattaaagcactctaaaagttgtcttggaa

SEQ ID NO: 2674 - DNA, 1889 bp, Cricetulus griseus
  modified_base (208)..(208): a, c, t, g, unknown or other
tgtcaccgtggcgctggtcatgcagatctacttcggggatccccagatcttccagcagggtgctgtggtgacggatgcctcccgttgcacagcactgggcatggaggtgctcagtaaacaaggctcttccgtggatgcagctgtggcagcagccttgtgtttggggatcgtggctccacacagtttctgggcctgggcggcgggggtntgatgctggtacatgatatccgacgaaatgagagccacctgattgatttccgggagtccgcaccaggggctctcagggaagaggccctgcagaggtcctgggataccaagcctgggctcttggtgggggttcctggaatggtgaaagggctacatgaagctcaccagctctatggcaggctgccctggtcccaagtcctggccttcgcagcagctgtggcccaagatggcttcaacgtgacccatgatctagcccatgccttggctgagcagctacctcccaacgcgtctgaacgcttcctggagacctttcctgccatccgggccacccacctttgcctggtgccctgctgcgacgacctgatctagctgaggtactggatatacttggcaccagcctggtgtccccgtgagcaggcgcttcactgggtggcagagagcctgaagatttggccctggctagcagactgggagatcctgcctacgattctaccatcactgagagcatgggtctatgagctggatggggctcccacagctgcccaggtgctgatcatgggtcctgatgacttcattgtggccatggtcagctccctgaaccggccttttggtagtggcctcatcactccttctgggatcctactcaacagccagatgttggacttctcctggcccaacaggactgctaaccactctgcacccagcctggagaactcagtacagccagggaaacggcccctctccttcctgctgcccactgtagtccgaccagcagaggggctctgcgggacctaccttgcactgggggccaacggagctgcccgaggcctcagtggcctgacccaggttctactgaatgtcctaacattgaaccgaaacctaagtgacagcctggcccgaggacgcctccacccagacctgcagtccaacctcctgcaggtggacagtgagttcaccgaggaagagattgaattcctggaagccaggggtcaccatgtggagaaggtagatgtcttatcttgggtccacggcagtcggagaaccaacaacttcatcatcggtgtgaaggaccctcggagtccagacgcagctggagccaccgtcctgtagagcattggggtgggcgggatctctgttctccgcctttgcatgttcccagagtccctctttctcccaggtttggtctcagggggaccccatggatgcctcagatcaggggccagaggggatgcttagcaaaccctatcccagagtaactggaaaattctccaactgaaggcctttggtggtaatggtgacgtcagtgtccatgaccaggcaggcaggaccttgaggagtcagattgtctgtctgtctcttctcctatctcagccatgctgcccttgagcttagggatgtgcttgtaaacccttctcaagggtctcacaaccccaacaccttcagactggtctgatctaggccttgtcttccagctcccttttcctgtacctggccccatttcttaagtgactaggatttttttaaataggccatcatagggagaggtaatcctccccgtccaccaggttaaggcagggccttgcacttgaaggtccccaggcagtcgggtaggggtgggggtgggtatcagctcaggggcttccatttgcaaaggggaattaaagaaagaatattgcttaacc

SEQ ID NO: 2675 - DNA, 1889 bp, Cricetulus griseus
cggagaaggccgggaagatggcggcctcctggaggcttcgctgtgacctgccgctgctacgttacctcctgggcttcggcagccgtcgaagcctgggccgggctcagggtgctgcagcgtggcctgtcggccgtggagcgagctggaggtggtttcatggcgctcagccgctgcaggcggatcctattaagatcctaatgccatcactgtctcctacaatggaacaagggaacattgtgaaatggctgaaaaggaggtgaagctgtgagtgctggagactcattatgtgaaattgagacggacaaggctgtggtcaccttagatgcaaacgacgatggcatcttagccaaaatagtggttgaagaaggggactaaaaatataaagctgggttcactcattggcttgatggttgaagaaggagaagattaggaaacatgtaggaaattccaaaagatgtcggtgctccacctccagtttcaaaaccagcagtgccacctcagccctctccacagccacagatttcgagccctgccaggaaggaacacacagaaggaacacctcggtttcgcttaagtccagctgcccgaaacattctggaaaaacattcattggatgccagccagggcacagccacaggccctcgagggatcttcactaaagaagatgcgctcaagttagttgagttgaaacagatgggcaagattacagaatccagaccagccccctactctgtcggcatctgtgcctcctccagccacaggcgggccatcttaccctaggccaatgatcccaccagtatccatccctgggcaacctaatgcaacgggcacatttactgaaattcctgccagcaacattcggagagttattgccaagaggttaactgagtcaaaaagcactgtgcctcatgcctatgctactgctgactgtgaccttggagcagttttaaaagttagacaagatctggtcaaagacgatgttaaagtctcagtgaatgactttatcatcagagcagcagctgttactcttaaacaaatgcctggggttaatgtcagctgggatggagaaggcccaaagcagctgccctctgtggacatttcagtggctgtggcaactgataaaggtttaattacaccaatcataaaagatgcagctgctaagggtgtacaggagatcgctgactctgtgaaggttctgtcaaaaaaagcaagagatggaaaattgttacctgaggagtaccaaggaggatcttttagtatttccaacttggggatgtttggcatcgatgagtttgctgcggtgatcaaccctcctcaggcctgtattttggcagttgggagattccgaccagtgctgaagctcactgaggatgaagagggaaacccccagctgcggcagcaccagcttataactgtcacaatgtcaagtgacagccgagtggttgatgacgaactggctaccaggtttcttgaaagtttcaaagcaaacctagagaatcccatgagacttgcatagtcttcaaaggccagattgggtatgagtatgaagtaggtgaaatgcttatttatataaggcgaaagcttttcgcccaagctgtcttcattttccctgtatgtttattgcagaaatgtgtgatgataaactgtgactaataaagaacatttggttagtcaaatccatttttaactctggtgctgtatagaagggtattaaactgatgtaaatcacgtcccatgtttggttcatttgaaattttggaatagtagtgaatgtataatattgtaaaattaaaacaaaatatatagaactctaccttaatcgtgttgaagttatgattgggcttcaaagagatgtctgtccatattgggacctctctttttttataagc

SEQ ID NO: 2676 - DNA, 1889 bp, Cricetulus griseus
  modified_base (416)..(416): a, c, t, g, unknown or other
ccctctacagctacccatcagatgtcacttccaaagacgacatgcaaagacaaactctcattcttctgctcttcacgtgaattataaaacaccttgtggacggagtctaagaaacatggatgaagtttttcattaccttattgagacagagtgtaactttttattcacagacaacttttctttcaatacttatgttcagttgactcggaattacccaaaacaagatgcagtagtttctgaattggatattagtaatggagtggaatcagtgccaatttctttctgtaatgagattgacagtaggaaacttccatcatttaagtacagaaagacaacgtggcctcgagcatgctatctaaatttttcctagtcatgttttcttgattcatgtgactgttctgagggatgcatagacntaaaaaaatagtccatgtcttcagttgacagcaaagaatgccaaagcatgtcccttgtcacctgatggaatgtgtactggatataaatataaaagaactgaagagactcatacctactggcatttatgaatgcaacctattgtgcaagtgtaaccgtcagttgtgtcaaaaccgagtcgtccaacatggtccccaggtgaggctacaggtgttcaaaagtgagaagaagggctggggagtacgctgcctggatgacattgacagagggacatttgtgtgcatttattcaggaagattactaagcagaatcactcctgagaaaactaatactgatgaaaatgcaatagaacaacagaacattgtgaaaaatatgttttccaaaaagaggaaaatagaagttgtatgttcagattgtgaaacacatcctagaagtcctaaaactgagaaatgttctcctactaaccttaacagtgatctcgaagagcctgttgtggaaatgaactatagaaatatttcaagaattcagcgtcactcagtcattagaagccctaaattcaagacagctgtttttcattacaataagaaaaacatggaatttgtttcctcagagtgtgctgaccctgaagataagaatggatttaaaccagctcaagaacacataaactctaaagctagagctcacgaggacttaaggtcaaaccaagttggatattctgaagacagacagctgattgaatcagacgtgatagatataactaaaaataaagaagacacttcaccagatggcaagtgtaagcacatagccacattgaatactgagaatactaaaaagatgcttgaagttccaagtaaaaaagtcccaaagaaaaagaatctagcagcctctcacagtcaacaggtcttctgtgatgaagaattgccaagtgaaaggacaaagactccatcaccttctctaatgaggctcagtaaagagaatgtatttctgttggatgcttcaaaagaaggaaacgtgggccgtttccttaatcacagttgttctccgaatctctgcatacagaacgtttttgtagaaacacatgacaggaattttccattggtcgctttcttcaccaacaggtatgtgaaagcaagaacagaactaacatgggattatggttatgaagctgggaccatacctgaaaaagaaatcctctgccaatgtggggttaataagtgtacggaaaaaaataatataactttatctcggatgtctgttcaggaaatgatctggtcaagctggaactacatcatttgtcaatgaagtcgtggttaatccttctgtttcccttgttcagggtattcatgttttatatctgattttgtatgacttaggtcagaaacaaaataaggacactcatatgcatcaagtatcacttgttattattgttaactttatatgaattagaatgtaaatagttataattttgtgttaca

SEQ ID NO: 2677 - DNA, 1888 bp, Cricetulus griseus
ggagaagaaaccgaacgtgcggcctgggtagccggattccgtgacaccgcttgagcaacgcgcaaccacgatctgcccggcatggagggcgagtgccgggtgctctccatccagagccatgtcgtccggggctacgtgggcaaccgggcggccatgttcccgctgcaggttttgggatttgaggttgatgcggtgaactctgtgcagttttccaatcacacaggctatgcccattggaagggccaagtgctgaattcacaggagctgcatgaactgtatgaaggtctcaagatgaacagcgtgaataaatatgactacgtactcactggttacacgagagacaagtccttcctggccatggtggtggacatcgtgcaggagctgaagcagcagaactcccagctcgtgtacgtgtgtgatcccgtgatgggcgacaagtggaatggcgaaggctccatgtacgttcctcaggacctccttcctgtgtacagggacaaagtggtgcctgtggcagacatcatcactcctaaccagtttgaagctgagttgctgagtggcagaaaaatccacagcgaggaagaagccctggaggtgatggacatgctgcattgcatgggtcctgacaccgtggtcatcaccagctctgacctgccctccccacagggcactgactacctgatcgcactgggcagccagaggatgcggaagcctgatggctccacggtgacccaacgcatccggatggagatgcgcaaggtggatgccgtcttcgtgggcactggggacttgtttgctgccatgcttctggcgtggacacacaagcacccagacaatctgaaggtggcctgtgagaaaactgtgtctgccatgcaacacgtgctggacaggaccatccggtgtgcaaaagctcaggcaggagagggacagaagcccagcccggctcagctggagctgaggatggtccagagcaaaaaggacatcgaggaccctgagatcatcgtgcaggccaccgtgctgtgagggccgtggactcgcctgacacagcagcgtgctggctggggtctccttttccatccctgtgagagctgtgaagtctgccttagagccatgactgaaactcaacattgtgttccctcctgagggtcgtgcctcagcctgtctcaatcctgacaatgtgccatcatggctttttaaaataataacaaagctgtcacagaaatatgtgactcagaaacatgaccccttcccccgaaggccgtgggcctcctgactgcctcatgtagactcacaggtatgtggaaggtaggtggaggaggcaagcctgtggcctgtggacgcttctgttggttttttttttttggttttggttgtttgtttttctctctctctctctctctctctctctctctctctctctctctctctctcttctctctctctctttcacatggaagctcccagaaggccttggggtgtaaccattgccatgcctcatgctcttagcttcatagctgcctaattcctgatatagaccttgtcagaatttcacctatgtgttgcaaacctggaccaatctgaaaacagactgcacctctggggccagcctgaccctactattccttcccagagacctcaactctttggaggtcctaactgttagagtaaagcacagctggcccccagcccctgctgtacaggaggcggaggctctgggcttaggtggtctctggtccaagtcctccagccctgtgtactgtcccttgtcagtgcgtctatagacaggagcacctgtcagcacggtgtagctgtgtctgttttgtgctggtctgtcaacctctatgattatccacaaataaatattttctattgacaaaaaaaaaaaaaaaaa

SEQ ID NO: 2678 - DNA, 1888 bp, Cricetulus griseus
  modified_base (49)..(49): a, c, t, g, unknown or other
ggctacctcaagatcttcatggaggaagtgcctggaggcagcctatccnccttgcttaggtcagtgtggggacccctaaaaggacaacgagagtactattagtttctacacacgtcagatcctgcagggactcagctatctccatgagaaccgcatcgtgcaccgcgacatcaagggggacaatgtattgatcaacaccttcagtgggttgcttaagatttctgactttggcacctccaagcggctggcaggaatcacaccttgcacagagactttcacagggactactgcagtatatggccccagaaatcattgaccagggcccacgaggctatggaaaggcagctgacatctggtctctgggctgcactgtgattgagatggccactggtcgaccgcccttccatgaactagggagcccgcaggctgctatgtttcaggtgggcatgtacaaggtgcatccaccagtgcccagttccctgtcagctgaggcccaagccttcctcctccgaaccttttgaaccggacccccacctccgagccagtgcccaagagctgctgggtgaccccttcctgcagccagggaagaggagccgaagccccagctctcctcgtcatacaccccagcccccagacactccttccgctggttccagtccttcagctgactcagccacccagtctcagacattcccaagaccccaggcaccctcccagcacccacccagccccccaaagcgctgccagctccgtgtgcctgaggagcccgtccgccgaggaacccgcgtcccccgaggagagttcggggttgagtctgctgcatcaggagagcaagcgccgggccatgctggccgcggtgctggaacaggagctgcccacactggcagagaatctactggagcaggaacaggattctcggctcagcaggaatcatgtggagcagctgcttcgctgcctcggggcacaaatccacactcctaaccgccggcagctggctcaagagctgcgggccctgcaagctcagctgcgggcccaggccctggggcctgcacttttgaatgggccgctcttcgcatttccagaagcggtgaagcggatcctccgcagacgccagatccgcccacactggatgttcgtgctggactcgctgctcagccgcgcagtccgggcggctctggcagtgctggatgcggaggtggagaagaaagcggtcccaccgaagtcagaggagtgcagtaaagcagagtcccagcagaaaccgcaggagagccagcagctacagagccagctcccgtcggaacaggggcctccgccgctgaccgtgcagctgggcctcttgcgagccgagaccgataggcttcgagatgtcctggctgagaaggaacgggagtgccagaccctgatgcaccaggccatacatgggtttcatgcagaggccaggacgtatgcccgggcttcagagcccgcagccactctctcaaaggaccagagcctggtacaatggctacaggaactgagtgtagacccagccactatccaaacgctcctgagccatagcttcacccttcagaccctgctcacctgtgccacccaagatgaccttgtctacaccaaaatcagggggggatggtatgccgaatttggagagccatcttggcacagcgagcaagagccacaccagttacccctggtccccgggaagccgaatgatggcattaaaggtcacagccatggatggacgaacagagaagacacagagaccttctgacacacatcgtcccagccacccagcagcaactgcaggacccgggcccaactgaagtgggtgtcactaaggagggagacacccagggatgccgcacacagtcaaaaactataaacagagcac

SEQ ID NO: 2679 - DNA, 1888 bp, Cricetulus griseus
aaggcgcagcaggatcagctggtcctgatcttcgcgggcaagatcctcaaggacggagacaccctgaatcagcatgggatcaaggatgggctcactgtccatctagtcatcaagacccctcagaaggctcaagatccagtggctgcggctggttctcccccatccactcctgactctgcatctgcaccatccaccacacctgcctcacctgctgcccctgcccaggcctgcggctctggcagtgccacttcagatgccgccgccgccggtgcaaggggacccaccccggtggctgcagaggggcccccaagtgctactgcatcaattctctctggctttgggggcatccttggcctaggcagcctgggcctgggttctgccaacttcatggagctccagcaacagatgcagagacagctcatgtccaaccccgagatgctgtcacagatcatggacaaccccttggtccaggatatgatgtcaaaccctgacctgatgcgacacatgatcatggacagtctcgaaccttttggatcaatgcggctagctgggtcaggatgttcaacagcccagaaatgcagcactcctccagcagattttccgaaaaccctcagctgatgcagaacatgatctcagccccttacatgcgaagcatgatgcagacactcgcccagaaccctgactttgctgctcagatgatggtgaatgtgcctctgtttgctgggaatccacaacttcaggagcagctccgcctgcagctccctgtgtttctgcagcagatgcagaacccagagtctctctccatcctcaccaatccccgggccatgcaggccttgctgcaaatccagcagggcctgcagacactacagactgaagcccctgggctggtacccagccttggctcctttggaacatcccggactcctgtacccctggcaggcagcaactctggttctgcagccgaggcccccacctcttccccaggcgtcccagccacgtctcctcctacaccgggttccagtgcccagcagcaactgatgcaacagatgatccagcttttggctggaggtggaaactcacaggtgccggtgccagaagtgagatttcaacagcagctggaacagctcaactccatgggctttgtcaaccgtgaagccaacctgcaggccctgattgccacaggaggggacatcaatgctgctattgagagactcctggggtcccagctctcctgatcccttggcctgtgcctcctgccttccccacctctcagcgccagcctttggctctctgtcaagccctaccttctgtagcctgtcttctttgacctctacaaacagcatgaaagttgggagtttgtgtgttctttgttggtttcaggttcacaactttgtcaacagagatgagtgggtacaagggccagcctagtggaggaatatagcattgggagagctgggtctctgggtctctgggtctttggtaaccagatagcatattggataattctaaagataatggctctaacggatacccttaccaccattactcttgtggaaaaaaatagtgaggtttctcttccagagctcctgcctttcaattccttgctggttccctctagaccagaaagttctatttgaggaaagggtgggaacagtgatgcctttaataagaaattaggtttagctcagctggagtactgaggaagaggctgtcaacacattctctctgctctgtggtccagctacttggaggatccctggctgggagatagaagaaccctgttccaggtggggaagggtcccaagtagtccagacatgcctgcccttttcctctcttacttccaacatccaccctggcctttgtaaataaatgatttttgttgtgaga

SEQ ID NO: 2680 - DNA, 1888 bp, Cricetulus griseus
  modified_base (24)..(24): a, c, t, g, unknown or other
atgattatacagttaattatgganattccaaactccaaagaaattcagacattcagagaacattccgattatgtgaggtgtggctgtgccagcaagctgaaccctgatctctttgtaacaggatcatatgatcacactgtgaagatggtttgaacgcccggacaaataagaatgttctctgtgtggagcatgggcagcctgtggagagtgtcctgcttttcccctcgggaggtctcctggtgtcttcaggaggtcgttatgttaaagtctgggacatgttaaaaggaggacagttgcttgtgtcttttgaaaaatcatcataagactgtgacatgcttgtgtctgagcagctctggacagagattactctccggctcactggatggaaagtcaaggtctacagcacaacttcttacaaagtagtccacagttttgactatgcagcttccatcttgagtctggcactgtctcatgaagatgagacgatagttgtgggaatgactaatgggatactgagcgttaaacaccggaaatactgaagcaaagaaggaaatctctctcaagaaaggaggaggcctgcataccgaaacctttgttaaaggaaaaaattttaacatgaagcaacgggaatgatatcatgatcaataggccagcaaagaaacacctagaatggtatgacaaggacctgaaaagttttcggatctcaaaggcacttgacagagtccttgagcctaattgtgtaataaagacgcccgaggttacagtttccatcataaaggaattgaatcggagaggagtcctagccaatgctcttgcaggtcgggatgagaaggagattacccgggttctgaactttttgataaggaatctgtctcagccgagatttgcccctgttctgattaatgctgctgaaatagtaattgatatatatctccctgtgattggccagtcaccagtagttgataaaaagtttatagtacttcaaggactcgtagaaaaagaaattgattaccaaagggaactcctggaaaccttggggatgatggacatgctgttcgccaccatgtcaagaaatgacagtgtctctctgtcagagaatgtgcctgctgaactcccagagaagacagaatcaccatgtcaacccggtgacacagacaagaactcctaactcctgccaagtgaacagaaccttggttttaaagagattcttttcgtcttcttggctttctgaggtgttaactactcactccctttgacaaactaagagtgttgcagctcctgtgtaaaatttatagtaattacagaacccttgaaaggattaggagactttctcacagtcctccatgcaattatgttaaggtagtttttcttttgttttgttttttgagacaggatttctctgtgtggccctggctgtcctggaactcactatgtagaccaggctagcctcagactcacagagatccatgtctcagcctccagagtgctgggattaaaggtgtgtgccaccacacccaactcagaagttgtttttgtattcattgaaactattaactttttatgtgaagtgttttaacataattgacatatttcaatatgtaatgttggccttaggagtcaaatgcttaatgaattcttagacttgttcttcttagttggaaaatatttgatattttaccatggatgcaaaaataatgaaatgttgctggaacttagtcatttatgtttaatttattatgttaactcaaacttaaacatatgggaaggtctgtctgtttctagtcaaatttctcaaatgcctgtgctattaaattgcttaaggaattgatgtcaaatgggatggttaggaactccactgattgaactcaaatgaattctaccaaacatt

SEQ ID NO: 2681 - DNA, 1888 bp, Cricetulus griseus
atttcttctgtggcttcagtgcaccatgcaaacggtctgaccaaatcatccaccacggtctctagctttgctaacagcaagcctggctcggctaagaagttagtgatcaagaactttaaagataagcctaaattaccagaaaactatacggatgagacatggcagaagctaaaagaagcagtggaagctattcagaatagtacttcaattaagtacaatttagaagaactctaccaggctgtagaaaatctttgctcttacaagatatctgcaaatttgtataagcaactgaggcagatctgtgaagatcacatcagagcacagattcaccaattcagagaggattctttggatagtgttctctttctaaagaagatagataaatgctggcagaatcattgtaggcaaatgataatgatcaggagcatatttttgtgtctggatagaacttatgtttcttcatcaaaaagtccagacgaaaacaattgatggcatccttctcttgattgagagagagcgaaatggtgaagcaattgatagaagttacttcgaagcctttaagtatgcagaaagagaggttcctgagtatcttcatcatgttaataaacgcctagaagaagaagcagacagacttattacttacttagatcagaccacccagaagtcactaattgcttctgttgaaaaacaacttctaggtgaacacttagcagcaattcttcagaaaggtttaaataacctccttgatgaaaaccgaattcaagatttgtgtctcctgtatcagctcttcagtagagttcgaggtggagttcaggttctcttacagcaatggattgagtatatcaaggcttttggaagtactattgttatcaaccctgaaaaagataaaaccatggttcaggagctgttggactttaaagataaagttgatcatataattgatatctgcttcctgaaaaatgaaaaatttatcaatgctatgaaagaagcatttgaaacattcattaataagagaccaaataaaccagctgaactcatagctaagtatgtggattcaaaacttcgtgcaggcaacaaagaagctacagacgaagagctggagaaaatgttggataaaataatgattatatttagatttatctatggcaaagatgtttttgaggccttctataagaaagatttagccaaacgcctattagttggcaagagtgcatctgtagatgctgaaaagtcaatgctgtccaaactgaaacatgaatgtggagctgcgttcaccagcaagcttgaagggatgtttaaagacatggagctttctaaagacatcatgattcagttcaaacagtatatgcagaaccagaatgtacctggcaatatcgaattaactgtgaatatcctgacaatgggttactggccaacatatgtgcctatggaagtccatttgccaccagagatggtaaagcttcaggaaattttcaagacattttacttaggcaaacacagtggcaggaaactccagtggcagtcaaccttgggacactgtgtactaaaagctgaatttaaagagggcaaaaaagaacttcaggtctctctttttcaaaccctggtgctgctaatgtttaatgaaggggaggaattcagtttagaagacatcaagcaagctactgggatagaggatggagaattaaggagaaccctgcaatcactagcctgtggcaaagctagagttctcactaaaaatccaaagggcaaagatatcgaagatggtgaacaaattcatttgtaaatgatgatttcaaacacaaactattcaggataaagatcaatcaaatccaaaatagaaaagaaacggttagaagaacaagcaaagcaactacaagaaagagtattt

SEQ ID NO: 2682 - DNA, 1888 bp, Cricetulus griseus
gaagaagaagaagaagaagggccaggaagcaggaggattctttgaagatgcctctgagtatgacaaaagcctctccttccaggacatgaatctgtcccggcccctcctgaaggccattacagccatgggcttcaagcagcccaccccaatccagaaggcttgttatccctgtgggtctgctgggaaaagacatctgcgcctgtgcagccactgggacaggcaaaactgcagcttttgcgttgcctgtcttggagcgtctgatctacaagccccgccaggctgcagtcactcgagtgctggtgctggtccctaccagagagctgggcatccaggtgcactccgtcaccaagcagctggcccagttctgcagtgtcactacatgcctggctgtgggtggcctggatgtgaagtctcaggaagctgctcttcgggcagcaccagacatcctcattgccacacctggccggctcatcgaccacctgcacaactgcccttcgttccacctgagcagcattgaagtgctcatcctggatgaggctgacagaatgctggatgaatattttgaggagcagatgaaggagattattcgaatgtgttcccaccaccgccagaccatgctcttttcagccaccatgacagatgaggtgaaagatctggcttccgtctccttaaagaaccctgtgcggatatttgtgaacagcaacacagacgtagctccctttcttcggcaagagttcatacggatccggcctaacagggaaggggaccgggaagcaattgtggcagctttactgatgagaaccttcactgaccacgtgatgctgttcacccagaccaagaagcaggctcaccgcatgcacattctgctggggctgctggggctgcaggtgggcgagctccatggcaacttgtcacagacacagcggctggaggccctccggcgctttaaggatgaacagattgacatcctggtggccacagatgtggcagcacgtgggcttgacattgaaggagtgaaaacagtgatcaacttcaccatgcccaacactgtcaagcactatgtgcaccgggtagggcgaactgcacgtgctggcagggctgggcgctctgtctctctggtgggagaagaggagcggaagatgctgaaggagattgtgaaggctgccaaggctccagtgaaggcacggatcatcccccaggacgtcatcctcaaattccgggacaagattgagaaaatggagaaagatgtgtacgcagtgctgcggctagaggcagaggaaaaagagatgcagcagtcagaggcccagatagacacagcaaagcggctcttggagaaggggaaggagacagcagaccaggagcctgagaggagctggttccagaccaaagcagagaggaagaaggagaagattgccaaggctctgcaggagtttgatttggccttgagaggaaagaagaaaagaaagaagtttatgaaggatgccaagaagaaggggagatgactgcagaggagaggtcccagtttgaaatcctcaaggcacagatgtttgcagagcggttggccaagagaaaccgcagaaccaagcgagcacgggcaatgcccgaggaagagcctgcagcaggccgtgccaagcatcaaaagcagcagaagaagtctgtgtttgatgaagaactcaccaacacaagcaagaaggccctgaagaagtaccgagctggcccttcctttgaagagaggaaacagttaggtctgtcccgccagagaagagggaacttcaaatccaagtccaggtacaagagaaagaagtgacccagtggcatggagaacttgatgggacaattttatatcccttccccgtgggaagtcatcttgtcttggtcttgttttttt

SEQ ID NO: 2683 - DNA, 1888 bp, Cricetulus griseus
cgcagggcggggattggcccgctcccttcctgtgcgttcgctgcagccgttcctgggacacctgctcacggtgccccgtactgtgctcagctcccaacttgagctccgcggcgcggggagaaaggccgtgcgtccccggcctccgacgggaaccgtgctgagcgttctccgggcaagatgagcgcggacgcggcggccggggaagccccctgccccggctctgctgcctggagaagggtccgaacggttacggcttccacctacacggggagaagggcaaggtgggccagtttatccggctggtggagcccggctcgcccgccgagaagtcgggctgctggccggggaccgactggtggaggtgaacggcgagaacgtggagaaggagacgcatcagcaggtggtgagccgcatccgcggggcgctcaacgccgtgcgcctgctggtggtcgacccccgagacggacgagcatctcaagaagctgggcgtcccgatccgggaggacctgctgcgctcccagaagtccgaacaagccgagccgccggccgccgctgacgaccagaatgaggccgaaaagagccacctggaacggcgtgagctccggcctcggctctgcaccatgaagaaaggccccaatggctatggcttcaacctgcacagcgacaagtctaagccaggccagttcatccgagcagtggacccagattcccccgcagaggcctctggactccgagcccaagaccgcattgtggaggtcaatggtgtctgcatggagggcaagcagcatggggacgtggtatctgccatcaaggctggaggggatgaggccaagctgctggtggtagacaaggagactgatgagttcttcaagaagtgcaaagtgatcccgtcacaggaacacctggatggccccttgcctgagcccttcaccaatggagagatacagaaggagagcagccgtgaagccctggtagaggcagcctcagagagccccaggccagccctggtgagatccgcctccagcgataccagtgaggagctaaattcccaagacagtcccaagagacaggagtctacagagccctcatctacctcctcctcctccgaccccatcttggacttcaacatctccttggctgtggctaaagagagggcccaccagaagcgcagtagcaagcgggccccgcagatggactggagcaagaaaaatgaactgttcagcaacctctgaacaccggccacccctggccagcgctggagagtggaccagcacacccacccacccacccaacctagctcctcctcctcccccaatcacccaccaatcaacattcaaatcagcatcccccccccacaccttcctgacacatctgagtttcctaggaattctgttctgcccaccttagggaaggggaaggtttctgtcccatccccttactcctccctgagggcttcatcctacccagtgtacccccaccagtctgcctaggacatcaccgggacctgcaccaagtgtggacctttgtccctcgactacatgtgatgaccagtcagggctgaccagggacttgactgttgcagccattgctcataagggtcagggtgcccaaggtcctcacagctatggtttggccttcttaggtccatttgattttttttttttagttagtgtagcactgcagaatttagaggggctcttttaatgattcttgtgattttcctggttgtttgtacccagagcatggcaacagcctcatccttaaattttggtttctactctcaccctgaacgacctgggtggcacggggaaaccctggcagcctctgcctgtactgagccaggtgccaccactgtaaggacatgtcttcagaaattcactggttcctt

SEQ ID NO: 2684 - DNA, 1887 bp, Cricetulus griseus
tttgacgcggcggaggaagcatcgctgaaggctctcgtttccctgccgtcatgtctaagtcggagtcacccaaggagccggaacagctgcggaagctcttcattggagggctgagcttcgaaacaaccgacgagagtctgagaagccattttgagcaatggggaacactcaccgactgtgtggtaatgagagatccaaatacgaagcgatccaggggctttggttttgtcacgtacgctactgtggaagaagtagatgccgctatgaatgcaaggccacacaaggtggatggcagagttgtggaacctaagagagctgtttcaagagaagattctcaaagaccaggggcccacttaactgtgaaaaagatctttgttggtggtattaaagaggacactgaagaacatcaccttcgtgattattttgagcagtatgggaagattgaagtgattgaaatcatgacggacagaggcagtgggaaaaaaagagggtttgcttttgtcacctttgatgaccatgactctgtggacaagattgttattcagaaataccatactgtgaatggccacaactgtgaagtgagaaaagccctgtcaaagcaagagatggccagtgcttcatccagccaaagaggtcgaagtggttccggaaactttggtggtggtcgtggaggtggttttggcggcaatgacaactttggtcgagggggaaacttcagtggtcgaggtggcttcggtggtagccgtggtggtggtggatatggtggcagtggggatggctataatggatttggtaatgacggtggttatggaggaggcggccctgggttactctggaggaagcagaggctatggaagtggtggacaggggttatggaaaccagggcagtggctatggcgggagtggcagctatgacagctataacaacggaggaggcggaggcggctttgggcggtggtagtggaagcaattttggaggtggtggaagctacaatgattttggcaattataacaatcagtcttcaaattttggaccaatgaagggaggaaactttggaggcagaagctccggcccttatggtggtggaggccaatactttgctaaaccacgaaaccaaggtggctatggtggttccagcagtagcagtagctatggcagtggcaggaggttctaattacagctaggaaacaaagcttagcaggagaggagagccagagaagtgacagggaagctacaggttacaacagatttgtgaactcagccaagcacagtggtggcagggcctagctgctacaaagaagacatgtgttagacaatactcatgtatatgggcaaaaaactccaggactgtatttgtgactaattgtataacaggttattttagtttctgttctgtggaaagtgtaaagcattccaacaaagggttttactgtagacctttttcacccatgctgttgattgctaaatgtaatagtctgatcatgacgctgaataaatgtgtctttttttttttttttttaaatgttgctgtgtaaagttagtctactctgaagccatcttggtaaacttccccaacagtgtgaagtttagaattcctccagggtggtgccaagttccatttgggatttatttatattgcttgggtggagaagccattgtcttcaaaaaccttggtgtagttaaactgccggttattgttgtgactttaatgagtttcacattaaaagggtcatccaagcaaagtcgaaatttggttataaaatggttgttggcacaccctatgcaatatcaattgaataatggtatcagataaaaataacagatgggaatgaagcttgtgtatcatccattatcatgtgtaatcaataaacgatttaattctcttg

SEQ ID NO: 2685 - DNA, 1887 bp, Cricetulus griseus
tcaccattgtggcggtcactaaggacccaaactggtacaaagccaaaaacaaagtgggccgtgagggcatcatcccagccaactatgtccagaagcgtgagggtgtgaaggcaggcaccaaactcagccttatgccctggttccatggcaaaatcacacgggagcaggccgagcggcttctctacccaccagagacgggcctgttcctggtgagggaaagcaccaactaccctggggactacacactgtgtgtgagctgtgaaggcaaggtggaacactaccgcatcatgtaccatgcgagcaagttgagcatcgatgaggaggtgtacttcgagaacctcatgcagctggtggagcactacaccacagatgccgatggactctgcactcgcctcatcaaaccaaaggtcatggagggcacagtggccgcccaagatgaattctaccgcagtggctgggccctgaacatgaaggaactgaagctgctacagacgattgggaagggggagtttggagacgtgatgctgggtgattatcggggcaacaaagttgcagttaaatgcattaagaatgatgccactgcccaggccttcctggctgaagcctctgtcatgacgcaacttcggcacagcaacctggtccagctactgggtgtgattgtggaggagaagggtgggctctacattgtcacagagtacatggccaaggggagtttggtggactatcttcgatcacgtggtcgttcggtgctaggcggagactgtctcctcaaattctcactagacgtctgtgaggccatggaatacctggaaggcaacaattttgtacatcgggacttggctgcccggaatgtactggtgtccgaggacaacgtggccaaagtcagtgactttggcctcaccaaggaagcctccagcactcaggacacaggcaaactgcccgtcaagtggacagctccggaagccttgagagagaagaaattttccaccaagtctgatgtgtggagtttcggaatccttctctgggaaatctattcctttgggcgagtgccttacccaagaattcccctgaaggacgtcgtccctcgggtggaaaagggctataagatggatgccccggacggctgcccacccgcagtctacgaggttatgaagaactgctggcacctggatgctgccacacggcccaccttcctgcagcttcgagagcagctggagcacatcagaacccatgagctgcacctgtgacctctgcctccgcctaggccctgggcctgtaaggacaaggcctagaagatcacagatctggtgcctgctgcccactgggcctgaacttgaactgagccccagtgggctggtaggcctcctgcctctgacctgcctgtcccttctggccccccagggaccccacctaggcctggcatctcttatggacccacccacctatagggcttggggcactcactgaaggggctaaggagggaggaggacaaggagcgggaggcagtgcccccactgtggtcagccttctcttggcctcccatcactcgccttcttagagttttattcctttccttttttgagatttttttccgtgtgtttattttttattatttttcaacataaggagaaagaaagtacccagcaaatgggcattttacaagaagtacgaatcttatttttcctgtcctgcccctggggtcgggaggaatcagcctctctctagggaccgatcaccccagcctgttccccatcccgtgttccatgtccagtgttgcctcggtcgcctctgtttgcgcttgaccatgttgcactgtttgcatgtgcccgaggcaggcgtctgttaaaccactcccaatagaggaacaccgccaaaaaaaaaaaaaaa

SEQ ID NO: 2686 - DNA, 1887 bp, Cricetulus griseus
gcgatggccgggtccgcgtgggtgtccaaggtctctcggctgctgggtgcattccacaatacaaaacaggtgacaagaggttttgctggtggtgttcagacagtaactttaattccaggagatggaattggcccagaaatctccgcctcagttatgaagatttttgatgctgccaaagcccctattcaatgggaggagcgtaatgtcactgccattcaaggaccaggaggaaagtggatgatccctccagaagccaaagagtccatggataagaacaagatgggcttgaaaggcccactaaagaccccaatagcagctggccatccatctatgaatctgttgctccgtaagacatttgacctttatgccaatgtccggccatgtgtctcaattgaaggttataaaaccccttacacggatgtaaatattgtcaccatccgagagaacacggaaggagaatacagtggaattgagcatgtgatcgttgatggagttgtgcagagcatcaagctcatcaccgaacaagcgagcaagcgcattgctgagtttgccttcgagtacgctaggaacaaccaccggagcaacgtcacagcggtgcacaaagccaacatcatgcggatgtcagatgggctttttctgcaaaaatgcagggaagttgcagagaactgtaaagatattaaatttaatgagatgtaccttgataccgtatgtttaaatatggtacaggacccatcccaatttgatgttctcgtcatgccaaatttatatggagacatccttagtgatctgtgtgcaggtctgatcggaggtcttggtgtgactccaagtggcaatatcggagccaacggtgttgccatctttgaatcggttcatggaacagccccagacattgcgggcaaggacatggccaatcccaccgccctcctgcttagtgccgtgatgatgcttcgtcacatgggactctttgaccacgcagccaaaatcgagactgcgtgttttgctacaattaaggatggaaagagcttaacaaaagacctgggaggcaattcgaagtgctctgacttcacagaagaaatttgccgccgagtaaaggacttggattagaacttctgcagatggatttgctgctgtcagtcactccagaagggtaccctgtaatcctccttgagaacacccgccattggtttgcttgcttcttgacagagtacattttcaaatctggccttttcttaacaaaacccttgcaacagatgcacatgatggcctttggccttcagtcagagggtttccccaagtgcttgttgtatttattgtctatctggtaaaccttttttgtaaactgtaagtgaactgtatcatttaccattgttacccattttacacttcaggtaaaatagtttttcctcagctgtaaatattatgatacagaattaataagagaaaatatttaactttttaacaaaagccctggttttttggtttatgaaaaatatactgagactacagcagggtttaaatgtcacacaagataacattaccctaaaactaaatgggcacaaaagaaatttcctaggaaagttcacagcaaaaaaatggtatatttcttagcaatatggaaaataaagatatttgtcctatacatgaattactattaataaaaatttaagctccaagaaatatataatgaacgatgtgtaattttgttaataacatataggtaatccttgagttaaagccctagatgccctgtgtatgcaactattttgttacctggagatttactatttttggggggagtacttttaattaagggcagtcattcctcgttaccagtggctttgggttcacagtaataaagtaaattaaaaactaaaaaaaaaaaaaaaa

SEQ ID NO: 2687 - DNA, 1887 bp, Cricetulus griseus
ggatgaaacagtaggtcgcttacctggaaaagtggcaggacaacaatttgtcattcaagactgtgagaactgtaacatctatatttttgatcactcagctaccattaccattgatgactgcaccaactgcatactttttttgggaccagtgaaaggcagtgtgtttttccgaaattgtagagattgcaagtgtacattagcttgccagcagtttcgtgtgagggactgtagaaagttggaagtctttctgtgctgtgccactcaacccattattgaatcttccacaaatatcaagtttgggtgttttcagtggtactaccctgaattagcagcccaattcaaagatgcagggctcagtatcttcaataacatatggagtcacgttcatgattttacacctgtgtcaggagagctcaactggagcattcttccagaaagtgctgtggttcaagactatgttcctattccaactgctgaagaattcaaagctgtacgaatttccaccgaagccaatagaagcattgttcccgtatcccggggtcagagacagaagagcagtgatgagtcttgcctagtggtattatttgccgatgattatgcaacagcaaatgccaggaaactaattgatgagatggttggtaaggggtttttcctagtgcagacaaaggaaatgtcaatgaaagcggaagatgctcaacgggtttttccgagaaaaggcatctgactattttcttctcctgaacaaggtcctgtgattgccttggaatttaatggagatggtgctgtagaaggatgtcaccatattgtaaatgagatattcaatgggacaaagatgtttgtatccgaaaagaaggagacagcatctggagatgttgacagcttctataacttcgctgagatacagatggggatttgaagcggattgtggtattaagccccttttccaaactttatatatagagtttgataatatacttatgtatattactcttagaccattagtaattttactaatgctaaattgttaaaggtcttattttttaaataatgagattttgtacatggtagttgtacttatactattttgtaaactaaaaatttttaaagaaattgggaatttgaaagctgatgtttaagaatggtaaaaatcttggttacctgaaataattgtttctcaaacccatttgatcatagtaattttccaggaggtatgggaattattcagacatacacattggtggattcagtcttcaaatgcacagattcagttttcaagggaaactgctttagggtgtattgttatctaaactaatcagttctgaaggtattgttaagttggtcttacaacatttagcagggacaaacaggaacagctttcttaggcccatttaaaggaatttgaaactatttttataaaacagactgaaaatggccacttataaaaatttcttccatggttgttactaaaagtgtattttcatgtttaaatgcttttggatattttcaagtcaaattataactatcatgttgaattgttaatgtgtagaaataatactttgttattttaaattaagaatattgagcacctacattgtgcctagccttgtgctgtcatcatttaagcatttcttttataaaagcatcatgttttacaaagtcaatatgatctcatgaggtgcaaataaaaactgctggcagggtataatagaatgtctattatattttacaaatgatctttgcaaattgtggtcagaggcattaatgtttgcctgagttaagctaacttaaatgcattcttttctgtcatgattatattaaatgtcactattcacatgtaaaacaatctcaatgtctttttttttccagtaactaaaatgcaatgttata

SEQ ID NO: 2688 - DNA, 1887 bp, Cricetulus griseus
tggctgccagcccgagccatgggctgccgggctctcctgctcctacctttcctatcattcggggccgccatgatgatccagcttgggccaaagtccttcggcagcgagtactttccaaccaaccccacatccgaccctgctgtagccaataactactcagttctttacttccaacagaaggttgaccactttgattttataactcacgaacttttaaacaagcggtacttaatagctgataaacattggaaggcaaatggtggcacaatacttttcttacactggtaatgaaggggacattgtctggttttgcaataatacggggttcatgtgggatgtggctaaggagctgaaagctatgctggtgtttgctgaacatcgatactatggggagtcccttccctttggtgaggaatcattcaaggatgcccaacacttggattttctgacatcagaacaagctctggctgattttgcagagttaatcaaacacttgaaaagaactgtcccaggagctaaaaatcaacctgttattgccatcgggggctcttatggtggcatgcttgcagcctggttcaggatgaaatatcctcacttagtagttggagctcttgcatcttctgcccctatctggcagtttgatgatttggttccctgtggtgtgtttatgaagattgtaactgaagattttaggaaaagtagtccacagtgttcagagagcatccgcagatcctggaaagccattaaccgacactcaactacaggtagtgatctccaatggctcacaaaaacctttcacctgtgtagccccttgaattttgaggacatcacaactttaaaagagtggctctctgagacctgggtgaacctggccatggtagactacccttacgaagccagctttttacagcccttgcctgcttggcctgtcacggtagtgtgccagtatttgaaaaatcctaatgtatctgatacagtgctgctgcagaatattttccaagctctgaatatatattataattattcaggccaagcacaatgcctgaatatttcacaaacagctactagcagtctaggtgccactggctggggctatcagtcctgcacagaattggtcatgcccatttgttctaatggtgttgatgacatgtttgaaagttatatatgggacttcgacaagttttctaatgactgttttaaccagtggggtgtgaaaccacggcttaattggataattactttgtatggtggcaaaaacatcagttcacactcaaacatcattttcagcaatggtgacttagacccatggtcaggaggtggagtgaccaaagacattacagataccctggtggctatcaatatccccaatggggcccatcatttagatctccgagccagcactgcctttgatccttccactgtgctgttatctcgatcactggaagttaaacacatgaagaaatggatcgcagatttctataaattaacttttttttgttttcttgtccctattcctgccacaaaatgagaagcacaagctggatcaaaaatgctgcagttgcagctggtaggatgtgtgatgccaatccaggaaacggggccacttcctttgagctcaatgactgcctttgaactgggctgcaaataaagaacaaggcagacctacctgtgtgttgctcccatctcctccagctgttgggaaggcagtgtgcctgggctggctgctttcagaaagtcctttctttttctctttcccctttggcagctttccttatttctgggagatttgctattgtggtactgccaggaagaaatctggccttctcctgctccatttctctttgtttctaaggtcagttttgtggtgatctgcctaaattctgccaa

SEQ ID NO: 2689 - DNA, 1887 bp, Cricetulus griseus
caggaagaagatgagcctgaagtccgaacgccggggaattcatgtggatcaatctgagctcctgtgcaagaaaggatgtggttactatggcaaccctgcctggcagggtttctgctccaagtgctggagggaggagtaccataaggcccgccagaagcagatccaagaggactgggagctggcagaaagacttcagcgggaggaggaagaggccttcgctagcagtcagagcagccaaggagcccagtccctcacgttctccaagtttgaggaaaagaaaccaatgagaagacccgcaaggtcaccacagtgaagaagttcttcagtgcctcttccagggttggatccaagaaggaaattcaggaagccaaagctcccagtccctccataaaccggcaaaccagcattgagacggatcgagtgactaaagagtaaacagacgaagatgtttttggaagcaatgcattacaaaagggatttaagcattgaggagcagtcagaatgactcaggacttttaccagaatgtggctgaaagaatgcagactcgtggaaaagtagcctccagagaaagtggagaagataatggatcagaatcgaaaagcacatcatgacacgtctgtataaatttgtgttctgcccagagactactgatgatgagaagaaagatcttgccattcaaaagaggatcagggctctgcactgggtgacacctcagatgctctgtgtccctgtcaatgaggaaatccctgaagtgtctgacatggtggtgaaagcgatcacagacatcattgagatggactcaaagcgtgtgcctcgggacaagctagcctgcatcaccaggtgcagcaagcacatcttcaatgccatcaagatcaccaagaatgagccagcctcagccgatgacttcctgcccaccctcatctacatcgtcctgaagggcaacccccctcgcctgcagtccaacatccagtacatcactcgcttctgcaaccccagccggcttatgactggcgaggatggctactatttcaccaacctatgctgtgctgtggctttcattgagaaattagatgctcagtctttgaatttaagtcaggaggattttgaccgatacatgtccggccagacttccccaaggaagcaggagtctgagacttggtcccccgaggcctgcttaggtgtgaagcaaatgtataagaacttggacctcctgtctcagttgaatgaacggcaggaaaggatcatgaatgaagctaagaaacttgaaaaagacttaatagactggacggatggaattgccaaggaagttcaagacattgttgagaaatacccacttgagatcaagcccccaaaccaaccattagcagccattgactctgaaaatgtagagaatgacaagctccctccccccctgcagcctcaggtgtatgcaggatgatggccatatttacttggggctgctttcagggagcttctgtgttccactgttcaggtctgggatacgaattaactgcttaaaatgtcaaagtatttttaaggtacagttttaggaattgttttgtttatttttttttcctagcagaggaagcgagtaaataataatgcactatttattttgagttggtgaggtaggtttgtgtgaattacgtttccatcttctctgtcctccctgattttccaatgggcttcctctgtggtggacacagttgttggtttggggcaaatactgcagtttagaggataaaacagatagatgctacagagtctatgttgacatggcttcaatgttcccatactctcctagtgtgaaataattttgtaattgtaaagataggagatatgttaataagtaaatatgtaaaattgtaaatatagtaaaaaataaa

SEQ ID NO: 2690 - DNA, 1887 bp, Cricetulus griseus
cactatgccatgaagatcttggacaaacagaaggtggtgaagctgaagcagattgagcacactctaaatgagaagcgcatcctgcaggctgtcaacttcccgttcctggtcaaacttgaattctccttcaaggacaactcaaacttgtacatggtcatggagtatgtgcctggtggggagatgttctcccacttgcggcggatcggaaggttcagcgagccccatgcccgtttctacgcggcgcagatcgtcctgacctttgagtatctgcactccctggacctcatctaccgggacctgaagcccgagaaccttctcatcgaccagcagggctatattcaggtgacagacttcggttttgccaagcgtgtgaaaggccggacttggaccttgtgtgggacccctgagtacttggcccccgagattatcctgagcaaaggctacaacaaggctgtggactggtgggctctcggagtcctcatctacgagatggctgctggttacccacccttcttcgctgaccagcctatccagatctacgagaaaatcgtctctgggaaggtgcggttcccatctcacttcagctctgacttgaaggacctgctacggaaccttctgcaggtggatctcaccaagcgctttgggaacctcaagaacggggtcaatgacatcaagaaccataagtggtttgccacgactgactggattgccatctatcagagaaaggtggaagctcccttcataccaaagtttaaaggccctggggacacgagtaactttgacgactatgaggaggaagagatccgggtctccatcaatgagaagtgtggcaaggagtttactgagttttaggggtgtgcttgtaccccatgggttttctttctttttttctttttttttcttttttttttccggttgggggtgggagggttggatcgaacagccagagggccctagagttctgtgcatctaatttaacacccactccacccccaagttagggagagcaggaaagccagatattggggaaggggcaacatcagctccccctccccccaccgagaccacgagacacccttctccccacttctctgcctgttttcaatgaatttctcagcttcagtcacacccagacttatggtgtatccaagggcagggtaaggaaagagaggcccaaattcaccccagcctccacccccactccagcactggacactaaggatgaacagaaatgccaaccaccccttccatgcagtcctacttggaaagggagattttagtgacaggtacagagggctgcttgctagtggggttttgttttttttttcatttaaattaagttccaccagtgcctcccttcctccagactgtccctcccctaccaaaccccctctacaagcccccaatccactctgaggccgggatagccaactgactctgtcaaggaaggaaccgggctttgaacctcgccctgagctgctagcctcccggcccccttttccaggggtctcatgccaattctttggcgcatcagcccccttaagaagcccctccccatcctgggcacctcacttctagcttagctgtcagctgtccatcacctcttgctctgctccccactcactgcacccccaagtctgattgtgcttttctctcaatagaaaggtggggagctgctggggaaattaccccatttatccctgtgtttatccctctcgtaacttctcccaaacaggaggagctctcaggcctgggtgggggccccgggtgggcgaggggggccattcaacctgtgtgctgcgaaggatgagacttcctcttgaacagtgtgctgttgtaaacatatttgaaaactattaccaataaagttttagttttaaaataaaa

SEQ ID NO: 2691 - DNA, 1887 bp, Cricetulus griseus
gagtggataaatgatgtgcactgccctgagccccaaggttcgcagcggacctggcctgtctgatatgcatcagtacagccagtggctggccagcagacatgaagctaatttgctgccaatgaaagaagacttggccttgtggttaaccaatctattagggaaagagataacagcagaaaccttcatggagaagttggataatggtgccttgctctgtcagcttgcagcaactgtgcaagagaaattcaaagaaagcatggatgccaataagcctgctaagactctgccactgaagaagattccctgcaaagccagcgcaccctcaggctcctttttttgcccgagacaacacagccaacttcttatcctggtgccgagacctgggagtggacgaaacatgtctttttgaatccgaaggcctggttctgcacaaacagccccgagaagtgtgtctatgttttgctagagcttggccggatcgtagccaggtatggtgtggagcctcctggtctgataaagctggaaaaagaaattgaacaagaagagacactttctgccccgtctccttcgccttctccttcatccaagtcttcaggaaagaagagtactgggaacctactggacgatgcagtaaaaagaatctctgaagatcctccctgcaagtgcccaactaagttctgtgtggagcggctctctcaaggtcgatatcgggtgggagagaagatcctcttcatcaggatgctgcacaacaagcatgtgatggtccgagtgggaggaggctgggagaccttcgcaggctatctactcaagcatgacccctgccgcatgctgcagatcctcccgtgtggatggcaagacatcccctgtgcagagcaaatcaccaatcctgaaggacatgaatccagataattacctggtggtctctgccacctacaaggctaagaaggagattaaatgaaactggtttctgaaaggggactcatgcaatggcctgtgtccattctacagtatagccagtgtagttcacatgctttgagaaccacacacattatcaagcaggaaaaggctcaaaagtagcactatttatttttaatgcatctgtagaacttcacctaagggaaaaaattctaaactcagaacaaaatcagacaaattataagcaaatcattatggctctgtatgtgaacatagtatttaaaacaaaccttattaggataaactcagtgcagccattggaggtgaacatgcctagattataattagcatgtatggataggtcaacagaaagtgcctgctgtatgtctatgagctaaagcaccccagacacttttataatggtgggattttatagctattttttacaaaatgacaatgtgatgatgtgctactaaaattgtccacagactatacgatacagttttcatagccataatacttaactggaaaggccacatcagagatgtcgacattcactgggaagattgccttaaagatcatctttgatcactgaccaaaccaacctctggggtacttttggatgttgcctgtacagccccttagaaatagcaggtaccttacacacacagagcagctatatttaggtaagatcacttagtgaaattcgacatgcataagctggcatacattcacattgtgatgtgcagactgcacagtcacatgttcatcagctttgtgattttgtttatttcaagcattttcttattaaaatgtatcttacttagtcctattctgctatgctgtctcatgaagtaaattcactgtattgaatgatgttacagacttgtatacccaggacagggctgttttgtaccaatgaacagcaagatattgtccacatttaagaattaaaaccaaaaattaaaaaaa

SEQ ID NO: 2692 - DNA, 1886 bp, Cricetulus griseus
tctgggaccgtttacataatgccacaaagccgaaagagttaccagcctggctccatagagccctggatggagcccctgagtcccttcgaggatgtggcaagcacagagatgagtcagtctgacagtggggtggacctgagtggagattctcaggtgtcatcaggtccctgcagccagcgaagctcccctgatggaggacttaaggggtcagcagagggaccccccaagcggcctggaggaccctcacccttgaatactgttcctggtgaggctgcatctggctctgaaccctctgaacctactaggagacggccacctgttccccatgatggggacagaaaggagctgccccgggagcagcccctgccccctggtcccataggcaccgaaagatcacagcgcacagaccgaggcccagagccaggccccctacggccagcccaccgacctggctctcaagttgagtttggcactaccaacaaggactcagacttgtgcctagtggtaggagacactttaaaaggagagaaagagttgacagcgtcggccacagaggccgttcccatacccagagactgggagctgcttcccagcgcttcagctcccactgagccacaatctaagagcctgggttctgggcactgtggtccagagcccagcccttcaggtcagcgcctatatcctgaggtcttctatggcagtcctgggcctcccagttcccaagtctctgggggtgccatcgactctcagttacatcccaacagtggaggcttccgtcctgggacaccctcattgcaccagtacaggtcacagcccctgtatctacccccaggtccagctcctccctcggcgctgctctctggggtagctctcaagggccagtttctggatttctcagcactgcaagccacagagctggggaagttgcctgctggaggggttctctaccctccaccgtccttcctctactctgcagctttctgccccagccctttacctgacacacccttgcttcaggtacgccaggatctgccatccccttcagatttttactctaaccctctacagcctggtggtcaaagtggcttccttccttcaggagcccctgcccagcagatgctcctccctgtggtagaatcgcagctgcccgtggtgaacttcggctccctgccacccgcgccacctcctgctccaccccctctgtctctgttacctgtgggtcctgctctgcagccccccagcctggctgtgcggcccccacctgctcctgctactcgggtcttgccttcatctgccaggcccttccccgctagcctggggcgagcagagctgcacccagtagaactaaagcctttccaggattatcggaagctgagcagcaaccttggtggtcctgggtcatctcggactcctccaactggaaggcccttctctggtctcagttcccgtctcaaggctcctccttccacttacagcggagtattccgaactcagcgcattgacctctaccaacagggctccccacctgatgccctgcgctggatgccgaagccttgggaaaggacggggccaccttctcgagaagggcctccccgaagagcagaggagcctgggtcccggggggacaaggagcctggattgcccccaccccgctgagggagttccccttgacccccacccccggggcttgtatatagattataaatatataagggggaaaggggtggctggggaggggttgtgggtctggagcctcacttcccctcttctcttcccctggtcccccatccctggggccgtttgttaaaaaagaataataaaagaatttaaaaaaaaaaaaaaaaaaaaaaaaaaaaaaaaaaaaaaaaaaaaaaaaaaaaaaaaaa

SEQ ID NO: 2693 - DNA, 1886 bp, Cricetulus griseus
  modified_base (1860)..(1860): a, c, t, g, unknown or other
aacacctcaggaggcaataacagatggcttggaaattgtggtttcacctagatgtctacacagtgaattaatgtgcccaatttgcttggatatgttgaagaacaccatgactacaaaggagtgtttacatcggttctgtgcagattgcattatcacagcccttagaagtggcaacaaagaatgccctacctgtacggaaaaaattagtttccaaaagatcactgaggccggacccaaactttgatgcactcatcagcaaaatctacccaagtcgtgatgagtatgaagctcatcaagagagagtgctagccaggatcaacaagcacaacaaccagcaggcactcagccatagcattgaggaagggctgaagatacaggccatgaacagattacagcgaggcaagaagcaacagattgaaaatggcagtggagcagaagataatggtgacagttcacactgtagtaatgcatccacacacagcaatcaggaagcaggacctagcaacaaacgaaccaaaacatcagatgactctgggcttgaacttgataataacaatgcaacagtggcaattgatccagtaatggatggtgctagtgaaattgagttagtattcaggccccatccaacacttatggaaaaggatgacagtgcacaaacaagatacataaaagacttcaggtaatgccactgttgatcatttatccaagtatctggctgtgaggttagctttagaagaacttcgaagcaaaggagaatccaaaaccagatgaacctcgatacagccagtgagaagcagtataccatttacatagctacagccagtggccagttcactgtattaaatggctccttttctttggaattggtcagtgagaaatactggaaagtgaacaaacccatggaacctttattatgcacccaccaaggagcacaaataagcttttcaaaatcagttctgagactgaactttttatagcctatttctttaatattaaagatgcaccatcattactttcacggacagatctgggatatgttcagttttctttctgagccagacttgtttacactatgagaagccatctttcacccttcaaaagttttgtagcctaaagaatgttagacaagatgtattctgacttttttcccttggagtcttgtatatttatagttttctatataaactgtagtatcttcatgaagaccgaggctcacatttactgtgcttaaacaattctcataggattattattttcatggtattttcttacacaatatctcatttcaaaagaggttctttatgaacttggtgtccattgtcatgcattgtttttggttttcactgttttccctataagcttagaatttctggtcatgggaaaagaatcagagttctttgagaacatggttcctgtatagatttcattgaagaacaaaaagcttaaattggtgataaaatgtattcctcagttgcacatttaagagttttccctttattatatgtgtttgatgcttttccctattaaaataccagagatatggagatattttgcactttagcattgatgaaaagtacaagatatgttcaaagcatcccctaattcttttttattaattcaagaagaacatgacacttagaactaaaaatggaaaagaaaggctgctttcgtttgaagagttctttttattttgagttgccatgtatttataaatttagtgctctgctaattacagaagcagttaatggaacatgaacattgctttgataatagtaagacaggtctgcagaagagtcagctgattggtagtcattcatatattcttagttttgtattgagacagtgttgatagtttggganccacaaggctttatgctgaccactca

SEQ ID NO: 2694 - DNA, 1886 bp, Cricetulus griseus
  modified_base (415)..(415): a, c, t, g, unknown or other
agaatgtatgaagacacagtggctagaaacggcaacgaagccaaccggtggtgttgctagagcccagttcaacggtgaataccccgcacaatagagagcctgatgaagagtctttacagttagctacttttcctgagccgctgttcgatgtgtgtaaaaaaagttctgtgtccaaactatctactccaaaagaacgtgtgtcacgtcgctttggacggagctttacctgtgatagttgtggatttggcttcagctgtgaaaaattactagatgaacatgtgctgacctgcactaacagacattcctaccaaaacacagcaagagcttaccaccggatagtagatattagagatggaaaagatagcaacatcaaagctgagctcggtgaaaaggattcttaccaaaaacattttcngcacagacagacaaatacagagaagacgccagccaggcgctgatggttcagcttcgaccactgcaagcaggaaaaaaaagaattattatcaagatggaaccagaagatattcctacagatgagatgaaagacttcaacattattaaagttactgataaagactgcaacgagtccactgacaatgatgaattagaagatgaacctgaagagccattttatagatactatgttgaggaagatgtcggcattaaaaagagtggtaggaaaaccctaaagcctcggatgtctgtaagtgtggatgaaagaagtggtttggaaagcatgagacctcctaacaatagcagtccaatccaggaggacaccgacaatgcatcttgtgagctgtgtggactcacaataactgaggaggacctgtcgtctcattacttagccaagcacatcgaaaatatctgcgcatgtggtaaatgtggacaaatacttgtcaagggcagacagcttcaggaacatgctcagagatgtggagaacctcaggatctgacgatgaacgggctaggaaatgctgaagagaaaatggacatggaagagaaccctgatgagcagtctgagataagagacatgtttgttgaaatgctggatgatttcagggacagtcattaccaaataaacagtatacagaaaaaagcagttatttaaacattctgcctgtccttttcggtgtcccaattgtggtcagcgttttgaaactgaaaatttagtggttgaacatatgtctagctgcctagaccaggatatgtttaagagtgccatcatggaagaaaatgaaagagatcacagacgaaaacatttttgtaacctgtgtggaaaaaggattttatcagcggtgtcatttgagagaacactatactgttcatactaaggaaaagcagtttgtttgtcagacatgtggaaaagcaagtttttaagagtagcggcagttgcgtctgcacaatgatatgcacaaaggcatggccaggtatgtctgttccatttgtgatcaaggcaacttccgaaaacatgaccatgtacggcatatgatctctcatttatctgctggtgagactatatgccaggtctgctttcagatattcccaaataatgaacagttggagcagcatatggatgttcatctgtatacttgtggaatatgtggagcaaagtttaatttgaggaaagatatgagatcacactataatgccaagcatttgaaaagaacctgaggggctttctactgcacgaatgtttagttgataggcagaacaccaaagcaaaaggatatgagctatttagacactgatttcataagaagtgttggggaaagatttcaaggtcccttttactttaactatttttgtttaggaccttaagtatattttaggcattaaatgtttatctattttattaatttttaactttttttttttctttactattt

SEQ ID NO: 2695 - DNA, 1886 bp, Cricetulus griseus
  modified_base (1880)..(1880): a, c, t, g, unknown or other
ggacacatatcgccagatccacattgacatccctcggatgagccccgaagcactgattcttcaacccaaggtgacagtagattttcgaaaggatcttgtttatatgggctatccgacaccctgccagtggatacgttcaggggataaacgacctggtcactccgttcttcgtggtcttcatttgcgagtacatagaccaggaggacgtggatgaggtcgatgtctccagtgtgccggcagaggtgcttcgcaacattgaggctgacacctattggtgcatgagcaagctgctggatggcattcaggacaattacacctttgcccagcctgggattcaaatgaaagtgaagatgctggaggaacttgtaagccggattgatgagcgagtccatcgccatctggacgggcacgaagtgcgatacctgcagtttgccttccgctggatgaacaacctgctgatgagggaactgcccctgcgttgcaccatccgtctatgggacacctaccagtctgaacccgaggggcttttctcattttccacttgtatgtttgtgctgctttcctcgtgagatggaggagagagattctagaagaaagagatttccaagagttgctgctcttcctccagaacctgcccctactgacccgcttggaaaatgaccaggacgtcagcctgctgctggccgaggcctatcgcctcaagtttgccttcgcagatgcccccaatcactacaagaagtgaacctggggcccatggcagtggcctcaccctgggggtagcatcccttccctgtctggacagatgctggcctctggattggttctttcctggtgtggcctagcagaatggaccccagcatggtccagaactggcaggatagtcagcctcagtttgacgagataccaaagagagcccgggagagaatcctagcttcagaagctcagtgtggccaggagtgtccctcaccctggcccttccttgccaaatgcctacctttagcccccagcccagacagcccagaggaagttccctcagagaggcctgctgtatgggtgccaggcagaggtgggcagccatctcaggcctgctctgaaatgcacaaatctattctgtcaagtgaaagaatgaagttcagacaaaatgctgagcactggctgctccagggccctcagactgtcttcccacatgtgctcccaggaatgccccaagcatcctggcctctgtgatgtggggtcccccaaagatcaccaggccacctgtagggcaagagcttcagactcctagagcaggcttcttccctcagttacccactgttgcccactctctgacctgtccctccttcaggagcagcacaccactgcccaggcactaggacactgtccagagactgtaggggacacaaggaagatgtgtgtctgcttctattcagatcatcctgggtcagatagggcatgacagcagcaaagtgttgtgcaggcagtctatgtcctggaccagcagagggacatgcttcctcaaactagtgcctgtcctgggtaaggggcacgcaggttatgaggaaaggtgcctctgcggctttgtggtgaagcactatccttcctgacccttccatggtggagatcacccctcagacaaaagggtagggccatatagatctgccccatggtgggttttttatgagatgacaaggacccatgaggttaacttaagccctgaatgtattttcatgtgttcaaatgcttgactgggtgtaagggacgctggccacagtcctgcgtttaagcccatgagctgagccaggcaggatgtgtgctttgaatgtgatgtgttagaaacacgaaataaagatgcttcatataagaaaaaaaaaaaaaaaaanaaaaaa

SEQ ID NO: 2696 - DNA, 1886 bp, Cricetulus griseus
cacttcagccatacttcgagagtggctggtggctgtgaagggtttgtaccactctgtggagtggcgaccggcggaggaacccagttcctacccagatgaggagggccccaaacactggtctgactcccggtatgagcatgtcatgaagttgcgccaagcggccctgaagtctgctcgggacatgtgggctgactacatcatgtttgtggacagtgacaacttgatcaccaaccctgacaccctgagtcttctcatcgctgagaacaagactgtggtggccccaatgctggactcccgcgcagcttattccaacttctggtgcggaatgacctcccagggctactacaagcgcacccccgcctacatccccatccgaaggcgggaccgcagaggctgcttcgcggttcccatggtgcactccacctttctcatcgacctgcgcaaggcggcttccaggaacctggccttctacccaccacaccctgactacacctggtcctttgacgacatcattgtctttgccttctcctgcaaacaggcagaggtgcagatgtatgtgtgcaataaggaggtgtatggcttcctgcccgtgccgctgcgtgcacacagcagtctgcaggacgaggccgagagcttcatgcacgtgcagctggaggtcatggtgaagcatcctccagtgcagctgtcccagttcatctcagcacccagcaagactgcagacaagatgggctttgatgaggtcttcatgatcaacctgaagaggaggcgggaccggcgggaacgcatgctgcaggccctgcacgagcaggagattgactgccgtttggtggaggctgtggacggcaaagccatgaacaccagccaggtggaggctctgggcatccagatgctgcctggctaccgggacccctaccacgggcgaccactcaccaaaggggagctgggctgctttctcagccactacaacatctggaaggaggtggtggagcggggactacagaagtccctcgtgtttgaggatgacctgcgttttgagatcttcttcaagagacgtctgatgagcctgatgcgggatgtggagcgtgaggggctggactgggacctcatttatgtgggccggaagcgcatgcaagtggagcaccccgaaaaggctgtgccccgtgtgaggaacctggtggaggccgattactcctactggacactggcttatgtgatctccctgcaaggcgcgcgcaagctgcttggtgctaagcccctggctaagatgctgcctgttgacgagttcctgccggtcatgtttgacaaacacccagtgtcagaatataagactcacttctctccccgcaacctgcgcgccttttccgtggagcctctcctcatctatcctacacactacacaggggacgatggctatgtcagtgacacagagacctcggtggtgtggaataatgagcaggttaagactgactgggaccgagccaagtcccagaagatgcgtgaacagcaggcgctgagccgagaggccaagaactcagatgtgcttcagtccccactggacagcgccgctcgtgacgagctctgaaggagccggcaaaaagccagtgccactgccgaggccaagccttcacatgcttgcctgaaactgtagggccacgtaggcagaccacagagggctctatagcaggcagcttccatgtcttgttcagcagccccttgtatacaggcagcattgatgaagtgcttactgtatgccaggaacagggctgaacactgagagattgggaagaaggagcccagtctctgttgtgtccaccctgaaggaaggtttcttagtagggcagtgaaagacatgatttcccctcatgggtgattgatctgatcatcag

SEQ ID NO: 2697 - DNA, 1885 bp, Cricetulus griseus
agatctgtaagagcaaaactcaggaatctcagcagtattaccatagcttggctgtccggcagagtctggctgtgcattttaatatccagcaggactgtggtcatttccttgctgaagtccctaatcgtctgcttccctggaaggatcctgatgctcctgaaaaggcagaggatagaaactgaaaacagtgaggaagaggtgaaagcaagaaactgccaggggaaatcccagccctgctctagaaacagagtcatgtggcccattccagagctgaccaaaggtggtgtcaccagtgcctcagcaggatggaatgcagttcagattttatgaatagttggcaggacatgaggaaataatgtccttgtgtgtgcaatcctccaggggccctcagggaacagactttaaagtactgttcttgaccactgtcagaccgatcagcagggcagccgggctggtggtgcctgagctttcctaagtttaatttatccagtactggaaaatcaccagacattagctggtgacctgcagtcaggattttcccttagcttttacccagagtcatctgaaaagatacaggctagtctcaaaagctgggatggattttggaggcttcattatatttgaagtaatcgtgagtatataaagcatacacacacttggaaacagaacaagaggaactcagccccctgggccagctctggcatgcttgtcattcccctcactagtggataaggattgagattctgatccagcctaataagtgaacaggatggctgcccataaaactggggttattagatttacctcattgaagctcatatcctcaaaggcccaaagtgttgcgctgagacaaacccaagtaaagtcttgggttttgaaggttgattttttttttctttaaaaagaaggtgctttcaaaaggtttgtctaaagaactcttgggaaatttcttaacacactgtaccatctttatgaaccttcctgcgaaggcaattgtcatcagcattaccgtcacctaatgtgtaaaagtacccagactgtccaaggtgctacacagctgtcaaacacctacccctgcagctgttttaaattagagacctctgcatcagctgccgctggaaattttgcccacttagatgggctacaggggtgtgcattctgaatattctatattacattccctcttcaagagcctctacatctgttcctgcttcccaccctaccctacccccattggtttttttttaaatcaggaaagtttcagggaattaatagaggttggggtttttttttaaacccagcagaatcagagttatatattttgctatgaacattgttatggtacagaaaatccactttgcccattggtttgtggctagtatgtgtgtctgaactcttggtgactcaaatgttgagccaaccctatggcttctgtgtagtgttgttgaaagattaaaccacacagctttaggaagcccactcaaattgttcctttcttgcccccaatgcctcaccaattctagacagttgtgtgtgaacacactgggctgggttttctgttcattatctggagggtgttttgttgggagatagacacagaagcaacatgtcacttgtcccagtgatttggatcatggcagtctttacctctctaattctccacgacactgcccacactctgtattggaaaatcttgtttctcttcctccagcgttttacccccatccttacacattttacagttgtataaattaataacaaggtcccctacgtcaccagtggcgccgccctttggtttgctgtggtactttgctgtgtactctgtggcctcacgttactgtgtaaataaattcagtttaatatacaataaaaaaaaaaaaaaaaa

SEQ ID NO: 2698 - DNA, 1885 bp, Cricetulus griseus
cccccgccgcctgctgggccgggccgaggatgcagcgcagcgcctcggtggccaggctcgctctgctccagcgtgcttgctaacttccccagctccgtccctgcttgccggggccgccccttgtccccgcgccctccgggtctggtcatcaaacgcactgggagctgcctccgggtcccttgcagccctctcgcgagcccgctctccccttctgtgccccatcttcgtcctcaccatgctgcccttcggcctcgtggccgccctgctgctggccgcagggcctcggccgagcctgggcgacgaagccatccactgccccccctgctccgaggagaagctggcccgctgccgcccccctgtgggttgcgaggagctggtgcgggagcctggctgcggttgttgcgccacttgtgccctgggcttggggatgccctgcggggtgtacaccccacgctgtggctcaggcatgcgctgctaccctccccggggagtggagaaacccctgcgcacactgatgcacgggcaaggcgtgtgcacggagctgtcggagatcgaggccatccaggaaagcctgcagtcctctgacaaggatgagagcgaccatcccaacaacagcttcaacccctgcagtgcccatgatcataggtgcctgcagaagcatatggcgaaaatgcgagatcggagcaagatgaaggtggtggggacacctcgggaggagccccgtcctgtgccccagggttcctgccagagcgagctgcaccgggccctggagcggctggctgcctctcagagccggacccaagaggacctagtcatcatccctattcccaactgtgaccgcaatggcaacttccaccccaaacagtgtcaccccgccctggacggacaacgtggcaagtgctggtgtgtggatcgcaagacaggggtgaagcttccagggggcttggaacccaaaggggagctggactgccaccaactggctgacagcttccaagagtgaggcctgccagtaggtggggtcctcagtgctccctactaggcccctgtgctctgggggctgtagagttgacctggcatggagttttggtccgagtcctggctctctgcctctggccctgcccaaagtttcccttgatgtgtatgtgcagtgtgtgtgtgtttatgggcacaaatgtggcccatggggtaagcctgaacctagagtacccactatgggcgtagatagcccaagaggtctgagtgtagcaacaggaagccccagtatgttttcaaatcaatcttgaattcattcattcattcattcattcagccatctgaaaacatgtattggcaacatactacatgccagctttagttttcagccctgggaggcctcattctaatttcctctgattgtggtagtcctataaagtcaccagagtcctgtagaagagaaacctcattcttggaatcagagagaaagaaaggtgtgaacattgaccactctccctctccaacctagtcagtgtgggattgtgtggagtagaagagggctttaggctcatgagacccacccccactattatgccaagctttgttctcattcctcaggttctccagggggaagagattgagggacagggcccatctttgggtctgggtattgggtcctaattgtggtctctggtcatgacgtcaccgggatgaccctacctttccagctgcccactgcctgtggccctgcctgcctccctgtatcccccttcccatcacaactgtcccacccactctaccctcctgggcattttctggcttgcctggatagacttagagacctgcttgttggctgtgatgtcttttcattcttttttttcttttttaaaaaaaaacagaacaaaaccaaaaa

SEQ ID NO: 2699 - DNA, 1885 bp, Cricetulus griseus
ttgctggtctcagtttagactggaagaggaacctactcatctgaggctgggtgtgtccattcagaacctggtaaaggtttaccgagatggcatgaaggtggctgtggatggcttggcgctaaatttttacgagggccagatcacctaccttcctgccataaccgagctgctgactgggagagagcacgtggagttctttgccctcttgaggggagtcccagaaaaagaagttggcaaggttggtgaatgggcaattcgcaaactgggcctcgtaaagtatggagagaaatatgccagtaactatagtggaggcaacaaacggaagctttccacggccatggcattgataggcgggcctcctgtggtgtttctggatgaaccaaccacaggcatggaccccaaagctcggagattcttgtggaattgtgccctaagcattgtcaaggaggggagatctgtagttctcacatctcatagtatggaagaatgtgaagctctttgcacaaggatggccattatggtcaatgggaggttcaggtgccttggcagcgtccaacatctgaagaacaggtttggagatggttacaccatagttgtgcgaatagcagggtccaaccctgatctgaagcctgtccaggagttctttggactcgcctttccaggaagtgtcctaaaaagagaaacaccgaaacatgctacagtaccagcttccctcctccttgtcgtctctggcgaggatattcagcatcctctcccagagcaaaaaagagactccacatagaagactaactctgtctctcagacaacacttgaccaagtatttgtgaactttgccaaggaccaaagtgatgatgaccacttaaaggacctttcattacacaaaaatcagacagttgtggatgtggctgtcctcacatcttttttacaagatgagaaagtccattaagccgtgccgaaccacaaaactggtttcctggtgacacatccattgctggcaatgagtgtgccagaattactagtgccaagttgctcagaaagtctgaagccctgaggtgtgtcacacacactttttgtgaaagccgccctgctgtctatcgacatcattaaatatcaggtgacaaaatggtgccatgtgtgactaaagccctgctttggttctctctttgatgagctgctgttgtggctgccagatgcaaaatgtggatcaccctaagtacaggagacttggttcagttgttcggggttgaattcaatgtagatttgacatgtttttctaaagctagaaacaatctatagatattgtgttgccttttacactatccgaacagcaatcttcaattttcctgtataaatgtaattattttagagatttaaaaaaaatcagccctatcttcaaataagtttcctcatattccctgtgaagatgtactatgtgaatttagaaattctcaaacgtaaacacatctgatttacctttttctttttaatcttggaaaacttactaactgtgaatatgagaaagacaaaagaaagtgagtcctctctctatacatacccagcacaattcattctggaacaaacaaacctcaaactactgtatttagatgtctgtactgaaagtatatgcctcatgcctattagatgttacacatcatttgctctctgtatagtaatcattgacttaaagggattgtctgttgtcttctcatggttgtatatatcaggtaaaatcgttccaaagagccatgtgttatataatggggaaccactttgatactgaaatactaatttgtactcttgttactatttactggtgatagtgtaataccacagaaatgctgttctgattcaaaactgttgcatcccttttttatagagcatttat

SEQ ID NO: 2700 - DNA, 1885 bp, Cricetulus griseus
cccggcacgtggctgccttggaacccggggccacccgcaggcccttcagcactgcggagctcaaggagaaacctgacatgtctagatttcctgctgaagatattagaaatttcagtatcattgcacatgtggatcatggcaaaagcactttagctgacaggcttctcgaactaacaggaacaattgataagacaaagaaaaatcagcaggttcttgataaattacaagtggaacgagaaagaggcatcaccgtgaaagcacaaacagcaactttgttttatagttttaaaggaaagcagtaccttttaaacctcattgacacaccaggccatgttgattttagttatgaagtgtccaggtcactatctgcttgccaaggtgttttactggtggtcgatgcaaatgagggtattcaagctcagactgtagcaaatttctttcttgcctttgaagcacaattgtcagtaattccagttataaacaagattgatctgaagaatgctgatcctgaaagggttgaaaaacagattgaaaaagtatttgatatccctagtgatgaatgtattaagatttctgcaaaacttgggacaaatgttgacagtgttcttcaggcagtcattgaaagaatacctcctccaaaagtacatcgtgaaaacccactgagagcattggtatttgattccacctttgaccagtatagaggtgtgatagccaacatagcactgtttgatggagtggtttctaaaggagataaaattgtatctgcacacactaagaagacatatgaagttaatgaagtaggcattttgaatcctaatgagcagccaactcataaattatatgcaggacaggtgggctttctgattgctgggatgaaagatgtcactgaagcacaaataggagatacattatatttacataatcatccagtggagcccttgcctgggtttaaatcagcgaaaccaatggtatttgcaggagtgtaccctgtagaccaatctgaatataataacctgaagagtgctatagagaaactgaccttaaatgactccagtgtgacagtgcatcgggatagtagtctggccctgggtgctggctggaggttgggatttctgggacttttgcacatggaagttttcaaccagcggctagagcaggagtataatgcttctgttattttgacgacccccactgttccatacaaagctgttctatcatctgcaaaattgataaaggaatataaagaaaaagaaatcacaatcatcaaccctgcacagttccctgataagtcaaaagtaacagaatatttggaaccagttgttttgggcactgttgtcacaccaactgaatacactggaaaaataatggcactttgccaggcaagaagagcaactcaggaaaatatgattttcattgatgaaaatagagttatgcttaaatatctcttccctttgaatgaaattgtggtagatttttatgactctttgaagtctctgtcttctggatatgcaagttttgattatgaagatgcaggttaccagactgcagaacttataaaaatggatattttactgaatggaaacatcgtggaagagctagtgactgtggtacataaagagaaagcatacactgttggcaaaaccatatgtgagcgtctaaaggattctcttcccagacagctgtttgagatagtaatccaagctgctgttggaagcaaagtaattgcaagagaaactgtgaaagcctacaggaaaaatgttttggcaaaatgttatggtggtgacattacccgaaaaatgaaacttctgaagagacaagcagaaagggaaaaaaagactgaggaagattggcaacattgaaattccaaaagatactttataaaagt

SEQ ID NO: 2701 - DNA, 1884 bp, Cricetulus griseus
gatatggagggtgtctctcaggccaaccagcggcgcatgaatgccaatcccttggaggcaatgctgctggacatgggctaccggattacaggcctgagcagtgggggcacggggccgtctgatgacgaggacagctcagagggccaggtgcagtgccggcccagctagatggtcctagcccatccccagccctgtgcaggagatcagagggctgggctctgttttggtttgtcttcccacccccccctgttttgtttgttagtttggcattgtgggtggggattgctgcaacttgctggctttcagactcttgggctaattgtcccttgactgtccccagccctgagcagaaaagcaggaggggaagcccctccgtctgccctcacctcctgcttctgtgtctctggaaggctctggcccttctcaaaaccccttctgccttcagtggggaggcaagagccagccgaagttgtcttcaaggactgtcctgcccttcagttggcagcagagagggagtggaactccccgctggcaacggcttgccttggcctattgccactctcgctcccgcctacagggctagctcccctgtggtctttctggacagtcccttcacagccaccagtgttagggtggaagcctgggaaagatgggagctctggagtggcaaggtcaggccacctgccctggtggcagtggagcttcctcatcccctcctggacctggtttcctaggctgtctctgggggctttgcctttcctatgatgtgacaggagggtggggcacctcatccccacccacctgcccatgcaagtacttctgcgccatggccactctcctggggtgctcctcggcctcactgtgacctttctgccagagctcccagccaggcctactctgctgaggtggcgctttcctaaggccccttctcaccctctctgccctccttcccacccatgtgctgagccgccaccaagaccaaagaagtgatggcttttctctgtcccctgctgctttggggagagggggtgggaaagtccctagctcagctatccctccttggcagccccccaagctttacactggacacagcggccactccaccaccaagcctccctctccctctgcccccttggctcctgctctagaggtgggagttggttcaacccagcctcccccctgtgtgcttcttctgggctgcagccctccagctgcagcctccggggagaagtccctccctcctccctccctttctccctccctccctcctccctcctttctccctccctccctcgccccttcctctgccaggtgcctcctctcagtcaagcttgtgagcagccctagagacaggaggccatgttaaaagcttttcacagttttaagaagactgggggggtgaggctagtggtggggggtctggcaccatctcattgctttaatctcagcgacacaggtggcagcttctccccctccctgcccaccccaggtcctctccccactcctctcttgtagcttggtaatgaagtgtatttattggtgaaggaaacagctgctgctgctgctgctgctgctgctgggacttgctcccctgtctcttcctcatgacctttctcaagccagggagggcgagagggagtgttgggctaggcctttggggcacaagaactggccagggtcccttttgctttcctatgttcaagccacctgccatttcctccctccatgcctcctgtctcccaacccatctgcctagcctgggccctgcagtgtggagagacacataagccttactgtcctctgggggcaggagccgagcctttttgtttgctctgctcccaggagagtgagggtgacgcaattgattaaaaccattttgttcta

SEQ ID NO: 2702 - DNA, 1884 bp, Cricetulus griseus
gggaactaggatgtcggacacgtggagctccatccaggcccataagaagcaactggactcgcttcgcgagagactgcagcggaggcggaagcaggactcggggcatttgggtgagatttaaggaaatccagaagcagcactgtccccaaccttccgtagtgatagcccagtgcctcctgtacctacctctactggccctaagcccagcacaacttctatagttcctgaattagctacagaccctgagttagagaagaagttgctacaccacctctcagatctggccttaaccttgcccactgatgctgtatccatccgtcttgccatctctacgccagatgcacctgccactcaagatggggtagaaagccttctacagaaatttgcagctcaggagttgattgaggtaaagcgaggtctcctacaagacgatgcacatcccactcttgtaacttacgctgaccactccaagctctctgccatgatgggtgctgtggcagacaagaaaggccttggagaagtagcagggactatcacagggcagaaacggcgtgcagagcaggacttgactacagtggctacctttgccagttctttagcatctggtttgacctcttcaacatcagaaccagctaaggagccagctaagaaatcaaggaaacacgctgcctcagatgttgatctggagatagaaagtcttttgaaccaacagtctactaaagaacaacagagcaagaaggtcagtcaggagatcctagagctattaaataccacaacagccaaagaacaatccattgttgaaaagttccgctctcgaggtcgggcccaggtgcaagaattttgtgactatgggaccaaggaagagtgtatgaaagccagtgatgctgaccggccttgtcgaaagctgcacttcagacggattatcaataagcacactgatgagtctttaggtgattgctccttccttaacacatgtttccacatggatacctgcaaatatgttcattatgaaattgatgcttgcatggattctgagggtcccggcagcaaagagcatacaccaagccaggagcttgctcttacgcagagtgttgggggtgactccagtgcagatcgactctttccacctcagtggatctgttgtgatatccgctacctggacgtcagtatcttgggcaaatttgcagttgtgatggctgacccaccttgggatattcacatggaactaccatatgggaccttaacagatgatgagatgcgcaggctcaatataccagtactgcaggatgatggctttcttttcctctgggtcacaggaagggccatggaattgggcagagagtgtctgaacctctggggttatgaacgggtggatgaaatcatctgggtgaaaactaatcaactgcagcgcatcattaggacaggccgaacaggccactggttaaaccacggaaaggaacactgtttggttggtgtcaaaggaaatccccaaggcttcaaccagggtctggattgtgatgtgattgtagcagaggttcgttccaccagtcataaaccagatgaaatatatggcatgattgagagattgtcccctggcacccgcaagattgagttatttggacgaccacacaatgtgcaacccaactggattactcttggaaaccaactggatgggatacacctactagacccagatgtggttgcccggtttaagcaaaggtatccagatggtatcatctctaaacctaagaatttatagaagcacttccttacaaagctgagcactcagagctgtggctctgcaggccataccttaagaggagtgtttatacaacggtgcccccccccatcccatatttaaataaagttttgtattttaattgg

SEQ ID NO: 2703 - DNA, 1884 bp, Cricetulus griseus
ggctggggtgcatgttcgtgcgcttgcgcgccctccagccgctacacgctgctcttctcgcacggcaatgccgtggacttgggccagatgtgtagcttctacatcggcctgggctcgcgcatcaactgcaacatcttctcctatgattactcgggctacggcgtgagctccggcaagccctctgagaagaacctctatgccgacatcgacgccgcatggcaagcgctgcgcacccggtatggcgtgagtcctgagaacattatcctctatggacagagcattgggactgtccccactgtggacctggcctcgagatatgagtgtgcagcggtcatcctccattccccactgatgtctggtttgcgtgttgcttttccagataccaggaaaacatactgttttgatgctttccccagcattgacaagatatcgaaagtcacctctcctgtattggtcattcacggtactgaggacgaggtcatcgatttctcccatggcctggcaatgtatgagcgctgtccccgtgctgtggagccgctgtgggttgagggggctgggcacaatgacatagagctctatgcacagtacctagaacgactaaaacaattcatatctcacgagcttcccaactcttgaagatggcggccagccttacctcattactgtgaagcgaggatccttgtttgcacacactttgactggattaacagtgatgcccaataaccacagagaggggcccagtccttgggatgttctccttaaagagctaacaaagtctgtcttttgtacttaatctccaccttccattaggctgagcagctggagtctcagctgtatgaccttgcaggagtgggaatgagagctgaccatggggactgtttcccagcgtcatagactaaagcgtgatcaagtctgtctcccttgctgtcacctctgattccccaactggtgcaggatcaccctctcacccatgtgccagtgtttgatctgcagcactctcagctctggtgccatgggtgagatccatttgtgaagctatgttagtgtaactggaaaactgttgtgagaaatcctccataaacttgtgttaacatgccagtctttcccacacacatgaaataaagagtagtttactggaactatcaccaacagcttcatcaactgtaatcatataaatacaactggaatattcttaaacaacaggaaactggggttttttaagtgtaaatttattactagccaagagttttaatattttgattgtctggttggtctaataaagcctggccgactttccttctgtaaagtcctccttgtcggcttttttaaagtcctgtacatatttgcaatgacattgtgcacagattcttaatgggtagttttcttttgtcaggctacaacaatgaactgcagattccttgtttgtattgtaaatgattgaatacattttgttaatatgtttttattcctatgttttgctattaaaatttttataacatttccaagacaaaaaatttcaagtttctgctttgaagactttaggtaattaaaattaccctaagctgatttcttagtttaggagttatttgggttttgacactggagttgtgccaggtgaacatcagaaatgagatgcttaaaattgctacactacttgtattggttgggggattgggtttggggtggtttggtcttattttagttttttttttttttttgttttttttctttttcaaatttaaaagccttaaaatgtactgtaagcctcagatcgttgtacaactggattgcgttggttgccagtttgtgtgctgttgcctgaatgcggcacggtggttggtaatggaataaaggacgcatggatcaagaaaaaaaaaaaaaaaa

SEQ ID NO: 2704 - DNA, 1884 bp, Cricetulus griseus
gattgctcagggcttaatcccacccgtggaagattttccagtttgttcacctaatcaggcttcggttttggagaacctgaggctcgccgtgcgctctcagctgggatttacttccatcaggctcccgatgacgggcaggtccagcagcatttggaaccggatttttaatttcgcaagatcgcgccactcggggtcgttggctttggtctcggcggacggagacgaggtcgtcccgagtcagaccagcggcagggaaacggaaaggagtcgccttcaccgaggcttgttctccgtggagtccgacgacaccgacacggaaacggagaggagggatacggcgggagcgggctgggtggggtggcagcgcctctgccccagaacggtcccccccacgcagccgtgaacgccaccgtgggcacaggtgggaacaccagctcagcagcgcgttaagtcgcatgactcagggcctgcgctgggtgcggctcacactaggtcgcgcgagcgccacccatcagaaccagagccccctgagacagctcgataacggggtgagcagtggacgagaggacgacgacgacgtcgagatgctaatcccggtttccgacggagcttcagacattgacgccagtgactgctcccggcccctgctcgacctggcctcagaccaagggcaggggtttagacagccctactgtgccgcgaacccgcgggcagagccggtaaccgcgacggcccctgcccgcgctgtggcatggtgcacaccgcgcagataccggacacttgcttagaggcggcggcggccaaaacgaacgagtgacgacgaggctttgctactgtgttaggatgggatccccagaatgctctttgacatcatgtaatttattatactagatgctaaggttgttaatgtacaaaaaacgagaaaggaaacaaacccacataatcacctctttatttgcataacattgtctgctgctggatggacctgtcaaagggaagagaattcccgctcacatttaacacacaatgatataaaactgacgtagagttagatacattgctgtcagaaaacaaacttttctagatttttctaatgctgactttaatactctaatatggtacagaccaaatggtaaaatcccaagacatttctgttttcatctccatttagggacagaattaagcggacgaagatactctactatgcattaaattttgaactttataaaacatgtacagaagttgtacatgctaagttccacctggtaatgtctttctccagtacaggggtttgcctgagttggaccctaaagggtttgcactaaagtcctgccaaggtctcacacgagtctagcttgctggcattatccctttagatgctagcatttgctaccacagtgactatgtatttccatagctttgggggtgcgggaccatttttattacaacttgaacttgctttgccggtttcatatttatttatttgttgtatttaaaaactgcattatggtaagagtgatttttttccagtatattttatatacttgggggggagagtcaccgctataatcttgaaaagcaaattaagaatttgttccaattgcccccccacctttaagtagagtgaattacaaaaccccattatttttttagttgtcaattcttgtttatttattctttagctgtctgtgttaggagctcaatgattgggtatgaagatgtgtttgtatgtggttattgctatttattacattttgaatactttgctgaatgtcattttcaagcatgtttgaggtcttgtgtatctgtcctgtatgccgtcagggacacctgactaaaatgtttaatatgtatcaaaattaaataattttttttattgccttg

SEQ ID NO: 2705 - DNA, 1884 bp, Cricetulus griseus
  modified_base (95)..(95): a, c, t, g, unknown or other
ctggaccttcgtgtgctccatcaccatctgacaacatagaacctggcccagttgttccaccgaagccatctaaaaaagactcctcagacccctgnacaagtgagagaaaagcccgaagaattagtgtgacttccaaagtacaggcagatgtccatgaatcccatgcagcagctgcagatgaacatataagtggctgcagacagactccgaggacacaaccccgagatgaggattatgaaggggctccgtggaattgtgacagctgtacctttctcaaccaccctgcactgaatcgctgtgagcagtgtgagatgcctcggtacacttgagttcggaagaattggcaccaagttgagggtgatacttgagcactcaccggaaggaaaggagacctcgggatttcgttcatctgcccagccttttcatttcttgattcactcctgaaagaatgtacagagaagttaagggcttctgtggaatcccaaatgttaaagttactgctgagtggctcttactttctgaaggtgaacatttgaattatggtaggaaatgttacagtttatgcagacaaactgtgaattccagagcagacttacttggtcacagctctctggaaaccaaggctccctgtgcctcttcctagctgattcctgtgaagaaatggttgctgcttttttttctaagggggtaatttacaaacacacattcatacacaaacaggatactttaaaatgtgatttgtagtagtcaggaattaggcatatcatgccctttgtgaggaagtacaatcagaggtagtaatatctctttttgcttgaacaatgattcatcaagctgcatcgacactggtaactaagacctacttatgccacataaactattgtatacttttcttaggttattgattttaaagaaatgcagtatggttttattaaatgacattctcaaaaaaccatgccttgccagtagcacagtgaatgtatgccaaatgcaagtccattccaaaatccatttggaaatcctgagctcagctgtggtttataagaagtgcttacagtatatagggtcccctactactggtttgtgatgaatacatgatgtttacagcacaaaaatactttgtaccatagtctgagttagctgaaaaactcatgatctctttatttgcacatgtgttaaccagccaatgagagggaagttgaagttggccaatatcataaagttaataccagttctgtcacccccctcctgtatacacagtcactttgtactgtcactgtattctaatttagcattaatgtcggcagacctggaaaaacaagctgcactcaacagcataatgaaaccaaaggcataactcactgtagttttctatcagctagtttaatgtatctagtaacatagacctgaccctacatttatattatttcactgttttgtaaactgggtttgtagaaagcactcttgtcattgtattcaaagaatattgccctcttgaattttgcagttcttaaagtttaaagggaaaatatagaatagccagaaacctcgaagcattgtaaaatgttttgaactgatcctgatctagtttgggaagaagtagaggcaggggatattaaagaaaaagaaatgcgctgtacaaatatgtagttttagggcagattaatgttggtggaggaaagtgttgctaatttgtttatttcccaggaagaaatgggaagtgtgatatgcagtttaatttttaaggagctggtctcaattttagtactttctaattataaaagaaatcgatgtttccttaaatcttttcattgatttgtcacaattatctgaggggttcatatctgactctctgtggcaactcaattttatatagtcttttaa

SEQ ID NO: 2706 - DNA, 1883 bp, Cricetulus griseus
gcagccgcgggaagcgcgcgtgacgagatgaagctgattatcctggaacactattcacaggccagtgagtgggcggccaagtacattaggaaccgcatcatccagtttaacccagggcctgacaaatacttcaccttggggctccccactgggagcaccccacttggctgctaccagaagctgattgagtactataagaatggggacctgtcctttaaatatgtgaaaaccttcaacatggacgagtatgtgggtcttcctcgagagcacccagagagctaccactccttcatgtggaataatttcttcaagcacattgacatccaccctgaaaacacccacattctggatgggaatgcggctgacctgcaggtcgagtgtgatgcctttgaggagaagattcgggctgcgggcgggatcgaactctttgttggaggcatcggccctgacggacatgttgctttcaatgagccgggttccagtctggtgtccaggacccgtgtgaagactctggcaatggacactatcctggccaatgctagattctttgatggcgatcttgccaaggtgcccactatggccctgacggtgggtgtaggcactgtgatggatgctagagaggtgatgatcctcatcacaggcgctcacaaggcttttgctctgtacaaggccattgaggaaggcgtgaatcatatgtggactgtgtctgccttccaacagcatccccgtactgtgtttgtgtgtgatgaggatgccaccttggagctgaaagtgaagacggtcaaatatttcaaaggtttaatgcttgttcataacaagttggtggacccactgtacagtatcaaggagaaggaaattcagaaaagccaggctgctaagaagccatacagtgactagcctgtgccaagtcacttgagtacctcagaagaagacaggcgggtctttctggaaattgtaagagagtagaattactttgcttcaatacactatggttgctgcagacccttggctaggaacatactggctgtggggaacattgagtttagctatggagaacagtgtttaaaactttgacctttcttttcagtactggggtttgaacctagggccttgcacatgccaggcaggtgctctactgagctatgtccccaaccttctgccccttatcattatttttttgtaacaatagagaagatcttcatcattgactgtcatcatattctcctgcccctgacacacatggccagcacactcccactgagaagttccatttgtgtgtgtgcctcctctttagtgggcaggggttagttaggtcttgtgcactttggacacagtctttttggagtcttgaaagcccctcctttgcaggcctgaccattgagaacatttgttctaaagaacacacttccagaacccgaattatgcacaaggaatctccttcctgtaggaaccaagtaccttagggagaagcctatcacttgctcccatagcctggatcttcttttctggctagcaatagctagcctttctacaaacaggttttctgggagaagtacaaccttcgcccacttgttcttcaagcccccttcccaggctcccctgctaggcctatatttatcttctccgcttctgtggagtggttgctgcctcctcctctgttctttgtgtctgtctgaagtgacagttgccttttctcaggagaggtttttcagatcctggcccaggctcttctggaagtactgtgcttagtaccagcatctttgtttagtttttatatgtgattgtgctgttgttctttgttaagctaatgaatcaatagacttgtttacaatgtgatattttctattaaatctaatattttcaaataaaatgtgtcatctgtg

SEQ ID NO: 2707 - DNA, 1882 bp, Cricetulus griseus
accggcgggaaccggctggcgacaggagccaggcaggctgccctcggctgcgggccccgcccgcctgcccgccatggaccaggacgtatgagcgcaggctcctgcgacagatcatcatccagaatgaaaacacagtgccatgtgtctcagagatgcggaggaccctgacaccagccaactccccagtatcctcacccagcaagcatggtgaccgcttcatcccctcgagggccggggccaactggagtgtgaacttccacaggatcaacgagaatgagaagtcccccagccagaaccgcaaggccaaggatgccacctcagacaatggcaaagatggcctggcctactctgcgcttctgaagaacgagctgctgggcgcgggcatcgagaaggtgcaggatccgcagacagaagatcggcggttgcagccgtccacgcccgagcacaagggcctcttcacgtattccctcagcagcaagcgctcaagtcctgatgatggcaatgacgtgtccccttattccttgtctcctgttagcaacaagagtcagaagctgcttcggtcaccacggaagcccacgcgcaagatctccaagatcccctttaaggtgctggatgcgcctgagcttcaggacgacttctacctcaacctggtggactggtcctcccttaacgtgctcagcgtggggctgggcacctgcgtgtacctgtggagcgcgtgcaccagccaggtgacccggctctgtgacctctctgtggaaggggactcagtgacttctgtgggctggtctgagcgggggaacctggtcgcagtaggaacacacaaaggcttcgtgcagatctgggacgcagctgctgggaagaagttgtctgtgctggaaggccacacggcgagagtgggggcactagcctggaatgcggaccagttgtcatccggtagccgtgaccgaatgattttgcagcgggacatccgcacaccacccctacagtcagagcggcgactacagggccacaggcaggaggtgtgtggcctcaagtggtccacagatcaccagctactcgcttcagggggcaatgacaacaagctgcttgtgtggaaccactcgacggtaagccccgtgcagcagtacacagagcacctggcggccgtgaaggctattgcctggtccccacaccagcacggactgctggcatctggtggtggcacagccgaccgctgcatccgcttctggaacaccctgacaggccagccactccagtgcattgacactggctcacaggtgtgcaatctggcctggtccaagcatgccaacgagctggtgagcacacatggctactcacagaaccagatccttgtgtggaaatacccatcccttacgcaggtggccaagctcactggccactcataccgtgtcctttacttggccatgtctcctgatggggaggccattgtcaccggggccggagacgagaccctgcggttctggaatgttttcagcaaaacacgctctacaaaggaatccgtgtctgtgctcaacctcttcacccggatccgatagacccgcgggcgggcgggatgcgcagccccatggggcagagacggagcagtcagcatgcatggtcctgctgacccgcagtccccagagacatctggcgggcgggagccggccggagaccccagagtctcattaaatgcctcgttgtgagctgtggagccagtgtctgggacagggacatggggaccctcagccagaccactgcctgagccatattggacacagctgagcaggatgcccaagatcccatcaaacccccaaacccagtgtcacgtgtggtggctgtggcccgtcggtgtgtgcacgtgtgtatatacgtatttgttgac

SEQ ID NO: 2708 - DNA, 1882 bp, Cricetulus griseus
aggctccagagactccagaggctccatctgtggactcagcacttgctttccccctggatcctcaggcgctggcctgtaccccagcttctcctctagactcaccgtctccaacttctctccaagattctgaggccctggaccttgaaaccacgtcttctctggcaccacagacaccagattctgctttgggttctgacactgtcacttctccccagtccctgcctccagtttcaccactgcaggaggacaggggagaggggaaattgggcaaagtgtccctggagtgtacagagtccaaactgtgccttctgcccggcgccctgtggtcaagttctgtcatcggccttcaggtcttcatggggacatctccctccagtaaccggctggccttgtacaactcccgtttcctgaatctctgctctgagatggatggtcgagtccggcctctggtgtataccgtacgctgctgggctcagcagtaatgggctgtcagggggcggcccccttctcaataactacgccttgacgttgctagtgatctacttccttcagactagagaccctccagtgcttcctcctgtggcccagctcacccagagatcaggtgaaggggagcaggtagaagttgatggctgggactgtagtttccccaaggatgcgtcccgactggagcccagcaccaacctagagcctctcagttctctgctggcccagttcttctcttgtgtttcttgctgggatctttcgggctccctgctgtccctccgggaaggttgtgcattgctggtgtcagggggcctgccttctgatctttgggaggggctgcgccttggccccatgaatctccaggatccctttgacctgagtcacaatgttgcagccaatgtaaccagccgggtggccagacgtctgcagaactgttgtggggcagcagctagttactgccgaagcctccagtaccagcagcgttccttccggggccgggactggggactactgccacttctgcagcccagctcccctagctccctgctgtctgccaagctcatccccttaccacctgccccctttcctcagatcgttacggctcttgtgcgagtgttaaaggaagcgcttggatgtcatatagaacagggaaccaagaggcccaggtcagagggtcccaggaccaaagacccttccctgggagggacaaacaaaagacagagactagatgggcaagagaagagctgggaggaggggaatgagaagtcgcagggatgtgcaggggaccacagtgaaaatggggtggaagaaatggtaatagagtttcgagagacgtctcagggcagggccttgctgagctctgcaccatcaggccagttgcccctgatgacttggaagtgtctagacaagttggctgagcagaagcccatggaacccgaagtggctggagaagagtctcagggtgagacagggaaggaaacatcacacctctcatcagcgagctggcgctgtgctttgtggcaccaagtgtggcaggggaggcggcgtgcccggagacgattacagcaacaaaccaaagaagaaggcagaggaggcaccaccactggagcagagtggctggcaatggaagctcgtgtgacccaggaactgaaaggaccagacagtgagcaacagaggctacagggggagcccctcctcacctttgtggcatctgtctcccaagctgaccaggcgctcactgtggtaccagtccaagattcccaaggcctgttccctgggcttcatcatttcctacaaggttttctccctcaagcacttaaaatctccttgagtgaggaggcgacctcacagacaataaagctggtagtttatttcttacagacaaaaaaaaaaaaaa

SEQ ID NO: 2709 - DNA, 1882 bp, Cricetulus griseus
ttctttctggcatctcgactctgttagtgctgcccacaggtgctggcaagtctctttgctccagctgccggcactgctgtatgcgcagcgaagcccctgcctcacactggtggtctctcctctccctgtcactcatggatgaccaggtgtctgacctgcctgcatgtctgaaggcagcccgcctccactcgggtatgaccaaaaaacaacgagaagctgtcttgaaaaggtaaggcagcccaggtgcatgtgctgccttgtcgtccggccttggtcgggtgttgggcgaagggccctgccagtctcccccaggccactcaattgcctccaattgccttcgcctgcattgacgaggtccactgcctgtctcagtggtcacacaacttccggccctgctacctgcgtgtttgcaaagtacttcgggaacatatgggcgtgcactgctttggacagagactcagaccaggctctggtgacactgctgcaaggtgaccgcttttgtacctggattctattatcatttactgtactcgaagaaaggacaccgaacgggtggctgcactgctccggacctgcctgtctgtggtgagagagccaaggcatggaggttgtggccctgaggctatagctgaagcataccatgctggcatgtgcagccaggaacggcgacgagtgcaacaggccttcatgcagggccacctgcgggtggtagtggccacagtagcctttgggatggggctggaccggccagatgttcgggctgtgctacacatgggactgcctccaaacttcgagagctatgtgcaagccatcggccgtgcaggacgtgatgggaaacctgcccattgtcacctgttcctgcagccccagggtgaagacctttgggaactgcgtagacacgcccacaaagagcacaacagccaacaaatacaccctgtattgggacaggcctgcctgggccacaagcgggcattcccagtgcagtctacggtacaggctctggacatgacagaggaggctattgaaactctgctgtgctatctggaattacaccctcggcgctggctggagctgctgccatgcacctatgcccactgtcatctacactgccctgggggcagtgctcagctgcaagctctggcccataggtgtcccccattggctgcatgcttggaccaagtacccacctaaagacacaagtcggggcagcagctccttagattttgacatggtggagctggcagactcaatgggctgggatctgtcctctgtacggcgggctctctaccagctgcagtgggaccaagagccaaagaaaggtgcaccacggggcacaagggtgcttgtggagttcagcgagttggcctttcacctgcacagtcctggtgacctgacagatgaggagaaggaccagatctgcgactttctgtacagctgtgtacaggctcgtgaacacaaggccctggcccatctacaccaaatatctatggcctttcgcagcgtggcctttcccagttgtggaccctgtctagaacaggctgatgaggagcgcagcaaccagttgaagaccttgctcagccactactttgaggaagaggaagaggaagctgtgaaggatgagcagagtccagagcctgggcagaccgagcttcaggactgggaggaccatattcgccgtgatatccgccagctcctgtccctgaggccagaggaaaggttttctggacgggctgtggcccgcatcttccatggcattgcaagtccctgctacccagcccaggtatatgggcaggaccggcgcttctggagaaagtatctacatatgaacttccatgccttgatgcgcctggctacagaagagctcctgctgagaggacgatga

SEQ ID NO: 2710 - DNA, 1882 bp, Cricetulus griseus
atgggactggcacaaagaagtctggcactgggctgcatggccatcatcttggttctacagatgactatggcagagtaccccaactggatgttgaatggcaaggcccaggtgttcgcagacctgagcgcccaggagatacaagctgtgcatgatttcctgatgagcaggccggagctggagctgcagccaaccagaatgcaggttttaggcaagaactctgtgttcctcattgagatgctgctgccaaagaagaaggatgtcctagagtttctggataaaggaacaaaagttccagtacgggaagcccatgttgtctattttctttagcgcccaggaacaccccaatgtcaccgagtttgctgtgggccctgccacgtgaatcatggagcacagatgtccaggactggagtatagagcaggtctggtataatgacaagctctacaacagcccagaagaactggctcagaaatatgcggatggagaagtagacacagtggtcctccaaggacccccctgcctgagaacacagagcagtcacaaatctttaacaagcctgctggggaaatcccactgccccctagcaagactggccaccatgtggaacaagtcagtgtccccagctaccgcctagaaggcaacactgtgatctacaaaggctggagcttctccttccagcttcgaccctcttctgggctgcagatattgaatgcgcacttcaagaatgagcctttagcctatgagattagtgtccaggcagctatggctgtgcatagagaaaacacacctgcaggagagctgaccaagaccatggacctaggctggagcatgggcagtgtgactcatgagttggcccctggcgtcaactgtccagagactgccaccttccttgatgccgtccactactatgacactgatgggcctgtccattatccacaggctctctgcatctttgagatccccacgggggtgcctgttaggcccatctttaacactgactttccaggcaaagtcaacttcttttcagatgtcacgggacacaagctggtgctacgggcaacctcagcactctacaattttgattacatctgggacttcattttctatactaacggcatgatctcggccaagatgcatgccacaggatatacctacaccaccatctacacccctgaggggttgggtgaaactcgcctgataactcaccaacttggcaacagccacacccaccttgtgcattaccgtgttgacctggatgtggcaggcaccaacaacagcttccacacactgcacaccaggcagaaaaacaccaccaaccccggcagcctaagaccccacctggtccaggacacaatggagaagacacagtactcgcaagagcgccaggccaccttcccctttggacaaactctgcctccattcctgctctttagcagcccccaaacggatatctggggacacaggcgcagctaccgcctacagatctactccacatctaagcagaagctgacccctgcatcccaggaggacttggctttcagctgggccaggtactccctggcagtgaccaaatactgggagtctgagcgttgcagcaccagcatctacaaccagaaccacccctgggatccccccgtggtctttgaggagttccttcagaatgatgagagtattgaagaccaggatttggtggcctgggtgacagtgggattctcacatgggcctcattctgaaattgtccccagtgtggcctcagctaggaacttcgtaggcttcttgctcaggcctttcaacttcttctatatcacctaaagacacctagacacaactgccacagatatatcagacagtaaatgactggggacagggtctgcctgatgcctc

SEQ ID NO: 2711 - DNA, 1881 bp, Cricetulus griseus
ccggctcttgcgcgcgcaactttcctgctgtcttggttcctcggagaatcgagaatatcgcagtctctgacccgtgccatctctcgccatccgggcctgcggagcccactgcaggttttagacaatggcgaagttcatgactcctgtgatccaggacaacccttccggctggggcccctgtgcagttcctgaacagtttcgggatatgccctaccagcctttcagcaaaggagatcggctggggaaggttgcagactggacgggggccacgtaccaagacaagaggtacacaaacaagtactcctctcagtttggtgggggaagtcagtatgcatatttccatgaggaggatgagacgagcttccagctagtggacacggcgcgcacacagaagactgcctaccagcggaaccggatgagattcgcacagcggaacctccgtagagacaaagatcgccggaacatggtgcagttcaacctacagaccctgcccaagagtgccaagcagaaagagagagaacgaattcgcttgcagaaaaaattccagaagcaatttggagtgagacagaaatgggaccagaagtcacagaaaccccgagactcttcagttgaagttcgcagtgactgggaggtgaaggaggagatggattttcctcaactgatgaaaatgcgctacttggaagtgtcggagcctcaagacatcgagtgctgtggcgcactggagtactatgacaaagcctttgaccgcatcaccacgcggagcgagaagcctctgcggagcatcaagcgcatcttccacaccgttaccaccacagacgaccctgtcatccggaagctggcaaaaacgcagggcaatgtgtttgccactgatgccatcctagccacactgatgagctgcacacgctctgtgtactcctgggacattggagtgcagagagtcgggtctaaactcttctttgacaagagggacaactctgacttcgacctcctgactgtgagtgagacagccaatgagccccctcaagatgaaggcaattccttcaactcaccccgcaacctggccatggaggccacctacatcaaccacaacttctcccagcagtgcctgagaatggggagagaaagatataatttccccaacccaaacccatttgtggaagatgacatggataagaatgagatcgcctctgttgcttaccgttaccgcaggtggaaacttggagatgacattgaccttatcgtccgctgtgaacatgatggcgtcatgactggagccactggggaagtgtccttcatcaacatcaaaacactcaatgagtgggactccaggcattgtaatggcgttgactggagacagaagttagactctcagcgtggggctgtcatcgccactgagctgaagaacaacagctacaagttagcgcggtggacctgctgtgctttgctagccggatctgagtacttgaagctcggatatgtgtcccggtaccacgtaaaggactcctcacgccatgtcatcctgggcacccagcagtttaagcccaatgagtttgccagccagatcaacctgagtgtagagaatgcctggggcatcctacgctgtgtcattgacatctgcatgaagctggaggagggcaagtacctcatcctcaaagatcccaacaagcaagtcatccgcgtctacagcttgcctgatggcaccttcagctctgaggaagacgaagaggatgaggaagaagaggaggaggaagaggaagaggaagaaacttaaatgagttggcttggtgccttcgtgtgttccacccaggtgtgcttgggcagcatgtgtggctcctactctgtggcagataaaaataaagtttaagtgtgtttggtttcttc

SEQ ID NO: 2712 - DNA, 1881 bp, Cricetulus griseus
  modified_base (387)..(387): a, c, t, g, unknown or other
gacaagcatccggcatggtggagagagtgtggcggctgtgctcagggcccatggtgtacgctttgtcttcacactggttggtgggcacatttccccactgctggtagcctgtgagaagctgggcatccgtgtagtagacacacgccacgaggtcactgctgtctttgctgctgatgctgtggcccgcctgactgggacagtgggcgtggcagcagtgacggctggccctggtctcactaacacagtgactgcagtgaagaatgctcaggtggcacagtccccagtcctgctccctgggtggggctgccagccaccctgctgcagaaacggggagcactccaggccattgatcagatgtctctgttcaggccgctctgcaagttttgngcatctgtgcggacagtacgagacattgtacctaccctaagggctgcagtggctgctgcccagtcaggcacccaggtccagtgttgtggagctgcctcgaaggagatggtgcccgccaagttgcccaagggcctcatgggtcgagtggtcttctggtacttacagaactgcctgaccaacctctttgctggagcttgggagcctcgtcctgagggacctctgccccttgaacattcctcaggcgtctccccagcaagtccagcggtgtgtggagatcctgagtcgggccaagagacccctgctggtgcttgggagccaggccctgctgcccccgacccctgccaccaagcttagggctgctgtggagaccctcggtgtcccttgcttcctgggagggatgtctcgggggctgctgggccgcaaccaccctctccacatccggcagaaccgcagtgctgccctgaagaaagcagatgttgttgtcctggcaggagctgtgtgtgatttccgcctgtcatatggtcgtgtcctcaaccgcaagagcaaaatcatcattgtcaatcggaaccgggatgatatgttgctcaactcagacgtcttctggaagccccaggaggctgtgcagggagacgtgggttccttcatgctcaagctggtggaaggccttcagggccagatgtgggcctcagattgggctgaggagcttaggaatgctgaccggcagaaagagcagacttatcgggacaaggctggaatgcccgtgtctcagcacctgaacccagtgcgggtgttacagcaggtggaggaggctctgcctgacaatgcgcttcttgtggttgatggcggggactttgtggccactgccgcctatttggtacagccccgggggcccctgcgctggcttgatcctggagcctttgggactctgggagttggtgcaggttttgcacttggggctaagctgtgtcagccggatgccgaggtctggtgcctgtttggggatggagcctttggctacagcctcatcgagtttgacacattcgtcagacacaagataccagtgatggccttgatagggaatgatgcaggttggacccagatttctcgggaacaggtgcccaggttgggcagtgacgtggcctgtggcctggcttacactgattatcacaaggcagccataggcctgggggcgcagggattgatgctctcacgggacaatgaggatcaagtagtcaaggtacttcgtgaaggccagcaactgtgccgggcaggccatgcagttgtggtcaacatcctgatcgggaggacagatttcagagatggctccatttctgtgtagggcctgcgagtgggttagtgtgctcgcctctctgagcctggactcgggctggcctatctagaattttcacccttgccctctctgagattgtctctcaaggtccaactaaatctcttggctacatgagcccaaggactcggtacaaaaaaaaaaaa

SEQ ID NO: 2713 - DNA, 1881 bp, Cricetulus griseus
gccttggttcttgacatcggcacgggcacaggtctcttgtcgatgatggcagttactgcaggtgctgacttctgctatgctattgaggtttttaagccaatggctgatgctgctgtgaagattgtggagaaaaatggcttcagtgataagattaaagttattaacaaacattccactgaggtgacggttggaccagatggtgacttgccatgtcgtgctaacatcctggtcacagagctgtttgacacggaactgattggggaggggcactgccctcttatgagcatgcgcatagacatcttgtgcaaggtaaaattgtagaagcagtgccacaagctgtttcctgtccatgttcagaccagtcttggagagcaggttatcgtccctccctcagaactggagaggtgtcctggtgcaccttcagtctatgacattcagctgaatcaggtgccatctactgacttcactgccctcagtgatgtactaccaatgttcagtgtggacttcagcaagcaagtcagtagctcagcagcctgccatagcaagcagtttgtacctctggcatctggccaagcacaggtggttctgtcctggtgggacattgaaatggaccctgaggggaagatcacatgtaccatggcacccttttgggcacagacaaacccacaggagcttcagtggcgggaccactggatgcagtgtgtatacttcttgccacaggaggagcccgttgttcagggctcaccccgatgcctggtagcccaccatgacgactactgtgtgtggtacagccttcagaggaccagcgctgatgagaatgaggaagtttaccaagtgcgccctgtgtgtgattgtacaggctcacttgctctggaatcggcctcggtttggagagattaatgatcaggacagaactgatcagtatgcccaagccctgaggactgtgctgatgccacggcaccatctgtctttgtgtcagtgatggcagtctgctctctctgctggcccatcaccttggggcggagcaggtgtttacagttgagagttcggcagcttcctatagactgatgaaaaggatcttcaaggctaaccacttggaagataaagttagtatcatcaagaaacggcctgagttgttaacatctgcagacctggagggtaagaaggtctccctcctcctgggtgaacccttcttcgccaccagcctgctgccatggcacaacctatacttctggtatgtccgtacttctgtggaccagcacctggaacctggagctgtggtgatgccccaggctgcttcactgtatgctatgatcgtggagttcagggatttgtggcggatccggagcccttgtggtgactgcgaaggttttgacgtgcacatcatggatgatatgattaagcactccctggattttcgagagagcagagaggcagaaccccacccattgtgggagtacccctgccgcagcctttctgagcctcagcagattctgacctttgatttccagcagcctgtgccccagaagcctgtgcgtgctgagggctccatggaactgagaagacctgggaagagccatggtgctgtcctgtggatggaatatcatctgactccagacagcacagtcagcaccggcctcatgaaccctttggaagacaagggggactgctgctggaacccccactgcaagcaagctgtgtacttcctcagcaccacagtggatcccagagtgcctctggatggccctcagtctgtcagctatgctgtggagtttcatcccctcactggagacatcaccatggagtttaggcttgcagacaccttgaactaattccctcattgagaaattaaatggtccaatagggctgcaggactctgaa

SEQ ID NO: 2714 - DNA, 1880 bp, Cricetulus griseus
cgaagagcggctcggcggcgggcagtgtaaccttgggtgggagcgcgcggcgcctcaacatgtcgtccagtggcaccctcagcaactactacgtggactcgctcataggccatgagggcgacgaggtgttcgccgcgcgcttcgggccaccaaggcccggggacaccgggccggcccgcaggtgtggccgatggcccgactgctgcctccgagttcgcctcgtgtagttttgcccccaaatcgaccgtgttctccgcctcgtggtccgcggtggccgcccagcccccggcggcggcgacgatgagcggcctgtaccacccgtacgtgtccccgccacccctggctaccgccgagccgggccgctacgtgcgctcctggatggagcctctgcccagcttccccggcggcgcgggtggtggcggtggcagtggtggcggcggtggcggaggcccgggtcccgttcccagccctggcggcccagccaacgggcgccactacgggattaagcctgaaaccggagcggccccggcccccgccgcagcctccacctccacctcctcctccacctcctcgtcctcctcctccaaacggactgagtgctccgcggtccgcgagtcccaggggagcggcggcccagaattcccgtgcaactcgttcctgcgggacaaggcggcggcggcggcagcgggagggaacgggcccggggtgggaatcggggccgggcctggggcgggaggctcttccgagccctcagcttgcagcgatcacccgagcccgggctgcccgctgaaggaggaggagaagcagccgccgcagccgccgcagcagcaacttgacccaaacaaccccgcagcgaactggatccacgctcgctccacccggaaaaagcgctgtccctacaccaaataccagactctagagctggagaaggaattcctcttcaacatgtacctcacccgggaccggcgctacgaggtggccaggattctgaaccttacagagagacaggtcaaaatctggttccagaaccgcaggatgaaaatgaaaaagatgagcaaggagaaatgccccaaaggagactgacccagccggtcctggcctgaaatgctcagaggcagccggtttggggtggggtttgttttgtttgtttgtttctttttcttcttttttcttcttgttttttttccttgtgggtgcttgattcagaaactctccagcaactcggacttttttcttcttttttaggtagaagtgactgtgtggttggtctctgtgagttatttgggggacactgtatttgctcgcatatgtattggagaaaccaagtggctttggagttttgtcttattccgctccctccctttcctactctgttggttccttaggaaatgctatattttgtgagtgcacgcaggcttgatgaagccctctcttgtgtaaatgtccctcatgtttctgaaaagtgctgtagtttagtctcacccggtccagcctcccaaacagggccaactatccaattccgagaatctgaaggcagagggagattatggacacccgcgctgctctccagcccaaacccaagccagctgcacaccgcaggaaagcccctttcctcagggagcctgcaggctgacttccaatgaggcctaccgagaagtcctgggctctgggacgccgcagggtgcgggggaaagcttggccctctgagccccggaagagctgctctctccccgggagggttcctgcctgaggaccagtgtaaatgttaccgcttccaacaaataaaagactgatctgagtaaaatggagcccagacactggccctgaaaaaaaaaaaaaaaaaaaaaaaaaaaaaaaaaaaaaaaaataaaaaaataaaa

SEQ ID NO: 2715 - DNA, 1880 bp, Cricetulus griseus
ccatggtgggattttctggtgtgatgaaggcgctgtatgaatcggggattttggactgtgctacctacattgctggtctttctggctccacatggtacatgtcaaccttgtactctcaccctgattttccagaaaaaggtccagaggagattaacgaagagctaatgaaaaatgttagccacaaccctcttttacttctcacaccacaaaaagtgaaaagatatgttgagtctttatggaagaagaaaagttctggtcaacctgtcacctttactgacatctttgggatgcttataggagaaacactaattcaaaatagaatgaacacaaccctgagtagtttgaaggaaaaggtcaatgaagcccggtgccctttgcctctcttcacctgtctccatgtcaaacctgacgtgtcagagctgatgtttgctgattgggttgaatttagtccatatgagatcggcatggcaaaatacggtacctttatggctcctgacctatttggaagcaagttttttatgggaacggttgtgaaaaaatatgaagaaaatcccttgcatttcctaatgggtgtctggggaagtgccttttccatactgttcaacagagtcttgggagtttctggttcacaaaataaaggttctacaatggaggaggaattagaaaacattacggccaagcacattgtgagtaatgacagctctgatagtgatgatgaggcccaagcacccaaaggcactgagaatgaagatgctgaaagagagtaccaaaatgacaatcaagcaagttgggtccatcggatgctgatggccttggtgagtgactcagcgttattcaatacccgagaaggacgagcagggaaggtgcacaacttcatgttggggttgaatctcaacacctcctatccactgtctcctctgagagacctcagctcccaggattccttcgatgatgatgaactcgatgcagctgtagcagatccggatgaatttgaacggatatatgaaccactagatgtgaagagcaaaaagattcacgttgtagacagtgggctcacctttaacctgccttatcccttgattctccgacctcagagaggtgtggatctcatcatctcctttgacttttctgcaaggccaagtgacacaagccctcctttcaaggaacttctacttgcagagaagtgggctaaaatgaacaagctcccctttccaaagattgatccttatgtgtttgatcgggaaggattgaaggagtgctatgtttttaaacccaagaatcctgatgtggagaacgattgccctaccattatccactttgttctggccaacatcaacttcagaaagtacaaggccccaggtgttccaagggaaaccaaagaggagaaagaaatagctgactttgacatttttgatgaccccgaatcgccgttttccaccttcaactttcagtatccaaatcaagcattcaagaggctacatgatctgatgtacttcaatactctgaacaacattgacgtgataaaggatgccattgttgagagcattgaatacagaagacagaacccatctcgttgctctgtttccctgagtaatgtcgaggcaagaaaattcttcaacaaggagtttctaagtaaacctacggcgtaggctgtgtgctggaaagaccaagccatttgaattccacgacgattggtgtcaaatgcacattagagttttctttttaaaagtatttaatagttcagctcagtcagcaaggcttcccattgtgtgtgaatgttattcacaaactagatttgttcatgccatgatacaacactattttttatttaagtattcatacataccattatgaaataaatacttggatgtacaaattac

SEQ ID NO: 2716 - DNA, 1880 bp, Cricetulus griseus
  modified_base (218)..(218): a, c, t, g, unknown or other
aagaagggcgatgaggatgaggcatggtgacaagaaacctaagatccagccactgtccctggaggaacttctggccaagaaaaaggctgaggaagaagctgaggcaaagcccaagttcctctccaaagcagagcgggaggctgaggctctgaagcgacggcagcaggaggtggaagagcgccagaagatgctggaggaagagaggaagaaaagaaacngttccaggatttgggcaggaagatgctagaagatcctcggcgaggcttcattgcaggcattgacctaaagcagcagaaacgagaacagtcacgtttctatggagacctaatggaaaagaggcgaaccctggaagaaaaggagcaagaggaggcaagactccgtaaacttcgtaagaaggaagccaagcaacgctgggatgaccgccattggtcccagaagaagttagatgagatgacagacagggactggaggatcttccgggaagactatagcatcaccaccaaaggtggcaagatccccaatcccatccggtcctggaaagattcatctctgcccccacatattttggaagtcattgataagtgtggctacaaggagccaacacctatccagcgtcaggccattcccattgggctacagaatcgtgacatcattggtgtggctgagacaggcagtggcaagacagcagccttccttatcccattactggtctggatcaccacacttcccaaaattgacaggatcgaagagtcagaccagggcccttatgccatcattctggctcctacccgtgagttggctcagcagattgaggaagaaaccatcaaatttgggaagccactaggtatccgcactgtggctgtcattggtggcatctccagagaagatcaaggcttcaggctacgcatgggttgtgagattgtgatcgccaccccaggacgtctcattgatgtgctggaaaaccgctacctggtgctgagccgctgtacctatgtggttctggatgaggcagacaggatgatcgacatgggcttcgagccagatgtgcagaagatcctggaacacatgcctgtcagcaaccagaagccggacacagatgaggctgaggacccagagaagatgttggccaactttgagtcaggaaaacataagtaccgccaaacagtcatgttcacggctacgatgcccccagcggtggaacggctagccaggagctatcttcggcgtcctgctgtggtgtacattggctctgcaggcaagccccatgagcgagtggaacagaaagttttcctcatgtcagaatcagaaaagaggaaaaagctgctcgcaattttggaacaaggttttgatccacccatcatcatttttgtcaaccagaagaagggttgtgacgtgttggccaagtctcttgagaagatggggtacaatgcctgtacactgcatggtggaaaaggccaggagcagcgagaatttgcattgtccaatctcaaggctggagccaaggatattttggtggctacagatgtggctggtcgtggtattgatatccaagacgtgtctatggttgtcaactatgatatggccaaaaatattgaagattacattcaccgaattggccgcacgggaagagcaggcaagagtggtgtagccatcaccttcctcaccaaagaggactcagctgtgttctatgaactgaagcaagctatcctagagagtccagtgtcatcttgccctccagagctagcaaatcacccagatgcccagcacaagccaggtaccatcctcaccaagaagcgcagggaagagaccatcttcgcttgacacagctcttgactggatgtaaagacatgccctgaagcgggtgcctgctcttaagccct

SEQ ID NO: 2717 - DNA, 1879 bp, Cricetulus griseus
agctgcagttcctccctgtggagctgtgcagcctccgttccctgcgggatcttaatgttcggaggaaccagctcagtaccctgcctgaagagctgggggaccttcctctggtccgcctggatttctcctgtaaccgtgtctcccgaattccggtctccttctgccgcctcagacacctgcaggtcattctgctggatagcaaccccctacagagtccacctgcccagatctgtctgaagggaaaacttcatatcttcaagtatttaacaatggaggccggaaggaagcgggagctgcccttggggacctggtcccttcccatcccccaggttttagtccttgccctgctgaagacttatttccgggacgtcggtatgatggcggcctggactcgggcttccatagtgttgacagtggcagcaagaggtggtcaggaaatgagtccacagatgatttttcagagctgtcattccggatctcagagctggcccgggagccccgggtgcccagacagcagagggaagatggctctggcgatggagacctggagcaggttgacttcattgacagccatggggaagatgaagagcgaaatgcagctgaggagcagctaccttctgaattaagccttgtagcaggggatgtggagaggacagggagcggcaggcgggaggagcctgcaggggaggagaggcggcacccagacactttgcagttgtggcaggagcgggagcggaggcagcagcaacaacagagtggggggtgggatcccccaggagggacagtgtcctgaagcgggggaccagagccacgggtgcttcggcctcatccacacaggccacctccaatggcccaccgaagtccagtgctacccaactggaagtttcagggggcagggagctcctacgccatcctccatctcccaggagcccacccctgtgtctggaccagtgacagctcctgtcccccaggccactgggctccattcagagaccaaacagcttcctcttccgttcatcctctcagagtggctcaggcccttcctctccagagtctattgtgaggagaaggaactcatgtcccaacttcgacaggtccttgagtcacggctgcagcagcccctgcctgaggacctgacggaggctctcgccagtggggtcatcctctgccagttggccaaccagctacggcctcgctctgtacccttcattcatgtgccctcacctgctgtgccaaagctcagtgccctcaagtctcggaagaatgtagagagtttcttagaagcctgtcggaagatgggtgtccctgaggctgacctgtgctcgccctcggatctcctccggggcaccacccaggggcttcggaccacactggaggctgtgatcctggctgggggcaaggcccccctcccagcccagccctcctctggtctgggtggcttcctcctcttctacgtggcctccatgctgctgctctatgccgtgtacactcggctcctgggctcctaggacccacgctgcccttcattccctaccttctatttataagtcctcctgttcaaccggtggtgccttcagcccctaccaaagacactagtgtacccctcacagacactgacctcagaagccccactctagtgcccacagtagccctttaccccactagtgctgatggtgccttcatgtcctccacactagccagccctctgtcccccagagggatgacagaccttggctgtttcccttctcacctccctccccctactggctgctatgggggagctaaattatctctattttgtagagagagagaactctatatttgtagggatgtgggcccattatgggccctggttctgtgtataattgtatagattgtc

SEQ ID NO: 2718 - DNA, 1879 bp, Cricetulus griseus
  modified_base (1854)..(1854): a, c, t, g, unknown or other
cattagcccagtggcacgtccccagggccacatctttcagagttcactccgacgtgaagcaggtgctttgccacctcacgcacccacgtttcacctttactgaaagcgaggctgacgccgacatcctctaccacttctcacacttcaaagactacagggcactcagccaggagaggccacaagtgctactcaaccagttcccctgtgagaacctgctgactgtaaaggactgcctggcctccatcgctcgccgagctgggggtcctgagggtcccccctggctgccccgaaccttcaacctgcgtactgagctgccccagtttgtcagctattttcagcaacgggagagacagggtgaagacaaccactggatctgcaagccctggaacctggcccgcagcctagacactcacgtcaccaacaacctgcacagcatcattcggcaccgagagagcacccccaaggttgtgtccaagtacattgaaagtcccgtcttgttccttcgagaagatgtggggaatgtcaaatttgacatccgctatgttgtgctcctgcgttcggtgaagccacttagcttgttcgtgtatgacgtgttctggctacgcttctccaataggcctttcgcactcaatgacctagacgactatgagaagcatttcactgtcatgaactatgaccctgatgtggtgctgaagcaggtgcactatgataagttcatcccccagttcgagaagcagtacccagagtttccttggagtggtgtccagactgagatcttcaaggccttcatagagctgttccaagtggcatgtgccaagccaccgcccatgggcctctgcgactacccctcatctcgggctgtatatgctgttgacctcatgctcaagtgggatagccatccagatggaaagcgagtgatgcagccccagatcctggaggtgaactttaaccctgactgtgagcgagcctgcagataccaccccacattcttcaatgatgtcttcagcaccttgtttctggacgagaccaacgactgtcacgtcacccgcatcatctaggtgcacaaagccctcctgccagtgctcaaagctggttctagccagtcccagccttctccctcctctctcctcctccctcttccctccccagtcagagcctaggcctaagttaggctctgccctcctgagccatgttcctgcttcatatgtaggacatcaggtccacaccatgtggcaaagctggacagtaagtggtatccccagggctggatactgccccagacactctgcacacctcctaacaccttctgtcctttgatgagcctccagctcagccaagggcttttactcctggcatccagagagtttgtacagaggaagaggtgttccacagaaacagagttccccaggggagtgtttgggaaccctgtatccagcaggaccagggagttctctcccagagtctctgtcctcctttcccatgactggtgtaagcagggtatcagcaccctgtgttgtactccaggccccagaacagccagggaaaaacatttgccaacccagccttatacctaggcatcctccaccagagccttcaccagcaaacttcccagccatgcctgccctggatgtttcccttctgggaagctggactgttagagacccatggtctctgcatgctggcatctcactgagttccactgtcctcttgagttggtcaagggactctggtgttgtgaggttccctggcagagtccaggaggaggtgacaatggaaatgccaaggctgctaacatggctctggggagaacttcatgtggaggtcaggctgcctcttgccaatagcaaaaaaaanaaaaaaaaaaaaaaaaaaaaaaaaa

SEQ ID NO: 2719 - DNA, 1879 bp, Cricetulus griseus
gggagcaggcttttgtcagcaactggcccaaaccttcaagtccagatctacctgtgacaagcttctgggtgaccagtgaccagttcttgccccaggatggggaccatatccagagcagccttgatcttggcctctttggcccttgcttctgttgcctctgcaggagcctccaagccttcagagcagagagagatgaagccagagaacctcttcctgcaccttcatgaagtgggctatgcagcacccccttcccaccacaaacacggggactccgagtggatgaccactttgaaacttctcttcatgactctctctttgagggacaaagggaagtggagccccctgcgtctccggaagtgccctttgtccaggaagaagagtggccggcttcccccaagtctgtaaaaagtgaagtgggtcctcctacccctcaagaagccatccccctgcaggaaaaacagccccctccccaagtctcgattgaacagaaggaaatagacccatatgcccaacagcaggaagagttcatccataccgggcagaaagaggagaagccagccccttccgtggtccagggttctccaggacctcgatcttggaatccagcccagcactgccaacagggtcggagaggtggctggggctaccggctggatggcttccctcctggacggccttctccagacaatctgaaccaaatctgcctttctgagcgtcaacacgtggtgtatggtccctggaacctgccacagactggctactcccaccttagtcgccaaggagaggccctcaatttgctggagactggatattcccgctgctgtcgctgccgcagccacactaaccgcctagattgtgcaaagcttgtgtgggaggacacaatgaccagattctgtgaggccgagttctctgtcaagacccgaccccaccggtgctgcaaacagcgggggaggagcgattctcttgcttccaggaggaggctcctcaaccacactacctgcgccagccctgccccacccaccagactggcatgtcctcggggccccaactgcctttccccccggggttgcccactctggacaatgtcaaaaacatctgtctcctgagacgcttccgctctgtgccacgaaacctcccagctactgaccccatccagaggcagctgcaggctctgacccggctggagatggcgttccagcgctgctgccgccagagccacaaccacacctgcctgcggaatgcttgggaagataccctggatgaatactgtgatcgggagctggctataaagacccacccccactcatgttgccactaccctcctagcccagcccgtgatgagtgcttctcccgccgggctccctatcccaactatgaccgggatatcttgactcttgacctcagccgagtcacccctaatctcatgggccatctctgtggaaatagaagagttctcaccaagcataaacagatccctggactgatccagaacatgactgcccgctgctgtgttctgcccttcccagaacaggcctgctgtggcgaagaagagaaactagctttcatagaggatctctgtggtccccgaaagaactcctggaaagatcctgccctctgctgtaacctgtctcctggggacgaacaagccaactgcttcaataccaactacctgagaaatgtggctttagtgtctggagacactggggatgccactggccagagggagcaggacccaactggagaaacaaatgtcaaccccgcccctgggtccaaggaagaaaaatgagtcaccctgagcctcggaggattagatggaggaaccccaccctactccaccctccttgaacactcattacaataaatgcctcttggatttggc

SEQ ID NO: 2720 - DNA, 1878 bp, Cricetulus griseus
  modified_base (1817)..(1817): a, c, t, g, unknown or other
gctcgcacgtctggagtggcccgggtaggagcgggtggcgcgccaggggcatgcgctccatgagggctctgcagaacgcgttgagccgcgcgggcagccaccgccggcggggaggctggggtcacccgagccggggcccgctcctggccgggggcgtccggtaccacttcagtgaggccgcggcggcgcagggcaggggaacgccgcacagccaccagccgcagcacacggatcatgatgcatcaaacagcggcatgctgccccgtcttggcgacctgctcttctacaccattgccgagggacaggagcggatccccatccacaagttcactactgccctgaaggccactggactgcagacctcagacccacggctccaggactgcatgagcaagatgcatcgcatggttcaccggccacgtggatcgcatatttgaggatgccaaagaactcactggaggcaaagtggcagcctacatccctcacctggccaagtcaaacccagacctttggggcgtttccctgtgcactgtggatggccagcggcactctgtgggccacacgaagatccctttctgcctgcagtcctgtgtcaagccccttacttacgccatctccgtgagcaccttaggcactgactatgtacacaagtttgtgggcaaggaacccagtggcctgcgctataacaaactctccctcaacgaggaaggaatccccccaacaacccccatgggtcaatgctggtgccattgtcgtcagctccttgatcaagatggactgtaacaaagcagagaagttcgatttcgtattgcagtatctgaacaagatggctgggaatgaattcatggggttcagcaatgccacattccagtcagagaaggaaactggggatcggaattacgccatcggctattacctaaaggaaaagaagtgcttccccaagggagtagacatgatggctgctctcgatctctatttccagctgtgctctgtggaggtcacctgtgaatcaggcagtgtcatggcagccactcttgccaacggtgctgccccatcacaggcgagagcgtcctaagtgccgaagccgtgcgtaacaccctcagcctcatgcattcttgcggcatgtatgacttctctggccagtttgccttccacgtgggtctgccagccaagtcagctgtgtcaggagccatcctcctggttgtacccaatgtcatggggatgatatcgaggcttgcaaagtgaatccttttgtcaaggataggtggggacaataattacccctaggaatgatgcttgtacagttcaaccacctagaggtggtcaaagctgcttcaagattaaccatgactcctacatgctctctgacactcaggcagaggaagcaagctgagaccctgtccaaagagaacttagaaagcatggtgtgagcccaggctgggggcagtccctgctcaagaaaaagcatgagctggccatacatctaacgcacagccactaaaaaattctatgggaagctgcttcggtggggatcaacacagccatttggtgacacaggccagtgttttctgtgaagatcaaaacaccccattcccccagtaaacagcacacagaagatcctcagtggacacccacatagagctatccacagacacctagtagcccaggtctttacccaggtcccctttttcctctctgaagaatcattgtgagaacaagagacttcttggagagactctcgccaccatgcatatgtatccgccacaggagggggcagaagcgggtgggagccaaggcacctggcgtttagaaggtcngcagagatccgtcccttagcagggcatgctgccattgctgacagcaattttatagacagag

SEQ ID NO: 2721 - DNA, 1878 bp, Cricetulus griseus
ggcgtcggccccgtcccgggccccggcaccggcaccggccccggtgccgcgtccagccccgccatgaagtgtcactacgaggcgctgggggtgcggcgagacgccttagcgaggaggagctcaagaaggtcctatcggaagcttgccctgaggtggcacccggataagaatctggataatgctgcagaagcagccgagcagtttaaattaattcaagccgcatacgatgtgttgagtgaccctcaggaaagagcatggtatgacaatcatagagaggccttaacgttaaaagggagggtggagacgatgaaaagggtttctatgcagtgtatcgtgatgtctttgagctgattgcaaaagaagaatttgaatgtatgtcagagggagatgttgaggattttccaaacttcggtgactcccagagtgactacgacacggtagtacaccctttctacgcttactggcagagtttctgcacacagaagaattttgcctggaaggaagaatatgacactcggcaagcctcaaaccgctgggaaaaacgggcgatggaaaaagaaaacaaaaaaattcgagacaaagcaaggaaagaaaaaaatgaactggtgcgccagcttgtagctttcattcgtaaacgagataaaagagtgcaggctcatcggaagcttgtggaggagcagaatgcagagaaggcgaggaaggcagaggagatgaggaggcagcagaagctgaagcaagccaaattggtagagcagtacagagagcagagctggatgactatggccaatttggagaaggagctgcaggagatggaagccaggtacgaaaaggagtttggagatggacccgatgaaaatgaagtggaggaacaggagcccaaagatagattggaaggtaaagacagcgatgaggctgaggaggctgagctttatgatgacctgtactgcccagcttgtgacaagtccttcaagacagaaaaggctatgaagaaccatgagaagtcaaagaagcaccgagaaatggtcgcactgttaaagcagcagttagaggaagaggaagaacatttttcaggggctcaagtggatggaaatttattgaatgccaattctgaggacgaagtggaagacctaccaaagcaaaaactttccaaaaaacagaagaaaaagaaacagaaatcagctcagaattatgataacaatttcgatgaaaatggaactgaagaaggagtaaaggttgatccagaagatactaacttaaatgaagacgatgccaaagaattaaaaaataagccccaagaaaatgtctgtatcacagaaaccacagaagtctgtgaggatccaaagagtgaagctaaaagtgttcctaaatccaaaggaaagaaaaccaaagatgtgaaaaaacctgtcaaagtacctgctgaaccagcaacagtgagtgatgttctcatcagctgtgcgacctgccacagtgaatttccatctcggaataaactttttgatcatctaaaggctactggtcatgcaagagccccttcaacatcagcatctttaaacagtgtaacaagtagtcgaaacaagaaagagaagcgtaaaaacagataggaattctgccaattctctctctctctttttttaaaaactgtctctagattttgaaaccaaaaaactgaaataatctagagttaaaatttcagtgatctgcaatttattgcattgtggaagattatatatatttttaaacatttcactagtgattgaattctactttgccatctgaattcacttgaatgtttcatgacaggtaaatattataaatgtgtatcttgatttctcatatgaacaaaaatgtacagggaaaattaaattattttgacacata

SEQ ID NO: 2722 - DNA, 1877 bp, Cricetulus griseus
cgcagagcagctgcctgaggatcgttttaaagggcccgtgcgccgccgccccctcggcccgccatgctcctctccgtgccgctcctgctcggcctcctcggcctggccgccgcggaacctgccgtctatttcaaagagcagttcttggacggagatgactggaccaaccgctgggtcgaatccaaacacaagtccgattttggcaaatttgtcctcagttctggcaaattctacggggaccaggagaaggataaagggctgcagacaagccaggatgcccgattttacgcgctgtccgctagattcgaacccttcagcaacaagggccagacactggtggtacagttcacggtgaagcatgagcagaacatcgactgtgggggtggctatgtgaagctgtttccgggtagtttggaccagaaggacatgcatggagactcggaatacaacatcatgtttggtccggacatctgtggtcctggcaccaagaaggttcatgtcatctttaactacaagggcaagaatgtgctgatcaacaaggatatccggtgtaaggatgatgaattcacacacctgtacacgctgattgtgcggccagacaacacctatgaggtgaaaattgacaacagccaggtggagtcaggctcattggaggatgattgggactttctgccacccaagaagataaaggaccctaatgctgccaagccagaagactgggatgaacgagccaaaattgatgaccccacagattctaaacctgaggactgggacaagcctgagcacatccctgaccctgatgctaagaagcctgaggactgggatgaagagatggatggggagtgggaaccaccggtaattcagaatcctgaatacaagggcgagtggaagccacgtcagattgataacccagattacaagggtacctggatacacccggaaattgacaaccctgaatactccccagatgccaacatttatgcctatgacagttttgctgtactgggcttagatctctggcaggtcaagtctggcacaatctttgacaactttctcatcaccaatgatgaagcctatgcagaggagtttggcaatgagacatggggtgtcaccaaggcttcagaaaagcagatgaaggacaagcaggatgaggagcagaggctgaaggaagaagaagaagacaagaagcgtaaagaggaggaagaggctgaggacaaagaggatgaggatgacagagatgaagatgaagaagatgaggatgagaaggaggaagatgaggaggatactacccctggccagaccaaggatgagctgtagaggccataccacctgcctccagggctggactgaggcctgaacaccccactgcagagctggctgctcccaataatgtctctatgagactcaggaacttttcagttttttccaggcaggttcagatctggggtgaattctgattttgtttccctgcctcccccactacccccccccctttttttttttactggtgtttgtcttaattctcctttagccctcaacctcctggcttctcattttgaatcaacatctttccctatgtcccttttctctatccaacccctggtcacaaccctcccaacttcaggaacgggtgtggaggaaaagtcctaggcttgagatttcatctgctctccttcttggatctcagaggagtgcaggagaagggggtggtgtatccctcccccagcactgaggaagaatgggggtcttctcatccccgttctcccttgcccccaggactgggccacttgtggggcagccagttctagcacagctcacactgagagtgtaagaactacaaacaaaatttctattaaattaagttttgtgtcttccct

SEQ ID NO: 2723 - DNA, 1877 bp, Cricetulus griseus
agatcagggagcagagaaacatgaaggggcaggccagtcatctggggtcaccgaccaggagaaggagctgtccaccagtgctttccaggccttcacatctggaaattatgatgcctgtctgcaacaccttgccagtctccaagatataaacaaagatgattacaaaataattttgaacacagcagtagctagttaaaatttttaaaaataatacaaacaacaacagataatttgagacaaacacttaaccagctgaagaatcaggttcactcagcttgttagaagaaatggatggattagagtacatccagatgaagtccctgaaggcttgcaaacgggaaatcaagtctgtcatgaacacggctggaaattctgcaccctccctgtttctcaaaagcaattttgagtacttaaggggcaattatcgaaaagcggtgaagctcttaaatagttcaaacattgccgagcatccaggcttcatgaaaacaggtgaatgcttgaggtgcatgttttggaataatcttggttgcatccattttgccatgggcaagcacaatttggggattttctactttaagaaggctctgcaagaaaatgacaatgtctgtgcccagctcagtgcatgtggcactgatccaggcaaaaagttttctggaagacccatgtgtactttgctaaccaataagaggtatgaactgctgtacaactgtgggatccagctgctgcacatcgggaggccactggctgccttcgagtgtctgattgaagctgttcaggtttatcatgcaaatccccggctttggctgcggctggctgaatgctgcattgctgccaataaagggacttctgagcaagaaactaaaggtcttcctactaaaaaggggattgtgcaatctattgtcggtcaggggtatcaccgtaaaatagttctggcatcacagtctattcagaacactgtctacaatgatgggcagtcttcagccattcctgtagccagtgtggagtttgcagccatctgcctcagaaatgcattgctgctgttacctgaagaacaacaagacccaaagcaggagaatggctccaagaacagcagccagctaggagggaatgcggagagcagcgagagcagtgagacatgcagcagtaaaagccatgatggagataagttcattccagctccaccgtcttctccgttgaggaaacaggaattggaaaacctaaagtgttccatccttgcttgcagtgcttacgtggctctggccttaggtgataacctcatggctttgagtcatgcagaccagctccttcagcagcccaagctgtctggctctcttaagtttctgggccatttgtatgctgcagaagctctcatctcccttgacagaatatctgatgccattacgcacttgaacccagagaatgtcactgatgtctccttagggatctcttcgaatgagcaggaccaaggatcagacaagggtgaaaatgaagcaatggagtcctctggcaagcgcgcccctcagtgctaccccagttctgtcaactctgcccggaccgtgatgctcttcaacctgggcagcgcgtactgcctgaggagtgaatatgacaaagcccggaagtgtctgcaccaggcggcttcaatgatccatcctaaagaggtgccccctgaggccatcctgctggcagtctaccttgaactgcagaatggcaacacacagctagccctgcagatgatcaagcggaaccagctgctccccacagtgaaggcgcactccgacgtgaggaagaagccggtgttccagtctgtgcacccaatccagcccatccagatgtcctcattcaccaccgtgcagaggaagtgagaacttgcttgggga

SEQ ID NO: 2724 - DNA, 1876 bp, Cricetulus griseus
gagcgccccagagaagcgcttgcaacctctgcgcctcctccgccagaaccgcgaaagaaggacgccggcagcctcggtcccgtcctcaccgcgctcccggagcatccgatcccgctgctcaccggcttgttggctttcgtgtcgccgcgctcgccccggctctttctgcgcgccacaatgagctccagcaccgccagggcgctcgctgtcgccgtcacccttctccacttgaccaggctggcactctccacctgccccgccgcctgccactgccctctggaggcgcccaagtgcgccccgggagtcgggttggtccgggacggctgtggctgctgtaaggtctgcgccaagcagctcaacgaggactgcagcaaaacgcagccctgcgaccacaccaaggggctggaatgcaatttcggcgccagctccacggctctgaaagggatctgcagagctcagtcagaaggcagaccctgtgaatataactccagaatctaccagaacggggaaagcttccagcccaactgtaaacatcagtgcacatgtattgatggcgccgtgggctgcattcctctgtgtccccaagaactgtctctccccaacctgggctgccccaacccccggctggtgaaagtcagtgggcagtgctgtgaggagtgggtctgtgatgaagacagtagcatcaaggactccctggacgaccaggatgaccccgttgaatttgatgcctcagaggtggagttgacgaggaagaatgagttaattgccgttggaaaaggcagctcgctgaagaggcttcctgtctttggcacggaaccgcgagtcctttacaaccctctgcatggccagaaatgcatcgttcagacaacgtcgtggtcccagtgctccaagagctgcggaactggcatctccacacgggttaccaatgacaacccagaatgccgcctggtgaaagagacccggatctgtgaagtgcgtccttgtggacaaccggtgtacagcagcctcaaaaagggcaagaaatgcagcaagaccaagaaatccccagaaccggtcaggtttaattatgcaggatgctccagtgtgaaaaagtatcggcccaaatactgcggctcctgcgtggacggccggtgctgcacacccctgcagaccaggaccgtgaagatgcgattccgctgcgaagacggagagatgttttccaagaatgtcatgctgattcagtcctgcaaatgtaactacaactgcccacaccccaacgaggcatcatttcgcctctacagtctgttcaatgacatccacaagtttagggactgaatgtctcctgggttcctagtgtggggtggacagaggaagagtgtgagcatcttggagacatgggtgggtgccaacggggctggtgtggatggacataaggcagccccagttggggaatacctcgcttcatagtactggagcacccgttatgcttcattttggagcgtgtcgtgtggatgacgttctgttttctgtttgtaaattatttgctaagtgtattttttggctctacatcccccccccccccccccccgttctacagttgtaatagagataataagattttgtcctctgacaggagtaagtgaaagggcctccattccttcccgagggaggggggacactctgtgagtgcccagaggcagctagctacctgcactctaaactgcaaacagaaaccagctgttttaagactgaatgttttttatttatcaaaacgtagcttttggggagggaggggaaatgtaatactggaataatttgtaaatgattttaattttatatcagtgaagagaatttatttatgaaattaatcatttaataaagaaatatttacctaata

SEQ ID NO: 2725 - DNA, 1876 bp, Cricetulus griseus
aagcgggaaaatatgcagagaagaagaaaaaggaagatgaattggatgggaaaaggagaaaagagggtatgaacctcgtgatcccatttgttccttctgctgataactccaacctctctgctgatggcgatgattccttcataagtgtggattcagccatgcccagccctttcagtgagatctccatcagcagtgagctgcacactggctccattccccctgatgagagcagcagtgacatgttggttatcgtggatgacccagcctcctcagctcctcagtctcgagccactaattctcccgcttccataacaggctctgtctcggacactgtgaatggaatttccattcaggaagtgccagctgcaggacgtggtcactcggggctgcagcagcttctgcagctgcttatgccgcatacgggtacaatgtgtctaaaggaatctcagcaagcagtcctctgcagacatccattgtccgacctgctggccttgcagactttggaccttcaagcgcctcttctcccttaagttcccctttgaacaaaggaaataatatccctgggactcctaagagcctccacatgaccagcagcctagcctcagactccttgatccgggaaacagggcaaaggcaccaaccccgctggaggacggtaaccatctctgccctccagcttccttcaaccgaaaccagggctacagtcccaggcccacgaggtggtctttggatggcttacccagtgtggcatcttgcatcctatctggagagtaggaaaagccagctgcagcagaagagtcttaacctctttccggggaagggcctgatacagaccccttttagatgctcaggcagtctccatccacatcccactcttcagctctgaccatgtcccttatgaaggctccaccggtgctgtgaagagccttctatagtggagacctctctaaaggttatgatttcctatagggctagaaagggaggaaatggttccctggtatccacagtccagagcgcttcagggtctctaaaccccatttgccacagtgtcattactgaagtgtgcagtggatgccagagaagatggtggctgtaggatggcagaggctggaggaagcagacccacaggcagttttcccagcattcctccactgtccagcacgttcacaccagggaagcattagtcccaccagcaacagtagcagcagcccccactcaagggacttcccagaagccagtaaggagaccaggagccacctcaatcagcaggacaccctcaccaccctcttgcaagacacccctttctccgtcctgaatgcacagtctccctggctttgcccgtcagcccctgcttggctgtatgcactgtctgtattgcactgagaaagaaggcacagcaggaatgagatggggagggagcaagctcagcaccactcctccccagcccccagccccactcgcctgagcttgctgccctctgagaggggaaaaggggcgggctgggagggctttccacctgatgtccctggtggaacaggtgcttctgggcgggccagcctctaatttgcacacctgaaaatcgcggaattgagtttagatagattgatttttaaaactttttttttttttggagtaggtgtaggggaaaaagtcatttaatttaaatcataaagattcccctacccaaaccctgactcctgtgtacagatgctctttagaggggatcagaaaaatgccaagcctttttctctttgaatgtgctgtctatttttatagctgaacttgtacatatgtataaagagagacacatctttcttttactaactggataaaaaaaatcttaaaataaaatggagtgagataattttatagtaaa

SEQ ID NO: 2726 - DNA, 1875 bp, Cricetulus griseus
cggtctgaagtctgcctgaaagatgtcatccctcaaagccatcttccagtatattgatgaaaaccaggaccgctatgtcaagaaacttgcagaatgggtggccatccagagtgtgtctgcctggcccgagaagagaggagagatcagaaggatgatggaagtagctgctgcggacatccagatgcttgggggttccgtggagctggtggatattggcaagcagaagctcccagatggctcagagataccccttcctcccatcctgttgggtaagctgggcagcgacccccagaagaaaacagtgtgcatttatgggcacctggacgtgcagcctgcggctctggaggatggctgggacagtgagcccttcaccctggtggagcgggatggcaagttgtatgggagaggctcaacggatgataaggggccagtggccggatggatgaatgccttggaagcctatcagaagactggccaggagattcctgtcaacctgagattctgcctggaaggcatggaggagtctggctccgaaggcctggatgagttaatttttgcccagaaagacaagttcttcaaagatgtggataatgtctgcatttcagacaactactggctggggaagaataagccatgcatcacgtacggcctccgaggcatttgttacttctttattgaggtggaatgcagtgacaaagacctccattctggagtgtatggtggctcagtgcatgaagccatgacggatctcatttcactgatgggctgtctgatagacaagaaggggaaaatcctcatccctggcatcaacgatgccgtggctcctgtgacagaagaggagtgcaagctctatgaccacattgacttcaatatggaagagttcgccaaggatgtgggggctgagacccttctgcacagctgcaagaaagacatcctgatgcacagatggagatatccgtccctctccctccacggaatagaaggggccttctccggttcaggggccaagactgtgatccccaggaaagtggttggcaagttctccatcagactcgtgcccaacatgacacctgaagttgttagtgagcaggtttcaagctacttgtcaaaaaagtttgctgaactgcacagccccaacaagttcaaggtgtacatgggccacggtgggaagccctgggtatctgacttcaaccatcctcattaccaggctgggagaagagccctgaaaacagtgtttggtgttgaacctgacttgaccagggaaggtggcagtattcctgtgaccctgacctttcaggaggccacaggcaaaaatgtcatgctgttaccagtggggtcagcagatgacggtgcccactcccagaatgaaaagctaaacaggcacaactacatagaaggaaccaagatgctggcagcatacctgtatgaggtgtctcagctgaagaactgagaactctcgtattccatagagtgctgtgcctgcccggaaacaacctaccctctgccctcttccttccagctttcttagggaagtggaagtttcttttccctatctccctcaggtcacaggcagacttgcaagaatggagacacttgtgctgtgacagccccatggtgaccgctcactgtgctctgtatctgttcttaagacccttgctgaccatcactggtgtcccctcctgttgcagtcccctcaacctgtccacacagccctagtggaagcgtcagtcctgagctagctaccctgctaataaaggtgatgatgtgcctctaggaaaaaaaaaaaaaaaaaaaaaaaaaaaaaaaaaaaaaaaaaaaaaaaaaaaaaaaaaaaaaaaaaaaaaaaaaaaaaaaaaaaaaaaaaaaaaaaaaaaa

SEQ ID NO: 2727 - DNA, 1875 bp, Cricetulus griseus
ccaatcatcttgctttgatatttaagattgctagtgcgacgactgcgcccatccatcccatcacatctgtccccaggtcttcgtgacgtggctctgcgttgtttagaacttcagcctcaggacagacctccatcaagagagctactgaagcatcctgtctttcgtactacatggtagttactcattcaaatcaactataatggagacaggaagtgcaacaaggaaagaataaaaagaacttgtgggcaaccacattgagaatctactggccctcatgccactgaacagctagaaatgaggccagtggggaacccttacctaagtatgtgattgacaaatcataatctgtacctaagctcaatatgcaaaagtccacaacttgtgcagaaactgtaaaccgtgcctttcaaaggactggctctgggtgaacaggaaagcaatggagtttgcatgattaaataacagaagcataaatttatttttggagcactttttcagcaatattagcagctgagggctcaggatctgttttaatgtgtcacttcttccatttcatctagtgatcacagcagggggttctacaattccgtttgggtttttttttttttttttttttttttttttttttggtttttttggtttttttgggtcagagtatgctatgagtagcagtaaatacatgtatttttaaaagttaataacttctttatgacccacagttgacctttttttaaaaaacaaaaacttctggtcagttgtggtttgttgtgcattttactgttggcccgttcatttcgttttttggaaaatatggttctgtattttcatttcaccttcattttgtttaatattcagggaaaggtgatctcttcaaaccaaaaaaaaatatgtatatgtagtacatttgaaatgtacaacacaaattaggaagtaaattaagttccaagataagtttacagggatatattgcagataattttcaaaggcagtttttctgtgaatgttgcttcttaagtgaaattttacattcctttgttttggaagattggcaatatttgaagagttaaaaaataatacagaaatgtgaagtttggtaatgctaaatgtgttgtacttgacttcctcctttatatcctttcatttttacttttacttttgactacttagaattttcacacaatctaataatcagatggtcccaagagtctcgtgtgcaagctttaaaggacgcactcttgccattttatgtactggaagatcattggtcagattagcactgtctgacaggtgtaaactgtagaaactgaggaacctcagctatcagtattactgtgtacatcaacatgcccgccacatttcaaactcaaactgtctccacatgtcaagatccactgtgtttgggtttgtttgcagttccctcagcttgctggtaattgtggtgttttgttttcgatgcaaatgtgatgtaatattcttattttcttttggatcaaagctggactgaaaattgtattgtgtaattatttttgtgtttttaatgttatttggtactcaagttgtaaataacgtctactgctgtttattccagtttctactacctcaggtgtcctatagatttttcttctaccaaagttcactctcacaatgaaattctatgtgctgtgtgactaggattcctaagacttccagggcttaaggggctaactcctattagcaccttactgtgtaagcaaatgctacaaaaaacctctgggttaagaaaatttggcttaagtgtatcctttgttattttaaatatatcaagatattttaattaaaatttttacccctttgaaccaattttatagtattgtacctattttggtgttttgtctt

SEQ ID NO: 2728 - DNA, 1875 bp, Cricetulus griseus
agctcagagtccatagcatccttctctaacgagatcatgagtagctttctgccagaggcgggtgttacgagctgctcactgtcataggtaaaggatttgaagagttaatgacagtgaatttagccaggtacaaaccaacaggagagtatgtgacaatacgaaggatcaacctagaagcttgttccaatgagatggtgacgttcttgcagggggagcttcatgtttctaaactcttcagccatcccaatatagtgccataccgagccaccttcatctccgacaatgagctgtgggtcgttacgtccttcatggcatatggttctgcaaaggatctcatcggcacacacttcatggatggcatgaatgagctggcgattgcatacatcctgcagggggtgctgaaggccttggactacatccaccacatgggctacgtgcacaggagtgtcaaggccagccacattctgatttccatggatgggaaggtctacctgtctggtctacgcagtaacctcagcatgatcagccacgggcagcggcagcgtgcggtccatgattttccaaaatatagcgtcaaggtcctgccatggctcagcccagaagtcctccagcagaatcttcagggttatgatgccaagtctgacatctacagtgtggggatcacagcgtgtgaactagctaatggccatgtccccttcaaggatatgcctgccactcagatgctccttgagaaactgaatggcacagtgccctgcctcctggacaccagcaccatccctgccgaggagctgaccatgagtccctcacgttccattgccaacccttccctgaatgatagcctggccactagtaacctccggccttccaatggtgactcgccttcccacccctaccaccgaaccttctcaccccacttccaccactttgtggagcagtgccttcagcgcaaccccgatgcaaggccgaacgccagcaccctcctgaaccactccttcttcaagcagatcaagcgacgtgcctcagaggcattgcccgagttgcttcgccctgtcacccccatcaccaactttgagggcagtcagtctcaggatcccagtggaatcttcagcctggtgacagacttggaaggcctggaggtggatgactgggagttctgagtcaatgcagcctgcaccctccagctgggggtggggtgtgagccctgggggcgctccctgagggtcggcacctacctctgggtgcagactgggtagaaaggacactgtgccggcagagctggctgctggctgcttgaaaggacattctggaagagacttcactgtttctttggcttttgagagacagggagtcccagtcaccagggacttggagaagccggaaagctgacatcctgttctgtgagctcaggggacctccttagaaggaagagacactgctttggccccgaggctgaagtccaagcccagagcttaactcacgacccagggatccttcacttcctcttcctgcacttgcgctcataccagcctattccactcatttctctgctcccagatcctgtagggctaaacgggggacaagtcccaagcagcctgtccctgctctgccatcaggcatctccccagtgtctgttttaagcaccaggtcagttatggctgggccgggccatcctcatccccacctagctcttgggccctgacacctgaaacctcttagctcgtctgttacactcctttcccaagaatccatccaatgcctcctgccagctgctgccttggtgcctcctccaagggccgtaatgtcttgcctcatctgagggcttgagtaagtccttacgttgtgttagtttcattgtcagaacaaattaaaaatttc

SEQ ID NO: 2729 - DNA, 1874 bp, Cricetulus griseus
gcggcgcccagggggcgcgggctgctcttcttgccctcgctgctcggcttgctcggagtggtgtggtgcagcctgagctccggggtttcccgcgacgatgacctgctgctgccgtacccactcgcgcgcacgcgtccctcgcgggactgcgcccgggtgcgcgccggcagccgcgagcaagagagctggcctccgccgcccgcgacccctggcgccagccaccccgcggccgtgcgcacctttgtgtcgcacttcgagggccgcgcggtggccggccacctgacacgggtcgccgcgcctctgcgcactttctcggtgctggagcccggggggacctggaggctgcgcgcagaggcgccgcgccaccgtggaagacacagccgtcccagccggttgcctcgtcgcccagaacggtggtttcttccgcatgaacaccggcgagtgcttggggaacgtggtgagcgacgggcggctggtgagcagttccggggggctgcagaacgcgcagttcgggatccgccgcgacgggaccttggtcaccgggtacctatctgaggaggaggttctggattctgtaaatccattcgtgcagctgctgagtggagttgtgtggctcatccgcaatggaagcatctatatcaacgagagccaagtcaccgagtgtgatgagacgcaggagacaggttcttttagcaaatttgtgaacgtgatatcagccaggacagccgtgggtcatgaccgtaagggacagctcgtactcttccatgcagatggacagacggagcagcgtggcatcaacctctgggagatggcagagttcctgctgaaacaagacgtggtcaatgccatcaacctggatggaggtggttccgccacctttgtgctcaacgggaccctggccagttacccctcggatcactgccaggacaacatgtggcgctgtccccgccgggtttccaccgtggtatgtgtgcatgaaccccactgccagccacccaactgcagtggccatgggacctgtgtggatggccattgtgaatgcaccagccacttttggcggggtgccgcctgcagcgagctagactgtggcccctccaactgcagccagcatgggctgtgcacagagactggctgccactgtgatgctggatggacaggatccaactgcagtgaagagtgtcctctgggctggtatgggccaggttgccagaggccttgtcagtgtgaacaccagtgtccctgcgaccctcagactggcaactgcagcatctcccaagtgaaacagtgtctccggccaactgaggccacaccaagggcaggagagatggccttttttaccaggaccacgtggctggcacttaccctcatcctagttttcctgctgctgatcagcattgtggtcaatgtgaacttgctcctgggctccaagacagagaggaaccgacacctcgatggggactatgtataccaccccctgcaggagatgaatggggaactgctggttgcagagaaggagcaaacagaagacacttgcaaccccttcaaggactgacagacctgggctgcccaatggcatgttccaaataatgtccctgctcctcacttttatggggaaggatgtgaggccactggcatggatgctgcacactccactccttgcctggccatgccccacctgtccccaggctgtggcacatgccaccccaagcaatacagagctctggagagcctgcacccgcttccctgcctgcctgcctgtgtctgctgcccagaagcctgtctcccacaggggtctcaccactgccaaagactcccaggaggccactagcaaatgaaactgtaccccaagtcatgacaagagtggccaactctcc

SEQ ID NO: 2730 - DNA, 1874 bp, Cricetulus griseus
gcggcggcgcggacagaatgcggcttctcggcatggctcgccttgggttcggtctggtgagctgtaccttctttctggctgccagcggtctctattcctctagtgacgatgtcattgaattaacgccatcaaatttcaacagagaagttattcagagcaatagtctgtggcttgtagagttttatgctccatggtgtggtcattgccagaggttaacaccagaatggaagaaagcagccactgcattgaaagatgttgtcaaagtcggtgcagttgatgcagataagcatcagtccctgggaggtcagtatggtgtccagggattccctaccatcaagatattcggagctaacaaaaacaaaccagaagattatcagggtggcagaactggggaggccatcgtagatgctgccctcagtgctttgcgccagctcgtgaaggatcgtcttagtgggcggagtggtgggtacagttctggaaaacagggcagaggtgatagttccagtaagaaggatgtgatagagctgactgacgacacctttgataagaatgtcctggatagtgacgatgtttggatggttgaattctatgctccatggtgtggacactgcaaaaacctggagccagaatgggccactgcagccacagaggtaaaggagcaaacgaaggggaaagtaaagctggcagccgtggacgctacggtgaaccaggtcctggccaaccggtatgggattagaggattccctacaatcaagatatttcagaaaggcgaggctcctgtggactatgatggtggacggacaagatcagacatagtgtcgagggccctggatctgttctcggataatgcccctcctccagagctgcttgagataatcaacgaagacgtggccaagaagatgtgtgaggagcaccagctctgtgtcgtggccgtgctgccccacatcctggacactggggccgcaggcaggaactcttacttggaaattcttctgaagctggctgacaaatacaagaagaagatgtgggggtggctgtggacagaagctggagctcagtctgagctggagaatgcactggggattggagggtttgggtaccctgccatggcagccatcaacgctcgcaaaatgaaatttgctcttctcaaagggtctttcagtgaacaaggcattaatgagtttctcagggaactgtcttttggacgtggctccacagcacccgtgggaggtggttcctttcctgccatcactgccagggagccctgggatggtagagatggtgagcttcctgtggaggatgacattgacctcagcgatgtggaacttgatgacctggagaaggacgagttgtgaggccacagctcagccttccaatgtcttttcttgggagcgggcagttttccggcagtgaaggctctggtcagctgtctgcccttggcctttccgagcagcacttgctcggccactaaaaacactgcagcagtgaacctcggcgtctcaagaaaacactgaagaattctatgaattgtagcagtgaattggattgcgttctttggtatattttgaagcaaggtgggttgttgaaacattttccctcctgactgctgcttgaatgttcttggaagctgtttcttatatatagggtttttaaaatgtgattcctttgtttgaatattaatggctttttccattaaagaataaaatgatattttggacaatgctgataaatgtatgaaattagtggcacatcataaaatcggagtctggtggttagcctgaaaactaccgagacagtttggagttatgttagaacaccagaaaagcctcagaactgagcattttattgtaacttaaaaaataaatacactctaa

SEQ ID NO: 2731 - DNA, 1874 bp, Cricetulus griseus
  modified_base (131)..(131): a, c, t, g, unknown or other
gtgtgcctgttgtggaccaacagctgctgtatacctgctgcccctatattggagagctccggaaactgcttgcttcctgggtttcaggcagcagtgggcggagtggggttttgtgaggaaaatcactcccnctaccactaccagcctgggaaccctgcctcccaagaccagccaggggttgcaggctcagcttgcccaggcctttttccacaaccagccaccttccctgcgcaggactgtagaatttgtggcagaaagaattggatcaaactgtgtcaaacacatcaaggcaacgctgggtggcagatctggtgaatcaagccgagtcacttcttcaggagcatctggtgacacaggggccaaaggaagagccccaccgctgtgcgagcactgctgccaagaaagagaccccagctgctgttctaagcagtgcagagaacattgctgtggggcttgcaacagagaaagcctgctcttggttgtcagccaacattacagcactgattagaagagaggtgaaagcagctgtaagtcgcatcctgcgagcccaggggtcctgagccaactgcccgggtgagcggaggggctgctcccgagcctgtgagcaccatgctcccctcccctcccacctcatctccgagataaaagatgtactctccctggctgcggggcctcgggaccctgaggagggagtttccccagagcatctggaacagctcctaaaccagctgggccagtcactgcggtgccgccagttcctgtgcccaactgctgagcagcatctggccaagtgctctgtggagttggcttccctcctggttgcagaccagactccccatcttacgggccccaacacaacacaaattagagagaggacaggctcgaaggcttctgcacatgctgctttccttatggaaggatgacttccaggggccagttccactacagcttctactcagcccaagaaatgtggggcttctagcagatactcggccaagggagtgggacctgttactgttcttactccgggagctggtagaaaaggatctcatgggacagctggagatagaagcctacttgggcagccttaatgaggcccagtggccaggggacttctcggaagaattatcaacactatttcgcttgttcctagctgagccccatctgctagaaccccagctgagagcttgtgaacttatgcaaacaaaccgagggacagtgctggcccaaagctagggctgggaagcagccctcttgggcatgacaccagaacctgcctcctgtacctcaggaggctcaagagcccactgcacaccttgctggggcaagagtggccatgtctgtaatcaggcttactgctcctaagtgaaggaagtgtgttgctgcagagcatccacagacacgggcctcaacacctgaagtctagaggaaggagaacctgattaagagtcacagtggaaaagcctagagactccgagtcttggagctggcgtttctcgtttggatgctaaatgaaatatgtgtatgccggtcagtgcatttcaagcctcaagttgctgctatcccagcatttcttaaatgagaaattttgataggcaaagaaatgtttaacttgtgagaaagttaacaaaacatggatttggaagtctacattttctcacctacagaagctggactgttacccccaccccaaatattgacagccaaaaaggtaggacacacctatgtgaaacttggtcttacatggactttcatttgcagggagttagtcatcagaccaagcatggtgtagaaaattaggggtttggggtctttttttaaataaaacttttaacaaaggtctttttttttttttttttttttataataatatt

SEQ ID NO: 2732 - DNA, 1874 bp, Cricetulus griseus
ctgaaggtggaaaagttcgcgaccgccgaccgtggaaatgggctgcgtgccgtggtcccgctgcgccctggggagctgctcttccgctgcgatcccttggcgtacactgtgtgcaaggggagtcgcggcgtggtgtgcgatcgctgcctcctggggaaggaaaagctgatgcggtgttctcaatgccgaattgccaaatactgcagtgccaagtgtcagaaaaaagcttggccggaccacaagcaggaatgcaaatgtcttaaaagctgcaagcccagatatccccctgactctgtgagacttctggccagagtcatcgtgaaacttatggatgaaaagccctcagagtcggagaaactttactcattttatgatctggagtccaatattaacaaactcacagaagataagaaagagggcctgaggcagcttgccctgacatttcagcatttcacgagagaagagatacaggatgcttcccaactgccgccatcttttgacctttttgaagcctttgcaaaggtgatctgcaactcgttcaccatctgcaatgcggagatgcaggaggttggcgttggcctgtaccccagcatgtctctgctgaatcacagctgtgaccccaactgctcaattgtgttcaatgggcctcacctcttactacgtgcagtgcgggaaatcgaggcaggagaggagctcaccatctgctacctggacatgctgatgaccagcgaggaacgccggaagcagctgagggaccagtactgctttgagtgcgactgtatccgatgccaaacacacgacaaggatgctgatatgctgacgggtgatgagcaaatatggaaggaggttcaagaatcactgaaaaaaattgaagagctgaaggcgcactggaagtgggagcaggttctggccctgtgccaggcgatcataagcagcaactctgaccggcttcccgacatcaacatctaccagctgaaggtgctcgactgtgccatggatgcctgcatcaacctggggatgctagaggaggccctgctctacgccctgcgcaccatggagccgtaccggatctttttccctggaagccatcccgtccgaggtgtgcaagtgatgaaagttggcaagctgcagctacatcagggcatgtttccccaagccatgaagaacctgaggctggccttcgacattatgaaagtgacccacggccgagagcacagcctgattgaagatctaattcttctcctggaagaatgtgatgccaacataagagcctcctaaggacagccagagggacaggggaggtggcgcaccctgatcgaacgccttattgtggtcacacaacctgtgatgcttgctgtgtgaccctcctgtagaaaaatgccattctgtgtctatgtgggtaaatgtgtctctgtggtgtgttgtgagaagacctgttcgtggtagagcagaaccattacaataaattctctctctctctctctctctctctctctctctctctctctctcacacacacacacacacacacacacacactgttggctttaatagcattttaactgcatacatgatatctcattgtaattttcaacttccctgatgactgatgatattgattgggcctcatgtatttgtgactgtcaaagcagttgctcattttgtaatcagattcttctttttttaaattccttacatattataaattaactacatattatggacataaatcctaccttgggaggacagttagcaaacaattctctcattctgtagatcgtcttgtcctctgttgtttttgtgtgctgtacaaaacttcagtgtaattgttcatctgtctttggttttgtttcctttccttttataatcatata

SEQ ID NO: 2733 - DNA, 1874 bp, Cricetulus griseus
tccattgttgaccaggacttggaatacttgtctgagggtctggagggccgatcatccaatccagtggcagtactttttgacacacttcttcatccagatgctgactttgggtatgactacccatccattcttcactggaaattggaacagcatcattatatcccccacttagttcttggtaaaggcccccctggtgggggaataatatggaaggctctatgttgacgatcagctttggaaattggatggagctacctggacttaaatttaaagattggatgtctagcaaacgaaggaacttaaagggggaccgggttatgccagaggaaatagcgcgctactacaaacactatgtaaacgtcatgggtcttcagaagaatttaaagagagaatacttacataacttctgtatcaagactctacagagatcaaggtgataatggtagtcaagacaaagatatctcaacaaaacatttacagaaccagaagtcaaagtttgtcaaaagaaactgggaaatcagaggctatcagcgaatagcaggtggttctcatgttcccttttgcctctttgctgagaatgttgctcttgcaactggaacattggattctcctgcccacctggaagttgaaggggaagagttaccttttgtgtttcattcaatgcccgaatttggagctgctataaacaaaagaaagctgtgtggcagagctgatccagtgctgattgtaggctctggccttactgcagccgatgcagtactgtgtgcctacaacaataatatccctgtgatccatgtatttcgaagacgagtaactgatccaagcttaattttcaagcagcttccacaaaagctgtaccctgagtatcacaaagtctatcatatgatgtgtactcagacatactctgcagactcagatccttcatctgattataccagctttcctgagcaccgtgtgctttcctttaagtcagacatgaaatgcattcttcaaagtgtctccggattgaagaagatatttaaactgtctgcagctgtagtcttaataggttctcatcctaacctgtcttttctgaaggaacaagggtgttacctaggccataactcaagccagccaataacatgcaaggggaaccctgtggaggttgatgcatacacctatgaatgtgttaaagaagccaacctttttgctttgggccctttggttggagacaattttgttcggtttttaaagggaggggcattgggtgttacacgctgtttggccacaagacagaagaaaaagcagcatttgtttgttgagagaggaggaggagacgggatagcttaaagaaagtttacaagtaacttaaatggacacttaaccattaaagatttttaacagtggttgcagtgtattggcttaaattaactgggagagcctccagctgtcaaaggtgtcactcttagacaaatccaaacactgccaacttggtatacttcatgctttcatttaactagaatgctcttttctaacttgacatttataaagccagtcattaagacagaaatcatagttcattcatattgggtcaccttactgctcaagttgagggccagcagcttcagcttcctctagttcattaggaatttaggcagactgctacaagatccccaagggttatatatgtattcattggatgaagtttgaagtacactggcctaaatgaaaatgggctataaaatatatatgctgggatagcataggaggaagcattttcaactcaggttttatttattttgaaattatcggttatataaacctaatttattaccaaatatgatggtctttaaaaatatttttactgttgaaatttaggtaggtattgatatctt

SEQ ID NO: 2734 - DNA, 1874 bp, Cricetulus griseus
tgcgactgtgtcacttccattctgctctgctgcagaacagacagaagccctggccatgccctgccatattcttcagaagaaactcaagagcccaatggcaaggacctcaagaaccaggctgctgtggaggaggacgctctctgccactgtggtgggggtgcccttgctcctcggagcccgctatttcactgcagaggcgcaggagaagaggaggctgcgacttgcggtagatggtatcgggcgctttggcaggtctctgaaggttggtctgctcatctccctggactactggtggtgtacaaatgttatcctacgaggagtggaggagaacagcccggggtatgtgaaggtgatgtctgcatgtcaccagcgtgcggctgacgccctggtggcaggagccatccgcaatgggggcctctatgtgaaactgggtcaaggactgtgctccttcaaccacctgctgccacctgagtacatccagacgttgcgtgtgctggaggacaaggctctcactcggggcttccgagaggtggatgagctgttccttgaagacttccaggcactgcctaatgaactcttccaggagtttgactatgagccgatggctgctgcaagcctagctcaggtgcaccgtgccaagctacatgatggcactgctgtggctgtaaaggtacagtacattgacctacgagaccgctttgatggggatgtgcacacactggaacttctgctgcaactcgtagagctcatgcaccccagcttcggcttcagctgggtcctacaggacctgaaggggaccctggcccaggagctggacttcgaaaatgagggccgaaattctgagcgctgtgctcaagagctaaagcacttccattatgtcgttgtccctcgggtgcactgggataagtctagcaagcgggtgctgacagctgacttctgtgaaggctgtaaagtgaatgacacagaggccatcaaaaggcagggactggcagtgcaggacgtagcaaagaagctgatccagacttttgctgaacagatattctacactggcttcattcactctgacccccaccctggaaatgttctggtgcggaaaggtccagatggaaaagcagagctggtactcctggaccacggtctctaccagttcctagatgagaaggaccgatcctccctgtgtcagctgtggcgggccatcatcctgagggacagtgctgcaatgaagacacacgcagctgaacttggggtacaagactatatgctgttctctgaggtgctcatgcagcgaccagtgcgcctgggccagctgtggggctcccacctgttgagccgtgaggagactgtctacatgcaggatatggctcgtgaacactttgaaggcataatggaagtactcaaggcactgccacggcccatgctacttgtgctgcgaaacatcaatacagtgcgtgccatcaactcaacattgggcacccctgtggaccgctacttcctcatggccaagagtgctgtctggggttggagccgcctggtgggtgcagcataccatggcatttacagcagcagcctcttacgccacatcaaggtcatctgggagacattcaagtttgaagtggccctgaggctggagatccttgccatgcggctcactgccctcctgcttcgtgttctggcccgcctgggctttgccccaaggctaaggatgtctcccagtacctggagatgtagctccctgagccacaacaactgcaaggctgccaggggccagcagagtttccagcctgggcacactgagcaggccccagtgcataaatcttacaacccagagcctggaatggggagtacactatgggggctcttaaacacaatgacca

SEQ ID NO: 2735 - DNA, 1873 bp, Cricetulus griseus
gcccacctcccacatctgcggccattgcctgagagccaaccctcaactagcccactcctccagacagccccaggcatcaaaggtcaccagagggtggttaccctggctcagcacatcagtgaggtcatcacacaggactatacacgccaccacccgcagcagctcagcggcccccttcccgcccctctctactctttccctggagccagctgccctgtcctggatctccgccgcccacctaccgacctctacctcccaccccctgaccacagcaccccagcccggggatccccgcacagcgaagggggcaagaggtccccagaacccagcaagacatcagtcctgggcagcagcgaggatggcattgaacctgtgtccccaccggagggcatgactgagccaggacaccctcggagcgctgcatacccactgctgtatcgcgacggggaacaaggggagcccagaatgggctccaagtctccaggcaacaccagccagccgccagccttcttcagtaagctgactgagagcaactctgccatggtgaaagtctaagaaacaggagatcaacaagaaactcaacacccacaaccggaacgagccagaatacaatattggccagcctgggacggagatcttcaacatgcctgccatcactggaccaggggtgggaaagccaaggtttctggcagacccagtagccgaaaagccaagtccccagccccaggcctggggtcaggagatcggccaccttcagtctcctcggtacactcagaaggggactgcaatcgccggacaccactcaccaaccgcgtgtgggaggaccgaccctcatctgcagggtccacaccgttcccctacaaccctttgattatgcggctacaggcaggtgtcatggcctccccacccccacctggcctcgctgcaggcagtgggtccctggccggtccccaccacgcctgggatgaagagcccaagccactgctgtgttcacagtatgagacactctcagacagcgagtgactccaaattggaggggagcggtgccaggttcctgcacgaggcagaagcagcccagcatggagcaggcagctgctgactctccccactgaggaaggagcccctgagtctgcctgcgcgtccaaccgtccgtccacccatctgtccatccagagctggcatcctgcctgtctaaagccttaactaagactcccgccctgggctggccctgcgcagtgaccttactcaggggatgtttacctggtgctcgagaggggagtggacaggaggggaggacagcgggcccggaggggatacaacgatcatgtgtcagttgcacatgtgcatctggggcagcggggacccaacgcaggatgaccaggcacctccatgccaccgcctcgccccttaacgcatttggaaccaaagtctacgctgagcttgtggccctgccccttcctctgcccccagcctgctcgcactctggcagacagacgttcccagcttatcctgccccaatgctgtcatcgcagtccccaaaggccacccagcccacaagactgggagcccatcaaaccaggtgggtgcacaagggtccaggatggcctggggcacgaatgtttgtcggaactggaccgtccctggccgtcgctgtggcgatgggagggaaggcaggtataaatggtgttggcttacagggtatatttttgataccttcaatgagttaattcagacgtttcacacaaggaaggactccccgtgttactgctgctgtgctttggtctctgcttatgctccagaggcgtgtgccggccaaggcggtgaccccaccatacgcaggactggggggcaggggcgccggcacacagccctg

SEQ ID NO: 2736 - DNA, 1873 bp, Cricetulus griseus
gctgactccaagagagccttttgagctgcaaaagtcagccttcagtgaagaggtcaatatcaagacagctgaggcccagttggcctatgagctgcaaggggcccgagagcagcagaagatccggcaggaagagattgagattgaggtagtgcagcgcaagaagcagatcgctgtggagacacaggagattctccggaccgacaaggagctcatcgccacagtgcgccgccctgcggaggcagaggcccaccgcattcagcagatcgccgagggcgaaaaggtgaagcaagtcctgttggcacaagcagaagctgaaaagattcgcaaaatcggagaggcagaggcagcagtcattgaggcaatgggcaaagcagaggctgagcggatgaagcttaaggctgaggcctaccagaagtacggggatgcagccaagatggccttggtgctggaggccctgccccagattgctgccaaaatctctgcccccctgaccaaagttgatgagattgtagttctcagtggggacaacagcaaggtgacgtcagaagtgaaccggctgctagcagaactgcctgcttctgtgcacgccctcaccggtgtggacctctcaaagatacccctgatcaagaatgccactggtgcgcaggtgtgagcgaggctcctgcagactcgagcccttcagcagctgcctgcccttccagcacctgtctaacatcacagggacaagaacgtcaccgactctggtgccttattttgcagggaccagaagtgctgcgtgttgaggccccctctggctgtcctcccttctctcctgttagccttccttcctctctctccacactcgcatcaactgccaccttcatgtagtctgtttctcttctgccatgtgtgcctctccctctggctctgtttctctccccttctctccccacctccacacacatcatatagtttaagctgaagttgtttattataatcactgtccatctgtgaggagtggccccactgctcctcagaatcctggtgccttcaagttctatatgtatctgtctgtcttccttagttctggcagagcccagcatgggtaaaagggttctgggtaggacacccactctcttctctccccatctgaacttcctagccctaaactctgttccaggaagcccacaacccacacattcttgccctttgaggcctgagtggctatggcctattgggcctggagtaatgcccgtcactcacacacacacccaggcctgctgttaaacctgcccctctgccctgcaccccagaggcacaaaggcaaggcctcttgtctatagcagcttcctcagtttactactgccttaggaggccctgctcgtgctcagggacatccccatcattggcttgtccttgattggggggtgggggatcttagtccagttctgtctttctggggtcaatgtttatctctgatggggacaggaagtttatagatcttcctgctagtgctgtgagtgcatggggctcgcccatggggcaaggctgtaccaaccctaagagaatcaagtgctgtagactggccaaacctcattctataccatacttttttctctgccagcatgatggggttctagccatgggaagcagctaaatcttctgtgtctttgcaccattggtggcagaagagcccaatgcccaagtatcctagaggaggtgcaagggtgtcccatggccccagtccccacccggcctgcccagcctgtggagctgctgtgcatgtgaatgctgcatgtctggcctggggcttacatgttgcactcgccccactacctacttcccctccggtaaaaataaaaaagatctacttacgaccaaaaaaaaaaaaaaa

SEQ ID NO: 2737 - DNA, 1873 bp, Cricetulus griseus
tgttgttggttgctctgggaagccggcagagcaggccctacctgctggtgcacgtggaccaggaattgcttatctatgaggccttcccccacgactctcagcttggccaggggaatctcaaagtccgctttaagaaggtccctcacaacatcaacttccgtgaaaagaagccaaagccatctaagaagaaggcagaaggttgcagtactgaggaggggtctggagtccggggccgtgtggcacgtttccgctatttcgaggacatctatggctattcaggggttttcatctgtggaccctccccgcactggcttctggtgactggccgtggagctctgcgtctgcatcccatgggcatcgatggccccattgactcgtttgctccattccacaatgtgaactgcccccgtggcttcctgtacttcaacagacagggtgaactgaggatcagtgtcctgcctgcatacctctcctatgatgctccatggcctgtcaggaagatcccgctgcgctgcacagcccactatgtggcgtaccatgtagagtccaaggtgtatgctgtggccaccagcaccaacacaccttgtactcgaatcccacgaatgactggtgaggaaaaggaatttgaggctattgaaagagatgacagatacatccacccccagcaggaagccttctccatccagctcatctctccagtcagctgggaggccattcctaatgccaggattgagctagaggaatgggagcatgtcacgtgcatgaagacggtgtcactgcgcagtgaggagaccgtttcaggcctaaagggctatgtggctgctgggacttgcctcatgcagggggaagaagtcacatgccgtgggcggatcttgatcatggatgtgattgaagtggtccctgagcctgggcagcccctgactaagaacaagttcaaggtcctgtatgagaaggagcagaaagggcccgtgactgcgctgtgccactgcaatggccacttggtgtcagccattggccaaaaaatcttcctgtggagcctgcgggccagcgagctgactggcatggccttcattgacacccagctctacatccaccagatgatcagtgtcaagaacttcatcctggcagcagatgtcatgaagagcatctcactgctgcgttaccaggaggagagcaagacgctgagcctggtgtcccgggatgccaagcctttggaggtgtacagcgtggatttcatggtagacaatgcccagctgggcttcttagtgtctgaccgagaccgcaatcttatggtgtatatgtatctgccagaagccaaagagagttttgggggcatgcgcctgctgcgccgagcagacttccatgtgggtgcccatgtgaacacattctggaggaccccatgccgaggcgctgctgaggggcccagcaagaagtcagtcatgtgggaaaacaagcacatcacgtggtttgccaccctggatggtggcattgggctcctgctgcccatgcaagagaagacataccgacggctgctgatgctgcagaatgcactgacaaccatgctaccccaccatgctggcctcaacccccgtgccttccgaatgctgcatgttgaccggcgcatcctacagaacgctgtgcgcaatgtccttgatggagagctgctaaaccgctacctatacctcagcaccatggagcgcagtgagctggccaagaagataggtaccacacccgacattattctggatgacttgctggagacagaccgtgtcactgctcacttctaactctgtgataccctgccattgtacaattatctctacccattttgtataaaagaaaaagaaaacgatttcttccaaaaaaaaaaaaa

SEQ ID NO: 2738 - DNA, 1873 bp, Cricetulus griseus
agagtatgcaagagccacctactcaactgttgtccccatgatgtcctttctggaactagaatggatcttggagaatgcctgaaagtccatgacctggctttaagagcagattatgaaattgcatcgaaagaacaggactttttctttgaacttgatgccatggatcatctccagtcattcattgcagattgtgatcgaagaacagaagtgtctaagaaaagattagcagagactcaagaagagataagtgctgaagtggcagcaaaggcagagcgtgttcatgagttaaatgaagaaatagggaaattgttggccaaagtggaacaactcggagctgaaggaaatgtggaggagtctcagaaagtcatggatgaagtcgagaaagcacgagcaaagaaaagagaggcagaggaagtttatcgaaattctatgccagcttccagtttccagcagcagaaacttcgagtctgtgaagtctgttctgcatatttaggtcttcatgataatgacaggcgacttgctgatcattttgggggtaaactgcacctgggatttattgaaataagagaaaagctcgaagaattaaagagagttgtagctgagaagcaggagaaaagaaaccaggaacgtctgaaacgaagagaagagagggagagagaagaacgggagaaactgaggaggtcccgttcacatagcaagaatcccaaaagatctagatctagagagcatcgcagacaccgatctcgctccatgtctcgagaacgcaagaggaggactcgatccaagtctcgggaaaaacgacatcgccacaggtcccgttctagtagccgcagccgcagccgcagccaccagagaagtcggcacagttctagagatagaagcagagagcgatccaagaggagatcctcaaaagaaagattcagagaccaagacttagcatcacgtgacagagacaggagttcaagagacagatcacctcgtgaccgagaccgaaaagataagaagcggtcctatgagagtgctaatggcagatcagaagacaggaggagctctgaagagcgtgaagcaggggagatctaactatagctgtgtggtcttccatccttaagcttcctctggagttaacatgctattgtttatagttcttttgtatctcctaatacccgtgcctccaactgtcagagaaaaggggcagggaagcaatataacttctgttgtaagcttctgttcacatcaattaccagttgatcacagttgagcatttctactggattgtgtgctggagaaacttatacagggctgttttgtttggggcctattagagttggaaattgaacagctgttgcattatatatttttgcttttttattgaaaatttgaaatcagacttgtcttgattttttttttttttttctgttctattaaactgctatgttcagtatattgaggggggacgggcagggactatttcataataagcacttgttttattttgtgtgtggagtataaaggctatacttactgtaaagataataaaatgaaaagaaacaatcaccaccaccatcatcacactgtaacttgttcagtaagttgttactagaactattttgctgtggtattttcctctattctgtaacatccttaacagtgccttactgtacaaggcaccaaaggaagtaaatatataattgtggatttcagatgaattgttgctctacccaaatctcttgctgactatactccactatttcagagctgtgtttaacagctttgtaaggaaaaattggacctgtagaagcaactaagagtctcttgtttgtatttcttaattgacaagcctgaataaaatcaatatgtaaccaatataatgaaa

SEQ ID NO: 2739 - DNA, 1873 bp, Cricetulus griseus
ggcgaggtgatggtgatgaaggaactcatccggtttgacgaggagacccagaggacattcctcaaggaggtgaaggtcatgcggtgcttggagcacccgaacgtgctcaagttcatcggtgtgctgtacaaggacaagcggctgaacttcatcaccgagtacattaagggaggcactcttagaggcatcatcaagagcatggacagccagtacccgtggagtcagagggtcagctttgaaccaaggacattgcatcagggatggcctacctccattcgatgaacatcatcccaccgagaccctcaacctcccacaactgtctggttcgtgagaacaagaacgtggtggtggccgacgtttgggctggctcgactcatggtagatgagaagagtcagtctagattattgggcgagtgaatgcagaccccgattatctgccccgaactatggactttggcctcaatgtgcggggtttcttggaccgctactgtccaccaaattgtcccccaagtttcttccccatcactgtgcgctgctgtgacctggatccagagaaaaggccctcttttgtaaagctggaacaatggctggaaacgcttcgcatgcacttggctggtcacctgccactgggcccacagctggaacaactggagcggggcttctgggagacctaccggcggggcgagagctcactgcctgctcaccctgaggttcctgattgagcccacctggccctgccgtcctcctccccgcctctggagaatacaccctcaccagattcctcagctgggggaagcccaggcatggagccctcagccagggcagtggtgccccagacccataccctgacccaggccctgatttgccttctcccccccatgcaggtgcccccggcctgtctctgcctctgcctcccaaaatgaccaggctgcacacacatggtcagtcgcattgccctgccttacctccctttctttctgtgtggggctgtccctcacttgtctctgcatgaactctggtcagggaagctggacgcattccatgcatcacctgcagcatccgcactgcacctgctggcattcttccccagcgaggcagggctgggaggcagctttagaagtgagcccctaacccaacagggagtccaggattcccctggggggatctaggtagcagcaggtattgacaatgatataaaccccaaagcagatagaggtctgatcccacatgccccctggccaggcagtggccctcgcttttgcttggaggtccatctcatttcttgatcaaagccactttagtgagaagcaggtaccagtcctcaggatgagcagggatccctcaagggaaaagggcaggtgatgcctgggatctggctgacagggagggctcagcccacacagcagaggtcggacagaggggatgaggcagccatccaccagcaccccagcaccccaggttcatctcagcatcctctcgggtctctccccactggctggagcagccccgtgtcctccttgggtgcctctgccctgagttctttctgtgtgatctattttttaagaagagttggtattattttttcataacagctgtagcagccgctgctgggattttagggggattgttctgtgttttgttttgttttaggtgggtggggcgggagggccatttcctcactctgcttcagttgaacatctaaaatgtattgaaactgtgaagctttctcagtgcactttgaacatggaagagaatctgagcagatcccagtggaaccaagacagaaggaagcaagacatacttgcctctgcccagtgaccatgataggaatgaacccagattcagaacaaataaaacgattctgtgcctcccc

SEQ ID NO: 2740 - DNA, 1872 bp, Cricetulus griseus
tgtggataaaactgaacatcaccgcgccctcactgagctcttctttgtcaccgagaaccgtgcccaggagctgggcctgctgcaggagtacctgctggccttaaccactgaggaccaccttctccgatgtgcagcacaggctctgcaaaacatcgctgctatcagcctggccatcaactacccaaacaaggccacccgcctctggaatgtggagtgttagcctcactgtggcatgcatggactcaatactttgtctacaggggtttacagcagacctctaaccttgctcaggaaccccctgtggcctctgcacccagctctctgagcccaccccctgctcccatttggatgccaagcagccgtctcatcaagtaggcccactgtgcaggctctgcatgtgcaagaaagcacagcagtgctgagggctcagaaagggccatcgagaggccttggggaaagttactcagagagaccagtctcctccagggctgtcccacgggagtcacagcattgaagacctagaagtagtctctagaaggattctgtctccactgagtgggagctgctcaggcttgccatcaggggactgtgcagagccacccttgcagtgagacttgcagcttgcagcagcagtggcccagttgggaaaccaaccacaaccaacatgagcgcctctcagccacctccagaaatggagggactctccagcacctgcagtgccagcagtgccctcagaggagcccttgttcaggagtcaggacatacctgattatacttctgcttcaaggtcatggtgattggcatacctaccaccttgggcctcttgcctggctatttagccatcacctgtctagcaataactacattagttctagtgaatgcttttgcatttttccatgtatggctttagcattgccctgaagtgctgatgatttttctttccagggccacaatgagtgggaagctgggttggcaccaggccaaggattttcaggaagaatgcaaataaaaaaaaaaaaaaaaaatgctcctcacagccagggccatacttggccagctcatgttgctatggcccagtatgcctcttggcctctgaagacccttctgggagtgggcaagggacttggttggaagagactgagcctgcgggtctgggagcatcttctgcaaaggtgctgggccttctggcaccactagctgcctggcccctgaattaggttctctgatgaaccccagcatataggaaaaatggggacagagtgggagggaataggttgcaaaaacacaggaacaagtggagcggtgactcatggtccaccaccctgacatcaaaggaattgtagtccagttcctatggtgcttcagtttgcccttcacacaccacagctgctctctgacagggcccctcctgtcctggccacctgcagcccactgcctctgctttctctaggccactgggtggcactgctgagccaggcccatctctcctgaccccagccagggcaggaggtcccaaaggagttccatcaaggccaacgtccccttgacccttcttaggaggcaagactgcctggactgagacaaaactggcaggaataaggggtcgtggaaacatgtgcctaatctacaaagaattctgttccaaatcatatatattgtacagacactgttctaatgagaggagtgacttatttcatcattcgtttttaatttgttttcttacgggtttacgatttttgaattttttattatttggttgagagaaagtaattttgattatatcagctgagtgagttcagcctgtaaaaagatgtttaagttgtggataagatatgcaaatgaagagaaatataattgtacaaattctaataa

SEQ ID NO: 2741 - DNA, 1872 bp, Cricetulus griseus
gaaatgttcagagtaaaagaagaaagtagtaacattttcttccctgaaggatgaatttaccccaaagaattgcagaagcagaaaagaaagttcaactagcctgcaaagagagagatgctgctaagaaggaagtgaaaaccatgaaagaagaacttgccactagattgaatagtagtcagactgcagacctcttgaaggagaaagaagaacagattcaagggttaatggaagaaggagaaaaactttcaaaacagcagctgcataattctaacatcattaagaaattaagaacgaaaagacaaagacaatgaaaatgtcattgcaaagctgaatagaaaagctaaggagctggaagaggaattacaacatttaagacaggtccttgatggcaaagaagaagttgagaaacaacatagagaaaatattaaaaaactaaattctgtggtagaacgccaagagaaagatcttggccgacttcaggtagacttggatgaacttgaagaaaagagccgaagtactcaggctgccctagatagtgcatacagagaacttactgatcttcacaaagctaatgctgctaaggacagtgaggtgcaggaagctgctttgaggcgtgagatgaaggctaaggaagaactctctgcgacactggagaaggctcaggaagaagcccgtcagcagcaagaggcattagtgcttcaggtgggggaccttagactagcactgcaacgggcagagcaaactgctgcgaggaaagaggattatttacgccatgagatcagtgaacttcagcagagactccaagaagcagagaatcgaaaccaagaactgagtcaaagtgtttcatcaacaacaagaccattgctccgacagatagaaaatttacaggcaactctaggctctcagacttcatcgtgggagatgctagagaagaatctttctgacaggcttggtgagtcacagactttgttggctgcagcagttgaaagagaacgagcagctacagaagaactcctggccaacaaaatccagatgtcttcggtggagtcacagaatgccctcttacgacaggaaaacagtagacttcaggcccagctagagtcagagaaaaataaactaagaaaactggaagatgaaaataatcggtaccaggttgaattagaaaacctaaaagatgactatgtaagaacacttgaagagacaaggaaagaaaagacactgttgtgcagtcagttagaaatggagaaaatgaaagttgaacaagaaaggaagaaagccattttcactcaagaagcaataaaagaaaaggaccacagacagttttctgtttctagtactcccaccatttcacgttcaagttctataagtggagtagatacagcagggctacagacatctttcctgtctcaggatgagtctcatgaccattcatttgggccaatgtctacatcagccagtggaagcaatctttatgaagctgtaaggatgggagcaggatcgagcattattgaaaatctgcagtctcaactaaagctgagggaaggagaaattagtcatttacagctagaaattagcaatctagaaaaaactcgatccataatgtctgaagagctagttaaattaacaaatcaaaatgatgaactggaggagaaagtgaaagagatacccaagcttcgagttcaactccgagatctggatcaaagatataacactattctgcagatgtatggagaaaaggcagaggaagcagaggaacttcgcctggatcttgaagatgtagaaaaaatatgtaataaaactcaaaatagatgaactttctaaaggacaaaggctcagttaacttgaaatctgtattcccatcaaactgaatgt

SEQ ID NO: 2742 - DNA, 1872 bp, Cricetulus griseus
caggctgtgtctcgctgtgactacttctagccaagatcaagcaggctgatgtagcactgctggaggagacagcagatgaggaggaaccagagctcactgccaacctaccccgggagcttaccctgcaagatgtggagctccttaaagtagggcatgttggtcccctgcagattgggcaagctgttaagaagccccggacagttaacatggaagattcctgggcaatggaagaggcagtagcatctgctgcctcagcctctgttacttttaaggagatggacatgagccccgaggaagtggttgccagccctagggcttcacctgcgaaacaacggaattctgaggcagcctctggtatccagcagtgtctctttctcaagaagatgggggcaaaaggaagcaccccaggtatgttcaatcttccagtcagtctctatgtgaccagtcagagtgaggtgctggttggccagttttgtggtgactgacgtggaaggtgggaagctttggtgtttcactgtggaccgaggagccaggagtagtcaaatacagctgcctctgcagtgctgtgaggcccaaatttgtcacctgtgatgcggaaggcacagtctatttcacccaaggcttctcaatgtggaaaaccgacagaatgaacaccacctggagggtgggaattctccattggctctgtgggcccagacgggcagctgggccggcagatcagtcacttcttctctgaaaatgaggatttccgatgcattgctggcatgtgtgtagatgctcggggtgacctcattgtggctgatagcagccgcaaggaaattctccattttcccaagggtgggggctacagtgtccttattcgagagggtcttacctgtccggttggcattgccctcacacctaaggggcagctgctggttttggactgttgggatcactgtgtcaagatctacagctaccatctgagaagatattccaccccttaaagatgagaaatgccagtttcttctttcccccaaccgagtttccttccctttccttccttggttgttgatggtacagtagagtagatgtggcctatgtcctgattcaagccagattgctgtagaatcaaaaatctctagttttcagtgctttttatctgttattcttcctctccccactcccccttttcctctctcccaagtttagagttctgacaggtaccttgtcccaattaggatagatgatgctgttagcagaagttgcttaagaagttagacacttccaaggctttagtagacaaagccactttagccctttgcccttgtgtacaagatttgtattgatattgaatcgtcattgatctttctcctctgagctgtgatctccctagtctaccatttccttccataatattataatgtgcttcatctgtgattctttaattctggctgcattctgtatgcatgctccagtgggatctgctctacccttcagtgacagtatatctctgtagcatggtgtctctttgatcacctttatcagtatgagactgaatcattaaatgccaccaaaggtgacacacagtccctttgggaagtagggcctcttggctgggggatttctgccactatggattgtcttttcattgtagatgtgccagaagatggtttgaccctagttagatagttttgaaaacttcagtctagaaatcgatcgccttataaaggagttcataggttagaactctgccatgaccaacaacgtgggaaggttgatgaatccattttcattgaacaaaccattgagtagctaactctgtattttcttcacgtgagtgcatactatttgactttgagatttatttctgttctatcaagcattaaacta

SEQ ID NO: 2743 - DNA, 1872 bp, Cricetulus griseus
aaacatgaatgatgcagatgaaggattttcatcaggggcttctctcagcagccagccacatgggaccaaaccatcctcctcttctcagaggggaagcttacggaaagtagcaactgggcgttccgccaaagataaagaaacagcatctgccatcaaatccagtgagagccctcgagattcagtagttcgaaagcagtttgtacaaccagctgatcttagcatagattctgttgagctgacaccgatgaagaaacacctgagcctgcctgctggccaggtggtgccaaaaaccatagtttaagtctaattcggacagccagtgcttcctcaagtaaatcatttgactatgtaaatggcagtcaagcaagtaccagcactcaatccactttctgtgatgtcagactattggagaaaccctttcagctgcttcctagatgtacctaaattcagtcagatattggataaagaaacctaagtcctgaggtcatatactccaaggaaatacatcagggacagataattggttgaaaacactgatgcttcaatgtgacacatttttatagaacatttctaccagagggtactgacttgatttctccacaaggaccacactgcctttgtgtttaatgcaatttgtgtatcttctgattatctgcaaagtttctcgttttttataaaactttgaaatcatgccagtaagctagatgttgaatgtatgtaagtagcatttggtaactgctaagaggctacaaaaaatacgttattggtttaaattttttttattgttgatttgattggataagactttcttaaaatctcttctgggtctcaggccttgtttgaaaaataagggaatatattaggattttgaaaatcagtattgtgagtgacttcaactgctatcagaaaagaaaaaaaaaaaaaaaaaaaggttagaaggaaaaaaaaagttaattaattaagacattatttgatctggaaaacacaaatacagtaaatagatatacaagattctattttttcttgcatcaataagatgtcaatattttaataaaaataccaattaaagaataagtctaaattttattccttatgacatgttttcactaaaattaaggatttggattatcagtgttgaatgtaaagggggaaaactccttaaattggtatgttatatataatgggttgtttagacaaaattacagggaaaattattgaaaaatactccaatgggtagtagcatttatttctagtataatattagctaaaactggtgtggttagtttaactgctttttgtctttgcattaataacatgattgagctaaaggaagctaaaatatgtacttctaaaatatgtaggccaaaaagttctaaagggtttaatctgtttaatgatttcataaatcatgacacatagttttttttaactgctattccaaacaagtacttttattttatttaatatcacattatagttaataaatattggactgggaatgctggcacacacctttaatctcagcactaaaaaaaaataaaacgcacatttaagatcatatgtattggtgcatgtgagccatttatcctgtcttattgaatggattaatgctgttgattgttgaaatgtgaaatgtagtcactgttgaacttgtaaatatctgccagagatagaaaaattattttaagttattgtaaaataaagatgtataaaattcagtatccgtctgcaatgcagaaatataacatctcagatgttaaatattgtgtctcttgagggatttgtcatttctcccttgatgtatctagctacattaataatgtaaattttcttttgtacagtataaaaatacagctttatttggaattttaa

SEQ ID NO: 2744 - DNA, 1872 bp, Cricetulus griseus
  modified_base (1777)..(1777): a, c, t, g, unknown or other
gggcgctaagatggcggcggcgtgagttgcatgttgtacgaggatcctggggctgccgcattgctccggccccgccatggccatcaccgtcacgcttaaaacgttgcagcagcagaccttcaagatacgcatggagcctgaggagacggtgaaggtgctgaaggagaagatagaggctgagaagggtagagatgctttccctgtggctggacagaaactcatctatgctggcaagatcttgaatgatgatgtccccatcaaggaataccatatagatgagaagaactttgtggttgtaatggtgaccaaggccaaggctggccaaagtaccccagcacccccagaggtctcacccactgctgccccagagtcctccacaccctttcctccggctccaacatcaggcatgtcccatcctccacctgccagcagagaggacaagagcccatcagaggaatcagctactgcaacatctccagaatccatctctggctctgttccctcttcaggtagcagcgggcgagaggaagacgcagcttccacattagtgactggctctgagtatgagacgatgctgactgagatcatgtccatgggctacgagcgggagcgggttgtggccgcattgagggccagctacaacaacccccacagagctgtggaatacttgctcacgggaattcccgggagtcctgagccggaacatggttctgttcaggagagccaggtaccagaacagccggccgtggaagcagcaggggaaaaccccctggagttcctgcgggaccagccccagttccagaacatgcggcaggtgatccagcagaatccagccttgctccctgcactgctccagcaactgggccaggagaaccctcagctcttgcagcaaattagccgacaccaggagcagttcatccagatgttgaatgagccccctggggagctggcagacatctctgatgtagagggggaggttggtgccataggtgaggaggccccacagatgaattatatccaggtgacgccgcaggagaaggaagctatagaaaggctgaaggcactgggcttcccagagagcctggtgatccaggcctacttcgcgtgtgaaaaaaatgagaacttggctgccaacttccttctgagtcagaactttgatgatgagtgatactgggaggcaaaacaacacctaggccagattcccacctttctgaagtggcccctattcccatctcagtccgacaagacctgggccagacagctgtccccatcctcttaacagagcccagcctgctcaaagttgctggcaagaccaggaggtgacagatgggcccctcttggcctctgtcccagctccctgcagccagatggagaggcgcctgcctgcttcccatcccctgaagcatcccaaggacaacccacctccctcctccatgatgaggggaagctggagccctaaacttttatcctccgttggagtggcccaaatctttccatctggagcgagtgagttcattagaagcccaaggctttctccctagtctggccttggcctccagcctggagaagaggtaacatcagctctgaaggccaaggccaccccacccagggcagaaccacatctctgataaaggttttgaagtgaataaagttttaaaaatgagccctaacaatggtgcatgcctactgagcttctcacaccagcttgtgagtctgtgagctagctgggcacaggtgacatgggcatgctgagaactggggaagaggcctgagcctnacagatgggggcccagcgtctcctcctctggaaacttgggcccctgccccagcctcagccctagaaaagggctggctgctccctctcatgcagtc

SEQ ID NO: 2745 - DNA, 1872 bp, Cricetulus griseus
gtgaggccgcggcggaagagaagatgcaggagcagctggagcgccacaggctgtgcaagcagagcttggatgctgccagccagcagcttcgggagcgggaggatggcctggctgcggccagggagactattagttccttgaaagggcgtgtctccgagatgcagttgaatgcaatgggaccagaaggtgcaggtgaaacgcctggagtctgagaagcaggaattgaaggagcagctggaactgcagcaacgaaaatgccaggaggcaagtcagaaggtccaggaactgcaggccagtcaagaagagagagcagaccatgagcagaagattaaagacctggagcagaagctgtgcctgcaagagcaggatgcagctgtggtaaagaacatgaagtctgagctgctgcggctgcctaggatggagcgtgagctgaagaggctgcgtgaggagaacactcatctgagggagatgaaggagaccaacgggttgcttactgaggagctggaaggtctgcagaggaagctgggccgtcaggagaagatgcaggaagctctggttgacctagaattggagaaggagaagctgcttgcaaagctgcagagctgggagaaactggaccagaccatgggcgtgaatctcaggactccggaggacctttccaggttcgtggttgagctgcagcagcgagagctcaccctgaaggagaagaataacaccatcaccagcagtgctcggggtttggagaaggcccagcagcagctccaggatgaggtccggcaggtcagtgcgcagctgctggaggagaggaagaagagggagatacatgaggcactggcccgaagactccagaagcgcattgtactgctgaccaaggagcgagacggtatgcgtgccatcctgggatcctacgacagtgagctgacccaggccgagtactcagcccagctaacacagcgcatgtgggaggcagaggacatggttcagaaggtgcatgcccacagctcggagatggagactcagctgtctcaggccctggaggagcttggggttcagaagcagagagccgacacgctggagatggagttgaagatgctgagggcccagacaagctcagctgagaccagcttcccattctgcaaggaggaggtggatgcactcaggttgaaggtggaggagctggagggtgagcggagtcgcctggaacaggaaaagcaggcactggagatgcagatggagaggcttaccctacagggtgactacaatcagagtcgaaccaaagtgctacacatgagcctgaacccagccagcatggccaggaagcgccagcaagaagaccatgcccggttgcagggggagtgcgaacggctgcggggactcgtgcatgccttggagagaggggggcccatccctgctgacctggaggttgcctccagccttccctcatccaaggaggtagcagagctgcggaagcaagtggaaagtgccgagctgaagaaccagaggctcaaggaggttttccagaccaagatccaggagttccgcaaggtttgctacacactgactggctaccagatcgatgtgaccactgagaaccaataccgcctcacttcccggtatgctgagcaccagtctgactgcctcatcttcaaggccacaggaccctcaggctccaagatgcagctgttggagacggagttctcccgttcagtgcctgagctcattgagctgcacttgctgcagcaagatagcattcctgccttcctcagcgccctcaccatcgagctagttacagccgccagacctccatctagcctccatctgcccgcaggcatcctcattctacagccactggacctctgcctagcctatacc

SEQ ID NO: 2746 - DNA, 1871 bp, Cricetulus griseus
acccggccaggccgcgttcagccccacctccatgacgtcaacccacaatgctgcgcgctgttgtgccttgtagcgagcgtcgcccctggcaacagcggccgaggcagccagggagcgagggcgtcccggcccgcccctttatgcaaatctacgacgtcacctcgggccaatggcgatcgggggcggtgagctcatcgtgggggccgaggctataagggtgcgcgcgagcgtcgcggggcagagtggccggcagcgtagccgggcagcacgggcagcggactgggggcgcacggggccccgggaggccgcggccggggatggaaacgcccttttacggcgaggaggcgctgagcggcctgtctgcgggtgcgtcgaacgtcgccggtactgctggggcccccggcggtggtggcttcgcgcccccgggccgcgcgttccccggggcgcccccgacgagcagcatgctgaagaaagacgcgctgacgctcagcctggcggagcagggagcggcaggattgaagcccgggtcggccactgcaccttccgcgctgcgccccgacggcgctcccgacggactgctggcgtcgccggaccttgggctgctaaagctcgcgtcgccagagctcgagaggctgatcatccaatccaacgggctggtaaccaccactccgaccagcacgcagttcctctaccctaaggtggcggccagcgaggagcaggagttcgccgagggcttcgtcaaggcgctggaggacctacacaagcagagccagctgggcgcggccaccgcggccacatctggggcccccgcgccccccgcgcccggggacctggcagccactcccggagccagcgagacccccgtctacgccaacctgagcagcttcgcgggtggcgccgggccccctgggggcgcggccaccgtggccttcaccgcggagccagtgcccttcccgccgcccccgggcgcgctcgggccgccgccacctccgcatccaccgcgcctggccgcgctcaaggacgagccgcagaccgtgccggacgtcccgagcttcggcgacagccctccgctgtcgcccatcgacatggacacgcaggaacgcatcaaggcggagcgcaagaggctgcgcaaccgcatcgccgcctccaagtgccgcaagcgcaagctggagcgtatctcgcgcctggaggagaaagtcaagaccctcaaaagccaaaacaccgagctggcatccaccgccagcctgctgcgcgagcaggtggcgcagctcaaacagaaagtcctcagccacgtcaacagcggctgccagctgctgccccagcaccaggtccccgcgtactgagcctgacttcggggcgcatgcgcggactcgctgcggtggtgggcgccccggactcctccgaggctcggcgcccccggactcgacaagctggacccccccttcactccgggtggggaccccgagcgcacggcccccgccctcgcgccacctctgtttccccagccccgcgcgtggcagcccctttgtgccgccgagaaggggctcctaggggcgcgcagcctcacgctctgcctttttcttttcttttttgccttttggaagagagaacgggagtgtccgattccgccctatttatgtttctactcgggaacaaacgttggttgcgtgttgcgtgtgtgtttccttgtgttggttttttagagaaacgggaagaagaaaaagctcctcccccttcccctccgctctccctccctctcgacactatccctctcttcttgtttggttttgttttgctacgagtccacattcctggttccgtaatccttggttcgcccgttttgtgttttcagtaaagtcttcgttacgcca

SEQ ID NO: 2747 - DNA, 1871 bp, Cricetulus griseus
tcggccattttgtgccagtcgtccgcaggctgcggctgcagaggatctccccgagaagctgcgaggatgctgtccgtgcgcgtcgccgcggccgtggcccgtgccctccctcgacgggcgggactggtctccaaaaatgctttgggttcatccttcattggtgcaagaaatctccatgcctccaacatgcgacttcagaagactggcactgctgaggtgtcctccattcttgaagagcggattcttggagctgatacttctgttgacctcgaagagactgggcgtgtcttgagcattggtgatggtattgcccgagtacatgggctgaggaatgttcaagcagaggaaatggtagagttttcttcaggcttaaagggtatgtccctgaacttggaacctgacaatgttggagttgtcgtgttcggaaatgataaactgattaaagaaggcgacattgtgaagagaacgggtgccattgtggacgttccagttggcgaggagctgttgggccgtgtagttgatgcccttggtaatgccattgatgggaagggtccaattggttccaagacccgtagacgagtgggcctgaaagcccctggaatcattccccgaatctcagtgcgggaaccaatgcagactggcatcaaggctgtggatagcctggtgccaattggtcgtggtcagcgtgagctgattattggtgacagacagactgggaaaacatcgattgctattgacacaatcatcaaccagaaacgtttcaatgatgggactgacgaaaagaagaagctgtactgtatctacgttgctattggtcagaaacggtccactgtcgcccagttggtgaagagactgacagatgcagatgccatgaagtacaccattgtggtgtcagctacggcttctgatgctgccccacttcagtatttggctccttactctggctgctccatgggagagtattttagagataatggcaagcacgctttgatcatctacgacgatttatccaagcaggctgtggcttaccgccagatgtcgctgttgctgcgccgaccccctgggcgtgaggcctatcctggtgatgtgttctacctgcactctcggctgctggagagagcagccaagatgaatgattcttttggtggtggctctttgactgccctcccagtcatagaaacccaggctggtgatgtgtctgcttacattccaacaaatgtcatttccatcactgacggacagatcttcttggaaacagagttgttctataaaggcatccgccctgccattaatgtgggtttgtctgtgtcccgtgtcggatctgctgcccagactagggccatgaagcaggtggctggtaccatgaagctggagctggctcagtatcgggaggttgctgcttttgcccagtttggttctgatcttgatgctgctactcaacagctcttgagtcgtggtgtgcgtctgaccgagttgttaaagcaaggacagtactctcccatggctattgaagaacaggtggctgttatctatgcaggtgtgaggggctatcttgataaactggagcccagtaagatcacaaagtttgagaatgctttcttgtctcatgtcatcagccagcaccagtccctcttgggcaatatcagggctgatgggaaaatctcggaacaatcagatgcaaagctgaaagagattgtaacaaacttcttggctgggtttgaaccttaaagccctttgaatccatgtcagacactgctttggttttgtcatttgttctggtgaaatcagctccatttgtaaaaggactgctctcgtactcctgatgtacagaaattacataaataaaagttccgtattgtgtgactagtttg

SEQ ID NO: 2748 - DNA, 1871 bp, Cricetulus griseus
gagaagacagacatacacaatactgaaaaagtaaacagtgaatatctgaggggctgctgtaactgtccctgctgtttgtacttctggttgtttgtctttcccatctgctccacgagagtctccttgtggtggtaaatattctagaagtcaatttgatgccattacaaagcaaccaagcagcatttcttacaacttcacttcttcaacttcctggtatgaaaattcaccaaaacctcaaatacatgcctttcttcaggcaaaagaagagttgaagcaacttaagctgcctgggttcatgtacagtgatgttcctctgctggcacccctcagcgccttactttagtatggaagaagacgacgtctgtgtccatggtttagatgaaatagtgcagatctccgactagtaaaacaatacattgaacttggactgcctggggaagagttgattttcttattgtctgagagaaaccagaatgatacttttgctgattttgactgcatgactgaccgccttttggatgagatcatacagtatattcagatatatagtttaacagtctcaaaaataagctttattggacattcattgggcaatttaataatccgttcagtgcttacaaggccaaggtttaaatattacctcagcaaacttcatactttcctctctctttctggacctcaccttggcacactctacaacagcagtgctctcgtcaatacaggtctctggtttatgcaaaaatggaaaaaatcaggctctcttttaaaggacaagcagtcaggacaaatctattcagaaatgatccacaacttgcttcgcccagtgctgcaaagcaaaggctgtaatttggtcagatacaatgtcattaatgcattgcccaacacggctgattcgctcatcgggagagctgcacacatagctgttcttgattcagaaatattttagagtaagttttttctggttgctgccctcaaatattttcagtagaacagaagcatcattaaagacttactaattacctcattcagcagtggtttaaataatgtattatagtgtgtagatgttaagttctaagacatatttatacctttttatatggaagataatttatatcatccatgtgtagagccttttaaacatcaactttactttctaggtaatgtggctgtgcaatattttttaattttatcttttacttttctatttttcatatattttgctacctaagtatttcagtgaaaccttgatcccatatgtatgtctgatcatttcttattggcttccacaatccttattcagactacatcacattaaaggctgttattgctagaatagcatagtattttaaattttctaatttggggctttcagtggacacaaaattttacttttaacactttattctgttttaactggaagtaaaaaatggctgctaaaatgtatttttgaaaaatctctttaatcctaaaatactaactttacatttgctcaaacaggtggttcatacatgccaatgttttaaaggtttttctataaaatcattattgttgctattaaacatatgtcatgcttattaaatatatatttttactggtaatttcaacattatttctcatattgacttttattactggaacttttcttgttcattaggagcttataaagattttgaatgccctctgccttgatttggttggaattttgttaaatttagtaatgttgcttgaattttctcacagcagttctttaacccttttcatagagttccttgtacgtaataattaaatgttgaaatttatgaaatacttttatgaatttaaataatttttaaatactattaaaatttatggagctaaagagtcatgtaaat

SEQ ID NO: 2749 - DNA, 1871 bp, Cricetulus griseus
gtcgagatgtcgtagaattctgcttttaaggtaacctggagaggggcagttgccacctggctgaagtgtggagaggaagtgagcgccccatcccctatgaccacatgatgtatgaccatctgcagaagtggggacctcgaagggaagaagtgaaaattctttcttcgaccatcgaggactctccagctgagagcagtgaacaaggtggtcgtcaaacccaagagcagagaactcagagaaatgttaacgagtgtacctggagaaaagcgcactgagaatggggttgaaatccacgagttgaactcaccctctcagaacttcaagatatggcagccaggcaacagcagcaaattgaaaatcaaacagacaaaatgttaggttcgagttgaagcccaggaaaacaagactgaagaagatccgtgccatgagaggacaagttagactacagcaaaattatgaacggcaatctgtcagctgagatagaaaggttcagtgccatgttccaggaaaagaaacaggaagttcagactgcaatcttacgagttgatcagctcagtcagcaactagaagacttaaagaagggaaaactgaatgggttccagtcatacaatggcaggttgacaggaccagcagcggtggagttaaaacgactataccaagagctacagcttagcagatgtggacaatggaaataccaatgccaatggcaacttagatcgaggcctcctcccctcccccggccccaccagccccggttcctgatgagcttgccccatcctcagatgccaatgataatgagttaccttcccctgagccagagctcatttgcccccaaacgactcatcaaactggcctgctgaggacaacaacaacaatgtggccccagtaccctccacagagcagatcccaagtcctgtggctgaggctccctcggaggaagaacaagtccctccagctccactttcccccgtcgtcccatcctccagcaacatctgcgagcaaacggaccaacctgaaaaagcctaactcggaacggacagggcatgggctgagagtgcgcttcaatcccctggcactgcttcttgatgcgtccctggaaggcgagtttgatctggtgcagaggatcatctatgaggtggaagaccctagcaaacccaacgacgaagggatcacccctctgcacaatgctgtctgtgctggccaccatcacatcgtgaagtttctgctggactttggtgtcaatgtaaacgctgctgacagtgacggatggacaccgctgcattgtgctgcctcttgcaacagtgtccacctctgcaagcaactggtggaaagtggggccgctatctttgcctccaccatcagtgacattgagactgctgcagacaagtgtgaagagatggaagagggttacatccagtgctctcagtttctgtatggggtccaggagaagctgggagtgatgaacaaaggcactgtgtatgctctgtgggactacgaggcccagaacagtgatgagctgtccttccatgaaggggacgccatcaccatcctgaggcgcaaagatgaaaatgagactgagtggtggtgggctcgtcttggggaccgggagggctatgtgcccaaaaacttgctggggttgtatccacggatcaagccccggcagcgcacacttgcctgaacttcccctggagtaccagtctcattagctcccaggagctactagagagggttccagctgccctggaggaacagaagctaggacggcctcacggtgctcactttagcagacggacagtatccacaatgtgaatcccagcttcccagcaatacactagctgtttcccatcctgaaaaaaaaaaaaaaaaaaaaa

SEQ ID NO: 2750 - DNA, 1871 bp, Cricetulus griseus
  modified_base (1048)..(1048): a, c, t, g, unknown or other
gaagagaacatggcccttcgatccaaggcttgtcatatcaagacagaaacttttacttatgaagagaaggaacaacagctggtcaatgactgtgttaaggaacttcgtgaaaccaatgcacagatgtccagaatgactgaagaactgtcggggaagagcgatgagctgattcgataccaagaggagatctcttccctactgtctcagattgtagaccttcagcacaagcttaaagaacatgtcatcgagaaggaagaactaagacttcacctgcaggcttccaaagatgcccagcgacagctgacgatggagaactcgacattcaccttcaccacctgtaggatcttaccatccctctgacatcacccaggtcacccctagctcggcttcccatcactatccagtggaagtagtgggagcagctcctccaacacagctgtgaactctcctgccatgtcctatagactcagcatggtgaatccatcacaaaccggcgcgactccaccataacgttcagtagcacacggagtttagccaagcttctgcaggagcgaggcatctctgctaaggtgtaccacagccctgcttcagaaaaccccctcctgcagcctcgccccaaggccctggctaccccttccacaccaccaaattccccatcacagtctccatgctcctctcccttgccctttgagccccgagtccatgtctctgagaattttttggcctcccgaccagctgaaacattcctgcaagaaatgtatggcttgagaccttcaagggcccctcctgatgttggccagctgaagatgaacttggtagacaggctaaaaagactagggatagccagggtggtcaagacccctgatccccaggagagcgggaagagccgggaggcagaaggtggctctccaaaaaggcagactctgctgtttatttaaattcaagtggcagtttattgggtggactgaggaggaatcagagtcttccgatcatgatggccagctttggagccccagtttgcacaacctcacccaaaatgggtatcctnaaggaagactgaggctcaacactaactgacctcatgtatcaattagcacatgaagggtagagaagcactgagaatagggactggtctaagttgtctgttactgagactgtagatgctctccctgcctatgcctgctcaaattatgcatccatccagtggtacgtcacagcattagcaaaataaggagttttatcctgtcccttacttcaaaaatggagactttctcattgcagaactttcaggcactgagaacccaaacaccacccagattcctttgaatttatggttactaaaacttcagtttttttaaacttgtatttttgtacaacacaacaaaaattttaaaaacaataatgtgagcgggcttgggagagataaagaaggaaaataggggaaaattggaaataaagtttttcaggatatttcttctggataatgcggtggccaaggaatgcaaacataattgcatgtttctcatgtttccttggaggccggaagggtttaaaccagaagtgcaatcagtaggatttagattatgttgtatatttatatatgtaaatttttaagaaaagttagttgtaactagctttttccaaagtgtgctatgcatatttttaatgaaagatgacatatatttgcacaaaaattctcaggcacattaaattgtaaactgcagtaaaacccaggtgcttgctttgaaagtgtgtttttgttggatttcattgttttccttgtgtaaattaaaaacagctgcctagttctcggtgtctttaaatagtaaaaaaaaaaaaaaaaaaaaaaaaaaaaaaaaaaaaaaaaaaaa

SEQ ID NO: 2751 - DNA, 1870 bp, Cricetulus griseus
  modified_base (1867)..(1867): a, c, t, g, unknown or other
atctggagcagcagcctcagggctggctgagtagctggctccccacttggcgccccacttccatgtctcagctgaagaatgtggaagccaggatcctccagtgtctccagaacaagttcctggcccgttatgtttccctcccaaaccagaacaagatctggacagtgactgtgagcccagagcaaaaggaccgcacccctctggtgatggtacatggctttgggggcggtgtgggcctctggatcctcaacatggattcactgagtgcccgccgcacactccacacctttgatctgcttggctttgggcgaagctcaaggccaacattcccaagggacccagaaggagctgaagatgagtttgtgacctcaatagagacatggcggggagagcatgggaatccccacccatgatcctcctggggcacagtttggggggattcctggccacatcttactctatcaagtacccagaaagagttaaacatcttatcctggtggacccatggggctttcccctacgaccaactgaccccagtgagatccgtgcacctccaacctgggtcaaggctgtggcatctgtcctgggacgttctaatcctctggctgttcttcgagtggctggtccttgggggcctgggctggtgcagagattccgtccagacttcaagcgcaagttcgcagacttcttcgaggatgataccatctcggaatatatctaccactgcaatgcacagaatcccagtggggaaacggcattcaaagccatgatggagtccttcggctgggcccggcgccccatgttggagcgaattcacttaattcgaaaagatgtgcccatcaccatgatatatggggctaacacctggatagacaccagcacggggaaaaaggtgaagatgcaaaggccggactcctatgtccgggacctggagatcgagggtgcatcgcaccacgtctatgccgaccagccacacatcttcaatgctgtggtagaagagatctgtaactcggttgactgagctgctctgaggaagaggaggaaactagagttgccgtcacctcccagttttagccagaacctctgtccttttctcaccaactaacacgtgccagccaggcagagtcgggctgttcccaagataggaccacagtgaaaaagcactaaggttccatgcagacaccactgctgtggagctggtttcaaattagtcttgcgccatattctaacctgttacacaggtacactgttatcttgccctgtgtctcaatcctggttgcctaaattgggacacttgagatcctttcccctacttcctcccactgttaggctctaagcctcttctgtgccttgggccctgaagccccatgtgtagtatagagcaaatatggctcctggtagagaaggggaaaggcccttccaccctagagtcatgtctggatgcacaaagtccacaagtacctgcagcattttctacatagccccagagctgagagcccctgcccatgcctcactgaggagctttaggccagcagttctctgtcctcatcagccacacaatgcttctcactgcctgaccctctatgcctgccatctgtcaccgtggtctccaactcactctgcttcaaaattacccatcagccctctcccatggatctcattccaggtcctgctctaaggctctgggtactaggctgggcctggccccgaggcagggcagttcctgcctgctccttctcttttataaagccaaccctttcaccagaatagtattaactcctggtgctttgtactactggtccagctgccttgggcttcttttctatattaataaagaagaagttaaaaactaaaaaaaaaaaaaaanaaa

SEQ ID NO: 2752 - DNA, 1870 bp, Cricetulus griseus
gagaagacaaacgaatgtaaggaatgtgggaaaaccttcttctgtctgtcagccctgacagcgcaccagaggattcacagcggggaaaagccctacgagtgccccgagtgtgagaagaccttcttttgtcagtcggccctcagtgtgcacctgagaagccacacgggagagaagccctacaaatgccaccagtgcggcacgtccctgtgcactaagtctgctctcgctgcgcatcaggtcatccacggaggcaagacgtccttggaatgcagtgagtgcgggaagctgttccaccttaagacaacactcgccatacatcagagaactcacgccggagagaaccacggcgagctagtaaatgggtcgacgcacccactgccaattccaacggcagtgagcagaaaaaagtggacccgaaggagaatcactacgagtgccacgagcacaagcccacagtccacagaaattcgcaccactttgcacataggagaaccatatgggagaggccttacgagtgtcacgagtgtgggaggacctactgccggaagtctgctctccggcaccatcagatgacacacacaggagagaggccctatgagtgtaaggactgtggcaaaaccttctaccagaaagtctcctttatcgagcaccagcgaactcacactggggaaaaaccacataagtgcaaacagtgcgggaaatctttccgccacaagtcagcattcacagtgcataagagaattcacacaggggagaagccgtatttgtgtaatgagtgtggcagaagctaccgtcggctctggactctgactgaacaccagaaaatacacacaggggagaaaccctatgaatgtaacacatgtcagaaaacatttcgccataagtcaaacttccttttacatcagaatactcacaagaagtaaattccagcaaggcaacaggtaatttacataatgctcagatcctgaattatgcatgaaggtagtgacagaccccaacccctttatctgcagaagtgaggcgacagactaaccatagttccccttgcccacctgcagcaactctcacgtgagtgagcatttgctgaggccgagtcactggagttttctcatgaggggtagcgtgtaagtgcccctggagctttcaggtaagctaagaaaacagcgattacaggtaccataacaagaacagaaaaatgtagtaagcagatttgaatagtgaagaggatttggggagtgttggaattaaaacgctgtctctgctttagtattttaaatacctctgtccccttagtggtttggttatgtcagtgtttaaaagaaaaaaaaagaaatctcaaatttctaataaacatgtcagaaggggtgttatttagaatctacttatcagcttctgaagtctctctttggcctgtctgctgcctttggttgtgatgttgggttcttggtggggagagctgcccttggtttgagacccatcggaaattccaatgtgaacaggagtggtctgtttgttcagtttctattttatatccttcagcaaggtaaacacagttgtgaatgcacatctatttgatgcatataatatatgctgaaacatgaatatatgtggtgtatcaataatcttttcctgaaatttttagtaattacttaaaagatttgctttgcttttgcaaatggaattttatctatttgtttttaaaattactgacggaggcctgacaaggactagcaagcaaaggtgcttgctggcaggcatgacaacctgagttcaatctttgggccccacatgataggagagaactgcttttcttgcaagttatcttggcttccacaagtctgattggcacgcgcacacacagaaataaata

SEQ ID NO: 2753 - DNA, 1869 bp, Cricetulus griseus
  modified_base (432)..(432): a, c, t, g, unknown or other
gacaagacaccaaagacagactccccaaaagcacggccactaaggcagacaaaaggaagaaggtgtgcagcgtatgcaacaagcgcttctggtccttgcaggacctcacccggcacatgaggtcacacacaggagaaaggccatacaagtgtcagacctgtgagcgaaccttcaccttaaagcacagcctagtgcgacaccagcggatccaccagaaagccaggcacagcaaacaccatgggaaagacagcgacaaggacgagcgggctgaggaggacagtgaggatgagtccacccatagtgctaacaaccctgtctcagagaatgaggccgactcagctcctagcaccagcaaccatgtggccatcaccaggagccggaaagagagagagcagcgcttttaatttcctaactggccaatcccttggtgcncaaagcggggtcctttcattcttgagtgtcctatacaggcagtagatgtccctcatcagcagaatgaaaccgctcctactgtagctggcctctgttcagcaccctgtcctttagctgagacccgaggatgcctgagccacactgctactagagctcctgtgcttgtcccttgctgcatacccttttgtccaccagtttctagtggctaaaatccaaccaccctgacttcaatggaagacagctattctagagataatgaaaagtgatatatttgcatattaaaaaaatgttgagttatatatgattttttaaaactgtactagggatgtatgaaccagtttaaaattgagatattatttactgtacagtagagagaaatcagaaccagtgaccccatggtcttctaagttaaagccagctcctgcatcccttagttgttttttattattattattattattattattattacaactgttattttcattgttattattggggtttcttgtgttttgtttttctttgcaactctccacactaaactcatgatcttgtggggagaagccatgactgaactctaggctgcggtaagatgtagcagggattggctcccagcagcagccatagccggggctgcagctcgcaataatcactattgatttaaagctttatttagtctgatctattcttcatagtcaataaggtcttgccacattttattagtgagattgagaaatgtactatttgtttgttgtcctgcccgccttccttcccacatattaaactgtgaaatttgtgatttgtttaaacgctgggtgaatcatagtttagtttgcatgtccagctaatttgtttctatacattttgtttgattctctttctcctcagggcttttacaaatatatatatattatatatgtatatatatatggatcgtctgaaaaatttttgaggtgctaaattttttctttgtttttgttttttgttttctctttaatggacacaatgctgagattcaatcactacataaaatacctggctgtgaaaacaaacaaaaagaccccgtggggctgttcttcaagcagctctggggaaggcccgtgagacagacgctgatttcagatacatcatcatcatacatacatctcgtctcctctcctctctttcctcaagaagttgatcctgatgatttcagcccatgcattaaacaggaaacaataataactgtagaattcatatttttctaaagggaacttaaaaactgctgctacatgtcatgtacaaaactggtttatgccacatgaacagaatcacaagtttggttttggtactttttgtttctctttgtactcagttgtatagaacttccaaattcagaatgaaaagaaagctgttctgtatcaaaccatctaagcaataaatgttatatttaaaaaa

SEQ ID NO: 2754 - DNA, 1869 bp, Cricetulus griseus
cgatgacttcaagaagatgcgtgaacagattggccagacacaccgagtctgtctcctcatctgcaactcgcccccatacctcctgccagccctggagagcaccacatactcaggctgcacaacggagagcctggtgcagaagataggggagcgtggtatccacttctccattgtttctccaagaaagctgccagcccttcggcttctgtttgagaaggcagctcctcctgccctgctggagccattgcagcaaccagtagatgtgagccaggacccgaggcacatggtgctagtgcgtgggctcgtactgcctgtcggcggcagctcagtcccaggccctctgcagcccaagcagccagtccccctgccaccaactccacctgtcccaccacagtaccaggtccctgggaacctaagtgctgctcaggtggctgcacagaatgctgtggaggctgccaagaaccagaaggctggacttggcccacgcttctcacccatcaatcctctccaacaagctgcttcaggagtgggcccccccttcagtcaggccccagcacccccattggctcctgggcctcctggagcccccaagccacctcctgcttcccagcctagcctagtctccactgtggcccctggaacaggcctggcacccactgcacagcctggggctccatccatgcaggcaggcactgtggccccaggtggggtcagtggtccttccccagcccagcttggggctcctgcccttggtgggcaacagtcagtgtccaacaagctcctggcctggagtggggtcctcgagtggcaggagaaaccaaagcctgcatctgtggatgctaacaccaagctgacgaggtctctgccttgccaggtctatgtgaaccatggagaaaacctgaaaacagagcagtggccccagaaactgatcatgcagctcatccctcagcagctgctgactaccctgggccctctgttccggaactcaagaatggtccagtttcacttcaccaacaaggacctggagtccctcaaaggcctctaccgcatcatgggcaatggcttcgcgggctgcgtgcacttcccgcatacagccccatgcgaggtgcgtgtgctcatgctcctgtactcatctaagaaaaagatcttcatgggcctcatcccctacgaccagagtggctttgtcaatggcatccgccaggtcatcaccaaccacaagcaggtccagcagcagaagctggagcagcagcgagggatgggggcacagcaggcacttccaggcctgggccccattctggaggaccaagcgaggcccccgcagaacctactccagctccgtgcaccacagccccagcctcagggtgctgtgggggcctctgtggctacagggcagccccagccacaaggtactacccaggcccccacaggagcaccccagggtcctccaggaacagcccccggcccaccaccttctggacctatccttcggccccagaaccctggggccaacccccagttgcggagcctcctccttaacccaccaccgccccagactggggtacccccaccccaggcctccctccaccacctgcagcctccaggggcccctgcactgctgcctccaccacatcagagcctggggcagccccagctggggccacaactcctccaccctccacctgcccagtcttggcccacacagcttccccagcgggctccactgccaggtcagatgctgctgagcgggggtccccgggccggtccccagccgggcctgcagcccagcgtcatggaggacgacatcctcatggacctcatctgaacccaacacccaataaagttccttttaaacgaaaaaaaaaaaaaaaa

SEQ ID NO: 2755 - DNA, 1869 bp, Cricetulus griseus
  modified_base (342)..(342): a, c, t, g, unknown or other
ccagagaggactggctcctggtcaggactaccaggtcactgtccgtgctctacgagggaccagctggggtcctcctgcctctaagaccatcacaaccatgattgacggtcctcaggacctccgagtggtggctgtgactccgaccacactggatctcagctggctgcgcccccaggctgaggtggaccgatttgtggtgtcctatgtcagtgctggcaaccaaagggtgcgactggaagtcccccctgaggcagacaggactcagctcaccgacctgatgccgggtgtggagtatgtggtgactgtcactgcagaacgaggccgtgcagtcagctaccccgnttctatcagggcaaacacagcaaatacaagatgaacctgtatggactccatgatggtcagcgggtgggccccgtgtctgttgttggggtgacagctgcagaagaagagacccccagccccacagagcccagcacagaggccccagagccccgtgaggagccgctcctgggagagctgactgtgacaggatcctccccagactccctgagcctctcctggaccatacctcagggagactttgactccttcactgtgcagtacaaggacagtgatgggcgtccccaggtggtgcgtgtcgggggccaggagagggaggccaccgtgagagacctggaacctgggcgcaaatacaagatgaacctgtatggactccatgatggtcagcgtgtgggccccgtgtccaccgtgggcccatccccggcctggagccagaccacaagtacaagatgaacctgtatggcatccacagtggccagcgtgtgggccccgtgtctcgttgtcggggtgacggctgcagagaagaggtgggccccgtgtctgttgtcggggtgacggctgcagaagaagagacccccagccccacagagcccagcacagaggccccagagccccgtgaggagccgctcctgggagagctgactgtgacaggatcctccccagactccctgagcctctcctggaccatacctcagggagactttgactccttcactgtgcagtacaaggacagtgatgggcgtccccaggtggtgcgtgtcgggggccaggagagggaggccaccgtgagagacctggagcctgggcgcaaatacaagatgaacctgtatggactccatgatggtcagcgtgtgggccccgtgtccaccgtgggcgtgacccaggagagggaggccaccgtgagagacctggaacctaagaccaccaccatcttcctcaacggcaaccgcgagcggcctttggatgtgttttgtgacatggagactgatggaggcgggctggctggtgttccagcgacgcatggacggacagacggacttctggagagactgggaggagtatgcccatggttttgggaacatctccagggagttctggctgggcaatgaggtcctacacagtctgacgcaggctggagactactcgatgcgcgtggacctgagggctggagatgaagctgtgttcgcccagtatgactttttccgggtagactcagcagtggagaactaccgtctacacctggagggctaccatggcaccgcaggcgactcaatgagctaccacagcggcagtgtcttctctgcccgtgatcgagaccccaacaacctgctcatctcctgtgccgtctcctatcgtggggcttggtggtacaggaactgtcactatgccaacctcaacgggctctatggaagcaccgtggaccaccagggagtgagctggtaccactggaagggcttcgagttctcggtgcccttcacggaaatgaagctgagacccagaaacttccaggcccccaccaggggcagctga

SEQ ID NO: 2756 - DNA, 1869 bp, Cricetulus griseus
gatggctgcggccatgcgaggccttgctgtgtgtgcgcagcgggcggcggagcggctcggacagcaggggcagcgacgacactagctcagcccttaaacactcttctagaacgccatcccagcctccacccgcttcgtccgagatggatctggctctgggccccggtgcagcggggcccagcaacgtcccggccttcctgaccaagctgtggaccctcgtgagcgacccggacaccgacgcgctcatctgctggagcccgagtgggaacagcttccacgtgtttgaccagggccagtttgccaaggaagtgctccccaagtacttcaagcacaacaacatggccagcttcgtgcggcagctcaacatgtatggcttccgaaaagtagtccacattgagcacggtggcctggtcaagcctgagcgggatgacaccgagttccagcatccatgtttcctgcgtggccaggaacagctccttgagaacatcaagaggaaagtgaccagcgtgtccaccttgaagagtgaggacataaaaatacgccaggacagtgtcaccaggctgttgacggatgtgcagctgatgaaggggaaacaggagtgtatggattccaagctcctggccatgaaacatgagaacgaggccctgtggcgggaggtggccagcctgcggcagaagcatgcccagcagcaaaaagttgtcaacaagctcattcagttcctgatctcactggtgcagtcgaaccggatcctgggggtgaagagaaagatccctctgatgttgagtgacagcagctcagcgcactctgtgcccaagtatggtcgacagtactccctggagcatgtccatggtcctggcccatactcagctccatctccagcctacagcagctctagcctttacacctctgatgctgtcaccagctctggacccataatctctgatatcactgagctgactcctaccacccctttggcatccccaggcaggagcatagatgagaggcccctgtccagcagtaccctgatccgtgtcaaggaagagccccccagcccacctcggagccctcgggtactggaggcaagccctggccgtccatcctccatggatacacctttatctccaactgccttcattgactccatccttcgagagagcgagcctaaccctgctgcctcaaacacagcccctgtggacacaaccggagtccatgcccctgctccacccccttctacccctgagaagtgcctcagcgtagcctgcctagacaagaacgagctcagtgatcacttggatgccatggactccaacctggacaacctgcagaccatgctgacaagccacggcttcagcgtggacaccagtgccctgctggacattcaggagctcctatctccccaagagccccccaggcctattgaggcagagaacagtaactctgactcagggaagcagctggtgcactacacagctcagcccctgttcctgctggaccctgacgccgtggacacggggaacagtgaactgcctgtgctctttgagctgggggaaagctcctacttctctgagggggatgactacacagacgaccccaccatctctcttctgacgggctctgaacctcccaaagccaaggaccccactgtctcctagaggtcccaggagctgtcaggatggcttgtggctggcccccaactacacctaggacgtggctggtcctggggagacaagacaggcaatccagggcatcctaggtcaagccaccatagccccagtggaacatagatggaggttggcctgggcagtgcctcaggtcaagaggaagatcctgagggctgcatacctgctgccttcaccccagccccaggtc

SEQ ID NO: 2757 - DNA, 1869 bp, Cricetulus griseus
agggcggctgcgaggccgacttaacgtctcccgcacctgagctccctgcagttccttccactttctcctgccctgagcaccgaggctccggccgctggcctctcgccacttccctcgtgccatggccccgaaacggcagtccgcgctcctgccccagtccaagaaacccaagtcggtccccgcagcgaagctggaccgacaagccggcctcgctcggcctgccgaagggagaaaaagaacagcaagaagcaattgaacacattgacgaagtacaaaatgaaatagacagacttaatgaacaagccagtgaggaaattttgaaagtagaacaaaaatataacaaactccgccagccattttttcagaagaggtcagaattgatcgccaaaatcccaaatttttgggtaacaacatttgtcaaccatccacaagtgtctgccctgcttggggaggaagacgaagaggctctgcattacttgaccagagttgaagtgacagaatttgaagacattaaatcaggttacagaatagatttttattttgatgaaaatccttactttgaaaataaagttctctccaaagaatttcatctgaatgagagtggtgacccgtcatcaaagtccacagagatcaaatggaaatctggaaaggatttgacaaaacgctcaagtcaaacacagaataaggccagcaggaagaggcagcacgaagagccagagagcttctttacctggtttactgaccattctgatgcaggtgcagatgagttaggagaggtcatcaaagacgatatttggccaaaccccttgcagtactatttggttcctgatatggatgatgaagaaggagaggcagaagatgatgatgatgatgatgaagaggaggaaggcttggaagatattgacgaagaaggggatgaagatgaaggtgaagaagatgaagatgatgacgagggggaggaaggagaggaggatgaaggcgaggatgactagcacagaagactgatggattccaaccctcttttttattttcttttattttcaattttctccagtccctgggagcaagttgcagtcatttccctcccctccccaatccctcttgtgctcagtcgccctgtttttgaggtctcaacaccatggctctcaacttatttggggggaaataccttgagcaaaatacaacgagaaaagaatctccactcttctgttctaaattcatttttatcctcgtctctaaatatatggataaaaccgccaatgtgctctgtggggggaaaagaaaagccctctggctccctgggctctgcaggagactggggggtgctaggcccctgtgtagtagtgcatagaattctagcttttttcctttctctgtatattgggctcagagattacactgtgtctctatgtgaatacagacagttagcatttaccaacatgtatctgtctactttctcttgtttaataaaaagaaaaaaaaaaaaaaaaaaagggggggtaaagaaggtcagcgaagggtgggtttgaggtgtcgtggggggggttagtgggcattgtgacaacatggcttctcctttggcatgtttaattgtgatgtttaacagacatccttgcagtttaaggtgacacttttaaaataaaattctctcctaacgatgacttgagccctgccactcaatgggagaatcaacagaacctgtagggttttatttggaaatgacattctctgttgtaactttatttttaatttttttttttattttttttttttatttttttggttttcactggaaggaaaaagatgctcatttttaaatgttaaagtgtacaagttgctttgttacaataaaaccaatgtgtacacaaa

SEQ ID NO: 2758 - DNA, 1868 bp, Cricetulus griseus
tgagtgtgtagctgttggggagtctgcatcagagaggctgaagcctgaggagaccagaacaagggagaagcccctttgtgcagctgacaaggctattcccttgctaaggcagaacactgtcccaaagttgcctgctgtccatcctgctcgtctaaggaagctgtccttcctgcccactccacgctctcagggtcctgaggacgtggtacaggctttcatcagcgagattggaatcgaagcatcagacctgtccagtctcttggagcagtttgagaaatcagaagccaaaaaggagtgtcctctcccggctcctgctgacagcttggctgtaggaaactcaggcattgacactccccaggagaagagacccctagaccggttacaagccccagaactggccaacgtggcagggctcacccctccagctacccctccccatcagttatggaaacccctggctgctgtctcactgttggccaaagccaaatctcctaaatctaccgcccaggagggaaccctgaagcctgaaggagttacagaggccaaacatccagctgcagcctgcctccaagatggggtccatggccctagtcccgtccatgtgggctctggggaccatgactattgtgtccgaagcaggacaccccccaaaaagatgcctgccctagtcattccagaggtgggctcccgatggaatgtcaagcgccatcaggacatcaccatcaaacctgtcttgtcattgggcccagctgctcccctgcttccatgcacaacttcccaggggccacttgaccacaggactaacagtgagcaggcagagccctcggtgccttgtcttgccccatccaccttgctgtctcctgaggcctcaccctgccggaatgacatgaacactaggactccctctgagtccccaggcaaacagcggtcaatgcgctgttaccgaaaagcctgcagatcagtcagccccccaggtcggggctggcagggccgccgtggccgcagcagccggtctgtcagctctgggtccaaccggaccagcgaagcgtcctcatcttcatcggtgtcttcctcatcccgatcccggtccaggtcccctcccccccccccccccccaccaagaagaggtccagctgcagttcctctggacgttccagaaggtgttcatcctcttcgtcgtcttcgtcgtcgtcttcctcctcttcctcctcctcctcctccagttccagaagccgttcaccctctctgtcccctcggaggagaagtgaccgaagacggcggtacagctcttaccgttccagtgaccattaccaaaggcagagggtgctgcagaaggagcgtgcaatagaagagagaagagtggtcttcattggaaaaatacctggccgcatgactcggtcagagctgaaacagaggttctctgtttttggagagattgaggaatgcaccattcattttcgtgtgcaaggtgacaactatggtttcgtcacttaccgatatgctgaggaggcttttgcagccatcgagagtggccataagcttcggcaggcagatgagcagccctttgatctctgctttgggggccgcaggcagttctgcaagaggagttactctgatcttgactccaatcgggaagactttgatcctgctcctgtgaagagcaaatttgattctcttgactttgatacattgttgaaacaggcccagaagaacctgaggaggtaaccctgggcactcctcccccacccgttttctctggaggtgcccaacctcctttccccccttcccactctagggggagagctgctagtgtggaaatgactgttttataaagaaattgggaaaaagttaaataaaaatgtgttaaa

SEQ ID NO: 2759 - DNA, 1868 bp, Cricetulus griseus
tggcacctggaggaagcccagggggctcaggctcagccctgagtgcccagtccacggaggccctagaaggaataagtgggcggggtcccaaaactagtggatgtcaggaggaggtgggcaccccgagaaaagggctgggtgcccgcctccaacagctgctcaccccttcccgtcgctcctctgtgtcccgcatccccccacctgagttgccccctgaccttcctcctgcggcccgccgaagtcccatggatagccttctgtggccccgagaacgccctggatccactgcttctgaggtaagttccgcttctctgggcagtgagtgggatctctcagagtcttctctcagcagcctgagtcttcgccgttcctcagagcgcctcagtgacacccctggacctttccaaccaccctccctggaaattctgttgtcgagctgctccctgtgccgcgcctgtgattcgctggtgtatgatgaggaaatcatggctggctgggcacctgatgactctaacctcaatacaacttgccccttctgcgcctgtccctttgtgccctgctcagtgtccagcccttgattctcgacccagtcgcccccacgcccaaagtctatggggagtgcttcccggagagttgagaatggggcatgggcatacctgagccctctggtgcttcggaaggagctggagtctctggtagacaatgagggcagtgaggtgttggcattgcctgagttgcctgctgcccaccccatcatcttctgggccagatcccacagcgagtagtatggccaggcccagtaccctcttgtcttagcttggcattactggagtcagtactacgccatgttggactcaacgaggttcataaagctgttgggctcctgctggaaactctagggcctcctcccactggcctgcacctgcagagaggaatctaccgtgagatcctattcctgacaatggctgctctgggcaaggaccatgtggacatagtggctttcgacaagaagtacaagtctgcctttaacaagctggccaacagcatgggcaaggaggaactgaggcagcggcgggcacagatgcctactcccaaggctattgactgccgaaaatgttttggagcacctctggaatgctagggacccttaagtcttcctctcctgccttgggtagagaggtgaggaagagcggattctagacatagcttgactccctattcccttcatagaggaattggaaacgagctgttcagccataggctccaagtggaaatagcaggaagaggaattcactgttaccaaaagtcacaattcccctagctccaacctgcccaatatgtcatgctgatgttggggagagctggggaagttggcacaactccattctttctccatcctattccagggactcctctccagggtaccctcagatatgaagcaccctggtagaattagaagtttttgttttaaaaaacaactggaaagatttagagttcctgagcctttgccctgaatgggagggaggaatttcattccccacctctcttccctgacattgctaaaggagcccacggcaatcttagtgttgtattttatttagttatttattctgaggccacagctcctatacttatgagattctcaaggagcataagaaagagaagggaattaagtttgtagcttccttgagagccatgcactgggacccacgaggaccgttccaagcttcccttgggaagaattggtgcctcttgtagtcccggtccttcttgtccactctacctgggggaatgcctctcctgtccacggccttgacctgtgcaataaggattgttctctgcaaagttttgttgtatgtaaatatagt

SEQ ID NO: 2760 - DNA, 1868 bp, Cricetulus griseus
  modified_base (1861)..(1861): a, c, t, g, unknown or other
gaccgtatcctgaacaacctcactcagtggccctcggccttgatgcccggaacaaccttaagatctggttcaacaacaagggctggcatgccatggtggcctttgtgaaccgagccaacaatggactcctacatgctctcctaccaactggcacatcccaccatgcccatggcatcactacattcaaccatccttttgaacctgaccaaggagcagctgtctgaggctgcactgatggcctcctcggtggatgttcttgtctccatatgtgtggtcttcgccatgtcctttgtcccagccagcttcaccctggtcctcattgaggaacgtgtcaccagagccaaacacctccagctgggcagcggcctgccccaaaccctatactggcttggcaatttcttctgggacatgtgtaactacttggtggcaatgtgcatagtggtgttcatcttcctggccttccagcagaggcgcttgggagacaagcaattccagtcaccccttcgctgggacgtcatcggcaagaaccttctggccatggtggtccagggacccttgttcctcctcatcacactcatcctccagcaccgcaatcatctcctgccacaatccaaaccgaaactgctaccacccctgggagaggaggatgaggacgtggctcaagagcgggggcgggtgaccaagggggccaccacgggggacgtgctggtcctccgggacctgaccaaggtgtaccgtgggcagaggagcccggctgtggatcgtctatgcctggggatcgcccctggggagtgtttcggactgctgggcgtcaatggggcagggaagacatccaccttcagaatggtgacaggggacacgctgcccagcagtggtgaagcagtgctggcaggccacaatgtagctcaagagccagctgccgcacaccgcagcatgggctactgtccccagtctgatgccatcttcgacctgcttactggccgggaacacctggagctgtttgcgcgcctgcggggcctgcccaaggcccaggctgcccagacagcgctctccggcctggtgcgcctgggcctttctagctatgccgaccgacccgcgggtacctacagcggaggcaacaagaggaagctggcgacagccctggctctggttggggacccagctgtggtctttctggacgagcccaccacaggcatggatccaagcgcgcggagatttctttggaacagcttgctttccgtggtgcacgagggccgctccgtggtgctcacgtcgcacagcatggaggaatgcgaagcgctctgcacgcgcctggccatcatggtgaacgggcggttcaggtgtctgggaagccctcagcacctcaaaggcaggttcggaactggtcacacactgaccctcatggtcccaccagaacagcctgaaccgacaatagccttcgtcatggccacattcccgggtgctgtgctccgggagatgcatggcagtcgcctgcgattccagctgccacctgggggcagctgcaccctggcacgagtgttccaagagctggctgcgcaaggcaaggatcacggcgtggaagacttctcagttagccagaccactctggaggaggtattcctgcatttctccaaagaccaaggggaagaggaggacaactggcaggagactggagcctgggagctttccaccccaggcctgcagcaccccaaacgtgtcagccgattcctggaagaccccagctctatggagaccgtgctctgagcatgcctgccttggcctgagtggtaaagcccaggcagagggtccttgagccacacactgactcccagagaaataaaaataaaatagtatagaaaanaaaaaaa

SEQ ID NO: 2761 - DNA, 1867 bp, Cricetulus griseus
gtcgtctatgcaggggtttatccagacccatcggaaagactccccatccgatctggggttccctctccagaagtctaagttcacaaagaattccagaatttagtagctttgttgctcggaccaacacatgtggagaattgcgttcttcccacttaggccaagaagtcactctgtgtggatggattcaataccgaaggcaaaaacaccttcttagtcctaagagattgccatggtcttgttcaaattatcattccccaggatgagtcagctgcatctgtgaagaagatattatgtgaagcccctgtggaatctgtggtgaaagtatctgggacagttatctggtgagattgaaatcaaagttaaaacagccgagctcctgaatacctgcaagaagctaccctttgaaattaaagactttgtgaagaaaacagaggctcttcgtttgcagtatcggtatttagatcttcgaagcttccaaatgcagtataacctgcggctgaggtcccacatggtcatgaaaatgcgggaatatctttgtaatctacacggcgagatgaaggatcaagaccagatagacagccggagtttactcagattgacatagaaatgtcttttgtagaccagactggcattcagcgtttaattgagggtttgctgcagtattcctggcctgatgataaagatcctgtggcgattccttttccttccatgactttcgctgaggcactagccacctatggaactgataagccagatattcgctttgggatgaagattgtggatatcagtgatgtgttcagaaacacagagatcagatttcttcaagatgtactggctaagccccaaggaactgtcaaagctatatgtgttcgtgaaggagcaaagtacttaagaaggcaagacgtcgagctcattagagagtttgcagctcaccattatagtcaggaagtcttacctatattcctaaacgccaagaggaactggagttcaccatttgctaaattcataatggaggaggaaagactggaactaaccagattgatggagatccaagaggaagacatggtgctcctgactgctggggaacatgagaaagcatgctctttgttggggaagttacgattgcagtgtgcagaccttttggagatgagaggagtagtactccgtgacccagcactgttctctttcctttgggtggtggacttcccactcttccttactaaggaagagagtcccacagagctggagtcagcccaccacccattcactgctcctcaccccagtgacattcacctcctccatacggaacctgaaaaggttcgtggccaacactacgacttggttttaaatggctgtgaggtaggaggtggttctatccgaattcatgatgcacagctacagaggtacattctggcaacattactaaaggaagatgtgaaattgctttcccatctgctccaggctttagactatggggcaccccctcatggaggaattgccttagggctagacagactgctgtgtcttatcactggagctccaagcatcagagatgtgatagccttccccaaatcctatcgaggacatgacctcatgagcaatgccccagattctgtgcctcttgaagagctgaaaccctaccacatccaggtctcatggccaacagactccgaagaggaggatgcatcagccacaccttccaaaaacttgaactcttaagttttgtctgctttgctctgccaaacctaatatccagagctgccagactttagagtcaagcctccatgtggaagcactcatcaccatattaagaaacagaagctacccaactgtggtttggtaatgtgacccactaggactttctgtg

SEQ ID NO: 2762 - DNA, 1867 bp, Cricetulus griseus
cggagtcgtcttcgcttttgctccgggtctcccgtgaccgccgagccgcggagctcgaccggcgtctgcccgcccgtgcggccctcgcgtccccgcggcagtccaggtctgtggagaaacattcgctatcatattagatgaccaaaatggacattcgaggtgctgtggatgctgcagtcccaactaacatcattgcagctaaggctgccgaagttcgggccaacaaagtaaactggcagtcttaccttcaggggcagatgatttctgctgaagattgcgaatttatccaaaggtttgaaatgaaaagaagtagtgaggagaagcaagagatgcttcagactgaaggcagccagtgtgctaaaacatttataaatctgatgacacacatctccaaagaacagacagtgcagtacatactaaccatggttgatgatatgctgcaggaaaatcaccagcgtgtcagcattttctttgactatgcaaaacgaagcaagagcactgcctggccatactttctgccaatgttgaatcgccaggatccctttactgttcatatggcagcaagaattattgccaagttagcagcttgggggaaagaattgatggaaggcagtgacttaaattactattttaattggattaaaactcagctgagttcacagaaacttcgtggtagcggtgttgctgttgaaacaggaacaatctcttcaagtgatagttctcagtatgtgcagtgtgttgctggctgtctgcaactgatgctccgggtcaatgagtaccgttttgcctgggtggaagcagatggggtgaactgtataatgggcgttttgagtaacaagtgtggctttcaactccaatatcaaatgattttttcaatatggctcctggcatttagtcctcaaatgtgtgaacaccttcgccgctacaatatcattcctgttctctcagacatccttcaagaatctgtcaaagagaaagtaacaagaatcattcttgcagcattccgtaatttcctagaaaaatcaactgaaagagaaactcgccaagaatatgctctggctatgattcagtgcaaagtcctgaaacagttggagaacttggagcagcagaagtatgatgatgaagacatcagtgaagacatcaaatttcttttagaaaaacttggtgagagtgtccaggaccttagctcatttgatgaatatagttcagagcttaaatctggaaggttggaatggagtcctgtacacaaatctgagaaattttggagagagaatgctgtgaggttgaatgagaagaactatgaactcttgaaaatcttgacaaaacttctagaggtatcagatgatccacaagtcttagctgttgctgctcatgatgttggagaatatgttcggcattatcctcggggtaaacgggttatagagcagcttggtggaaagcagctggtgatgaaccacatgcatcatgaagaccagcaggtccgctacaatgctctgctggccgtgcagaagctcatggtgcacaactgggaatatcttggcaaacagctccagtcagagcagcctcagactgctgctgcccggagctgagctgacctctccagcttttctgcacctccgatggaccactggagtgagaacctcagtccttagggtcaaaaatgaatagttttaatttaatgataatttctgttgtatagctttttgtagtggtaattcctgggggaataaaggtgtttgcttattaagttgtataaaagtaggtgctgtctgtatctagggaaatattaccgttacttacattgcttataatttctgtatttattgttctctggaaataaatataattaaaggattctcactccaaa

SEQ ID NO: 2763 - DNA, 1866 bp, Cricetulus griseus
  modified_base (53)..(53): a, c, t, g, unknown or other
caaagctattgcaattgaaagcagcgaaggatggagcaaatattgtcattgcngcgaaaaccacccaaacacacccgaaatcccaggcacaatctacactgctgctgaagaaattgaagcagttggaggaaaggccttgccatgtgttgttgacgtgagagatgaacagcaaatcaacaatgcagtggaaaaagctgtggagaaatttggaggaattgatattttggtgaacaatgcaagtgctattagcttgaccaacacattggatactcctacaaagagagtggacttgatgatgaatgtgaacaccaggggcacctaccttacatccaaagcatgtattccttttttaagaaagagcaaagtagcacatattcttaatctcagcccacccctgaacctaaatcctctgtggttcaaacagcactgtgcttacaccattgccaaatatggcatgtctatgtgtgtgcttggaatggcagaagaatttagaggtgaaattgcagtcaatgccttatggcctaaaacagccatacatactgctgctatggatatgcttggaggatctggtgttgaaagccaatgtagaaaagctgacattattgcggatgctgcatattccattttcaaaaggccgaaaagttttactggcaactttattattgatgaaaatatcttaaaggaagaaggaataaacaattttgatgtctatgcaattacaccaggccatcccttgataccagatttcttcttagatgaattcccagatgcagttatagaggaaacaatatcacatgattttgtaccagaagtaaaagaagaaaagccacagcagcagaccacattttggagctgtggaagaaacatttagaattcttaaggactcgctcagtgatgatgtcgttaaagccacacaagcagtctatcagtttgaactctcaggtgaagatggtggtacatggtttcttgatctgaagagtaagggtgggaaagttggacatggagagtcctccgagcgggcagacgtggtgatgagtatgaccactgatgattttgtcaaaatgttttcagggaaactaaagccaaccatggcattcatgtcgggaaaactgaagattaaaggaaacatggctctggcaatcaagttggagaagctgatgacccagatgaattccagactatgaaagacaaagagcaaaaacactgactcttctcagaagtgaaaagctcagcagttaaagttctgttgtcttctccattgtcttataaggacacatgtgtttgttctggaaaagtagaatttctgtatctataagacttgaaattgtaattaaaacaactaaccaatcaaggacaagtttcattaagtggcatcctaatatattgtgggtttttcttttttcagtttttttctttaagcctttatttcagtcattgctttcttgcaggaaaactacagtcatgaatgactaatcaatatcaagcaatagaattagctatttacaaaacttctcatgtaaaatgaagttactttatcttcacaaagacagttgcagtgtataatatttgcaggcaaaattttctttaacttatcataagcattttgtattattgatactattctagatatctttaaattttcagctttcccctttttgtccagctggggtaactcaactggccttgaactcaggtcagtcctcctgcctcagtttgcttagtgctattatgacagacatgaaccaccatgcctagctaaattcagttttcaagtgctaatatatagaaatgtaattaatttttgagtatgccttatgccatatagtagtttaatctactcaccaccttcagcagactttttaaaaa

SEQ ID NO: 2764 - DNA, 1866 bp, Cricetulus griseus
ttttcccctcctttccctttacgcgcctctctttgatcagctgccgccccgggtccgggccattttccgggccgggcgcacgaaagcgcgcggccccggggccccggtacgtactgaccccgtcgcccctgccgcccctcgcttcctccgccccatgtggctgcggggccacggcggcgctgcccactatggcccggaaagcagttagcaggaagcggaaagcgcctgcctcgcctggagccgggagcgacgctcagggcccgcagtttggctgggatcactcgctgcacaagcggaaaagactacccccagtgaaaagatccttggtgtactacctgaagaaccgggaggtcaggctgcagagtgaaaccaactactctcgggtgttacatggttacgcagcacaacaacttcccagtctcctgaaggagagagaatttcaccttgggacccttaataaagtgtttgcttctcagtggttgaatcataggcaagtggtgtgtggcacaaaatgcaatacgctctttgtagtggatgtccagacaggccagatcaccaagattcccattctgaaagaccgcgaacctggaggtgtgtctcagcagggttgtggtatccatgcaatagagctgaatccttctagaacactcctagccactggaggagacaacccaaacagcctcgccatctatcggctgcctacattagatcctgtgtgtgtgggtgatgatggacacaaggactggatcttttccattgcatggatcaacgatactatggcagtgtctggctcacgggatggttctatgggactctgggaggtgacagatgatgtattgaccaaaagtgatgcaaggcataatgtgtcaccagtccccgtgtacgctcatatcactcacaaggccttaaaggatatccccaaggaagatacaaacccagacaactgcaaggtgcgggcgttagccttcaacaacaaaaacaaggagttgggagccgtatcactggatggctactttcatctctggaaggctgaaaatacattgtctaagctcttttccaccaaattgccatattgtcgagagaatgtatgtctggcttatggtagtgaatggtcagtgtatgcagtgggctctcaagcgcatgtctcattcttggatccacggcagccatcgtccaacgtcaagtctgtctgctccagggagagaggcagtgggatccgatcagtgagcttctatgaacacattatcactgtgggcacagggcagggctccctgctcttctatgatatccgagcacagagatttctggaagagagactctcagcttgttatgggtctaagcccaggctcacaggggagaatctgaaactaactactggcaagggctggctgaatcatgatgaaacctggaggaattacttttcggacattgatttcttccccaatgctgtttacacccactgctacgactcgtccggaacgaagctctttgtggcaggaggtcccctcccttctgggctccatggaaactatgctggactgtggagttaatgacaactaactttctcccaaaatgcagatttacactaacttaccaccctcggtttccttgtttgacacagcatatgccacaggttttagaataatcatcccataatctagataaataggtgctatgaacaggaaattaagaaaaatgctggatgctatgaatcttttgtctcaatttttttctatttattaaactacaagctgtagatttcttagttctcacagaacttgtcgttttaaaactgacttgtatatttacaaaacaaaatcttgagtaggatgctttgtgccgtggccagaccgtctcctgtgatgc

SEQ ID NO: 2765 - DNA, 1866 bp, Cricetulus griseus
  modified_base (1857)..(1857): a, c, t, g, unknown or other
cggagcccggcgctcgccggcctcgcggagagtgctccgggccgtgtttcgctagagcaccgccacaaactccggccgccagaacgcggtgtccttgtgctgtcagtccggagtgtccgcacgtcggccggcgccgcgcagccgcacgtcgagagcccggtgcaacgccgcagcgcgcggaacaccagcagatactccccaaggacccgtggaaggtgacttggaagtgtattccgaagccagttttcttcgtagactgaaggagacacaaccctgaagagtctgtggaaatgggtcagcatcgttaagtcagagctataaccccgagttttagctcagacctgatggcttgagccttctgatgtccagtgttctgaaaatccagtgcccatagatgtggaccaaggaagagccccgaccatggtcacgcttatcacagagaagctgcagaaccagagtttggatgaccttacccgaagggcccatgaggctggcccgtactctgctgagaaactgaacaaaagtggccatttgttccctttggagattggcgtagacaaaagtccctggaaggccttacatggaggatggcccattggaagccaggtgacctcaggccccttcccattgggctcacttggtgtgtctcacagcgaaggtctcaaatggcagctggcatctccagggcctgtggatgtgggcagcttcttggacctccgtgagagcacagggccacctgcagcaccaccgaccaagcgacactgccggtccctgtcagaaccggaggagctggctcgatgccgctccccatggcgccctagtagctccaaggtgtggactcccatctctaagaggagatgcaacagtggtgggagtgccacactgcactgctgcagtggccttgggaaccctaccctgcagggaaatctaggcccaggcctacctaggagtcctgtatcacctgcgggccctacctcaccactgacaccccggccagcttcagccagtagtggctttgtggatggcagtgaaggcagtacaagctcaggtccaccttggctttcttcaggaccctgctcgttttcctccaggcgccgactgtctctctcacaagagcaccttgtagacgcaagtgcttgcctgccttcagccagcagcacccccacatccacacctgaactaggccgacaccatggcctgctccggtgccgctcacagccttgtgtattggatgggaggagggtccggcgcaagcggagacgggaggaggatgccaggtggacacgcccatccttggactttctgaaaatgacacggactttaaaaaactcaaagagcctttgctccctggactatgaagatgatgaggacgacacccaagcgaagactgttgtgtcctccccatgtaactcgaaggaccttgtgagcattatcacaccaggctctagcccaaggattcccaggcctgcccctaccagtcccagtgcctgggcttcaggagagccagaggccagcataggagagggtgggagcagtggggaacccagtgattgggacagtgcaggagaggagggcatcttcccactggaccacgatgacctggacctggagcagatcgagaacaactgactttggctgagcagtggttactgtctgtcaccttggtgcctgaccagtggaaataacttgtgtgttattttgaaaattgaggcataattttgattcagtttttcctaaagaagtattttgctatttttatggcttctacagtttgggagagctctattttgaaatgggttttcagagggcattctattaaacgtggttctagaaacctaaaaaaaaaaaaaaaaaaanaaaaaaaaa

SEQ ID NO: 2766 - DNA, 1865 bp, Cricetulus griseus
cagtcagcaaggcctagacattcagagccgaagtatggaatatgtacagcggcaaatatctaaggaatgtgggagcctaaagtcccaaagtagggtccctttgaagtcaatcagacatgtcagctttcaagatgaggatgagattgtcagaataaaccctcgagacatcttaatacgtcggtatgcggactacagacatccggacatgtggaaaaatgacttggagagagatgacactgactccaatattccattttctaaacaagacagtaaaaaatcagactatctctaccactgtggagatgaaactaagttaagttccctgaaagactctgtggtatttaagacacagcctccctcgttaaaatttaagtcaaaacgaagaaaagaggatggggaacgttctcgctgcgtgtactgccaggaaaggtttaatcatgaagaaaacggaagggggaaatgccaggatgctccagatcctgttaaaagatgcatatatcaagttagttgcatgctctgtgcagagagcatgctgtatcattgtatgtcagactcagagggagacttttctgacccttgttcatgtgacactagtgatgacaagttctgcctaagatggttagccctggtagctctgtctttcattgtaccatgtatgtgctgctacgtacctttgagaatgtgccatcgctgtggcgaggcgtgtgggtgctgtggtgggaaacataaggctgctgggtgaagcagtccagggccaacatgagcttaaaaatcttcatctccaggaattagctaacttggatttgtggaagctgttggcaagcagtatggaatcttgcctggtatcattggggccatgcgtggaggaaacagaactcgacagttgctgtgatttacagatgctagccatgcctggtgtttccctgggtgcatggcatgttctgggacagatcatagagcatttacagaagaaagtcatttctggttattgactacaaaaggtcaacatagaatatgatccaactaaaagggattaattttggcattttcatatttatgcactaggtgatgggactgtttaaagatttgaatttttaggacattaactaaaaagtgcactaagggacagtttatttcagttcagaaaagttaacacttggaaattaagagataaaacaagtacaactaaatcatttattagttgttttttgaaagcagttttatgtataaataacaaatgtttatatttaactaaatgtaaggtacgaactatgacattaaactttcttgcccttcctagttctgaggtagatgtgcatatatctaccaccacattccatataattttgagtatttaacactctagttaataatgtttgtatccatgtgaaagatttgatatgttcatcctcatttctctttggcggcagtttatattgagttattatctgtacattctggaaacctaaactctttaaaatactctaatagcctcaagtgaccaacttttttttaagcacagctgtaattgtctaatgttctgatgaaaacataacacttatttttatataaagatactgagtaaacatagaagaaagtgagggttttagcctgttttgtttttgtggtattcaaccagcaagttgttttctttcagagtttcctccttcaaaaagacgtaactgcatttattaaaggttttacaaggcaggagcattaactggatagttagtgtgagcagtttcctcttgaggtctccatttatcattctgctaagccagaatgtacacagctgtttcactgtatttttcctgttgcagagcagttgtattacgggatgtttgatttacagagtggtatgatat

SEQ ID NO: 2767 - DNA, 1865 bp, Cricetulus griseus
tttcaggaggagcagctcggcgacgggagcaggagctggccgagcgcgagatggacatcgtagaacgtgagctgcacctgctcatgagccagctgagccaggagaagcccagggtccgcaaacgcaagggcaccttcaaacgcagccgcttgctcaagctgcgggaaggcagcagccacatcagcctgccctccggatttgaacacaagatcaccgtccaggcctctcccaccctggacaagaggaaaggatccgatggggccagccctcctgccagccccagtatcatcccccggctgagggccattcgcttgactcccatggactgtggcggcagcagcggcggcggaacgtggagccgaagtggaccaccaaagaaggaagaactggttgggggcaagaagaagggcaggacgtggggccccagctccactttgcagaaggagcgggccggaggcgaggagaggctcaaggccctgggggaaggatgcaagcagtggtcctcgagcgcccccaacctgggcaaatcccccaagcacacccccatggccccaggctttgcgagcctcaatgagatggaagagtttgcggaggcagatgaaggcaacagcgtgcccccttccccctactccaccccgtcctacctcaaggtgcctctgcccgccgagccctctccttgcgcgcaggcgccatgggagccgccggctgcgaccccttcccggccaggacacggagctcgcagacgctgcgacctggcgctgctgggctgcgccacgctgctgggcgccgtgggcttgggtgccgacgtggccgaagcgcgtgctggggacggcgaggagcagaggcgctggctggacggcctcttcttcccgcggcctggccgcttccctcggggtctaagcccaaccgggcgccctgggaatcgccgcgatgacacagcccccggcctgggcctggcgccctcggccaccctagtgtcactgtcctctgtgtcggattgcaactctacacgctccttgctgcgctccgacagcgacgaggctgcgcccgctgcgccctccccaccgccctctccccaggcgtcgtcacccagcaccaacccccttgtggacgtggagctggagagcttcaagaaggaccctcgccagtcgctcacgcccacccatgtcaccgccgcgcacgccgtgagtcggggacacaggcggacaccatcggatggggcgctgaggcagcgagagcccctggagctcactaaccatggtcctcgagacccccttgacttccctcgacttcccgaccctcaggccttgttccccacccgtcgccggcccctggagttccctggccgtcccaccaccctcacctttgccccacgaccccgtccagctgccagccgcccccgtctggacccctggaaactggtctcctttggccggacactcagcatctcgcctcccagcaggccagacactccagagagccctgggccccccagtgtgcagcccacgctgctggacatggacatggagggtcagagccaggacaacacagtgcccctgtgtggggcctacggctctcactgagacctgcccaccaccacccgcctgggcagccatgaatgtagcgccccaggctccgccacagcccactggaccccaaggtgggggaggccctgggcaggatactcactctatttattggggaaggggggaggggaggacacttaatttattcctttgtaccccagggggtggagctctgagcccagcctgctgtggggagagggtgggcagggatactcagggacaggacattgttgggaatttggcacaaaacacagcattaaaggtaacccctgcccccta

SEQ ID NO: 2768 - DNA, 1864 bp, Cricetulus griseus
ttccggccagtctccctcaaagacccgtgaagtccagtcgcagggcagttagcggctgcagagctcttgggtgaggggaccgcggcagtggcggcggcgaccccgcgggcgggatgttccgggattgggagcagttggttgggccagcccggcgcggaccagccgttggcaggagacgcacctcctgaggagcactccaagtcaccggcggagcccaccgaggtcgagcagcagcagcctacggaggacccagcgctcctccaccaggccaaaggccttggcagttatttgtttaactttgcgagtgctgccacgaagaagataactgagtctgttgctgaaacagctcagacaataaggaaatctgtggaagaagggaaaatagatggcatcattgataagaccattataggggattttcaaaaagaacagaaaaaatttgttgaagaacagcacacaaagaaatcagaagcagctgtgccaccatgggttgatagccatgatgaagaaacaattcaacaacagattttggctctatcagctgacaagaggaatttccttcgtgacccaccagctggtgtgcactttaactttgactttgaccagatgtaccctgtcgccctggtcatgctcaaagaggatgagctactaagcaagatgagattcgccctcgttcctaaacatgtgaaggaagaagtattctggaggaactatttctaccgcatctccctaattaagcagtcagcccaactcacagcactggccgcccagcagcaagcctctggaaaggaagagaaaagcagcagagaggatgatttgcctctgacagaggcagtacggcccaaaacaccacctgtcgtaatcaaatctcaactaaaaactcaagaggaggaagaggaaatctctaccagcccgagcgtttctgaatttgtcagtgatgcctttgatacctgcaacttaaaccaggaggatttaagaaaagaaatggagcaacttgtacttgataaaatgcaagatgaaacaattgcactagaagaagattctgccgattgggaaaaggagctacaacaggagcttcaggagtatgaagtagtagcagagtcggagaagcgagatgaaaactgggataaagaaattgaaaagatgctgcaggaggacaattagctccaaaccaattcttaactttgtgctgacattaaattttgatgcttggtgatcagaaagtacaaaaaaagtgtaactttatgtaatttgaaattattctttttcaagctaaaacttgcctcttctaaagtatatagaacagctattggaataatcgaaaaataacaggatattgtatgtaacatttcttataaatcaaattagcaatgttgtcataggcagcagagctagctatgccacagaaacacagtaaaaatactagagtttgtttttcacaaggttggcaacataatttcttctttagttgtggttttctaagcatactcattgcctttttgttgatacatggttaaagtacttacttaatggcctaattactatcagaatgaccaaattataccaaagaactcaagagaaagcactttcaaaactattttcttgacagatattttctaaagttctgtttgaaagccaaaagctgagataattaagttcgcttgaatgacataaacatcactcagtttctagaacttgctaattaatccttgtattcggctatgccagcaggcatctgttcatagaatgtgatcattttaaaagaggaaggtgatttaatgttagaaaaataactagcattcaccttttgtattttcacagcgcctttatttcataaggggtaataaaatcaagacatttcttt

SEQ ID NO: 2769 - DNA, 1863 bp, Cricetulus griseus
caagcctgtgccgtcagcccctaactcgagcactatgggaagccaagagcccgaaaagaccgaggctgcagcccctagggaccccttcgtccttggaaaaggcctctcggcgcgtcctggccgtagtcctggaagatgtcgtggctacaaacagggtccccctggcataccaagaggacactgccaggccaatgaatcgcaacaatcatcaggactctgtctacagtcagtcacctgcgttaccaccccagcaagtcaagtggtccttccaagccagacctcctgacccactgcatttgtgccgagaacccttgagccggacccaccagtcctctcccaccttgaagatgagatcaaggacagcccctggcccagcagagagcccttcacaaaagatggaccagaccacccaacctaccctggtggtggtactggaagacattgccagccccagacaaccagctgagggttttgctgaagatgggcccaacttcattgttccagcacaaagagagctgagcctatgacaaaagttcatcagccagtgcctacacccagagaactagaacctccattccaaccgtccactctgcctgctgaccctccagagagcccactaccagccccagatcctgttctggaggtcccattgaccccaacaccgtccagccttttacgcccccgtctcagtccctggggcttggcccctctcttccgttccgtccgatccaagcttgagagcttcgctgacatcttcctcacgcctaacaaagcaccacagcctccacccccatcacctcccatgaaattggagttgaagattgctatctcagaggctgagcagtccagggctactgagagaattgcatctgtcagcccccggccccctatccgccagtggcggactcaggacaattccctagcacctgtctctaagttatctctgggccgaagctactcctgccctgatctggggccccctggcccaggtagctgtacctggcctcctgttccatcccagccaagccagtccaggccccggagacatactgtgggttgtggggagatggcccggaccccaccacctcctcggccctgtctccggaaagaggtcttccctcttggaggtgtgggagcctcaccttctctcactacatcttgctcatccactgcatccacttccttcttctgcgaaccagcagaacacagattgggttcaaccaaggggaaggagttaaaagcctcaaaggacaaggtgttttctgacccagagaccaagaccatgggaaaagtttctagattcagaatacggaggactcctgtccgtctacagccaaaccttacaccaatggggctgcctcgaccaatcagattgaacaagaaggagttcactttggaagaaatttataccaataagaattaccaatcacccacaactagaaggacctttgagaccatctttgaggaaccacgggagcgcaatgggactctgatttttaccagctctaggaaactccgacgggctgtagaatttcgggacagtagcatgcctcgatcccgtcgaccatcacgaggggtccgcactgcagccagcaggacccttactcccaacttggcacccagccaggatgtgggacctctgctgcaagaacggctgaaggaactagatgccttgctcctggaggaggagatagatagggaacacccctgtcaactctaggagctccaactgttcattcatacatccttcaggggaggggagaatctctggatcaactgtattttttctctatatttctataaagttttcaatataaaaaaaaaaaaaaaaaaaaaaaaaaaaaaaaaaaaaaaaaaaaaaaa

SEQ ID NO: 2770 - DNA, 1863 bp, Cricetulus griseus
gggcgttgcggtggagttccgcggcccgtcggcaccatgcgggtggctgtggccggctgctgccatggcgagctggacaagatctacgagactctggcgctggcggagcggcgcggcccgggacccgtggatctcctcctgtgctgcggcgacttccaggcggtgcggaacgaggccgacctgcgctgcatggccgtgccgcccaagtaccgccacatgcagaccttctacagatattactctggagagaaaaaggccccagtgctcacaatcttcattggaggaaatcatgaagcctcaaaccacttgcaggagttaccctatggtggctgggtagcaccaaatatttactatttaggtttggctggagttgtaaaataccgaggtgtaaggattggtgggatctctggcatctttaaatcgcatgactatcgaaaaggtcattttgaatgccccccttataattcatccaccataaggagtatatatcatgtgagaaatatagaggtctacaaattaaaacagttgaagcagcctgtagatatattcttatctcatgactggccaagaagtatatatcattatggaaataagaagcagcttcttaagaccaaatcttttttccgccaagaagtggaaaacaacacgctagggagtcctgccgcctcggagctgttggagcacctaaagcccacctactggttttctgcacaccttcatgtgaaatttgcagccttgatgcagcatcaggccacagataaagaacaaacaggcaaagcaaccaagtttttagctttggacaaatgcttaccacacagagactttcttcaggtgttagaaatagaacatgactccagtgctcctgagtacttagagtatgatgttgagtggcttactattctcagggccactgatgacctgattaatgtgaccgggaacctgtggaatatgcctgaaaataatggtctgcacacaaggtgggattatagtgcaaccgaagaagctatgaaagaagtgatggaaaaactgaaccatgaccttaaagttccctgtaacttcagcatgacagctgcttgttatgatcctagtaagccacagacacaagtgcagctggttcacaggatcaatccgcagaccactgaattttgtgcccagcttggcatcacagacattaatgtcatgcttcagaaagtcaaggaagagcgccatctgtgtggggaatatgaacagcagggtgatgtggggaccgatgactctgaagaagaccacagtgaatacaacacagacacatctgccctgtcctccattaatcccgatgagataatgctggaggaggaggaggaggagagggaggagggggaggaagttgtaagcgcttgtagtgacatgaatacgccttctgtggaaccttcttccgatcaagcctctgacttctccacaagcttttctgacatcaggaacttgccaagctccatgtttgtgtcttctgatgatgcatcccattctccagctggtggggaggagaaatctggtgagacggtggagtctggggatgagaaggacttatctgagttcccagtgaagaggctcagtaatgaacatgagcctgaacaaagaaagaagatcaagaggaggaatcaagccatctatgctgcagtagatgacgacaatgatgaatgagtaagacagggacttgtcttggtgatgtatgtagtatgtgactttaagaccctatttttagggttgaacttttgatctatggctggactttgtaataatgaaacggtggaatttcggttctgtatcagtctttgttttaggtgtatgtttgtatgtttcagtatataaacttattaaaatttc

SEQ ID NO: 2771 - DNA, 1863 bp, Cricetulus griseus
aagctagtgctcagctctctgcccaaacgcctctgccttgtctgtggggacgtggcttccggctaccactatggtgtggcatcctgtgaggcctgcaaagccttcttcaagaggaccatccaggggagcatcgagtacagctgtccggcctccaatgagtgtgagatcaccaagcggagacgcaaggcctgtcaggcttgccgcttcaccaagtgcctgcgggtgggcatgctcaaggagggcgtgcgtctggaccgtgtccgaggtgggcgacagaagtacaagcggcggccagaggtggacccattgcctttcccaggccccttccctgctggtcctctggcagtagctggaggcccccggaagacagccccagtgaatgctctggtgtctcatctgctggtggttgagcctgagaagctgtatgccatgcctgacccagcaagccctgatggacacctccctgctgtggccactctttgcgacctttttgatcgagagatagtggtcaccatcagctgggccaagagcatcccaggcttctcctcactgtcactgtcggaccagatgtcagtactacagagtgtgtggatggaggtgctggtgctgggtgtggcccagcgctcactgccactgcaggatgagctggcatttgctgaggacctggtcttggatgaagaaggggcccgggcagctggtctgggggatctgggggcagccctgctgcagctggtacggcgactgcaagccctacggctggagcgggaggagtatgtactgctgaaggctctggcccttgccaattctgactctgtgcatattgaagacgctgaggctgtggagcagctgcgagaagccctgcatgaggccctgctggagtatgaagctggccgggctggccctggagggggtgctgagcggaggcgcgcaggcaggctgctgctcacactgccactcctccgccagacagcaggcaaagtcctggcgcatttctacggggtgaagctggagggcaaggtgcccatgcacaagctgtttctggaaatgctcgaggccatgatggactaggcaaggggtgggcaggatgggcggctggcagggtctgcccagcacgggtgtcagccccaacggggcaaagctggagtctgggcagggccacagcctgctggcagggccagggcaatgccatccgcccctgggagtaggcttcatgccctcccctcccccctccggggagggggagttgtcagaagccaggaaagtgaatgcccgggtgtgggcacagtgctgccccttgcaagccataatgtacccccaagagcgtagggggccttgcggaagccatagggggctgcaggggatgtgtgggaggcagaaactgatctcagggagggaagggaatggaggccacagtctcccagtgggtgatgcttttgctgctgcttaatccgaccccctctccaaagcagagggggtgtggaaagcaaaggcccctgtccccttcgctcctctcctcattcgcattgggcattagtgccccccccttgaagcaataactccaagcaggctccagcccctggacccctggggtggccagggcctcccatcagctcccacctcaaggggtggggacagcactgcctctatgccctgcagagcaataacactatatttatttttgggtttggccagggaggtgcagggccatggggcaagctgggggcccagagcccttggctgtacagagactctattttaatgtatatttgctgcaaagagaaaccgctttttggttttgaaccttttaatgaagaaaaaaaatatactatggagactaaacaaaaaaaaaaaaaaaaaaaaaaa

SEQ ID NO: 2772 - DNA, 1863 bp, Cricetulus griseus
tgtctgagacagataagaatgagctttctgcccttcagcattccactgccatttcgttctccatctcctctggtgtcccttcaggctgttaaagaaagtgtttctagctttgtgcgtaaaactactgaggaaaaattggcacccttcacgcaagcccggagctgaaggagacattagaatccaaggatgctgaccaagtacatgaagaggaagtgattgcagatacccggcctctggaggaagactctgaggagaaagaaattagccaacttcttgaagaagacaggcttcaagaactcacagcagtgacagcagaagcaatgaccaagttactggaccctctggttttatttgaacccaagtcactaagaacagttttacgtgagtggctttcacagttagaaaaaacatttgccttgaaggacttcactggcatttccagtaccagcagtctacctgtgaaattgaacctggatgtgcacctccttagtgagtcagaagagggagtgttagatgaagatagtgaagaagaaaaaaggaattcttcaggcactgaagaaactggtggtcatatagcctgtgaatctgtaagcagccttagtgaacccttgggtgatttttttcgagtatattctccattcactatagccaacagtcttcagaaagatctgatggaattgacaacgttgtgcttggaactgaatgtattgacttccgtagtggaaagcataggtggtggacatgtggaccgtactttacagcagctctctcctgagatcctggcttgtcgtttcctaaagaagtatttttttctcctggacttgaaaagagcaagggacagtatcaaactaagttacaccaacaacccttgtgtttgggacacttttgttgaaggactgaaagaaattgcacgttctaattctgcatacacagaaatagaagaaggagatctgcccacaggcctacagttactggatggttcaatcccttcagatagtcctttgttaattgcatttgccacccgattgtatgatagatttggggagtctgcccttcgagcgttcatcaagttttatccatccatcctgccttccgacattgcacagctctgccgtcatcatcccgctcagtttttggcctatctggacagcctggtgaagtcaaggcctgaagatcagtggccatccttccttgagttccttcttcaaccagagtctttaagacttgactggctgcttttggcagtgtcccatgatgctccaccaagcacaagtacactagatgatgaaggacatcccaggccccattcacacttgctttcttggggttatagtcagttgatccttcttctgattaaacttcctgcagacttcacaaccaaagagaaaatgattgacatctgtaggtcctatgggttctggcctggataccttacactctgcctggagctggagaggaggagggaggccttcaccaacattgtatatctgaatgatataagcctgatggaaggggacaatgggtggatccccgagaccttggaggaatggaagcttctcctacatctactacagaacaagagcataaggccaactcctcaggagtcactaaatgggagcctcagtgatggccctgcccccatcaatgtggagaatgtggcactcctgttagctaaggccatgggcccagatcgggcctggtcactgctgcaggaatgtggtctggcccttgagttatctgcaaagtttaccagaacctgtgacatcctgaggattgctgagagaaggcagagagcgctgatacaaggcatgcttgagaagtgtgaccggttcctatggtcacagcagacctagtgggagatct

SEQ ID NO: 2773 - DNA, 1862 bp, Cricetulus griseus
ggcacccagaggacaggggctggctggccacaggtggacgggacaagatggtgaaggtctgggacatgacaacacaccgtgccaaggagatgcactgtgtgcagaccatcgcctcagtggcccgagttaaatggcggcctgagtgccgccaccacctcgccacatgctccatgatggtggaccacaacatttacgtatgggatgtacgccggccctttgtgccagctgctatgtttgaagagcaccgtgatgtcaccacaggcattgcctggcgccacccacatgatccctctttcctactctctggctccaaggacagcacattatgccagcacctgtttcgtgatgccagccagcctgttgagcgtgccaaccctgagggcctctgttatggcctctttggggacctggcctttgctgctaaggagagcctggtggctgctgaatctgggcgcaaaccctatatgggtgaccggcgccaccccatcttcttcaagcgcaagttagatcctgctgagcctttttctggcctggcttccagtgcgctcagtgtctttgagacagagtctggtggtggcagcatgagctgggtttgtgggatacagctgagcgttatgctctggctggtcggccactagctgagctctgtgatcacaatgcaaaagtggctcgggagcttggccgtaaccaggtggcacagacatggaccatgctacggattatctactgtagccctggcctggtgtcctctgccaatctcaaccacagtgtcggcaaaggcagctcctgtggcctaccactcatgaacagcttcaatctgaaggatatgggcccagggctgggcagtgagacacggctagatcgcagcaaaggggacactcggagtgacacagctctgcttgattcttcagctacactcatcactaatgaggataatgaggaaactgaggggagtgatgtgcctgctgactaccttctgggtgatgtggaaggagaggaggatgagttgtacccactggacacggaacatgtgcaccccgaggagcctgaatatgtgctaccacaggaggccttcccactgcgccatgagattgtggatacaccctccgggccggaacacctgcaggacaaagctgactctccacacgtaagcggcaatgaggcagacacagcttcactggccccagtggactcctcctcctcccttctgtctgtctcacacgcgctgtatgacagccgtttgccgcctgacttcttcagtgtgttggtgcgggacatgctgcacttctacgctgagcagggcgatgtgcagatggctgtgtctgttcttattgtgctgggtgagagagtgcgcaaggacatcgacgagcagacccaggagcactggtacacatcctacattgatctgctgcagcgcttctgcctctggaacgtgtccaatgaggtggtgaagctgagtaccagcagggcagttagctgcctcaaccaagcctccaccactctgcatgtcaactgtagtcactgcaagcggcccatgagcagccgtggctgggtttgcgacaggtgccaccgctgtgccagcatgtgtgcagtctgccatcatgtggttaaaggtctgttcgtatggtgccagggctgcagtcatggtggccatcttcaacacatcatgaaatggctggaaggcagctcccactgccctgcaggttgcggccatctctgtgaatactcctgacctggccttccctcaggctgaggcagtttcctaactcaaccctgacggtccgcccgactaggctcacagcctcttacccatccctgtgtaccaggatggaaggtggctgcaacccggtaacccaataaaa

SEQ ID NO: 2774 - DNA, 1862 bp, Cricetulus griseus
  modified_base (1612)..(1612): a, c, t, g, unknown or other
agaaaccggacggcgtgttcccggtatcggtgcgctggattccggtgcccgcgcatccgcactaacctccctcaagacggtcgggcggcctccgaaagccgtccagatctatggtctcgcgagcggctctggacgggcgatgccagcgtgccaggagccatgtttgagcaagactatgggaaggtcaactccgttctggagacccttgtaaggagatgagttgttgagcagaggccaggatgaagttgctgccaggagtgggcgtgtttgggactggcagctcagcccgggtcctagtgccgctgcttcgggcagaggggttcactgtggaggccctgtgggggaagaccgaggaggaagcaaagcagctggctgaggagatggaacatcaccttttacaccagccgcactgatgacgtcttgctgcaccaagatgtagacctggtgtgcatcaacatcccccctccactcacccggcagatatccgtgaaggctctaggaatcgggaagaatgtggtctgtgagaaggctgcaacctcagtggatgccttccggatggtgacagcatctcgttactacccacagctgatgagcctggttgggaatgtgctgcgcttcttgcctgcttttgtgcgcatgaagcaactgatcgcagagcactatgtcggggcggtgatgatctgcgatgcccgaatctactccgggagcctgctcagccccagctatggctggatatgtgatgagctcatgggtggtgggggcctgcacaccatgggtacctatattgtggacctgttgacccacgtgactggccggaagccgagaaggtgcatggtctactcaagacctttgtgaggcagaatgccaccatccgtggcatccggcatgtcaccagtgatgacttctgttttttccagatgctcatgggtggggggtatgcagcacagtgacactcaacttcaacatgccaggtgcctttgtacatgaagtcatggttgtaggctcagcaggtcgccttgttgcccggggagctgacctctatgggcagaagaactctgccacacaggaggagctgctggtgagagactcactggctgtgggtgcagggctccctgagcagggtctccaggatgtcccactgctctacttgaaaggtatggtctatatggtgcaggccttgcgccaatccttccaggggcagggggatcgccgtacctgggaccgcacccctgtctctatggctgcctcatttgaggacggactatatatgcaaagcgtggtggatgctattaaaaggtcaagccgatctggagaatgggagactgtggaaatgctaacagaggagccagatgccaaccagaacctatgtgaagcacttcagcggaacaacctgtgagcctacacatgacctccctcccttgggggcagagggactggggaggggactgggggctgtgcttggctatagcagagacagtgtctttgtttaataaattagcttgggccaggccttggagcccactgaaggtgaaccaaggaaaaaacccatccatccatcattgactcctccagacttgccaggaaccagcttggttgagtcctgaggggaganggcaagaagccgtgcccgtcttggactggggcgtcttaggactggtgaaggcaacaggccatctcacagaaaaggtgggtctttacccaccctcccatgtgatcagaccctctcaggcctcaagcaggcccttcccacagaaaaggagatttctgtatcatacatagggaggagggcccctgacttggtagagaggagacaaaggggaactgtagaacatctcagaaatgtcagtaaataagccagaaaa

SEQ ID NO: 2775 - DNA, 1862 bp, Cricetulus griseus
cgcgtccacccgcgagcacaggcctttcgcagctctttcttcgccgctccacacccgccaccagttcgccatggatgacgatatcgctgcgctcgttgtcgacaacggctccggcatgtgcaaagccggcttcgcgggcgacgatgctccccgggccgtcttcccatccatcgtgggccgccctaggcaccagggcgtgatggtgggcatgggccagaaggactcctacgtgggtgacgaggcccagagcaagagaggtattctgaccctgaagtaccccattgaacacggcattgtcaccaactgggacgatatggagaagatctggcaccacaccttctacaacgagctgcgtgtggcccccgaggagcaccctgtgctgctcaccgaggcccccctgaaccccaaggccaaccgtgaaaagatgacccagatcatgtttgagaccttcaacaccccagccatgtacgtagccattcaggctgtgctgtccctgtatgcctctggtcgtaccactggcattgtgatggactccggagacggggtcacccacactgtgcccatctatgagggctacgctctccctcatgccatcctgcgtctggacctggctggccgggacctgacagactacctcatgaagatcctgaccgagcgtggctacagctttaccaccacagctgagagggaaattgtgcgtgacatcaaagagaagctgtgctatgttgccctggacttcgagcaggagatggccactgctgcatcctcttcctccctggagaagagctatgagctgcctgatggccaggtcatcaccattggcaatgagcggttccgttgccctgaggctcttttccagccttccttcctgggtatggaatcctgtggcatccacgaaactacattcaattccatcatgaagtgtgacgtcgacatccgcaaagacctctatgccaacacagtgctgtctggtggtaccaccatgtacccaggcattgctgaccggatgcagaaggagatcactgctctggctcccagcaccatgaagatcaagatcattgctcctcctgagcgcaagtactctgtgtggatcggtggctccatcctggcctcactgtccaccttccagcagatgtggatcagcaagcaggagtacgatgagtccggcccctccatcgtccaccgcaaatgcttctaggcggactgttactgagctgtgttttacaccctttctttgacaaaacctaacttgcgcagaaaaaaaaaaaatgagacaacattggcatggctttgtttttttgtttttttttttaattttttttttttttttttttttttttttttaagtttttttgttttgttttggcgcttttgactcaggatttaaaaactggaacggtgaaggcgacagcagtcggttggagcaagcatcccccaaagttctacaatgtggctgaggactttgattgtactatttttttttcttttttttttttctttttttaaagtcattccaagtacccatgagatggctacaggaagtccctcaccctcccaaaagccatccccattccctagaagaggatggctgagtccatgccctgagtccacaccggggaggtgacagcattgcttctgtgtaaattatgtactgcaaaaatttttttaaatcttccgccttaatacttcttttgtttttatttttgaatggtcagccatcgtggcccttttttttttttttgttccccccaacttgatgtatgaaggcttttggtctccctgggagtgggttgaggtgttgaggcagccagggcttgcctgtacactgacttgagaccagtttaataaagtgcacaccttac

SEQ ID NO: 2776 - DNA, 1862 bp, Cricetulus griseus
aaaggcatcctcacttcgaccccaatcagaggagcaggagatggaatggaaacagaggagccccctaagtctgttgaagtcacctctgaagtgcagcctgtaaatcagcatgtccttcagagtccacgtaagaaagttccctccgacagcccaggagtgctccagctcggaaagattcttactgaaaaagcagtggaagtggacgctgtgaggatatttgtccccaaagctgccatcactcatgacatccccagcaaaaatgcaaagcttaagtctctaggctatcaccgagaagaagtccaccctcagccagaggtagttacagaccccaggaaggaactctcagaggcaaagaaggttttagaaaaactcaagaattctgaaaggcggctacttcaggacaaagaaggcctttcaaaccaactccgagtacagacagagataaatcgtgagttaaaaaagttgctggtggcttctgttggagatgacccacagtatcactttgaacgtctagcccgggagaagaaccagctcatcttagaaaacgaagcactaggtcgaaacacagcccagctttctgaacagctggaacggatgtcaatacagtgtgatgtgtggagaagcaaattcctcgcaagcagggtaatggcggacgaattaacgaacttcagagtagttttacagcgtcaaaaccgagatgcccagagtgccatacaggatctcctgagtgaacgggagcagtttcgccaggaaatgatctctacccagaagttgttggaggaactcttggtctccttacagtggggaagggagcagacgcacttccccaacacacagccccacagcacagcagggctggcacttgcaaaccacaagttggcagaggctgtgcatgctcatcttctgggaaatgttggcatcagtaatcaaaagaagattccagcaccagtagacttcttcagtaccccagctgagaaaatggctgaaaaggttctacgtattttggatcccgttacctgtacagaaagctcaccggacaatccattttctgaatcttcaccaaccacattactcactacaaagaaaaatattggacgtttccatccctataccagatatgaaaatataactttcaattgctgtaatcattgcaagggagaactcattgctctttaatgtgttttgggagctggggttcttatgatgctgataataaaaccaattcatctttatataatatatatctacaaagatatttcatgtactagtttccaaattatttttcttaagaaatgtctcagggtaagaaaaagtgaagctatgtagacatatttaaagtacttcccagagaattcacagtgtttgtgctaaaacactaaaaaagattttgtaactttcttttaggcactaaattattattctttgttatatattttgtataaactataagcaggtttcattttggtgcataaagcaaaaacaggtcaactacaaccatgcgctggatgtggccatgcccatcactttcctgtgacctaatctgcttccctgcactgcagcagtgttcagtgtggggttagcaagcccattcctttatagggcatgtttgctagtgtaataactggggtacaggaaaaagggatttgcattccctttgtggtcacatttagggtataaaaagaggccttcagaaacaacccaggtaaagggattaatctttctaaacaaatacgttaggaaaataaaacatattttagagctacaacaaatacttcaacaaaagtgttccatgctgtttgttttttgcaaggtgttgtgtcttctgcatggttgtagttggacaaatcagaaacaaaaaaaag

SEQ ID NO: 2777 - DNA, 1862 bp, Cricetulus griseus
gcccgaggaggggacgcgcgctggaacggggccgccgggaccaagggagcgacagacgcgtaacacgccgacgccgcagccgctgggggcccgcacggaccctctgcctctgtgtagaatgagccaaggagactcgaacccagcagctattccacatgcagcggaagatattcaaggagatgacaggtggatgtctcagcataataggtttgttttggactgtaaagacaaagagccggacgtgctgtttgtgggagactccatggtacagttgatgcagcagtatgagatatggcgagagctgttttccccacttcatgcacttaattttggaattgggggagacacaacacgacatgttttatggagactaaagaatggagaactggagaacattaagcctaaggtcattgttgtctgggtaggaacaaacaaccatgaaaacacagcagaagaagtagcaggtggaatcgaggctattgtacaacttataaatacaaggcagccacaggccaaaatcattgtgctgggtctgttacctcgaggtgagaagcccaaccctttaagacaaaagaatgccaaggtgaaccagcttctcaaagtttccctgccgaagcttgccaatgtgcagctcctggatacagatggtggcttcgtgcactcggacggtgccatctcctgccacgacatgtttgattttcttcatctcacaggagggggctatgcaaagatctgcaaacccctccatgaactgatcatgcagttgctggaagaaacaccagaggagaagcaaaccaccattgcttgactggccccatcagtgttaaaagcatcccagcttcctcagatcagttacaccactggcactacagaatcctttcttaaggcactttgtacaatgttcctggatgcttgtatctaatgtttgacggggaggagggatttaaattggtcctgtatataaaggtttgtttggcacaggagaaaaattagccaaggaaaattcatttgaaaccagaaggggactttttagttgtatatgacacatttgtcaaattatcactgttcttcctaggacaacatcaagcacgagtacaatatgaagattcttggcccttttttctatggattatgttatatgtgataattatcacatctacttggctttaatcttatttttggtccagttttaaggttcatgagttagtgtgttgtgttttgtttgattcatgtatcctcagtatttttattaacatatagcatcagattaaacatgcttgtcactcaaatatggaagatgctatagttagaagtgagtttgttcctcttattctagcagtgaaaacgttctggggactggggtattatttgtatgctgctgaatatcatgtctgtaatagacccgtgcatgcagcctttgctctgcttccctttcatctctttgcaggtggcttatttacattggaagcattgagctcatttttgatctagaagttgcattgctctcaggatgaccttactgatgtatagctcattctgtgtggtgttctgtgatgtagggtctgtgtagtgttctgagacctgtctgtgctgagatgtacaaacattgccagggttatatttatttcagtggtgacgaaactagacacttacagaagggagcgtgatcagctcctgactctctagtgatgtatgtgggagcagtgagtggggatttgcctgtggtcttcctctccaggaccactacagcaggctgcctgaacttccccaggggagcttgtgactatgttttggtaaagacttcttgactagaatccattctgttcagtgcttatttaatataaaagtcaacatttcactgc

SEQ ID NO: 2778 - DNA, 1862 bp, Cricetulus griseus
  modified_base (1846)..(1846): a, c, t, g, unknown or other
ctcggagctggaaatgcaactcttggggatcctcggaggctaccgagctggaggcggaggcggctggggaggtccgagcgatgtgaccaggccgccgtcgctcgtccccctctctctctctcccgccgcctcctggcttgaaaataacttttttactctaaaagaaagaaaaaaaatcccctagaaccagtagccgtccgcgcctcacgtcctcgcttcctctcggccgtcgggtctgggcgggagcccggggtggccgctccgccgtcggggccgcgccgccgagccccggccgccccgggccacccccgtccgccgcccccatgcatcccttctacactcgggccgccaccatgataggcgagatcgccgccgcggtgtccttcatctccaagttcctccgcaccaaggggctcacgagcgagcgacagctgcagaccttcagccagagcctgcaggagctgctggcagaacattacaaacatcactggttcccagaaaagccgtgcaagggatcaggttaccgttgtattcgcatcaaccataagatggatcctctgattggacaggcagcccagcggattggactgagcagtcaagagttgttcaggcttctcccaagtgaactcacactctgggttgacccctacgaagtgtcctaccgaattggagaggatggctccatctgtgtgctgtatgaagcctcaccagcaggaggtagcactccaaacaacagcaccaacgtgcaaatggtagacagcagaatcagttgtaaggaggaacttctcttgggcagaacaagcccttccaaaaactacaatatgatgactgtatcaggttaagatatagtctatggatggatcatcttataatggatggataaatttgattttttgctttgggtgggctcctcttggggatggattatggaatttaaaccatgtcacagctgtgaagacctggcacaagatagagtggtaataatttttttttttattttttttttttttttaagtgtgacagtgccatagtttggacagtacctttcagtgatttaaatagcctgtgagtccaagtaaaggatcactttaattgctagggagtgaagtcacagggtggtttcagtttctcccagaccttatacccaatttgtcacatcagtcgatttaaggaaaaacctgtatttcgaagaaccctcctctgcagtccatctcgcaggggaatttgcactattacacttgaaagttatcagtaactttttttggcagctcaatagggaagctcaatgttttaagcatggtagtactggaaattttacatggagacttttacctagcacttacatgtataaatgtacataaagacaaactagtacgcatgacccggggaaaatggtcagaccttgtattgtgtttttggctttgaaagtagcaagtgaccagactctgccgtggcaacaggcttttaaaagacccttaaaaaagacactgtctcaactgtggttgttagcaccagccagctctctgtacatttgctagcttgtagttttctaagactgactaaacttcttatttttagaaagtggaggtctggtttgtaactttccttgtacttaattgggtaaaagtcttttccacaaaccaccatctattttgtgaactttgttagtcatcttttatttggtaaattatgaactggtgtaaatttgtacagttcatgtatattgattgtggcaaagttgtacagatttctatattttggatgagaaatttttcttctctctataataaattgtttcttatcttggcaattttaattttttttttttttgttttttttttttttnttttttttttttattt

SEQ ID NO: 2779 - DNA, 1862 bp, Cricetulus griseus
caagtgtcgttgtggagtctccgacgacggctgcgtcgccgccagctcggcatccttgaacgctgccgagccgccgacgccgcagacatggagcccgagccgcagcccgagcaggtcacgctgctggtgaagagtcccaaccagcgtcaccgcgacttggagctaagtggcgaccgcagttggagtgtgagccgccttaaggcccacttgagccgagtctaccccgagcgcccgcgcccggaggaccagaggctaatttattctgggaagctgctgttggatcaccagtgtctccgagacttgcttccaaagcaggaaaagcgacatgttttgcaccttgtgtgtaatgtgaagaatccctcaaaaatgctagaagccaaaacaaagggtgctgaatccacagagcagccagctaacactgatcaggcacagcatcctggggattcctcaggtgacggtttaaggcaaagggaagttcttcggaacctttctccctccggatgggagaacatctcaaggcctgaagctgtccagcaggcgttccaaggcctcgggcctggcttctctggctacacaacctatgggtggctgcagctctcctggttccagcagatctatgcaagacagtactacatgcaatacttggctgccactgctgcatcaggagcttttgtcccaacaccaagtgcacaagaaattcctgtggtctctaccccgactccagcccctattcacaaccagtttccagcagaaaaccagccagccaatcagaatgcagctgcccaagtggttgttaatcctggagccaatcagaacttgcggatgaatgcacaaggtggccctctagtggaagaagatgatgagataaacagagactggctggattggacctactcagcagcaaccttttccgttttcctcagcatcctctacttctactcctccctgagcaggttcctcatggtcatgggcgccaccgttgttatgtacctgcatcatgtcgggtggtttccattcagacagagaccagttcagaacttcccggacgatggtcctcctcaggaagccgcaaaccaggaccccaacaataacctccaggaaggcacagatcctgaaacagaagaccccaacagcctccctccagatcatgaagtgctggaccccgagcagaccagcccttcgtttatgagcacagcatggctagtcttcaagactttctttgcctctcttcttccagaaggcccaccagctatagcaaactgatgatacttatgctctgtcgctggaggctttgacagctcagactggatcatctggctccagctcattttcctcacctggcgtgactcagcagagtcattgaaaacccacaggatggtggtgtgcttttgtgccaagcagaagcacaaactaagacatgaagccgtgatacaaactgaacagggcccctcatgtctttattctgaagagctttaatgtatactgtatgtagtttcataggcactgtaagcagaaggcccagggtcgcatgttctgcctgagcacctccccagatgtgtgtgcatgagtgctgtacatggaagtcatagatgtgtgtgcatgtgtgctctacatggaagtcatagatgcagaaatggttctgctggttcgatttgattcctgttggaatgttcaaattacactaagtgtactactttatataatcagtgaattgctagacatgttagcaggacttttctaggagagacttatgtataattgctttttaaatgcagtgctttactttaaaccgagggtgacttggcagaggtgaaacctttgctgggttttctgttcaataaagttttgctatgaatgactgt

SEQ ID NO: 2780 - DNA, 1861 bp, Cricetulus griseus
gaaaaataaccgtccgcgacgccgactagaagcggacccgcagccaccatgaacagcaaaggacaatatccaacacagcctacctaccctgtgcagcctcctgggaatccagtatatcctcagaccttacatcttcctcaggctccaccctacactgatgctccacctgcatactcagagctctatcgtccaagctttgttcatccaggggctgccacagtccccactatgtcagctgcattccctggcacctctctgtatctgcctatggcccagtctgtggctgttgggcctttaggctccacaatccccatggcttactatccagttggtcccatctatccacctggctcagcagtgctggtggaaggaggatatgatgcaggtgccagatttggagctggcgctgccgccggcaacattcctcctccacctcctggatgccctcccaacgctgctcagcttgcagtcatgcagggagccaacgtccttgtaactcagcgcaagggaaacttcttcatgggtggctcagatggtggctacaccatttggtgaagaaccgtggccactcctgtgccgggaaagacatcacataccttcagcacttctcacaatgtaactgctttagtcatattaacctgaagttgcagtttagacacatgtttttggggtgtctttctggtgtccaaactttgaggcacttttcaaatttaataaggaaccatgtaagggtagcagtccctccctaaagcattttgaggtagggaggcatccattcttcaaatgaatgtgagtgaagcagccccgaggctcttccttaattcctctggagtgatactgtaccatactggtcttcgcttttagtaataaaacatcaaattaggtttggagggaactttgatcttcctaagaattaaagttgccaaattattctgattggtctttaatctcctttaagtctttgatttatagtagttgttacatgaatcgcattagctgtctgcctttttcctcccatcatctgccccaccggccctctctgtcctttgtctttcatccctttcctttagtctccattgaatcagtggtgcaggacagaaagccagtcactcagcctcttttcgccttgcacctgtcccacttgccattttttaacttgtctttcctaaggatcctctaaagccccctccctgtgccccgagcacaaaccccatttctttgggtttcatatatatccaggagaaggtgaaggaccttttggacccacctcatagacagtctctgcatcaccatgaacccagacgtgctgtggtgccagaacctgaacttaaacaacagttcagtagtgaaaactgtctcagaaaaagtttcttgaaaagtgacagaaagaagatgcacatcaaaagcttggctttaaagccaaattaaggggcgtttcagatcaaaacctggttttcattttctgagtgtctagtacagcctctccagttccaggagtttcctgtgatgggttagttagtagggtcatgtgaatgcctcactatgaaatgacttgagtccagtgagatctcattaggattaatatttcagggatccttaatattttgatttgttttccgagattggaattttattttatctgatatttcagttcatctaaatcttgtgttctgtacatgtgatgtttgactgtaccatcgactgttatggaagttcagcgttgtatgtctctctacactgtggtgcacttaacttgtggattttttatactaaaaatgtagaataaagactattttgaagatttgaataaagtgatgaagttgcattacaccaaaaaaaaaaaaaaaaaaaaaaaaaaaaa

SEQ ID NO: 2781 - DNA, 1861 bp, Cricetulus griseus
ggcggtcgggcggctgaggctcggggcctggtcccccaacatcatggccaagaccgtggcgtatttctacgaccccgatgtgggcaacttccactacggagctgggcacccgatgaagccccatcgcctggcgttgactcatagcctagtcttgcattatggtctctataagaagatgatcgtcttcaagccttaccaggcctcccagcatgacatgtgccgcttccattctgaggactacatcgacttcctgcagagagtcagccccaccaatatgcagggtttcaccaagagccttaatgccttcaacgtgggtgatgactgcccagtgtttcccgggctctttgagttctgctcccgttacacaggcgcatctcttcaaggagcaacacagctgaacaacaagatctgtgatattgccatcaactgggctggtggtctacaccatgccaagaagtttgaggcctctggtttctgctatgttaatgacattgtaattggtatcctggagctgctcaagtaccaccctcgggtgctctacattgatatcgacatccaccatggtgatggggtccaggaagccttctacctcactgaccgggtcatgactgtgtcattccacaaatatggaaattacttctttcctggaactggtgacatgtatgaagttggagcagagagtggccgctactattgtctcaatgtgcccttacgggatggcatcgatgaccagagttacaagcacctcttccagccagtcatcagccaggtggtggacttctaccaacctacatgcatcgtgcttcagtgtggagctgattccctaggctgtgatcgattaggctgttttaatctcagcatacgaggacatggggaatgtgttgaatatgtcaagagctttaatatcccgctcctggtgctgggtggtggtggctacactgtccgaaatgttgcccggtgctggacatacgagacgtctctgctggtagaagaggccattagtgaggaacttccctatagtgaatacttcgagtactttgctccggacttcacgcttcatccagatgtcagcacccgaatcgaaaatcagaactcacgccagtatctggaccagattcgccagacaatctttgaaaacttgaagatgctaaaccatgcacctagtgtccagattcatgatgtccctgcagacctcctgacatatgacaggactgatgaggctgatgcagaagagcgaggtcctgaggagaactacagcaggccagaggcaccaaatgaattctatgacggagaccatgacaatgacaaagaaagtgatgtggagatttaagaacagcatggatgttgtgtccccaggaactctttttcatcccttgggtgggaaggaaagtatgggtcacccagtcctgaactgggtacccccagtgcttttacgaactctggtgaagggtttggaaaccacatgtggttttagaatcatctaccccctttcctcaaactctcatagcctgatggtccctattagggatgagacaaggacaaaggtctctggaacatgatgggtaatgagccccttgttccctccctgcttctaactcagagacttttagggatgagatttttgacagtactagagtcacctctgatttcttcctgggttcttctactgcagttcttgcttctatggcaggtgaacagtgaaggggaggaaggagggcctggctctctgaaaccttcactgaagatgaagtagggggaggatgtgaagatgtcctgctctaactggcgttatgtccatttgaccactgtttttaatctaataaaccaattggttattttttttttttgtacctttcttgga

SEQ ID NO: 2782 - DNA, 1861 bp, Cricetulus griseus
aaacgggacattcagccgccgcccgcggctgccagggcgcgtcccccggggaaattaggcgtggagtcggccgcgattgccttcaaaagccgccctcccgccgtccgcggcgcacttggtacctggctgcgggctccgagcgagcgggatgccgcagtgagctgccggccatggggggcgcgagcgcctgcatcccgctctgcctgctgctggccgccgcgcagctggcccggccgcagaccccagagagacctgttttcacatgtggcggcattcttaccggagagtctggatttattggcagtgaaggttttcctggaatgtaccctccgaatagcaaatgtacttggaaaatcacagtccctgagggcaaagtggtcgttctgaatttccgattcatagaccttgagagcgacaacctgtgtcgttatgacttcgtggatgtgtacaatggccatgccaatggccagcgcatcgggcgcttctgtggcacattccgacctggatcccttgtagccagtggcaacaagatgatggtacaaatgatttccgatgccaacacagctgggagtggcttcatggccacgttctctgctgctgcaccagacggaaaaggagacaggtattgtggaggacgccttgaaaaaccttccggctcttttaaaacccccaactggcctgaccgagattaccccataggggttacatgtgtgtggcacatcgtagccccgaagaaccagcttatagagttaaagtttgagaagtttgatgttgagcgtgataactactgccgatatgactacgtggctgtatttaacggtggcgaagtcaacgacgctaagagaatcggaaagtactgtggtgacagtccacctgtgccgatcgtgtctgagagaaatgaacttctcattcagtttttatcagacttaagtttaacagcagatggatttattggtcactacaaattcaggcccaaaaaaattcccacaactacagccgtgcctgttaccaccacgttccccgtaactacaggtttaaaacccactgtggccttgtgtcagcaaaagtgtagacggatggggactctggagagcaattattgttcaagcaactttgtgttagctggcacagtcatcacgacggtcactcgaggcgggagtttgcacgccacagtctccatcatcagcatctacagggagggcaacctggccatccagcaggctggcaagaacatgagtgtcaagctcactgtggtctgcaggcagtgcccgcttctcagaagaggtctaaattacattatcatgggacaagtgggtgaagatgggcgtggcaaaatcatgccaaacagctttgtcaagatgttcaagaataagaatcagaagcccatgaacgccctgaagaacaagcagtgttagcctgagctcagtcacttcagctacactccgttcatcgcctctggaagatctgttcttccccacgtagaaaaagcccatgcaatttaatactgagcattctgggagatggagccaagttacttctcacatgacggttgtgtgagcccccctcccacccatgttgctggtggaagttctgatcctgcactgtgaggagcagatatctgagaacactcccacccactgcctgatgggagacagcagcaagcactggcagctggaagcttgtaatatacatttctgtagaaagatattctagaattgagttgtatgaagatataaaaagggttttataaagtgcaatatttataatgatatttggttaccttcaagcgtttgctctgaggtcacatttttctcttgcatttttaaaaaatcaatgcttaataaaatattttaagtgatta

SEQ ID NO: 2783 - DNA, 1861 bp, Cricetulus griseus
ccatggcggcgctcagcgtcgtctgcctgctgctggcagcggcattctggcggccggtctcggcttcaggagagggagttctggcctggccagtcggcggcggacatcctgtcgggggtggcgtcccgcagacggtaccttctgtatgatgtcaaccccccagaaggcttcaatctccgcagggatgtctatatccgggtagcatccttgctgaagacactgctcaagactgaggaatgggtccttgttctgcccccatggggccgtctgtaccactggcaaagccctgacatccatcaagtccggattccctggtccgagttttttgatcttccgagtctcaataaaaacatcccagtcattgagtatgagcagttcattgcagagtccggtgggcccttcatcgaccaggtgtacgtcctgcaaggctacgcggagggctggaaggagggcgcctgggaggagaaggtggacgagcggccctgcattgaccctctgctctactcacaggacaagcacgagtatcacagaggctggttttggggctatgaagaaactcggggtctgaatgtttcctgcctgtcggtccaggggtcagcttccatcatcgcacctgtgctcttaaaaaacacatctgctcggtctgtgatgttggaccgagccgaaaacctgcttcatgaccactatggaggcagagagtactgggaaacccggcgcagcatggtgtttgcaaagcacttgcgggctgtgggagatgaatttaggagccagcacctcaactccacagacgccgctgataagatagccgtggaggaagactggacgaagatgaaggtcaaactgggctccgcgctcggtggcccctacctaggagttcacctgagaagaaaggacttcatttggggccacagggaagatgtgcccagcctagagggtgccgtgaagaagatccgaagcctcatgaagactcaccagctggacaaggtgttcgtggccacagacgccatcaggaaggagcaggaagaactgaggaagctgctaccagaaatggtgaggtttgagcccacgtgggaggagctggagctgtacaaagacggaggcatcgccatcatcgatcaatggatctgtgcgcatgccaggttttttattggcacctcagtttccacattctcttttcggattcatgaagagagagagatcttggggttggaccccaagacaacatacaaccggttttgtggagaccaggagaaagcatgtgagcagcccacacactggaagattgcatactgagggccaccgctccaccacccaccagtcactcggtcacagggtcccagaggaggctcacaaatgtgtcttctgtcaggacttgagaacccatgtcccaatcacacatgtcacatgtgtcgcccagtccagaagtgtgaggaatatttggacagccccttgagttgccagtgactccttcacctcacttcacccagactcattgcaccctgctgagaaacagaattgagaagtgacagaaatgaccttcaaaaggccacatctgagacaccactgctttatgaaaccctttcctaggcctcatgctgcaccatgggaggcggagtcagcacagccttggccagggcagtccagttcccttgacctggtacaccgcctgccccacccccagtgccatgcactgagcagcccccactcagctactgcccaggtctccttcccaagcaccaaggtagaccctgagcacagacaaggtcctgtggctcactcagctgatcaggtagaatcacgtatttattcttttccatttgtacatccaagtgtattaataaaatactttttcaagaaagct

SEQ ID NO: 2784 - DNA, 1860 bp, Cricetulus griseus
acgcgccatggaacatgtgacggagggtgcctgggagtccctgcaggtgccgctgcatcctcgtgtgctgagcgcgctgcgcgagctgggattcccacacatgaccccggtgcagtctgccacaatccctctgttcaatgaaaaacaaagatgtcgctgcagaagctgtaacaggtagtgggaaaaccctggcttttgtcatccccattgtggagattcttctgagaagggaagagaagttaaagaagagccaggtgggagccattgtcatcacccccactcgggaactggccattcagatcgatgaggtcctgtcacacttcacgaagcacttcccacagttcagccagattttgtggattggaggccggaaccctggagaagatgtagagaggttcaagcagcacggtgggaacatcattgtggcaaccccaggccgcctggaggacatgttccggaggaagtctgagggcctggacctagccagctgtgtgaagagcttggatgtcctggtgttggatgaggcagacagacttcttgacatgggctttgaagcaagcataaacacaatcctggagtttttgccaaagcagaggagaacaggccttttctcagccacgcagacacaggaagtggagaacttggtgagagcaggcctccggaaccctgtccgaatctctgtgaaggagaagggcgtggcagccaatagcacccagaagacaccatcccgcctggagaaccactacatgatatgtaaggcagatgagaaattcaatcagctggtccatttcctccggaaccatcagcaggagaagcacctggttttcttcagcacatgtgcatgtgtggaatactatggaaaggccctagaggtgctgttgaagagagtgaagaccctgtgcatccatggaaagatgaaatacaagcgcaataagatcttcatggagttccgaaagcttcagagtgggatcttggtgtgcactgacgtgatggcccgggggattgatattcctgaagtaaactgggtgttacagtacgaccctcccagcaatgccagtgccttcgtgcatcgatgtggacgaacagcccgaatcggccatggtggcagtgctctggtattcctactcccgatggaggaggcatatatcaacttcctggccatcaaccagaaatgccccctgcaggagatgagcctccagagaaacacagtagaccttctgccgaagctccgggccatggccatggctgacagggcagtgtttgagaagggcatgaaagcctttgtgtccttcgtccaggcttacgcaaagcatgagtgcagcctcatcttcaggctgaaggatcttgactttgctagccttgctcgagggtttgccctgctgaggatgcccaggatgccagaactgagggggaagcagtttccagattttgtgcccatggacatcgatactgacacgattccatttaaagataaaattagagaaaaacagaggcagaaacttttggagcaaaaaagaaaggaaagaacagaaaatgaagggagaagaaaattcatcaaaaataaagcttggtcaaagcagaaggccaaaaaggaaaagaggaagaagatgaatgccaagaggaaaagagacgaggattctgatgtcgatgacgaggacatggaggaactccttaacgatacaaggctcttgaaaaagtttaagaaaggtagaatcacagaaaaagaatttgagaagaggctgctgacaagtgccaaaggaacagtccagctgacagacctaggggtgtcagactcgggagaggacagctgacctcagagcctcaggtgaaggtcctcacactgctggcccacactcctgc

SEQ ID NO: 2785 - DNA, 1860 bp, Cricetulus griseus
tggctggtaccaggatggcggcggccctggcgtgggtcctggtggcgcctggtgcgagttcctgagctgctaccaggcaggtgacacttcctgtagcccccagcatgcgggcaggactgggtcccatcatcacactggccctagcgctggaggtagcatgggccgaggaacttaagcccacagtgccacccatcttcactggccgaccctttgtggtagcatggaatgtgcccacccaagaatgtgccccacgccacaaagtgccactggaccttagggccttcgatgtggaggcctcacccaacgagggttttgtcaaccagaatatcaccaccttctactacgaccgcctaggcctgtacccacgttttgatgcagctgggatgtctgtgcacggcggtgtgcctcagaacggtagcctctgtgcacacctgcccatgctgaaggaatctgtggagcgctacattcacacccaggagcctggggggctggcggtcattgactgggaggaatggaggcccgtatgggtgcgaaactggcaggagaaggatgtgtaccgacagtcttcgcgccagctggtggccagtcgacaccctgactggccatcagaccgaatagtgaaacaggcacagcttgagtttgagtttgctgctcggcagttcatgttgaatacactccgttatgtcaaggcagtcagacctcagcacctctggggcttctacctctttcctgactgctataatcacgactatgtgcagaactgggagagctacacgggccgctgccctgacgtggaagtggcgcgcaatgaccagctggcctggctctgggctgagagtacggctctctttccctctgtgtacctggatgagacactggcttcctccacacacagccgcaactttgtcagtttccgtgttcaggaggcccttcgtgtggctcacacccaccacgcgaaccacgccctccctgtgtatgtcttcacacgccccacatacacacggggactcacgggacttagtcaggtggacctcatctctaccatcggtgagagtgcggctctgggctcagctggtgtcattttctggggcgactcagtgtatgcttcaagtatggagacctgccagtacctcaagaactacctaacacagtggctggtcccctacgtagtcaatgtgtcctgggccacccaatactgcagttggacccagtgcaatggccatgggcgctgtgtacgccgcaaccccaactccaataccttcctgcacctcagtgccagcagcttccgcctagtgcctggccgtacacctagtgaaccccagcttcgacctgaggggaagctcagcaatgacgacctcaactacctgcagacgcactttcgctgccaatgctacttaggctggggtggcgagcaatgccaatgggaccataagcgggcagctggaagtgccagcagagcctgggctgggccccacctcctcagtctgctggctttggtagctatgatccttacctggaccgtataaggggatctccccacctgggatgtcagtccagttggcctctggcacaaggatctgggcatgaagagcgtgttgggggtagacaaatgaatcttggcttggtagatcccccagggtgcctaggaggcatccataccagctgtcgccccctgttctaagggggagagaaaaatcccctgagaagcggctcatcttgctggagaagaaggaggtgtatacagcgaggccagggaaggcctgactactcccctgctcctggatagtttataattttgggggtctcttttgtaaattaaatataaaacaactacaaaaaaaaaaaaaaaaaaaaaaaaaa

SEQ ID NO: 2786 - DNA, 1860 bp, Cricetulus griseus
cgcgactggagcaggagaccgctcagtggctgcgctgggaccggaatcccttaacttcagagtcagtgaaacagctcattgctgaaggtaataatgaagagctgcagaaatgctttggggcccggatggagtttgggacagctggccttcgagctcctatgggagctgggatttcgagaatgaatgacttgaccatcatccagaccacacagggattttgcaggtacttggaaaagcagttcagtgacctgaagcagaggggtgtggtgatcagcttcgatgctagagctcatcctgccagtggaggcagcagcaggaggtttgcccggcttgctgcgactgcatttatcagccagggggttcctgtgcatctcttctctgatataacccccaccccatttgtgccctacacagtgtcacatctgaaactctgtgctgggatcatgatcactgcctcgcacaatccgaagcaggacaacggctataaggtctactgggacaatggagcacagatcatctctccacacgatcgaggcatttctcaagctatcgaagaaaatctggagccctggccgcaagcttgggatgagtctttgattgacagcagttcccttcttcacaaccccagcacttccatcagtcatgactactttgaagacctgaaaaaatactgttttcacaggagtgtgaacagggagagtgacgtgaagtttgtgcacacctccgtccatggtgtgggccatgagtttgtgcagctggcattcaaggcctttgaccttgctcctcctgaagctgttcccgaacagaaagatccggatcctgagtttccaactgtcaaatacccaaatcctgaggagggtaaaggtgtcttgactttatcctttgccttagctgacaaaatcaaggccaaaattatcttagccaacgacccagatgcggacagacttgctgtggctgaaaagcaagacagtggtgagtggagagtgttctcaggcaatgagctgggagccctgctgggatggtggctcttcacttcctggaaagaaaagaaccgtgatcgaagtaccctcaaagacacatacatgttgtccagcactgtctcctccaagatcttgcgagccattgccttgaaggagggctttcattttgaggaaacattaactggcttcaaatggatgggaaacagaaccaaacagctagtagaccaggggaagacggtcctatttgcatttgaagaagctatcggatatatgtgctgtccctttgtgctggacaaggatggagtcagtgcagctgtcataagtgcagagctggcgagttttctagcaaccaagaatctgtctttgtctcagcagctgaaggccatctatgtggagtatggctatcatattaccaaagcttcatattttatctgccatgatcaagggaccattcaaaaattatttggaaacctgagaaactatgatgggaagaataattatcccaaaacatgtggcagatttgaaatctctgctatcagggaccttacaactggctatgatgacagtcagcctgataaaaaagctattcttcctaccagcaagagcagccaaatgatcacctttacctttgctaatggaggtgtggccaccattcggaccagtggaacagagcccaaaatcaagtactatgcagagctgtgcgctccccctggcaacagtgatctggagcagctgaaaaaggaactagatgagctagtcagtgccattgaagaaaactttttccagccacaaaagtataacctgcagccaaaatccgaataaaatactgaagcattggatatgattacatttacctccaataaagtggaatttttttgtt

SEQ ID NO: 2787 - DNA, 1860 bp, Cricetulus griseus
  modified_base (1853)..(1853): a, c, t, g, unknown or other
gggagtgcgggtcggtagtgcgcgcgctgccgcccgaggctcctgccgccgtgacccgcgctccgcctgccgccgggctgcagggacccgcatagctaatgtcagaagaaagtgactctcagagaaccagcccctccgtggcctcgctctccgaaaatgagctgccgctgcctccgcctgagcggcccggctacatgtgctccctaacagaagacctggtcaccaaagccagagaagaacttcaggagaagcccgaatggagactccgggatgtgcaggcccttcgagatatggtgcgcaaagagtacccgtacctgagcacatcgcttgacgatgccttcctgctgcgcttcctgcgggcccggaagtttgattatgaccgggccctgcagctgctggtcaactaccatggctgccggcggagctggccagaggtcttcagcaacctgaggccctcagccctgaaagacgttcttaactccggattcctcacagtgctgccccacacggaccccaggggctgccatgtcctctgcatccggccagacagatggattccgagcaactcccaatcactgagaatattcgagccatatacttgacattagaaaaactcaatccagtccgaagagacacaagtgaacggaattgtaattcttgcagactacaaaggcgtgagcttatcaaaagcatctcatttcggcccttttatagccaaaaaggtgattggcatcctttcaggatggctttcccattcggataaaagcagtccatgtagtgaatgaacctcggatattttaaaaggcatttttgccattataaaaccatttctgaaggagaaaatagcaaacaggttctttctccacgggtctgacctgaactctctgcacacaaacctcccaaggaatatcctccccaaggagtatgggggcacagctggagagctagacactgccacctggaatgagatactattggcatcagaggaggactttgtaaaagagttctgccagcctgtgcctgcctgtgacagtctcctggaccagccactgctatctgaaggactgatctcagatgtacagtgtgatgactccatgcgagccatgaagtcccagctctcctcctgctattagcactcttctgggagtcaccatttataattccttcattccttagaaatacacaggcttaggatgccagtgcctcagtcttgctccatcattacgcagtgatggggctgcctagggagattcaagggtgagcccatcacaggcagacctttggctacctggattattccagggaagacaaggaaactgtcccagtgaatcgcaaatgtttgcaactgctagtctggataagctgtctgtatctgtatcttggtagcaaccagggtcagtcacctaaagtgactatgagaagacaactggattgatcacaagtctgaagcaatcttttccatcaggcagttaagtggtggctgctttagtctcccggatgtgcctcagcttcttgacatagtacacaggaactcaacaggtaaaatacttgaaacttctcagtggccaagaccttggacagccttctgacaggtggaaatggggctgtttccctgagcagtctaggccactgttttagcccctggtcacattccttacttcaaactgaaattcagtttggcttttagtagaggcacatgtggtggattcatctacttcagtgttcattttgaccaaaagtttatttttctagggcatttttctaagtggtgaaataatgtaattttagtatgcatgactggatctccaacaataaaaatctctagaaagcgaaaaaaaaaaaaaaaaaaaaanaaaaaaa

SEQ ID NO: 2788 - DNA, 1860 bp, Cricetulus griseus
ggtagcggcagcagcgaggagcaggtgtctggtgctaaagtcatcgtccaggccctgaaaacgcaaaatgtggagtatatgttcggcgtcgtaggcatccccgtgaccgaaatcgcccttgcggcacaggaactgggcatccgatacatcgggatgaggaatgagcaagcggcttgctatgctgcctctgcagttggatacctaacgggcaggccaggagtatgccttgtcgtttctggtccaggtctcatccacgccttgagtggcatggcaaatgcgaacatgaactgttggcccttgattgtgattggtggttcttctgaaagaaatcaagaaacaatgggagctttccaggaatttcctcaggttgaagcttgcagactatttagcaagttctctgcccggccaaccagcttagaacatattccttttgttattgaaaaggcagtgaggagcagtatctatggtcgtccaggtgcttgttacattgacattcctgcagattttgtgaccctccaggggaacgtgaattctataaagtacaaggagtgttgcctgccacctccagttagcatggccgaaacccctgctgtatgtaaggcagcatctgttattagaaatgccaaacagcccctgctcatcatcgggaaaggtgctgcttattcccatgcagaggacagtatcaggaaactggtggagcagtgcaatttgccatttttgcccaccccgatggggaagggtgttgtccctgacaatcatccaaactgtgtaagctcagccagatccagggctttgcagcttgctgatgtgattgtgttatttggtgcgagactaaactggatattacattttggactgcctccaagataccgggcagatgtgaagtttattcagattgatatctatgcagaagaattggggaataatgtaaggccttctgtgactttgctaggagatgcaaatgctgtttctaaacagcttttggaacagtttgataaaaccccatggcagttccccacagacagcaagtggtggaagactctgagggaaaaaatgaagagcaatgaagctgtatccaaggaattagcttccaaaagatccctccctatgaattattacacagtattctaccatgttcaagaacagttacccagagactgttttatagtaagcgagggagcaaatactatggacattggccgtactgtgcttcagaactaccttcctcgtcacaggctcgatgctggttcctttggaacaatgggagttggtttgggatttgctattgcagctgctgtagtggctaaagatagaagtcctgggaaacgggtcgtctgtgtggaaggagacagtgcttttggattttctggcatggaagtggaaaccatctgcaggtacaacttgccaatcatactcttggttataaacaataatggaatctaccaaggttttgatgcagacacttgggagaaaatgttaaattttcaagaagctgttacagctgcccctccaatgggtcttttgccaaactcgcattatgagcaggtcatgactgcatttggaggcaaagggtattttgtaaaaacaccagaagaactccaaaactctctgaggcagactctggaagacgcaagtaaaccctgtcttatcaacatcatgattgaaccacagagcacacggaaggcccaggactttcactggctcacccgttctaacatgtgaataaattagttgatagttttgaggaattttctctttccagcaaagtagaatttactttccctagcaaaattaccacactgccaaaattgtatttaaaaatattttaaattatgttttatagtaaagaatttgattaaa

SEQ ID NO: 2789 - DNA, 1860 bp, Cricetulus griseus
  modified_base (513)..(513): a, c, t, g, unknown or other
cctggaaagataccggccatgttaggtattgatggtctatgtaatactccatccctggaaggctttgaagaaggagaatatgaaactccaggtgaatgtaagagaaaaagaagacaaagtgttggagattttgttaatggagccctaaataaatttaaatctagcagaacaccgtctgttacacctcaacaagatagaactgcccaggcctctgtatcaccattgattctcacaccaagtattaaacgtaaactgccaggagagtcttctcatgccttctcaagtaagaaaaggaagtccatcaaacacaacttgaactttgaactgttgccaagtcatctcttcagcagcaattctacaccagtatcagttcactttgatacaagcccagaagggtcatctcagaattcgttctcacctatcatcatgagtggaaaccacttgatcaatacaggtaaaacaggtctgctttttagcccagatactgatgaaggattgctaagaaagaatgcngaaaagaatgagcaaatctgaggaacacttactaactccagatggactagctggaacaggttataggatgtcttggacagaacccggtaattcaagttttcaagacatgggtgcaaatggagcttctccagtcatgagaaatcttgaggtgaagcacttttctttggagtccgatgttactgttgaaaactcaccggctgtgtcatgtgagctcagagagtacatgcagtgtggtagtccttccaaaacctcagccccagaggctcgctaagcagcagtcagtggccggaaagtgtgatgatgcagttcctggaggtttacaaacgacggagcatggaaaggtttctgatcacatacaatggtttaataaactttccctaaatgaaccaaacagaacaaaagtgaagtcacctctaaaatttcagcgtactcctgtccgccaatctgtcagaagaatcaattctttgttggagtatggcaggcagcctgtgaggcagaagttggcaatccttggtgatgcagcttctcctctggtaaaatcagtcagctgtgatggtgctcttccctcttgtgtagaaagtacatcaaaagattcctctgtttcatgtactaaattaggtcgtgaagcacagaagtctatgtcattcgataaatccagtgttgaattaacttctaaatctttctcaaaagtgaagacatatccagatactctgcatgcttctcttggaactactagactttgtaaacaggagagcaaatctgatggtcaaattaagtttcccttggatgatctcactaatcatgatagattaaaatttgttgtaaataataatacggccttttcttgtgaagtaaaaagaagagttcttaggaaaccaccagaaaaagaaagggtctggtacaaaggttctcccaaaaatcctattggaaaaactcaactactaccaacaagtaaacctgtagacttgtaactgacaaatgtagtgtttgtccttagtgtaaataggtttcacttgaattttgaggtaagggcagtgattaaatcagaatgatgactaagttgcattcatacatcatggtattgaagtaatttattaattttaagccatacttcattttgaaggtaattttggtctattttgtccaatatgaaaatgaaatttttaaggaggaataattaaacttgaaaattttaatcaaggtttttatcctatgaagagggttgattttagaatttgaattgttaatgaacctctatacattatgcttagatagtttatctgatagtttatcctgtgtttaaatgttatttatttagcatacacattaaatgtaacttctaggaaa

SEQ ID NO: 2790 - DNA, 1859 bp, Cricetulus griseus
gctctgagctcaagaaagaacctgtgcattcatcccgaggtgacaccactgcgctttgggaaggacgtggacggcaagtgtcacagcctcacagcctcatatgtgcgggcccagtaccagcaggatgccagcctgcctcactgccgcttctatgaggagtttgatgcccacggacgccaggtgcccctcccggcaggcatctacaacctggatgacctgaaggccctggggcagcggcagggctggtgcccctacttcctggctcgatactcgatcctgcatgccaacgtggtggtttacagctaccactatctcctggaccccaagatcgcagacctggtgtccaaagagctggcccgcaaggccgtcgtggtcttcgatgaagcccacaacattgacaatgtctgcatcgactccatgagtgtaaacctcacccgcaggactctggaccgctgccagagcgtctgcctctgcccaatgatcattggccgtggtaatgaccaggtggccatcagctccaaatttgagaccagggaagatattgctgtaatccgcaactacggcaacctcctgctggagatgtctgctgtggtccccgacggcattgtggccacatggaaagcaccgtggcctcctggtatgagcagggcatccttgagaacatccagaggaacaagctgctcttcattgagacccaggacggggcagagaccagtgtggccctggagaagtaccaagaggcgtgtgaaaacggccggggggccattctgctctcggtggctcggggcaaagtctcagaagggattgactttgtgcaccactatgggcgggctgtgatcatgttcggtgtcccctacgtctacactcagagccgaatccctcaaaggcccgcctagagtacctgcgggaccagttccagatccgcgagaatgacttcctcaccttttgatgccatgcgccacgcagcccagtgtgtgggtcgtgccatcgaggggcaagacagactatggtctcatggtctttgccgacaagcgctttgctcgggctgacaaacgtgggaaactgcctcgatggatccaggagcacctgactgactctaacctcaacctgaccgtggacgagggtgtgcaggtcgccaagtacttcctgcggcagatggctcaacccttccaccgggaagatcagctgggcctgtcactgctcagtctagagcagctacagtcagaggagacgctacggcgggttgagcagatcgcacagcagctctgaccaggactgtgggtgacgtctgtggcaccaggaggtactgaaaggtcccaggaccctcaggcaatctcccagtcccagagtacagtctttaattgcagggagctgctgagctcacccagcactcaccctgcagcgcccgccatgctctcccctcggaggcgcgagaccagcttctcactccccgccggatggactctcgaagcttggagaaggagctgctcctacgcaggacctggggagggcacggggacatgtggggacatggcgggggcccaacaaggatccagggtggagcctgcttacctgctgttgtgcgtcaccagctgtgcctacatggggggctcctgtggagcagacgggacatggaagtgggcgtgacaagcgccacacaggagggtgggcaggaggcagtaggggtgcactcaccgagtggggcgggcaaagcctcctggctgaggatctccttgtacagctcctctgcttgttggtacttgttctgtttcaggtaggccgaggcctgcggggagggagggccggggcagggcgcgggcatcttgctcaggcctgggaatgtctcagacccgcccgcc

SEQ ID NO: 2791 - DNA, 1859 bp, Cricetulus griseus
aaatctttagtgctcaggggaaaaatcctggagcaaaatggaagatctttggcagtccatctgtgagtttggaaagagtttgaataaaagaaagttaaaagttttgtatttaatcctggaaggcagcagccagaccaacagaatttcaattaaccaaaggagaaataagcaaatccttggactgatccagaggtttcttgtacttcagatttacctacccctgggacaggacttctccactgaactactaattactgatttaggaaacatcaaaagaagattgtatttatcaacagtccataaggaactgtcctcaacccctcttcatgacaaaaatcccactcttcatgatcaagcgaaaatttggtgcaatctgtgcattgacttggtcgcattcaccagtgagatattcaagggagcagttttccagtctttggatggaattatcgtctctgctaactgtaaactacggaagatcttcactttaaaatcaaagccccgagaaactgctgataaagatgatgaacccacagatatgattccacgaagctgtcaacttgcaacagatgttcctcatgtcacacagctgctaaacatgacaaaagtctgccaaactgaaataaaatttggaggtcatcgagtacaatcagcagaatcagaccagttcatcaacaaagcaggaggcagtatccggaacagtaaaagtcaagatgtctgccatattgccttcgggtccagagtccttggaccgcctccaccctctggcagacggaataacttgaggctctccagtgagacagtaagatctgttgggtacaaaaatagccagttgtgccagcaatcttcaatagagaagcatgttaatactgcacaagtgtcaggcttgctgaagaacaccagcggagaaaagacagaggcacactgtggcagtgcctcaggaaataactggaatgaagaggaaggagccaccaccctgaacagcatcactcagccattgacagagccagtgaactccagcactccagaaccccagactcctgaccaaccagatgagtggatattccctgaaagtgctgctctgacttctgacccatcatgtgccagtcagtctgtactcctagagggggactcctgcatggattcacacctgtgcctagaaaccagcaaggacagtgaacctgaccaggcagaggaaagccagatgactcccgaggacgttttcaccttttcatctagaccaagatcggcacctcatgggaagaatcatgatatgtccccaaaggggcacccatttattctgaaccccaaagaagacaacggtctgacaaggagagatgcccatttggaagatgatttttatggtactgacagcagcgaagaggaatacaactggaggaactatcagcccagccagatgagtgaatgtgagctacagatgctagcaagcctccgacggcagcagaatgaggacctggaagacactggggatcctcatggcctgagtgcatcccaagtggacaactgtaatgttagcatcagtaccagcagtgatgacacaactacgtggaactcttgtctgccacctcctgtcaaccagggtcatcactatcaaacagaaatgaatccatcttctccattgaaccctcgagactggttgaccatgctgagcccaccaattgtccctcccagtcagcagccagcagagcagcctctagagtcttctgcaagtgcaagtgtgcaaggtgaagaggacccgagtgcagaggaagacgaggaagtgctgactctgttgtatgacccatgtctcaactgctactttgaccctcagactgggaaatactacgagttggtgtagctcc

SEQ ID NO: 2792 - DNA, 1859 bp, Cricetulus griseus
gacaattagtgttccagatgtggacgtgaaaggggagtattccagctactatctcctgttgcaaggcaacggcaagagaaaatgcaaagccacattgcttcactcggccaaccagatcaatggttccttcgcactcagtctcattcatgggaagatgaaaacaaagacggaagaagccaaattaagttttccgtttgacttctcaacactcccaagtttttctgaggagcaggttttgcagagagagaaacagctagccagcatacaacttttggccttgaaggaatgcctgaaaagaagacaggctgcagatcagcctgaagcagtttccactgaggaactcaaaagtctgttgctgctcacaagggagcgcttcctaggtcattctgatgctctcaaccctaaagcagttttaatacaccagacaaaatgaaagcagctgctggtatggtcagtgatgccagtaaagttgaaccttatttaatggaaaccaatcctctggaatggccagaaagactacgttcttctagaaattttagaaaactttttgaaaaaagctaaacaaaaatgagtaactggttcattacctcgttcatctgaacagttgctgggccgtaaagagggtccccgggactcggtcacattattggatgctaaagaactactaaaatatttcacctcggatggattgccagttggagatctacagccattacagattcaaaagggggaaaaacctttggttttgacaccagaacttagtcctcggaaacttcaggtcttaccttttgaaaaagcctccgaatgccattaccacgggatttgaatattgcttggatgaccaaaaggctttagaaagagatgggggattttccgaacttcagtctcgtcttattccttatgagacccagaccacctgcactagagacagttttccagtccccactgtgttgagtcctctcccgtcccctgctgttttgtctgagcctcggagtgtccccgacggagaagcactacaaagcgaactccgaactgaagttcctggattgaaaaggagatctaaggatccaagctgccattacccccagaaaagacttacaaaatcagaaagttctgattgtctgctgtctcaaacaagttgcagcggtagtcattaccgtcccatgaggccatccagaaagccgcagcccgagcgacctgtgtcattgcttccacttcctcatcgcgaagcttccaaagtcaccgcaaaggccagttcaggacaaaaaagtgcacatgcgtccaaaccatcaaagcagattaaggaatcgcggtcacagaaacatacccggatgctgaaagaagtggtcaaggacaccctgaagaggcaccgcatccccgaggcccacgagtgcttctctgcatgcagccagagactcttcgacatctccaagttctacctaaaggatctgacaacatcaaggggtctctttgaagaaatgaagaaaacagccaacaacaacgtgacgcaggtgatcgagtgggtgttggggaggataagcaagaagtaagccaatgctcccattctttaggaacctgtccaccgcctgtaagccttacttggagaataggtgctccatttgtaaagaggacccctagtgtcctgtatttatagagttttagtgagactcagttaatgtggtttttaattaatgactacttattttacagccttcactaggtattttaatcttgttatttttatattatttaaattgttttacttcttggtttattttaatttaaataaaaattaatatttaattaaaaaaaaaaaaaaaaaaaaaaaaaaaaaaaaaaaaaaaaaaaaaaaaaaaaaa

SEQ ID NO: 2793 - DNA, 1858 bp, Cricetulus griseus
gcctctgctgtccctgtgttcagctgtggtgtgatttctgttctgaggagtcaggaggagagtgccacaggcaggagctactgtaccttgctggattgtctctgttcctgggggcaagtggggcatgtcctggagctcattgtcgactggctgcctacaaggccacctcaggccaagagtaatttggcctctaaacgtaaagtgccaatcagtgacacgtgcccggtgaaacccgagttagcgttgttgtacatggagtatttgctgacccatccaaagaatcgagagtgtctgctcgctgcaccccagaagaaactgaaccagcttttaaaagcccttgagggatccaaggcagatctggaatcacttcttgagtctccaagtgggaatcccctcaacttcaacaaagcagctgccctgcacgcctttggtctgtactgccggctgagtgtccaccttcagtacacgttctgcccaggagagaagattcatctgtccatcttgagcgaaaccgggtcttggttggaaaacaaagttttacctcttcttcaagaccaagaagaggagtacctgaagcttcggagggacgtctatcagcaggtcatccagacttacctggctgtgggtaaagacgttgtcatggtgggccttggagaccctgagtttcagatccagcttttacagcggagtctcggaataatgaaagcagtgaagggatttttttacatttcactacttcttggcattctgaaggagatagctggaaactccatgattcagaaaacagattcagacgaagaagttgcagtgctctttgactcagtccaggaagtattccagaagatgttggaatgtgttgcctggaccttcaggaagcagccagaagaaagcctaccgctctttcattctgtccagaccccactccatgaatttgttagcaccatccagttgtggtacaaggacaccacagtccaccacggcatcctttctactctgattgctgcacccgtggttgagataagtcaccagcttcggaaggtgtctaatacagaagagctgaccacaccacaacgtcttgctgaccttcctccattttcaaggtgtttactggggataataatgaagtcttcggatgtggtcaggtcatttttggatgaactaaaggcgtgtgtaacctccagtgatattgaaggcattgtgtgcctcacagctgttgtgcatattgttatggttattaacaaaggtaaacacagaagtgcaaggctgaaggaagttgcagagactgtgaacaggaagctaaaaacattcatggagatcactttggaagaggatagcctcgaaaggttcctgtatgaatcatcaatgagaactttgggagaatttctgaattcatgacaaaaccaccatctctgggtgtgtagaaatagagagaaagattcatgaaagtgaaatgtgtatatatctttcttgctttttcttcttttgtcagagtaagcccccaaagatgaaggccagtacagctctggtgctctaccatacacactgtgcctttaaccagctggcagagatggagagtggtaaagatgagtgggaaaaagactggcaggcagctctcactctgccccagaagccttggcaatgcaaatgggaactgtggccttggccagctcttgacttcattggcatgtgacttacctattatttattacttgttatgaaaatttcattggaacatatttctctttggcctttcatcagggctaccattagcccatacagaatctttgttcaaatggtgaaaagaaatcactttgccaagacattttactgccatctgttgtacagttgtaataaatac

SEQ ID NO: 2794 - DNA, 1858 bp, Cricetulus griseus
gcccgcgctcggcggggccgccagccaggattggacacagtgtggacgatcaaatcaaacaggaggaggcttgttcgctcacgtagtaactcacagtggctcctcgggcaccttcaggatgcctgcggcacttgtggaaaacagtcaggtcatctgtgaggtgtgggccagcaatcttgaggaagagaatgcggaagatccgagagattgtcctcagctacagctacatcgccatggacacagagtttccaggtgttgtggtacgaccaattggtgaatttcgaagctccatagattaccagtatcagcttttgcggtgcaatgttgaccttctaaaaatcatccagctgggccttacattcacaaacgagaaaggggagtacccttctggaatcaacacttggcagttcaacttcaagttcaacctgacagaggatatgtactcccaggattccatagacctccttgcaaactcagggctgcagttccagaagcatgaggaggaagggatcgacacgttgcactttgcagagctgctcatgacgtcgggagtggttctctgtgacaacgtcaagtggctttcatttcacagtggttatgattttggctacatggtaaagttgcttactgattctcggttgccagaagaagagcatgagtttttccacatcctgaaccttttctttccgtccatttatgatgtgaaatacctgatgaagagctgcaaaaatcttaagggaggtcttcaggaggtggctgaccagttggatttgcagagaattggaaggcagcatcaagcaggctcagactccttgttgacggggatggctttcttcaggatgaaagagctattctttgaggacagtattgatgatgccaagtactgtgggcgcctctatggcctgggcacgggagtggctcagaagcagaatgaggatgtggactctgcccaggagaagatgagcatcctggccatgatcaacaacatgcagcagtgatagcgcgtgcaccgtgccatctgtgccatccgccccagccattgacctgcatctgctctaagcagagactttgggtttctgtttaaagatgcctttattttagatccagaagaagggggtttgctctgaatttgtaaacaagtcttccttttcctcatgcccacgtccctctgctgcctcctgccaccagcatccatggcttcatggacacctttttaaacctccaggatgtctgaaacaaaccagtaaaatgtatatgactcttacacgttgtcattcttttttcttttggctttgctgctctgatgaagattctcagatgagctgaggctgccagggaacatggtgtatgttcttgggaagtaggtccgcaacagcaggctctgccctgcttttgtcaaacttctccaggacagagcagtcctgactgttctgaaacctggaaagttctgagtctcctttttgtggcattaagctggcagctgagcctcacctcaagtcaccttagttttcggatgaactgccctcgactaggtcatgctccatgtccattttgttctcagcagggtgatctcaatcagctgtgttctcttagcttccattaaggttaggcattttggaagcacactttttaaaaatgactacagaaagtacaattttgagaaagcagaaacttctttggaaggcggagacagacggcagcagctccctgaagcaggagtggtcttacatcttaaaagcttgtgggaaactgaatttgaaatgattacaaaatgtcaactattaaagctgatatttaagatgcttgtaaatattatttatgtttttaattttgtaaaataaagattgctttttaacca

SEQ ID NO: 2795 - DNA, 1858 bp, Cricetulus griseus
gttgttgctcctgcgcgcgcagagaagcccaagtactggtgtcgcgcgcgccagggacccgcgagggctgggcacagggtgtgagcgctgcagccgcagctctagagctcgtgcgccctgcgcagcctggggcatcccaggcagctgcggctcccgtgcggtccctacgaggaggtcgccccagcgactgccaaggcggtgcgatggtgggcctgcccgggagcccgggaagggaaagcggaagccacgcgcccggccggtgacccggaggacccggcgcctcgccccggctgcccgcagcacccgcgcctgccctcggctgccagtcccgcggcacccggcgcgccgagaccatggccatcgcccacctggccacggagtacgtgttctcggacttcttgctaaaggagcccaccgagcccaaattcaaggggctgcggctggagctagcggtggacaagatggtcacatgcatcgccgtgggtctgcctctgctgctcatctcgctggccttcgctcaggagatctccatcggtacacagataagctgcttctccccaagttctttctcctggcgacaggctgcctttgtggattcatactgctgggctgctgtgcagcagaagagctccctgcaaaacgagtctggaaacctcccactgtggctgcacaagttcttcccctacatcctgctgctgtttgccatactcctgtacctgcccacgctgttctggcgcttcgcagcagctccgcatctctgctcagacctgaagtttatcatggaggaacttgacaaagtctacaaccgtgccatcaaggctgccaagagcgctcgggacttggacctgagagacggacctggaccgccaggagtgaatgagaatgtggggcaaagtctgtgggagatatctgaaagccacttcaagtacccaattgtggagcagtacttgaagacaaagaagagctctagtcatttaatcatgaaatacattagctgccggctggtgacatttgcagtcatactgctggcatgtgtctacttgggctattacttcagcctctcctcactatcagacgagtttctgtgcagcatcaaatcgggcgtcctgagaaatgacagcaccattcccgatcgcttccagtgcaagctcattgctgtcggcatcttccagctgctcagcttcattaacctcatggtgtatgctctgctggttcctgtggtcatctacacactgttcgtcccgttccggcagaagacagatgttctcaaagtatatgaaatcctgcccaccttcgatgttctacatttcaagtctgaaggctacaacgacttgagcctctacaacctctttctggaagagaacataagtgagctcaaatcatacaagtgtcttaaggtgctggagaacattaaaagcaatgggcagggcatcgaccccatgctgctcctgaccaacctaggcatgatcaagatggacgtcatggatgggaagactcccatgtgctcagagatcaagggagaggaccagggcagccagatggtggagttcaaagatttggacctgagcagtgacactacaacaaacattggagagaagaactctcgacagagacttctgaattcatcatgctaatggtttcattcttgactttcaagtccgtgacttctgcggctgaagcacccctgttgggtctgtagctagtttgcagtaaatgtttttggtagtgatgtgatgtgtgttttaccaggccctaatagatataatggccaatagtgtaaaggaagaatggattaggaatgtcccataagatgaaacttaaaaaaaaaaaaaaaaaaaaaaaaaaaaaaaaaaaaaaa

SEQ ID NO: 2796 - DNA, 1857 bp, Cricetulus griseus
gagttgggccgcggaggcagttggaggagtgtgtgggttctcctgcccggcagccgcggtgcgcccgcggctagtctgtcccggtccggtcgccgcgtcccgcgtggtgcaggctgcccgctgagcggcggcgggccctgagggacgcgcctcccggcacgcccggctcgacacttcccttcgcccgcacttcctcctgctgcagcgcggtgccggctgggcgggcgggatggcggcccgggggagctgccgggcgccaacgcgacggctgctcgtgctcctgctgcttccgctgctttgggccccggccggggtccacgccggccccgacgaagacctgagccatcggaaccagaagccgccggcgcccgcccagcagctgaagtcgcagtccgcggcagtgaagggcctcgagccggcccgggccgagaaagggttacaccagctgccccagttcataccaacagagaagatgcagctacccagacgaatttggggtttattcatgcatttgttgctgccatatcagtcatcatagtatctgagcttggtgacaagacatttttcatagcagccattatggcgatgcgttataaccgactgactgtgctggctggtgccatgcttgccttggccttgatgacatgcttgtcagttttgtttggctatgccacaacagtcatccccagggtgtatacctactatgtttcaactgcactcttcgccatttttggcattagaatgcttcgggaaggtttgaagatgagcccagatgagggtcaggaggagctggaagaagttcaagcagagttaaagaagaaggatgaagaattccaacgaaccaaactcttaaatggacccgatgttgaaactggtacaagcacaacgatacctcagaaaaagtggttgcattttatttcacccatttttgttcaagctctcacattaacattcttggcagaatggggcgatcgctctcaactcactactattgttctggcagctagagaggatccctatggtgtagcagtgggtggaacagtgggacattgcttatgcactggattggcagtaattggaggaaggatgatagcgcaaaaaatatctgttagaacagtgacaatcataggaggcatcgtatttttggcgtttgcattttctgcactatttataagcccagattctggtttttaaaaagccgttcatctgtattcagcttaagatatgcaactttctgtacatagtgtacattacaactaaaagtaatggaaaatactgtattttgtagtattaatttgtaagtttgacccatttaatcaagtatcatgtccaaaacagataatcattgattctatttgtaaaaaattttaaaagaaagtctgacttatgagtttttctctagcctaattatggtaacacttcagcccctactttgacatgtgttatccattgcagtgggactgactgcttgaattttcttgcagcatgacccttttataaatacattttctccttggccactatggtgtttatatgtatctcttaaacatttccttggggaaaagaatgaattttttctactttttaaaaccgtgttcctgagccagtaatcagtagttttatcttgtcttttgggaattagcatttatcaataacatgccataagagttgttggctaggtccgttctccctttattttatttttttaattgggtaggacacccaatataaaaatagtcaatatttgacaacacggacttaccaaattaagagagaatactatgaatgtattccttattttttctatattgaaataaaacaatgtaacagatatgtaaaaaaaaagtggtatgacta

SEQ ID NO: 2797 - DNA, 1857 bp, Cricetulus griseus
  modified_base (1317)..(1317): a, c, t, g, unknown or other
tcatatattgccaaacattacaacatgagcaaaagcaaagtagacaaccagttctacagtgtggaagtaggagactcaaccttcacagttctcaagcgctaccagaacctaaagccaattggctctggggctcagggaatagtttgtgctgcatatgatgctgtcctcgacagaaatgtggccattaagaagctcagccgacccttccagaaccaaactcatgccaagagggcttaccgggagctggtcctcatgaagtgtgtgaaccataaaaatattattagcttattaaatgttttcacaccccagaaaacgctggaggagttccaagacgtttatttagtgatggagctgatggatgccaacttgtgtcaggtgatccagatggagctggaccatgagcggagtgtcttatttgtctgtaccagatgttgtgtggcatcaagcatctccactcaagggactatattgaccagtggacaaagtcatcgagcagctaggaactccttgtccagaattcatgaagaagttgcagcccacagtcagaaactacgtggagaatcgacccaagtatgcgggactcaccttccccaagctcttttccagattccctcttcccagccgactctgagcacaataaactaaaagccagccaagccagggatttgttgtcaaagatgttagtgatcgacccggctaagagaatatcggtggatgacgccttacagcatccgtacatcaacgtttggtacgaccctgctgaagtggaggcgcctcctcctcagatatacgacaaacagctggatgaaagggagcacacgattgaagaatggaaagaactcatctacaaggaagtaatgaactcagaagaaaagactaaaaatggcgtagtaaaaggacagccctctccttcagcacaggtgcagcagtgaacagcagtgagagtctccctccatcctcgtctgtcaatgacatctcctccatgtccaccgaccagacccttgcatccgacactgacagcagcctggaagcctcagcaggaccgttgggttgttgcaggtgactagccgcctgccttcgaaacccagcgttcttcaggagatgacgtgatagaacacagcacacatgcacacgcacacgcacacacacacacacacacacacacacacacacacacacacacacacacaccaagagagagatccaacctaaaattcagataaatctttctgcctgcttctccaaagttctctatcacagctaagctgaaatgtatacttaacttctagttgctcttgctttggtctccttccaacngtgcttactacacaaaacaaatcagacacaattagagaagcctttccctaaagtgtaatttaaatggctgcaaaaccagcaacccttaactgcccttcaaacggcatgacaaggtgtgcagtggccccatccagcatgtgtgtgtctctatcttgcatctacctgctccttttggcctagtcagatggatgtagatacagatccgcatgtgtctgtattcacacagcactacttagagatgttcctgtcagtgtcctcagggctctaccaagacaccatgcactggggtaccacatggtccatttcatgtgatctattactctgacataaatccatctgtaacatattgccagtatataagctgtttagtttgttaattgattaagctgtatgtcttataagaaaatatgtaaagggggaatatggggggagtgaactctcagacccttgaagatgtagcttctgaatctgaactgattaaatggcacctgtataccaacaacaaatacacacacacacacacacacacacacacactac

SEQ ID NO: 2798 - DNA, 1857 bp, Cricetulus griseus
  modified_base (938)..(938): a, c, t, g, unknown or other
cacgagtcttggctccaaaggaaagtgaggagcccaggaaaatgcggagtcctcctggagagaaccccagcccacagggtgagcctcccagcccagagtcctctcgccgcctcttccgccgatttcgctaccaggaggctgcaggcccgagggaggcgctgcagcgcctctgggagctgtgccggggttggcttcggctcgaaaggcacacgaaggagcagatcctggagctactggtgctggagcagttcttggccatcctgccgtgggagattcagagctgggtgcgtgcccaggagccggagagcggagagcaggctgtggctgcagtagaggctctgggaacgggagccagggagaccctggcaggtggctcaagcactgtgaagatccggtggtgattgacgatggcgagtgggcctgtgggcctcaggacctagaacaagaacgaatgtcagcagagtcccagagcaaccctgatgcccagcctgtggccctagcacagggcctagggctcctaagcagaccaccaggccagccctcctgcttagacttcccagtctccagccatcccaagaagaaggaaggaaaatgggaggagctgcaggtgccagagctccagccctgccagcaggtggcactcactcaaagtccttgtccaggaggtggtggtgacccaccacccctaaagagcaacctggaccaggaggtgaccattgagatcgtgctgtccagttctggggatgaggactcccaacatagcccatactgcaccgaggagctggggagccctgcagaaaagcctcatagtcttccaacccacaggagcagcactgaggttgggggtgaggtacagagctcacagaagtcttatgtgtgtccgaactgtggaaagatcttccgctgtctgaactcgtactgatcagggtcgtggcccncaagctagtccctgccccagcaccaaacccaaaccacctgccctttgctctcaggtagtgtccaacttctggtgccatgcctcttcctctccagatagaaagtagccacctgagcattccctctactgtgcccaaacccagggaggtgaggtaactccagcctcaagatctgcatcttggagccctccagccacttgctccagccctcagagggactgggctgcccctaatccatcgtttggagaggcggggtgtgtatagtggggagcttgcctaaagcctttataaatgtgggatggaaactgcctgtcactactctgattcctacccattctgtctgagaattgagagtttggcccctcaaggctcctttgccaggtgagccaaaccctgggacagaagcttctgtgaagccatgtccttcaagggtatcaactccaaggcagtttgtttagcttcctagcactgttataactcatactaaacataggctcttctaatagcagcaggtggcattgacacggttatggaaactgcaaggccgaggtctggtgtcaacaggattggttctttctgaggctagaagagggaatcatcctgggtctggtggtcactaacacttgtctgtagccctgtgcttgtacaaatgtctctctatctttgccttcatctccactgtgtcagtctccaaacttacttttgtacaaggatcccagtttttgggttggggctcatcctgtctcctgcagcagaaccccacctacatctggagtggccatttccaaataaagtcacatctcgggtactgggagtaaggacttcaacactggggtttgagtggacatagccaaactccagataattccgtggtgctgttgttattcctgccccagatgaaccaattcgaacttgaggtagc

SEQ ID NO: 2799 - DNA, 1857 bp, Cricetulus griseus
cacagccctttagtctccaggcctcctcccgccccttaagcgctctgtgcagcctgctgaacgagggaagcgcaggctcgccatggggagcccggggactcgggtcggtgctgttcctgcctcaagcgctgctgttgctgctactggtactcctgctgcgtgtcccgccgagccggggcttcccaggatctggagactcaccactagaagatgatggagtctggtactcacactctctatataaagacactccatggtgctcccccatcaaggtgaagtatggggatgtatactgcagagctcctccagggggatactacaaaacagccttgggaaccaggtgtgacatccgctgcaggaagggctatgagcttcatggctcttcccagctgatctgccagtcaaacaagcgctggtcagataaagtcatctgcaaacaaaagcgatgtcctacccttgccatgccagcaaatggggggtttaagtgtgttgatggtgcctactttaactctcgatgtgagtactattgctcaccaggatatacattgaaaggggaacggacagtcacgtgtatggacaacaaggcctggagtggacgaccagccacctgcgtggatatggaacctcctagaatcaagtgcccaagtgtaaaagaacgtattgctgaaccgaataaactgacagtccgggtgtcctgggaaaccccagagggaagagatacagcagatggcattcttactgatgttattctaaaaggcctccctccaggctcgaattttccagaaggagaccacaagattgaatacacagtctatgacagagctgagaacaagggcacctgcaagttccgagttaaagtaagagtcagacgctgtggcaaactcaatgtcccagagaatggttacatgaagtgttccagcgatggtgacaactatggagctacctgtgaattctcctgtatcggtggctatgaacttcagggtagtcctgcccgagtatgccaatccaatctggcttggtctggcacagagcccacctgtgcagctatgaatgtcaatgtcggtgtcagaacagcagccgcccttctggatcagttttatgagaaaaggagactcctcattgtgtccactcccacagctcggaacctcctctacagaatgcagctgggaatgcttcagcaagcacagtgtggcctggatcttcgacatgtcacagtggtggagctggtaggagtgttcccaaccctcatcggcagaatcagagcaaagataatgcctccagctctagctctgcagctcaggctgttgcttcgaatcccactctactccttcagcatggtgctagtggataagcatggcatggacaaagaacgctatgtgtccctagtgacacccatggctctcttcaacctcattgacactttccccttgagaaaagaagagatgatcctgcaagctgagatgggccagacttgcaacacctgatgtgctgttacaattgtggtggttcctcatctctttgggaaggccttaaaaatacccttgatgtacagattctcatttgtaatttttaaagtctattttattatgtgctttctttgcccttaagaattggcacaatgttttttttaaactctgaaatgtttcaaaatatttgaatatatctactctttctaactctccttttattgtggctggttaactctattattagaaactacaaccacacacgagctctcagcttattattcattgtgcaacatacttttctttccttttattgtttatataagacatttgttaataaaatattttgaagcaaacttactaaaactcactttttaaaaacaactcaagc

SEQ ID NO: 2800 - DNA, 1857 bp, Cricetulus griseus
cgctatgcagtgaacagtgcagacctggtgtgtttgttctcttggcctgtggcactatctccagtacctgtggccagctggccagctaccactagccttggtcaggacccggatgcaggcacaagcttccattgagggtgcgcccgaggtaaccatgagcagcctcttcaaacagattctgcggactgagggggcctttgggctatacagggggctggcccccaacttcatgaaggtgattccagctgtgagcattagctacgtggtatacgagaacctgaagatcacactgggcgtgcaatctcggtgacgggagggtggtggacttggtgatcctgggttgctgcccgggacgtgtagccatctcattctgtgaatgtgccaacactaagctgacttacccaggctgtgaaacccaggatgccgcaggggaggggcagggactggcaagctctaggctggtcctgctgcttggggtccagaggtcagtaggatgtgggctcctgcacctagaaccaggatgtttctgcagtgcctgcccgacagtgagcttggaggccagcttagttcttccatctcgttcacgcagccagacctcagccataacctccctctggtccaaagagcattcctgtgtcccctctcatctttctcactcatgtgatgtgctaggaagtaggaaaaagccaaacccccacttcttcttgtccctcttgcctcagtgctggtcctccaaacctgtttcccaggctgcagcatccatggggacctgtggtacgggaagctgaaggagtaccccatacgtccttgcctcttctgagctcaccagcaaggctacctggatgtgcccaggtactcaggcactggctgcctggcaccatggtgcatggctttgctgaaagctactctaggacctggatcccagaggatttgtgctgcctgcatgggcctaatgtcctgtgagctgtccctaagccctgtcaggactggcatcagctcatgaccatacttattgttccattttgtggtatgagggtgaggcagagtatctgccccatgcgtgctgccatgatgagaaggaaaagatgctgaaggccttaatcatgtctcactggataaaggatttggttcagaagggcaaactggacactgccctgtgggccgagtgggaccagcctcacattccacacggcgtatcacactgcttggagcctatttattttgtatttatttgaacagagttatgtcctaactatttttatagatttgtttaattaatagcctgtcattgtcaagttcattttttattcgtattttatgttcatggtttattgtaccttcccatcaccacctggtggggggtggggagacagatggaagagtggccacagagtgaccttacctgctgcctacactgtccaaagaaattcctctcccagctggaaacaggaaaaggcaccaggaccttgctgtgggaagcatcccctggcagtccaggaagggtcgtgggaaaggcggagaggagggaagaatttctttattttgcccttttggaatgacaaggcagtgggtgcttcactgggaatttggtatgagggtgaggactggaggactgggtggcctgccctccctaacctgtgacctgggctccctcctggcccatggctgcccttgctcaatgagtggtcagctggccacttggcaattgtgcctcctcggtcccagaacaacctgatgagggaaatccaaataggatgcaaagatcaatgacaaaaattaccgttctgcatagtctatcgctgtaactggactttgtcaaaggcaagcagccttctaataaagttgcttcaaaagtga

SEQ ID NO: 2801 - DNA, 1857 bp, Cricetulus griseus
ctgaccgggccctcacgtgggctcagcctgctctgagggagctcgccggtgggccatggcaggctgcaggctctgggtttcgctgctgctggcggcggcgttggcttcctcggccacggcggtgtggccctggccccagtacatccaaacctaccatcggcgctacaccctgtaccccaacaacttccagttccggtaccatgccgcctcggccgcgcaggcgggctgcgtcgtccttgacgaggcctttcgacgttaccgtaacctgctcttcggttccggctcttggccccgacccagcttctcaagaaaacagctaatattggggaagaacgttttggttgtctccgtcatcacagctgaatgtaacgagtttcctaacttggagtcagtagaaaattacaccctaactataaatgatgaccagtgtttacttgtgtctgagactgtctggggtgcactcagaggtctggagactttcagtcagctcgtttggaaatcagccgagggaacattctttatcaacaagacgaagattaaagactttccccgcttccctcaccggggcatattgctggatacatctcgtcattacctgccattgtctagcatcctggacacactggatgtcatggcgtacaataaattcaacgtgttccactggcacctggtggacgactcttccttcccatatgagagcttcactttcccagagctcaccagaaaggggtcctataaccctgtcacccacatctatacagcacaggatgtgaaggaagttattgaatatgcacggcttcggggtatccgtgtgctggcagaatttgacactcctggacacactttgtcctgggggccaggtgttcctgggttattaactccttgctactctggctctcgtccctctggcacctttggaccagtgaatcccagcctcaacagtacctatgacttcatgagcacattcttcttggaaatcagctctgtcttccccgacttttatcttcacctgggaggagatgaagttgacttcacctgctggagatccaaccccaatatcgaggccttcatgaagaaaaaaggctttagtgacttcaagcagctagaatccttctacatccagacgctgctggacatcgtctctgattatgacaagggctatgtggtgtggcaggaagtgtttgataataaagtaaaggttcgtccagacacaatcatacaggtatggcgggaagagataccagtagattacatgaaggagatggaagagatcactaaggctggcttccgggccctgctctcagctccctggtacctgaaccgagtaacatatggccctgactggaaggacatgtacaaagtggagcccctggcatttcatggtacctctgaacagaagggtctggtcattggaggggaggcctgtatgtggggagagtatgtggacagcacaaacctggtccccaggctctggcccagagccggtgctattgccgagaggctgtggagcagtaacctgacaactaatatggactttgcctttaaacgtttatcacatttccgctgtgagatgctgaggagaggagtccaggcccagcccatcagtgtaggctactgtgagcaggaatttgagcagacttgagccagcagcaccaagcacccaggagggtgctggcctttgagccagcagcaccaagcacccaggagggtgctggccctaagagaacagtcacggggccaggcttccactgtctccctgccatgggatagagccccttgcccacgtgcccctgtgactacagaggaggaggctggtgctggcactggtgttcaataaagagtgatgtggcattttct

SEQ ID NO: 2802 - DNA, 1857 bp, Cricetulus griseus
tctgaggctgcgcaattcccggagttcccacggtcctgcagtctgcaaggcggtcacccgcccagccttctgtagctgacgatgtgcagaatgatctggaaagcggctgtgctgctcagcctggcactgggtgctggtgctcttgcggtcggtgtggatgatcctgaggatgctggcaagcactgggtggtgattgtggcgggctccaatggctggtataattaccggcaccaggcagatgcatgccacgcttaccagatcattcaccggaacgggattcctgatgagcagatcatagtgatgatgtacgacgacattgccaactctgaagacaaccctactccaggcattgtgatcaaccgacctaatggtacagatgtgtatgcaggggtcctgaaggactacacaggagaggatgtgactccggagaacttcctcgccgtgttgagaggtgacgcagaggctgtgaagggcaaaggatcgggaaaagtcttgaggagtggtccccaggatcatgtgtttgtttacttcacggaccatggagctactggacttcttgtgttccctaatgaggaccttcatgtcaaggacctgaacaagaccattcgctacatgtatgaacacaaaatgtaccagaagatggtgttctacattgaagcttgtgagtctggctccatgatgaaccacctgcccaatgacatcaatgtttatgcaactactgcggccaacccccacgagtcctcttacgcctgctactatgatgaggagagaaacacatacctgggtgactggtacagtgtcaattggatggaagactccgatgtggaagatctgaccaaagagacgctccacaagcagtaccacctggtgaaatcccacaccaacactagccatgtcatgcagtatgggaacaaatctatctctaccatgaaagtgatgcagtttcagggtatgaagcacagcaccagctcccccatctctctgcctccagtcacacgccttgacctcactcccagcccagaggtgcccctgaccatcctgaaaaggaagctgatgagcaccaatgacctgaagcaatcccagaatcttgtcgggcagatccagcggcttctggatgccaggcacgtcattgagaagtctgtgcataagatcgtctccctgctggcagggttcggggaaactgctgagagacttctgtcggaaagagctgtgctcatggcacatgactgctaccaggaggctgtgacccacttccgcacacactgctttaactggcactcccccacgtacgagtatgccttgaggcatttgtatgtgctggccaacctctgtgagaagccatatccgattgacaggataaagatggccatggacaaggtgtgccttagtcactactgaatagctgcgcttccggaagagtgaacacggtccattggaatgtgtaccaacctggagactgaaagggtggggccagaggcgctacctaagccctgctggccaggaatgctgtaagcccctcccagggcttgctttctgaggatactgacccactaagaagccggttcgggtggcaaagctctctggagaaggaacttttgctgtttaggagtttgtttttttgtttgttttgtttttttttgtttccattagctttcaagagcaaattcactgcgacttgtgtagccattgaaggaatctttttgagaaatttgaagctgaaacccatttccatcttcacagtgattttactgaagagggctgcaagcctctaagggagaattatttttagaaaatataattttttgattgcttttgtattttattctgtggtgatggatgtctttaaaaaaaaaaagt

SEQ ID NO: 2803 - DNA, 1857 bp, Cricetulus griseus
tttggctgctgctagaactggccaccgtcgcccctacctacccaggctagctccgtccacttagcacgtttgcatttatccgtggatcttctgagagtcggtcttgtaaatgttcagcattttcgctgctttcctgcctttttctggggactgtgtcaacacttgcccagaccgccgaagagaggaggctgagcccagagaagagcgaaatatgggggcccgggttaaagggcagacgtggtccttccagcccgctatttctacattcgggccgtggatacctcaggagaacagttcacatcttctccaggtgaaaaggcgttccaggttaaaatctcagcacctgatgagcaattcactagagttggtgtccaggtattagaccgaaaagatggatccttcatagtgagatacagaatgtatgcaagctacagaagtctgaagatagacattaaacatcacggtcaacatgtggccaagtctccttatgtcttacaaggacccgtttaccatgagaactgtgactgccctttggaagacagtgcagcctggctacgggagatgaactgtccagaaaacatcactcagattcagaaagatctggcacatttccctacggttgatcctgaaaagattgcagcagaaatcccaaaacgttttggacagaggcagagcctgtgtcactatactttaaaggacaataaggtgtatatcaagactcttggtgagcatgttggctttaggattttcatggatgccatactactttctttaactagaaaggtgaggatgccagatgtggagttttttgtcaatttgggagactggcctttggaaaaaaagaaatcaaacccaaacatccagccgatcttttcctggtgtggctccacagattccagggatattgtgatgcctacctacgacctgactgactctgtcctagaaaccatgggccgagtaagtctggatatgatgtcggtacaagctaacacaggccctccctgggaaaggaaaaactccacagctgtctggaggggccgagacagccgcaaagagagactagagctggtaaaacttagcagaaaacacccagagctcatcgatgctgctttcaccaatttcttcttctttaaacacgatgagagcctgtatgggcccattgtgaaacacatttcattttttgatttcttcaagcacaagtatcaaataaatattgatggcactgtggcagcgtaccgcttgccctatctactggtaggcgacagcgtggttctaaagcaggactccatctactatgaacacttttacaatgagttgcagccttggaaacactacattccagtcaaaagcaacctgagcgatctgctggaaaagcttaagtgggcaaaagatcatgatgcagaggcaaagaagatagcaaaaacaggacaagaatttgcaagaaataatcttatgggtgatgacatattctgttattacttcaaacttttccagggctatgccaatttacaagtgagcgagccacaaattcgagagggtatgaagagggtcgagccacattctgaggatgatctctttccttgcacatgccatcggagaaagaccaaagatgaactctgatatgcaaaataccttctattcatatgatggtgctctgaagacacttcttaactgtaaagattatttttaagtattagttccaaaaacaatgtaaaatctgttggtgactgttaaattctcagagtgtttcttcttatgcagtattcctgtaactgtcctttacagaacaatttaacaattttataataaaaccacctttattttaagagttcaagggcagtctgggctccatggtaa

SEQ ID NO: 2804 - DNA, 1856 bp, Cricetulus griseus
ggacaacgaacgagttgggatggccaccagctgggggagcatcttgcaagatgagaaacagcttgaggagttggcacagcaggccatagaccgggccttggctgagggcgtggtgctgaggcctgcggagagtcccagctcctctcaagtggtgacctatgccccgttcacgctcttcccctcaccagtccctagtgctctgctggagcaggcctatgctgtgcagatggatttcaacatgctggtggatgctgtcagccagaactcggccttcctggaacaaactctgtctagcactatcaaaaaggacgactacactgcccgtctctttgatatctacaagcaagtcctgaaagagggcattgcccagactgtgttcctgggcctgaatcgctcagattacatgttccagtgcagcgcagatggctccaaagccctgaaacagattgaaatcaacactatctctgccagctttgggggcctggcctcccggactcctgctgtgcaccgacatgttctcaacgtcctgaaaaagaccaaagaagctgccaagatcctctccaataatcccagcaagggactggccctgggaatcgccaaagcctgggagctctatggctcagctaatgctgtggtgctactgatcgctcaagagaaagaaaggaacatatttgaccagcgtgccatagagaatgagctactggacaggaacatccatgtaatccggcgaaaatttgaagatgtctctgaaaggggttctctagaccaaaaccgaaggctgttcatggatggtcaggaagttgctgtggtttacttccgagatggctacatgcccagtcagtataattcacagaactgggaagcacgtctgctgctagagagatcatgtgctgccaagtgtccggacattgccacacagctggctgggaccaagaaggtgcagcaggaactgagcagggtgggcctgctggaagagctgctcccaggacagcctgaggctgtggcccgcctccgtgccacctttgctggcctctattcattggacatgggtgaagaaggggaccaggccattgctgaagcccttgctgctcctaaccactttgtgctgaagccccagagagagggtggaggtaataacctgtatggagaggaaatggtgcaagctctggagcagctgaaggacagcgaggagagggcctcctatatcctcatggagaagattgaacctgagccttttgggaattgcctgctacggcctggcagccctgcccgagtggtccagtgtatctcagaactgggtatttttggagtctatgtcagacagggaacaacacttgtgatgaacaagcatgtggggcatctgcttcggaccaaagccactgaacatgcagatggaggtgtggccgcaggagtggcagtcctggacaacccctaccctgtatgagggcacatcctgcacttcactcaagagaccttctatcccctgtacttgacattcctctcctaattcctgagggctacccctgtctccaccttaggggaacttgtcttttccatagacctccagggtcttcagggaagggaaaatcctgggtaccttctctcagccttccatctgaggaccagaagagttatgcttccattagaagagttctggagatccccagatcttggagtgtggggaaggaagctgctttgaggtaaaggccataagccctgcagatcttattaccctcttgtgagcctttccagcaggttctagtgcctgacttggggtaggactgagtgataggaagaagtgggtaggagggcatagactttcccagctctgccctaaataaagcaacaatgatgat

SEQ ID NO: 2805 - DNA, 1856 bp, Cricetulus griseus
gaaatccagagaaggcagctgcaagaacagcagcgacagaaggagctggagagggaaagaatggagagggagaggttggagagagaacgactagagagagagaggctagagagagagcgcctggaacaagagcagctggagcgcgagcgcctggagcgggagcacatggagcggctggagagcgagccgctggagcgcgagcgcgagcgcgagcggcagcagcgggaggcgggagcgcctggagcagctggagcgggagcaagccgagtgggagcgcgagcgcagactgtccaatgctgctgcagctgcaattgcggagcaaagcttaggaaagtgtctcgggtggaggatggctctttcccaaagtggagggagtactgtgggtgtgaacttggcctcgtcgaaaacagatgctggtcgtgggaatggaccccttcctctagggggcagtggcttaatggaagaaatgagtgctctgctggccaggaggagaagaattgactgaaaaaggttcaacagtagaagcagaacaaaaagaagacagaagtgaagatgcagagcctgtaacttctaaggcctcgtcaacaagtacacctgaaccaaccagaaaaccctgggaaagaacaaacacgatgaatggcagtaagtcacctgtcatctccagacccaaatctacaccttcatcacagcccagtgccaatggagtccagacagaaggacttgactatgacagactgaagcaggacattttagaagaaatgagaaaagaactagcgaagctgaaggaggagcttattgatgcaatcaggcaggagttgagcaagccgaacactgcatagagaagcaaactgaggagagacaagacttgaatctggagaaaaaacaaaaattcctaacaaacaactcttaacataaaatatggaacagatggaattgtttgtgctttcaaagggtggtatttataagaaaggtcctaaaatgtttagtcccatttgaggaattttagaatgataggaagtctttcgggttagccttcatgcaattttgtagtttaaaacaaaatccgtccggaatttaaagatttagatgccttcctaaattgttacaatgctttaccaaatctatgacttctacataacaaacagttgtcaaatgtaaaccattctattatagatttaccgtaggttttcaaccttttttagacttatgcatgcggacatttttataatgtaattacaatcaccacaaagttagcttttttaattacagacagtaatgcatgtcacactaatgtgtagtggccttctcaaggcctagtcccagggaaaccattttgtagaatacagggaagagggaggaaggggaggaataattttttatttaaagttaattctgcactatcttttttcccctcaattatctgcatgagttataatgagaaatattttgtgactttaatcggtaaacatgttaacaaaaccaagtacttaacctcttacaccatgtcttcagctgtttgtattttaaccagcaatctcaatggtctgaagcatgactctgagcttcccatgaatcacacatctcactgtggaactctgaaagtttggtcacagaattttgttgttactatcactcggtccctgcagtgctgcaggtgtgtgggtacatgctcctgactgtgaagctgctcttgacctttgttgtactaaaatacgagaaatatcaatggtggcagcaattagggtcacagaaatcgccagataaagggacaccaatggagagttctgcagttttcttttaataaactgaagtaagatttaggtggtaggaagagtctgatactgttagaccctgag

SEQ ID NO: 2806 - DNA, 1855 bp, Cricetulus griseus
gttctcttctggaaactctgtgactttaacaagaaattcctgttctttggtcctgaagagcagtgatgtgctggatatcctggtccctatcctctattttctcaacgacgcccgggcagatcaatctcgggtgggcctgatgcacatcggggtcttcatcctgctgcttctgagcggggagaggaactttggggtacgactgaacaagccctactcagtgcgagtgcccatggacattccggtcttcacaggcacacatgcagatttgctcatcgtggtattccacaaaatcgtcaccagtggtcaccagcggctgcaacccctcttcgactgcctgctcaccattgtggtcaacgagcctgtccatggtgactgccaacaagctgctgcatctgctggaggccttctctaccacctggttcctcttctcagcgtctcagaaccaccatttggtcttcttcctcctggaggtcttcaacaacattatccagtatcagtttgatggcaattccaacctggtctatgccatcatccgtaaacgtggagtcttccaccagctggccaacctgcccactgacccaccctccatccacaaggcacgaaccaggcacccttaagaccagcctggtggccactccaggcattgacaagctgacagagaaatcccaggtatcagaagatggtaccttgaggtccctagagcctgaatcccagtcaagttcagcggaaggcagcccgtctgaaggggagcccagtcagacatggagagagcaacggcggttgtccagtgcatcagccagtggccagtggaacccaacatcagattggatcttgtcctggaagtccaagctgcccctgcagactatcatgcgcctgctgcaggtgctggtgccccaggtagagaagatctgcattgacaagggcctgacggatgaatctgagatcctgaggttcctgcagcacggcaccctcgtgggactcctgcccgtgccccaccccatccttatccgaaagtaccaggcgaactcaggcacggccgtgtggtttcgaacctacatgtggggtgtcatctatttgaggaatgtggacccacccatctggtacgacactgatgtgaagctgtttgagatccagcgggtgtgaggacgcggcccggggggaatagggccaggatggctggtcctagaccccagggctcccccaaccctttgttctgagctttaaaggaccaatatcagggcatggggcaagtagagtggttggtcctggatgtcaggtcccaggtgcccattgtggctggagacaacagggaggaaaaagaagtgccctctgccctctaagctgttgtcctagaagccttttgtctccagagacatgagtcccaccagagcccttgcccactctggctcctccttcaagatctgcccttgtgctgtctgctcctagaggctgccaggttgctgtgccctaataggttttccccccaaaaaggagccatgtgctgtcccgtggggcacctgggcatggtgaaggaagccctggctacctagcctgagactactgttccaggccctctcctggccagggcctttggggaaagagcagttgagctgctggccaaggaggctgggggctggggcagcttataaagcaagactggtggtgtgctggtaggggcttgggagccagggtgtcgagggtcccctgttactgtctttggaccagtggatattgcctgactggcggggtctgatggatgtcagtgccctgccctgcctgggtggtggggtaccacgactctactggcccagctctggcctccgggtctcccttgccccacctgtgtcagtgcaat

SEQ ID NO: 2807 - DNA, 1855 bp, Cricetulus griseus
tgcagctcttcatggccgatgacgcctacagccaccacagtggtgtcgaatacgcagatcccgagaagtatgtggactcgagtcatgatcgggatcctcaccggctcaactcgcatctgaagctaggcttcgaggatctgattgcagaacctgagactacacactcttttgaaaaagtgtggatctgcagccatgccctctttgaaatcagcaaatatgtgatctacaagttcctgacggtgtttctcgccatccccttggccttcgttacagggattctgtttgctaccctcagctgtctgcacatctggatcctaatgccttttgtgaagacctgcctaatggtcctgccttccgtgcagacaatatggaagagtgtgacagatgttgtcattgccccgttgtgtacaagtgtaggtcgctgtttctcatctgtcagcatgcaactgagtcaagactgacaactgagacccaggcccagatgattggatgctgtagcacttgatgatgtaacactgaagcactgctgttctcttcactgcccaattgttagaatcaagaagactgtcaagaggggacccatgttcataaagttcaatgacagatcttaataaataatgatttccctaataaaagccaaggatttcatatctagttctataacaagtattggcaacactccacttatgagcagataggttttgctttagtagaaaacatgcatttgtagtgatgacttgataatggtcaaggggaaattttctcaaatactacagtaattttgtgcataaatgctcataaaagtatgggatttcttattttcttttactctaggagtaatgcttttaaaaattactttacagatagcgtcataaggctagagaggtaatatatacaaacattctagaaacttcatgcagtaacaaacacatatacttatgataataactatcaaatataataagacaaatgtgaaaatgtgttcctctgagttattattagcctgtaatcatatttaacaagatgtttcattttgctgtatattttgtacctaatgcaagtgttcctctaatcaaagtgctttatgttttgatacatttatatcatcttaattgttctcatatataaattaagcatagataccacagtgtaactttctttgtaagattggcctgtcacatatgagaacttttgcagcttctttggaattcagtgtaaaatgagctgtctatgtttcctctctaactttcccagcaaatgttttatgactggggtttatctggctgtgaccttaagacaggtatttgcttttgtttactggacttttttctcccatatagttagaaacttaatctgtattctacattccaatgaatgcttcaattactttcaagtaattctggtgctagttaataatattttttattttttactacagtggctcatgtagagaaacttataggagaattaacaattgtgagggtttataatactaaaacatatatacaaattaatagctaacaattacaaatcttcaagatgttctctgatatgaatttgttgaccgataaaatattattcataccctggtaatagccacaaagtgttgccactaacaggactatggagattgtattgtgctacttttgaaagtcagtctcatggctttatattatttttgtaatttaagaatttaaatacttggatatattgattagtcaaaaaattaataataaaatatcaatttaataaattataagcttttaaccttttaaaaagtgttgatagtttttaaagacaattatgtataattacatgtacaaaaccaatttaatttctaatatatatgatttcc

SEQ ID NO: 2808 - DNA, 1855 bp, Cricetulus griseus
tttgaagattagaccttaagggttttggtaaatcaataagggatttcccacagaaacaatgtcttcgggcccagtagcaccttatacgtacacacccctgaatctactcaagaatggcacagttgtcaatgtctgtggtgttgtgaagttctttaagcctccgtacctaagcaaaggaaccgattattgttcagttgtaacaattgtggaccagacaaatgtgaagttaacatgcacgctctttagtaggaactacgaagatcttccagtcatttataaagttggagacattgtttgtttccgtgggctgaagatggtagaagccttgcggtttgggcatccacacacatttcagcttcttcaactgtagtgcagttgtgcgatgttcaacccatgcagtactatgacctcacttgtcagctcctgggtaaagcagaagtggacggaacagcatttcttctaaagggtatgggatggcacaaggacaaagtttccctcttggagagtctccatacaagaccttaattttgaaggtgacttaagtcacattctacgcctacagaatctggtgatagacattgtagtttatgataatcatgtccaaaccgcaaaatccctgaagatcggaagcttccttagaatctacagcctccataccaaacttcagcccattaattcagagtccatgacttcactggtaaggctagagtttcatcttcacggagggaccagctatggtcgggggatcacggtcttaccggaaagtaactctgacgtagatcagctgaaaagggctttagagtctgtagatttgacaaccattcagccttcaaatgatacctgtcaatcagaaaatgaggaccactgtttaacaccttcaagctccaaatcagtatttggtctcactgtacgaggtagaaagatgtcagcaactctgtgctacaacacttacagatcaccattatttagagaagacaccactgtgtgccattttgaaggaaaaagacccctcaacaatatcgaatcctagcaaaactgaggtcatatgagcccaaacgacttttccagtctgttaaactactttgtcctaaatgtcattcattgcaagaagttccatatgaggaaaatgtggataaaattttgcaagatgctgcaactaaagccccagatagcaagctgcaggatacatcattgtatgagtcagaagtctggaccactgaaggtcaaggagggcgacaggtggctgttcattttgtgaagaatgataacattctccctctttcaagtgaatgtttaattttgatagaaggaggaaggctctgtgaagtctccaaactgtcgagtaagtttcacagtgtgattcctgtgaggtccggccctgaggacctggagctgttagacctttcagcaccattcctcatacaaggaaaagtgtatcactatggatgtaaacagtgttcaaacttgaaacctatacaaaacctaaattcccttcttaataaaggactatggattccttccgctgtggcagaagttctaggaattgtacctctacagtatgtgtttgttatgactttcactctggatgatggaacaggagttctggatgtttatctcaaggattctgagaactttttcaagatcccagcatcagaaatcctcactgatgacgaccatcagagaagtttagaaacaatcatgaatatgatatgccctccagaaataaaaattgatgcatacccatggctggaatgcctcatcaaatcctacaatgtcacagttggaacggagcagcgaatatgttaccagatatttgacaccatggttgcagaagacatcatctagtcctgatgtt

SEQ ID NO: 2809 - DNA, 1855 bp, Cricetulus griseus
ctatcttcaaatgaaagtgataacaatgaagacatttcagtcctctttttacatcccagtcccctgtgaaagccactttgtctgatgaggatgatggcttcatagaccttctcgatggagagaatctgaagaatgatgaggagaccccttcgtgcatggcgagcctctggacagctccccttgtcatgagaagacctacaaaccttggcaatcgatgcaggctgcttgactcctcttcccgtgcagctccagcatgttttgaatggcaagtttgctaacctcattaaagagtttgttatcattgactgccgatatccatatgaatatgaaggaggtcacatcaagggtgccgtgaacttgcacatggaagaagaggttgaggagttcttactcaaaaaacctattgtacctactgatggcaagcgtgtcattgtcgtattccactgtgagttttcttctgaaagaggccctcgcatgtgccgatatgtgagagaaagagataggcttggcaatgaataccccaaactccactaccccgagctgtatgtcctaaaggggggatacaaagagttcttcctgaaatgccagtctcactgtgacgccccccagttaccgaccaatgcaccatgaagactttaaagaagacctgaagaagtttcgtaccaagagccggacctgggcaggggaaaagagcaaaagagagatgtatagtcgcctgaagaagctttgaagccagacagcagcagccatatttccctctgcccctttcctcttccctttgctgcagagcaggaagcaaaggagccagctgcggtacacggagaaagacacaggccttccgtgccttaatcctgtctcctacactcccaggttggagcccagggctctcctgggccttattcggcagaccctggccgcctgtcatgaggggagagaagtgacaaacagaagtgctgctggccaaataccaaagataggctggaagggagagagaggtctttgtggatgacccataactttaatttattcagcttcatcgattattttattattttttaattcctcaagacttttactttactgcttcattaagtcaaaatactgccatcctaggtagagttttatcattccaggaactacctctacttttaaattaaaaaaaaaaaaaaatggggcagggataagaataggcaaacctgttgtggacagcgctaggagctcagtcacccctaggaggcactgtgaactgggattgctgctactcaaagtcaaggactgagatgctggtaagagcctgcaccagatccaggcttggctacaggacataagctaaccttcccagacctggcctacagatgactgtagactttctcaggaggaagtggtaaattttgaagtaaaatgttctgggtttatcatgttttaatttgagggacagggagtggtaaatcacaccagttacccccttaatctaaccccatggaggtgaggctctcgagggaacatctccatctgaggagctgggctgtgctttagttgtgtgcagcctattttggtgtctgtccatcaacatttccgggcagcagtctcctggtcggtcatctttgctccgctggggtctagccaggtttttcttagggacagtctcccctcttgcctctttctattctgggggtggggagggaatcagtgatattgaagatggctagttgtttgttatgggtttgagttacatttggctataaaacaaatcttgttggaaaatacatggagaacaagggaatgagcagcctcttccccagtgttgaaatgtgtcccaattagtctctggtttgtagagattctgttagttgaa

SEQ ID NO: 2810 - DNA, 1854 bp, Cricetulus griseus
cctcccggcggcccgggagcggcgaacgagcaagtccgaggggttcccgggtcaggtggcgccgcgaagatggtcgccaagcagaggatccgtatggccaacgagaagcatagcaagaacatcactcagcgcggcaacgtcgccaagacctcgagaaacgcccccgaagagaaagcgtcggtaggaccctggttattggccctcttcatttttgttgtttgtggctctgcaattttccagattattcaaagtatcaggatgggcatgtgaagtgactgaccttaagctgtttccattctcctgtgacttttagcttgaactcattcctgatgttcgatgccctggttaaaaacaattcagtaaatcatcctgcctcagaatgacgttttcatatcatccttcatgtggcattccaaggtttcttcaagagccattccaggttttctagtccataccacagtgccttgcaaaagcaccacatgaataaagcaataaaatttgattattaagttccagtagtagactgtacttattcagtacagaatgagttttatgtggttattaaaacttatggctaattagattaaatctgtgtagacagggtatagattttgttaaccctaatgtgtaaatgcaattagcttaatttaaatttggaatcttaaggttttatatagctaggcaatttattactctcttgaattgaaagcacactccattatagggtcatgtaactatcctataataaggtgcttataagtggacaactacacagcctagttctaccacaatcattgtctacctattttttgtttttttaagtcttcaagggcataatataagtagagatgctaacagctgcatctgttttaactataatgtttctgttacacagccttgaattttgcatgaataagtatagtcacccaagatcccatccgtaaaaaaatcggttgagcattttgtaacttaatcagtgattgcagtttcactaaaagctatcatggtggaatgaaatgagggaaggtttgcttacatcatatctcaccagaattaaagaaataaatgcctcatcggaacatgttgagtccagcgtgccataagatatcttagcatgttaattgcacttttaataccaaaaaaggcacatcaactaaaaagctatgattgaaatgcccttagggtactaggtctatcaatctagattttggaattaaatgaatttactgataaggatcagtctagtcttcctttgtatgactttgtagttgtgattgatcaaaattttctttttcttaaatagtaaggtgagagtgatgaggcaggaaggaaaggggtagttagggatgtacaagaacttcagtgtattaaacaggaaagaaagctggctgtgggtctgcagggtcatcactgatgcttacctgcctcttcactcataagtgaatccctgcacttgattccctctgaagcaagtcttagttactaagtctattttattataactttaaaagtgaaagatcctctaaatttgtagcaggtgccttatttcctttgaatcaaatcattccataccagaatttccctcagtttactatagataattggctttaaggtatttttgtttttaaacatacattttaattaatttgttaaattgctataacaatcatttcacatttgtaaaattacattccctttgtatcatgtaatttacctattgagtgcattttatattcaggttggattatgcatggtttgggtcaatgaaagctgtgtctgagtgagttatggtttaaaaaataaagttcccggagattatgatgatgtcttttgttagtaaaaagaaaaaaaaaa

SEQ ID NO: 2811 - DNA, 1854 bp, Cricetulus griseus
tcactctgccagactagggcaagtacaccacgaactccagtgcagaatcaccgtgtacagctggatctggggctgtgggacaagttcagtgagctggccactaaatgcattatcaagatcgtggagtttgctaaacggttgcctggttttacaggactcagcattgctgaccagatcactctgctcaaggctgcctgcctggacatcctaatgctgcgaatctgtacaaggtataccccagagcaagacaccatgacattctcggatgggctgaccctgaaccgtacccagatgcacaatgctggctttgggccccttacagacctggctttgcctttgctgggcagctccctgcccctggagatggatgacacggagacaggactgctcagtgccatctgcctcatctgtggagaccgcatggacctggaggaacctgagaaagtggataaactgcaggagcccttgctggaagccctgaggctttacgcccggcgacggagacccagccaaccctacatgtttccaaggatgctaatgaaaatcaccgacctccggggcatcagcaccaagggagcagaaagggccattaccctgaagatggagattccaggcccgatgccccctctgatccgagagatgctggagaaccctgaaatgtttgaggacgactcctcgaagcctggcccccaccccaaggcttccagtgaggtatgaagctccagggggccagggcaaaacgggccaaaagtccccaacctgaccagggcccctgacctaccccactgtggggctgggctccaggcagcagactgaccattccccagacaccaccagtgactggggggaggacctgccctgcccattccccacctttcccatgagctcattgttttgccaaagtttctaggggtgcctgtgtccatccctgtcctgttctaactggctccctctacagtcctggaggactgctctgcacctaccagaagaaccggaggaggggtgaacctgggtctggactctaaaatctcagcactgcctgtccgattcaggccacaggctccccaggcaggaagaaaccctgccttcctacagccccatcctctgccaggtgcttgggcttctgagagcaaacaggaacactagagaccaaaaagggggccccccaaggagggctgagcccacccttgtgccctaccctgggtgcctaacgctgtgtgatgaacctgccatgcacactgtccctgtgccccatccttcctgccaggtatagaggcaggctggaccctgcatttctggggtggggactgaggggtgaagggagaagtgtaagccctttctgtacctctctgctgaggtacagcacacatcctgggccctccattttacaaacccctcccttagccctgtcttgtgccttggcctcctgcccccatctcagccacgaggcagggaccctcctacactacagaggggccagggatccctctcctagtgccttctacccttgaccccccagagcagcttggcccgcggaggggagatgctgcttagctgatccaccgtgacccagaggaagcctctatttatttattagcttttgtttacaccctggaatgaccccttcctccaggggtcttgggagggggagcccagggcctctgtgaccccctcccttcttccccccatctgccccctgtttgtatttagctgccaaataagattcctgcaggctcccccttttctctggggggtcagggtgctgtcccctcccctctgtttacatctcctcgcccactccgctgtatcgcatattgctgagttttctatttttgcaaaataaagtgatggaaa

SEQ ID NO: 2812 - DNA, 1854 bp, Cricetulus griseus
ggcggtggtggtggcggaggtggcagtgtggctcctcctaaacctcctcggggccgcaagaagaagcgggtgctggaatcagggcttcctgagatgaatgacccttacgtccttgcccccgatgacgatgatcatcaaaagatggcaagacctacaggtgccggatgtgctcactgaccttctactcaaagtcggagatgcagatccactccaagtcacacaccgagaccaagccccacaagtgcccgcactgctccatggcccagcacatccgtatccactcaggggctaagccctatagttgtaacttttgtgagaaatccttccgccagctctcccatcttcagcagcacacccgaatccacacgggcgatagaccatacaaatgtgcacacccgggctgtgagaaagccttcacacaactctctaatctgcagtctcacagacggcagcacaacaaagataaacccttcaagtgccacaattgtcatcgagcatacacagacgcagcctcactagaggctcacttatctacacacacggtgaagcacgccaaggtgtatacctgcacaatctgtagtcgggcatatacatcggaaacataccttatgaaacacatgcgcaaacacaaccctcctgatcttcagcaacaagtgcaagcggcggcagcagcagcagcagtggcccaggcccaggctcaagcccaggcccaggcccaggcccaggcccaggcccaggcccaggcccaggcccaggcccaggcccaggccagtcccaggcatcacagcaacagcagcagcagcaacagcagccaccacctccaccacaaccaccacacttccagtctcctggggcagctccccagggtgggggtggtggggacagcaacccaaaccctccaccccagtgttcctttgacctgaccccctataagacggcagagcatcataaagacatctgcctcactgtcaccaccagcaccatccaggtggagcacctggccagctcttagagatccgcactgccacccactggaaagagggagaagttctgctccctcctttgtcaactcctcttggtgggagagttctcttcttccttgacaagtcctgttttcagctccttggtcctcaggcatggcttccttcaagacaaccatccttaatctcagctgaccctgactgacaaaggaatcctgagctgatagtgttacccaacgcccccataccaagcagagctcttcaaactgggggttgtgctcgagagaggatctgctatggcctcacatcttgtccagtgtgggcacttccctttctctctcttcttctcaaagttggagccaatagaaggctagcggctggccctcccatataacagaaggaagctctaagtgcaaccagccttccgtgctgcgcttacctgtaaaagaacaggtcttgcacatgccctggcccctgtgagccattttctttcccttacatggtcatggtctcacttcatattgggtggtgactgtacctttttatttctaagagggacagtagccgatacatggtcaccaaggtgccagagatttcccggtgaccaaggggtagtatacaagtgtgggttatgacttttccttgcagcctccttccatctctgtcaaccaagggcctgtattctccagagaagggagaagtcagggcacacatgtggactggacttagctccctaggtgccacggtcagatgctggacatggatttatatatatatatatatatataagtatatatatatatacctgctcatcacggccatctttgttgtaaccatttctgtgtttataaactgcattatctcagaattttca

SEQ ID NO: 2813 - DNA, 1854 bp, Cricetulus griseus
ttaaaatggacattatcctaaccaaacccaactttgcaaaacacatcgtgtgggctccagaggacttacttccggttcctttacctaaacccgatccagtatcttcaatcaatttacctctgcctccacttatagctgaccagaggctcagtagattatggaatacaaaaagtgatcatcaaagtgccctgtcccttgatccaaaatcagcagccaaaatgaatataacacagagagagggctacttagaacagtgtggagacttacatagttcagggggtaaattaggagaccctaggctgcaaaagaattttgatcctaggcttcacagactgcccaatacagagtcacatcaagcagctataaaggactcacatgtatcaaagagtggcccaaacctagccagatcaaaccctggtttgtcacagtcatcaatagcatcacctatcaatgctggtcctgtggctcttcctccatatgcccccaaaactctcttcagctggcctcccactgggaacttcaagttcagttcttactagcattagtttgtacgatcctagggagaagggttcattgccttcatcagagctaactaccatttcttcagaagaaaatgcagagaaccaggaaaaaagtggttcaaagagtagtgataaaaatgagccttcccctggagaagtgatcctacagaaaactcctgcagactcggacgtcccaggtgaggggccagtcgacacgcaggcagatactctgaggagtgcggataaggttcaggtccccgctgtgcatagtcttcctattcaggccttaacaggcttaattagacctccatacagtgatccaaggcaggcaagagagccagaacaggcaagccccaccccaggtgatccaagtagagaaacagatgacaaatctctgaaagaggtttttaagacatttgatccaaccgcgtcaccattttgttagctgttgtgtaattaagctcttctcacgctgtcacagttctctgctgttttgtaactggtttacctctatagtttatttattttttaaattataaacattttcagctgctagtatcagaaccacatgaacttacatcctctaaagtctgtggtattttatataatatttttataacttcaagagactgtagtatagaaatacatatcatgtgagcattagtaaaagtacttttattgtaagtgaaccatcatgaactcaacagtcagcttgagtatatgccagttgtctttcgtaatcaatgtttaggttaacagttaccacttttgtatggttgtttagtttcaagcaatatgataagcattaattttgagaatcagtattttaactaggatcctcttgccagcacaaaaccgattagtttgtaacaccaactgctaagtaaaatgcaaggtgaaaacatttaaaaccataattagctcactttattagcattggcaacactgtttgtgtacatgaagcacttgaatgttgtatcttttaaaagtattttattgaacactgtatcatagaagctgaaggaatataaatacagtgttttgctatagtaaaaaaatttccaggttctctaacagaacttttaaaatttaatttttcatattaaatagttatgattttattgctctatcacattgtgatatttatgtatttcagtgttttgtctttagcagcataatttttatctctttcaaatgatgtaactgcaataattgtgctcatcatgactgtggcaatttttaacagaattttcaaagtgagactgtagtaattattaagctgataatgtttcaaatgtctagattctatattttttcttgcatagcaaaaaca

SEQ ID NO: 2814 - DNA, 1854 bp, Cricetulus griseus
tcaccatggataatctgtcatcagaagaaattcagctaagggctcaccaggttactgatgagtctttggaaagtacaaggagaatcctgggtttagccattgagtctcaggatgcgggaattaagaccatcactatgctggatgaacaaggggaacaactaaatcgcatagaagaaggcatggaccaaataaataaagacatgagagaggcagagaagactttaacagagctcaacaagtgctgtggcctttgtgtctgcccttgtaatagggcaaagaaatttgagtcaggaaagaattataaggcaacatggggagatggaggagacaattcacctagcaatgtagtatgtaagcaaccaggccgggtaacgaatggacagcctcagcaaaccacaggagcagccagcggtggatacatcaaacgtataaccaacgatgccagagaagatgagatggaggagaacctgactcaagtgggcagtatcctaggcaatctaaagaacatggctctggacatgggcaatgaaatcgatgctcagaaccagcaaatacagaggatcacagaaaaggctgacaccaacaaggatcggattgacattgccaatacaagagcaaagaaactcattgacagctaaagccactgctgtacttctttaccatttgctcagttctctagctcctaagtcattacctgttcagagtttgaaagtgtgtgaaagaagggccagaggaggaatgcctccttgcttcttattttctatcctttggggtaggttcctgctcagacttctttacagcgcctctctctcagttcacactcttacttaggctgctttccgtacatcactcatcctcttcacttagcttcttttgcattcaagatttggaagcattgccaaagagccatgaagaagactcattaaagaaactataggtcaacaaaacaaaacaaaacaggctaatgcctgaggtgggagcttttactcatgcattttgttttacatcactattttgcagcttctgctccaaaggaaaatacagtgggttttcgttaagtgaacctcacttctgaattcatagtgatttgtgtatgtacataggttttgggatctcgtttcatattgcacatgcaggaacactgtataaatgagtgccttttatcctcgtattatgagtcatatcatatcatggtctcattgtaggcctatttaccttgtgaagttgtcattagtcttttaaaatcaaaattttggagaaagtttaagagtgtatcatgtgaattcagatttacctcaaatactaagaattatgttcagatatgaaaaagaaaacttgttttgatctcaggtagaaaaatagattgttttgagttttgtagttttagacatttaaaaagttatgatttgttactaaagttgttttggaaaattatgcctttgaattaattattgatgactgcactgccactctctgccatgcatgcaagtcaagtttatgtagttctgaagttccaggaaagctgggtaggtatttgtcacctttgtttaaaattagcatctgtgcacttcagagctaccaaagtagattggtttgaccaatgaccattgcttgattcttacaattaaattttgtaactaatggtattgttctttcaaataggtaacgtgtttctgacttatttgtgggggcaatcattttatcagcttttgttaacaaattgaataaagcaaatgtccatagtcaagaactccaatagaaagttgcaattagctcttttccaatttttattcaaaatgtttacaggagtttctggtgatttgtcatgagtctgttttagtcattacttgtcat

SEQ ID NO: 2815 - DNA, 1854 bp, Cricetulus griseus
atggagcagccgccggacgcccaagagtaagctaaaaaagctgagtgaagacagtttgactaagcagcctgaagaagtttttgattgtattggagaagcttggagaagggtcttatggaagtgtttttaaagcaatacattaaggagtctggtcaagttgttgcgattaagcaagtgcctgtcgagtcagatcttcaggagataattaaagaaatctccataatgcagcagtgtgacagcccctatgtggtgaagtactatggcagttacttcaagaacacagacctctggattgtcatggagtactgcggcgctggctccgtgtcagacatcattaggttacgaaacaagacattaacagaagatgaaattgcaaccatcctaaaatccacattgaaaggattagaatatttgcattttatgaggaaaatacacagagatataaaagctgggaatattctcctcaacactgaaggacatgcaaagcttgcagattttggagtggctggccagttaacagatacaatggcaaaacgcaatactgtaataggaaccccattctggatggctcctgaggtaattcaagaaatcggttacaactgtgtggctgacatctggtccctgggcatcactgccatagagatggcagaagggaaacccccttatgctgacatccatccaatgcgggccattttcatgattcccacaaacccgccaccaacattcaggaagcctgaactctggtctgacgacttcacggattttgttaaaaagtgcttagtgaagagtcctgaacagagagccacagcaacacagctgttacagcatccttttatcaagaatgcgaaacccgtgtcaatattaagagacctgatcaccgaagccatggaaatcaaagccaaaaggcaggaggagcagcagcgggagctggaagaagaggaggaaaattcggatgaagacgagctggactcgcacactatggtgaagacgagttcggagagtgtgggtacgatgcgggccaccagcacgatgagtgaaggagcccagacgatgatcgagcataacagcactgtgttagagtcagacctggggaccatggtcatcaacagcgaggccgaggaagaagaggagaggaagaagaggacggaactatgaaaagaaatgccacgtcacccgaaggacagagaccgtctttcatggactactttgataagcagggcttccagaacaagagccacgaaaactgtaatcagagcgtgcgtgagtcccgccccatgtcacaaagtgtttttcctgatgactggagagtccctcaagatggagactttgactttttaaaaaatctaagtttagaagaactacagatgcgtttaaaagcactggaccccatgatggagcgtgagatagaggaactgcaccagagatacagtgcaaagaggcagcccatcctggatgccatggacgcaaagaagaggagacagcagaatttctgaccaatgtcctctgcctcagcatgaccagagaccaagccactaagagaactgaagggactgtgctgctttttaatccccaaaatgtacgttctacaagtttgcaaaagtcaaaaatgatggtacacagccaggtaaattcccaaagctagactttgagttgtgtccactctggcttcggttagaaaggataaaaacaatagaaatgggctctttctgccggctgctacgccagcaaccaaaccaatctaaattaaagctctatttggagactttggaaatccaaagttgtcgcttaaccgcacagtactggagggctttatgtcacactatcctctgttcctgtggaaaagcctatttattg

SEQ ID NO: 2816 - DNA, 1854 bp, Cricetulus griseus
gatccggagccgcccgaggtcgccgccgcagtccccggcgcccctggcgagcggtgagcggtgagcgacatgtcctttcgaaaggtggttcgacagagcaaattccggcatgtgttcggacagccggtcaagaatgatcagtgctatgaggacattcgagtgtcccgggttacctgggacagtaccttctgcgcagtcaaccccaagttcctggcagtgattgtggaagccagtggcgggggtgcctttatggtgctccctttaagcaagacaggccgcattgacaaggcctacccaacagtgtgtgggcacacgggacctgttctggacattgactggtgtccccacaatgatgaagtcattgccagtggctcagaggactgcacagtcatggtatggcagattccagagaatgggctgacctctccactgactgagccagtagtggtgcttgaggggcataccaagcgtgtgggcatcgtcacctggcaccccacagcccgaaatgtgcttctcagtgcaggttgtgacaatgtggtgcttatctggaatgtgggcactgcagaggagctataccgcctggacactttgcaccctgacctcatctacaatgtgagctggaaccacaatggcagcctcttctgctcagcttgcaaggacaagagtgtccgaatcatcgatcccaggaggggcaccctggtggcagagcgggagaaggctcatgagggggcccggcccatgcgggccatctttctggccgatggcaaggtgtttaccactggtttcagccgcatgagtgaacgacaactggcattgtgggacccagaaaaccttgatgagcccatggccctacaggaattggattcaagcaatggggccctgctgcccttctatgacccagacaccagcgtggtctatgtctgtggcaagggtgactccagcatccggtactttgaaatcacagatgaggctccctacatccacttcctgaatacattcaccagcaaagaaccccaaaggggtatgggtagcatgcctaagaggggcttggaggtcagcaagtgtgaaattgcccggttctacaaactccatgaacgcaagtgtgaacccatagtcatgaccgtgccaagaaagtccgacctcttccaggatgatctttatcctgatacagctggacctgaggctgctcttgaggcagaggattgggtgagcgggcaggatgctgatccgatcctgatctcactacgggaagcatatatgcccagtaaacaacgggatctgaaggtcagccggcgaaatgtgctatcggacagtcggcctgccagttccagccgccctggagcctccacagctaccacaatttctgatgttttcagtggcacctttgctggggctggtgaatctgggaaactacaagaggtgatgcaagagctccgggcacttcgagtgctggtcaaggaacagggggaccgtattagccgcctagaggaacagctgggccgcatggagaatggcgattcataggaccaccagggacctgcacccaacactgcctcctccaacccttctcacctagcttctgtggccaggtcacaccaggcagtttgctgcttagtgcctctggggcagatcatgaccagtttacacctctccacaacctgggacccaggttggaagcaccacctggcttttggaagatttttttgtaccaaggcaaactcccaagttctttaagggaccatcttctcgacctgcccagcccactctcccctcccccgagaaagcagcagagacagttctatattttcattctaaataaaatgctctttctaaagccaaaaaaaaaaaaaaaaa

SEQ ID NO: 2817 - DNA, 1854 bp, Cricetulus griseus
aaagttacaagttgttttacatactaagagagtggtcagcattgccttgtggtcagacctcatccaatggctgttctggacagtggtgaggtgtatggctgggggctataattggcaatggacaggtctgggcttggggaaacaatgggtaaccagttgacccccatatgggcagctgggaactggcagtaaaaacaatctactaagcccaacacccatcatggtggaaaaagaaagagttgtagagattgcagccccgtcactccacccacacatctgccgctaagacccaaggcgggcacgtttacatgtggggccagtgccggggccagtcggtggtccttccccacctcacccacttctcctgcacagatgatgtgtttgcctgctttgccacccctgcagtctcgtggcgcctcctgtctgtggagcatgaagactttttaacagttgcagattcactgaagaaagaatttgatagtccagaaactgctgatctgaggtttcgaattgatgggaaatatattcatgtccataaagctgttttgaaaatcaggtgtgagcacttccgatccatgttccagtcctactggaatgaggacatgaaggaggtgatagagatagaccagttttcttaccccgtgtaccgtgcctttctccagtacctctacacagacacagtggatctgccacccgaggatgccataggtctcttggacttggcgacatcgtactgtgaaaacagactgaagaggctttgtcagcacatcatcaagcgaggaattactgtggaaaacgctttctcattattctctgctgcagtcagatatgatgcagaggatttagaagaattctgctttaagttttgcatcaatcatttgacagaagttacacagactacggcattttggcaaatggatggccccctgctaaaggagttcattgctaaagccagtaaatgtggagcctttaagaactgaatgaagcctgaggctgctgggctgggtgtgagtgctctggggcacggtgggtgatgtgattctgcaggtaaaaccccacatgtatattttaaatgtgattttcttatatttggctgatctctgtgaaaggatgaaagtttagttgcttttgattttttagttttgatgagaggatcttttgaacttggattaaggaagttggtgagatgtctctggttctttgacaacaagcctgttcacactgtcggtgaaggacaagcccagtccagtgctcctgagtgctgctcactgtcaccaccttcccgtgggagcaccagcaccatgggaggctcttaagaaatactattgaatatgcattaaacccactttaacagccaagaaatgtttaggtttgccgagagtctcttaagatgtgggcatctaggtgctggaaagatggctcagcaggtaaaggctcttatcattaagactgatggcttaagttcagtccccaggacccacatggtggagagagcagacttacaaattgtcctttgaccgctatacatgtttttgtgtgtgtgtgtgtgtgtgtgtgtgtgtgtgtgtgtgtgtgtgtgtgtgtgtgtgtgttagtgaaagaataagccctttcaaaagtgtttgaaattttttttaaatgcaatcttttatttttctattaggttttgtttttaatcatagaaacaaaaattattcttgaaattagtgttttcttctgatgtaataatggaagccagagaagtcacatttcttaaaatagcctaaactgtatccttgaacttactggaacaaacaacccctcgaaggaaaaaaaaaaaaaaaaaaaaaaaaaaaaaaaaaaaaaaaaaaaaaa

SEQ ID NO: 2818 - DNA, 1853 bp, Cricetulus griseus
gcaaatgaagtggaaactgagcagatcctctgcgatgcgtctgtgatgtcttttactgcaggcagctactcttcttatgtacaagttagaggatctgttcccttatactggtcccaagacatctcaactatgatgcctaaaccacctattacactggaccaggcggacccctttgcacatgtagctgctcttcactttgaccagatgcttcagaggtttggctcaccgatcatcatcttgaatttagtgaaggaacgggagaagaggaagcatgagcggattctgagtgaagaactggtggccgcagtcacctaccttaaccagttcctgcccccggagcacacaatcgtttacatcccctgggacatggccaagtacaccaagagtaagctgtgcaatgttctcgatcggctgaatgtgattgcagaaagtgtggtaaagaagacaggcttctttgtgaaccgccctgactcttactgcagcactttacggccagatgaaaagtggaatgaactaggaggctgtgtgaatcccactggtcggctgcagactggcattcttcgaaccaactgtgtggactgtttggatcgcaccaacacagcacagttcatggtgggcaaatgtgctctggcttaccagctgtattccttaggactgattgacaagccaaacctacagtttgacacggatgcagtgaggttgtttgaggaactgtatgaggaccatggagacaccctgtccctgcaatatgggggctctcagcttgttcatcgggtcaagacctacaggaagatagcaccatggacccagcactccaaagacatcatgcagactctgtcccgatactacagcaatgccttttcagatgccgatagacaagattccatcaatctcttcttgggcgttttccaccccactgaagggaagcctcatctctgggaactccccacagacttttacctgcaccacaaaacaccatgagcctgttaccaactaggaggagctatactcactggtggacaccggaggtgatacagcatctgccactgccttacgatgaagttatctgtgccgcaaacttgaagaagctgatggtgaagaagttccacaggtgtgaagaagagatagacattcacaatgagttcttccgaccgcatgaattgagcagttttgacgataccttttgcttggccatgacaagttcagcacgtgatttcatgcctaagactgttggcattgatccaagtccatttactgtgcgaaaaccagatgaaacgggaaaatctgtactgggaaacaaaagcaaccgagaggaagccgtcttgcagcggaaaacagcagccagtgccccgccacctcccagcgaggaggccgtgtccagcagctctgaggatgactctggcactgaccgggaagatgaaggctctgtgtctcagcgctccactcctgtgaagatgactgaccctggggacagtaccaaagtgactgagaatgtggtccagcctatgaaagaagtgtatggagttaacctctctgataccctttcagaggaagacttctccatttatgccaggtttgttcagctggggcagagtcaacataaacaggacaggaacagccagcagccgtgttccaggtgctctgacagagttataaaattaactcccatttcagctttctctcaagacaacatctatgaagttcagcccccgagagtagacagaaagtctacagagatcttccaagcccacatccaggccagcagaggtatcatgcagccccttggtaaagaggacactgccatgtaccgagagtatatcagaaaccgctacttatgaggaaggccctgagga

SEQ ID NO: 2819 - DNA, 1853 bp, Cricetulus griseus
atggtggagagtgaggtcgatgaagagcttggggaaaggaagtggaggcttggatgatgatgaggaggaggaagacctggatgaaggttcaggggccaagcgccagggtgtggaagtaaaggcccatcaggcatcacataccaagtacctgctgatgagaggttactacacaatgcctggagtggtcagtacgcgaaacctgaaccccaacgacagcatcgtggtcaactcctgccaggtgaagtttcggctgcgcagcacccctgcacccacccagcttgggcccactgggttcacagctacaccgctggaagagctccaggcggggccttcttgcctccctgcctccttcaccagcctagtggacccacagctgcgtacctgctgcccagaagagtttgcccaccagatggcacagtccggctacagccctgaggatatggttgcttccctggagattctgcaagctgtggcagctgctgactgctttggggttgacagggagaagctaagcaggcagttctctgccttggagaagacagtgggcgagcgtaccaggacattctcagactatgtccaggacctcttggagcagcagcaggtaatggaagttggaggcaacactgtgcgcctggtggccatggcctctgcccatccctggctcctgcattcaatgcgtctgaaggacacagaagtagacaccaaggccacaggggatgactcccaagccagactccctgagggggctatcggtgaagatcacacttttgaggcaacagcagtacctccagacagctcccatagcaccagaaagcgtgcccactgctgagacagacgccgaggaagccataagactccctgccaagaggcccacactccaggatgttcgagtgcttgccaaccctaggcttggggcagaagagcagacagaggcccaggccttgactctgctggcagctcctgaagatgcaggtgcaggaatccccaggcaggagaaccaagagagtgttggtgtctcaggcctagaacagctgggctgtgagttccagcttcctgaaggctctgaagacccccgaggacttacagacagcaacatggcccaggcagcatgggaaagtagctgtgaaagagtgtgtttcatcggtcgcccatggcgtggtgtggatgggcgcctgaatatgcctgtgtgcaaaggaatgatggaagccgtgctataccacatcatgtccagacctggcgttcctgagagctgcctgctgcaatactaccagggggtcctacagcctgttgctgtgcttgagctgctccggggcctagagtccctcggctgtatccagaagcgcctgctgaagaagccagcagtcgtctcactattctccaagcctgtggtggagggtctgggccagaccagtgagattgaggcagtctcctgccacgagagcactgtcaccttctatgagcctacgctggactgtaccatccgcctgggccgtgtcttcccccacgatgtcaactggaataagtggatccacttatagatgctgtccccaggccaatggaggagcctctgcctgtgctctatagctcatccatgaaccctgtccctcacacagatgttaccacagctcggtaacacagatgttacccaggtgtagcatctgccaggtgacttcagtcccctccactctgctgctgttgctcccaggtgcccagccttcctgcaggcccatgttctgctctgaactcaggctccagcatcagccatagatatggcaaaggtggatgttgtttgggaagcagagctgatggccaagccctcagttatctgaccacccaccacaccattcagactc

SEQ ID NO: 2820 - DNA, 1853 bp, Cricetulus griseus
ttttcccgattccgctgtctgctgaggcgagatgaaccggagatcgcggcctacgccaagcagatttatggtctgcattatgtctggagcctgcactgcgcctgctctcttcctcctcctcggctgttctgcgcttgcgctgggcgttggctcgggctccccagagcaccgtgatgcagagtactacgtggctgccgtgtacgagcaccggtcggtcctgagcccaaaccctctggagctcagtagccgccagaacggccctggagctcatgaagcagaacctcgacgtctatgaacagcaagtgatggctgcagcccagaagggtgtacagattatagtgttcccagaagatggcatccatgggtttaacttcacaagaacatccatttacccattcttggacttcatgccatctcccagcctggtcaagtggaacccatgtctggagccctttcggttcaacgacacagaggtcctccagcgcctgagttgtatggccatgaagggacagatgttcttggtggccaatctcggaacaaagcagccttgccttcgcagtgaccctgagtgcccacatgatgggagataccagtttaatacaaatgtggtgttcagcaacaatggaacccttgttgaccgctaccgtaagcacaacctgtactttgaggcagcctttgacaccccggctaacgtggacctcatcacctttgataccccctttgctggcaagtttggcatgttcacttgctttgatatcctgttctttgaccccaccatccgtcttctcagagactctgaggtgaagcacattgtgtaccccacggcctggatgaaccagctgccactcttggcagccattgaaattcagaaagcattggccactgcctttggtgtcagtgttctggcagctaacatccaccacccgactctggggatgactggcagtggcatacacactcctcttcagtccttttggtaccatgacatggacaatcctgacggccaccttataattgctcaggtagccacaaacccacagggccttgttgggaaagagaatgcaactagtgaaatggacccatcccatagtaagttcttaaaaattgtgtccggtgacccatactgtgagaaggatgcccaggaagtgcactgcgatgaggctgccaagtggaacatgaatgcaccacctactttccactcagagatgatgtatgacaatttcaccttggtccctgtctggggaaaggaaggctatctccaggtctgctctaacagcctctgttgtcacttactctatgaaaggcccactctgtccaaagagctgtatgccctgggtgtctttgacggacttcacacagtgcatggcacatactacattcaagtctgtgccctggtcaagtgtgggggtcttggctttgacacttgtggccaggagatcacagaggcacagggcctatttgactttcacctgtggggcaacttcagcacttcctttatctttcctttatttcttacctcagggatgactctggatacccctaaccagctagggtgggagaatgaccactatttcttgaggaagagtggactgtcctctggcttggtgacagcagctctctatgggcggttgtatgagagggactaggaaatgtgtgtggtcagtgggatgggctctgctagcatgcttttccacaggccacagatactaagtgctgggaccttccttctttacataatgattgagacattttctggtattttctattctcattctttttcaagccacaccttcttcccactacacaattggttttaaatgctaaaataaaaaataaacaccagttactatttt

SEQ ID NO: 2821 - DNA, 1853 bp, Cricetulus griseus
ccgtcgagctatccagaaggaattgaagatcaaggagggcatggagaacatgcggcgtgtggccacagaccgacgccatttgggccatgtgcagcagctgctgagggcctccaaccgccgcctggagcagctgcatggcgagctgcgggagctgcatgcccgagttctgctgccaacctcagctgagccagtggcctcaggaccccggccgcgggcagagcagtcaagggctcggcacttggaggttttacagaggcagctgcaggtggagctgaaggtaaagcagggagctgagaacatgattcacacgtgtgccaggggcacccacaaggaaaggaagctcctggcagctgcccagcagatgttgaaggatagtcaactgaaggtaaccctgctccgaatgaagataagcagcctggagaccagcggatctccagagccaggaggtaaccttctgtgaccctgtcattgaaaggaggcctcggctgcagaggcagagacgtattttctccaagcatagaggccaggacttcctgagggcttcccagatgaacctcagcatggcagcctggggacgcctggtcatgagcctgctgcccccctgtagctcaccaagcacagtcagtccccctaaaggatgccccccaactgaagcatgtgggacctccaattctgcttcccccagtaatttttgtccatgaagaccctctccggagaagacatgaagcctccacccaagccccctcgtctctatctgccccaagaaccagtcctggacactccttgtatccaaacgcccgcacatggaccctagaactggaatagcaaccacccaggcggtctcacccacgaggaaacccctccaacttcaagacttccgatgcttggctgtgctgggcaggggacactttgggaaggtcctcctggtccagtacaaaggaacaggaaaataggaagtgctggccgggacgagattgacagcctgtactgtgagaagcggatcctggaggctgtgggtcacacagggcacccttcctgctatccctccttgcctgcttccagacctccagccacgcctgctttgttactgagtttgtgcctggaggagacctcatgatgcagatccacgaggatgtctttcctgagccccaggcctgcttctacctggcctgcgtggttctggggctacagtttctacatgagaagaggattatttacagggacctgaaactggataacctgctggtggacgcccagggcttcctgaagattgcggactttggactatgcaaggaagggattggctttggggaccggacgagcaccttctgcggcaccccagagttcctggcccccgaagttctgactcaggaggcttacactcgggctgtggactggtggggcctgggtgtgctgctctatgagatgctagtgggtgagtgcccattcccgggggacacagaagaggaagtgtttgactgcattgtcaatgcagatgcaccgcgtccccacttcctgtcggttcaggggcttgagctcattcagaagctcctccagaagtgcccagagaagcgactaggagcaggagagcaggatgcagaagagatcaaggttcagccattcttcaggaccaccaactggcaggccttgcttgctcgcactgtccggccccctttgtgcctactctctgtggccctgcagaccttcgctacttcgagggggagttcaccagcctgcctccaatcctgaccccaccagcaccccaaagttccctcactgcccgccaacaggctgccttccgggactttgactttgtgtctcagcagttcctggagtcctgagggtctcctggc

SEQ ID NO: 2822 - DNA, 1852 bp, Cricetulus griseus
gtccggactccctgcgtacgcacgtggcctgtccggcttccttctccgagaccctgcactgcaaccatggctcccggccagctcgctctgttcagtgtgtctgacaaaactggcctagtggaatttgccagaaacctcgcatctcttggtttgagtctagtcgcttccggaggcacggcaaaagcgctcagggatgctggcctggcagtcagagatgtgtctgagctaacaggttttcctgaaatgttagggggcgtgtgaaaaccttgcatcctgctgtccatgctgggatcttggcacgaaatattccagaagataatgctgacatggccagacttgatttcaaccttataagagtcgttgcctgtaacctctaccccttcgtgaagaccgtggcctctccagatgtgactgttgaggcagctgttgagcaaattgatattggcggagtgaccttattgagagctgcggccaaaaaccatgctcgggtgacagtcgtgtgtgaaccagaggactatgtgacagtggcagcagagatgcaaaactctgatagtaaggacacctccctggagaccaggcgccacttggctttgaaggcatttactcatactgcacaatatgatgaagcgatttcagattacttcagaaagcagtacagtaaggggatttcccagatgcccttgcggtatgggatgaacccccatcagacacctgcccagctgtataccctgaagcccaagcttcctatcacagttctcaatggagcccctggattcataaacctgtgtgacgctttgaatgcctggcagctggtgaaggagctcagggaagcagtgggcatcccagctgcagcctctttcaagcacgtcagcccagcaggtgctgctgttgggatcccactcagtgaagatgaggccagggtctgcatggtctacgacctctatccgactctcacacctatggccactgcatatgccagagcaagaggggccgataggatgtcttcatttggtgactttattgcattatctgatgtttgtgatgtcccaactgcaaaaattatctccagagaagtgtcggatggcattgttgccccaggatatgaagaagaagccttgaagatactttctaaaaagaaaaatggaaactactgtgttcttcagatggaccagtcctacaaaccggatgaaaatgaagttcgaacactctttggtcttcgtttaagccagaagagaaataatggtgtcattgacaagtcgctatttagcaatattgtcaccaagaataaagatctgccggagtctgccctcagagacctcattgtagccactgttgctgtcaagtacactcagtccaactctgtgtgctacgccaaggacggacaggttattggcatcggagcaggacagcagtctcggatacactgcacgcgccttgcaggtgataaggcaaactcgtggtggctgcgacaccatccacgagtgctttccatgaagtttaaaaccggggtgaagagagcggaaatctccaatgccattgatcagtatgtgacggacaccattggtgagggagaagacctggtgaagtggaaggcactgttcgaggaagtccctgagttactcactgaggcagagaagaaggaatgggtcgacaaattgagagacgtttctgtcagctccgatgccttctttcctttcagagataacgtggaccgagccaaaagaagtggtgtggcctacattgtcgctccatctggatccgctgcagacaaggttgtgattgaggcgtgcgatgaactagggatcatcctggctcacacggatctccggctcttccaccactgatcttagct

SEQ ID NO: 2823 - DNA, 1852 bp, Cricetulus griseus
cttcctgctgcacaacacacttcttccggtctcggcccggacgggatgctgctgctgttgctgctgctgctacccctctgctgggcagtagaggttaagagacctcgggggcgtttccctcagcaaccatcacttctatgatgaatcgaagcctttcacgtgtttggacggcacagccaccatcccatttgatcaggtgaacgatgattactgcgactgcaaggatggctcagatgagcctggtacagccgcttgtcccaatggcagcttccactgcaccaacactgggtacaaggccttgtacatcccctccagccaagttaatggatggggtgtgtgactgctgtgatggaacagatgagtacaacagcggcagcatctgtgagaacacctgcagagagaagggtcgtaaggaaagagagtccctacagcagctggccgaggtcacccgagaggggttccgtctcaagaagattctcattgaggactggaagacagcccgggaagagaagcagagtaagctgcttgagcttcaggctggaaagaagtctctggaagaccaggtagagatgctgcggacagtgaaggaagaagcggagaagccagagaaggaggccaaagataagcaccggaaactgtgggaagagcagcaagctgctgccaaggtccggcgggaacaggagctggcggccagtgccttccaggaactggatgacaacaaggatggggtggtttcgatggctgagctacagactcacccggagctggacacagatggggatgcagtgctatctcaagaggaggcccaggcccttctcagtggggacacacagactgatgctactgccttctatgaccgtgtctgggctgccataagggacaagtaccgctctgaggtgctgcccactgatatgcctgggaggaggaggaggaggaggaggaggaggccccagccccgctacagcccccacagccagccagccccgtcgaggaggagaagatgccaccctacgatgaggagacacaggctgtcatcgatgctgcacaggaggccaggaataagtttgaggaagccgagcggtccttgaaagagatggaagagtccatcaggagtttggaacaagagatctcctttgacttcggtccccacggggagttcgcatacctctacagccaatgctacgagctcaccactaacgagtacatctaccgactttgccccttcaaattggtctctcagaaacccaaacatgggggttcccccaccaaccttggcacatggggctcgtgggctggccccgatcacgacaagttcagtgccatgaagtacgagcagggcaccggctgctggcagggccccaaccgctccaccacggtgcgcctcttgtgtggcaaagagactgtggtgactagtactaccgagcctagtcgctgtgagtacctcatggagctgatgacgccagcagcctgcccagaaccgccaccagaagtgcccactgatggagaccatgatgagctgtagcctgaacctcaaggcttgaaaccaatctactcatcctgcagtctgtggaccaaggcctgcctacccagggatccctggctatcctccaggtagcaggaaccctgtgggctctaagccctgctctggcccaggctagccaagccatccatgttcctgaggccccagcggcctccagagatggataaaggagctcaccctccttggatttctgggtgggagttaatccctgcccccctcacccctgcctccccagctggtgggtgatgactggatgacttgatatgtgacctcagaacaataaatgtgacttacccacaaaaaaaaaaaaaa

SEQ ID NO: 2824 - DNA, 1852 bp, Cricetulus griseus
ggatcgggaacggcctgctgcagtccacgggctggccctgcgtggtggctgtgatgggcaactggtttgggaaagctggccggggagttgtctttggtctctggagtgcctgtgcttcagtgggcaatattttgggagcgtgcctggcttcatctgttctgcagtatggttatgagtacgcctttctggtgaccgcgtccgtgcagtttgctggtgggatcgtcatcttctttggactcctagtgtctccagaagaaattggtctcccgagtattgaggcagaagaaaactcggaagaagattcacacaggcctctcatccatggtgctgaaaatgaagatgaatacgagcctaactattcaatccaggaggacggggctgtcacccaagcgaaggcaatcagcttccatcaggcttgctgccttcctggagtcataccatactcactggcctatgcctgcctgaagctggtgaattactccttctgagtaacaacttcaggtggaaggaagccgaagccgacaagctgtccatttggtacgatgtcggaggcattgtaggtggaacactgcaaggcttcatctctgatgtgctacagaagagagcacctgtgctggccctcagcctgttcctggcagttgggtcccttgttggttatagtcgctctccaaacaataagtctatcaatgctcttctgatgaccattacagggttttttattggcggaccgtccaatatgattagctctgctatttctgcagacttgggtcgccaagagctgatccaagggagcagtgaggctctggcgactgtcacaggaatcgttgatggaactgggagtatcggtgctgctgtgggccagtatctggtgtctttgatccaggacaacctgggatggatgtgggttttctactttttcattctcatgacaagttgtacaattctgtttatctcaccattaatagtgagggaagtgttctctcttgtgcaaaggagacaagctcgcgtactgagtgaatgataggggcccacaggagagagcaaacggatggactcacgagggcctgtaggtcttcagttcagtcgtgtggagttgccaaagcaccagcggggcctcaccctgtcaggcaccctacaacactgcccctgctcctgacactgtcgaagaagggccgaattatttttgtacactacagcagttactgatgacttttattatatttatgaatgtactgaaagcaaaaaggagcctgccaacatctttgttgggcctgtcagctcatccctttaaccggacatgtgattttggtcctggactcttgtccttcagccttaattaagggctaagggagcaagaggcagagtcaggcaggtttgtattgatgagaacactgccgtgtgatactctgaaagcaagtttgcagaaagtggatcaccatggaggcgtctgagcagagctcaggacagaagaagctacggcctggctgggtcactctggcttctggaagtcctcgtcctctacattccatgtggagctttcaacctcagatttactgtctgggaactttaagaccctccaggaagccatgctgtgtaggcatattcttggaaaaattgatgtcggtcacagccgggtccatggagttacctcagaagaagactagaatgagagacaaggcagaggctctttgttgcgggatgtggagtgtatgtattgaatcatgttggtggattgttagggcctgaggcctgcccgttgtagaagatggtagagtgtatgtcttcaagactgagttctataggcatcaacactttcaggtcattctgtacgtacattttaaattacgtaaac

SEQ ID NO: 2825 - DNA, 1852 bp, Cricetulus griseus
gcgcaggctcgggggccgagtccgttatggccgccgccgcgctgggcagaatgagcggagctgcacgagagaagctgcttcccgggccaggcgcccggggcctcggagcgctggcgcggtcgctggtgctggcgttgctgctcgcgcctgtcctgtgctctgatactccagagcacacgtcacacaactccaccgtttctcctctagctgctctggcatctggaaacaacactgaaccttctatttcccagatcagtaccacggttccttccccagccagtacagagaagaatggaggcacctctgcgacacccactccctctgttgctcctgtgtcccaggacgaggctgatggcaatgaagatcctagcatggaggaggaggatcttctggccctcaacagttccccatccacagccaaagacactttggacaatggtgactatggagagccagactatgactggaccaccaacccccagggacgaggagcctgagagaacaggcgctttagggggtttgaggactccgtgaaggtggtgaagctccagcccccaaacagagaagatagccatttctttttccatctccttatttttgctttctgtacagctgttgtttatgtgacgtatcacaacaaaaggaagattttcctcctagttcaaagcaggaagtggcgtgatggcttgtgttctaaaacagtggagtaccaccgtctagaccagaacgtgaatgaggccatgccttctctgaagatcaccaatgattatattttctaaagcactgtgattggagtttgcttcttctgtcattttatttgcttgacttttatatgatgtcgtgcagaattctgccacaggcaagtagtacttatcaagagggggcgctctcttttgccttggtgcttctgaactaaatgtcacaaacaaggggtatataatcttttctttagagctagattcaatcaggtatctgaaatgtgagttaaacgttaccgtatatttttgtgtagttattattttccatttattgtgcctctggcagcagtgttcctttgaaagatcccaaaccagagctaaagtttcatggggcccagcactgctggttttcatcacttgctaccatccaaatgctgtttttcttcttctttattctattctaatttttgagacaggatctcactaaataacctaagctggcctcaaatagttggtcttcttgcttaggattctcaagtgctggtaccacaggtgtggccaccccacccacttccagataacatattttcaaacacattttgtgtgtgtgtgtggtaccaaactttaatttacaaggatgttgtgatataatgctttgctttaaagtaacatgttttcctctctttcaaaactgctttgaaagatggatgataaggtgggctcagtcagtgagggcgtttgccgccaagcctgacagcctgagttcagtccccaggacctgcatggctgaaggcagttttggtttggattactgaatgaagagttaggtagaaacgtggtagattatttaactgatgaacaacagttacttttagtcagcacttgattttagcacaagttccaagggttcaggtgatgagcagtgtttaaaacttagatcagagtgttttcagtttgtttaggcgagccagcagccacgatcctggtgcagacaaggaagcagcactgctgtccttcccctttggggacagttgattgaaggatgggcagcatagtgaaatatacctggactgttttattgcagtagtttttttcatatctgaaattgtattatttaatattttgaataagattttaagaaataaatggtaaag

SEQ ID NO: 2826 - DNA, 1852 bp, Cricetulus griseus
ggcgtgatcgcggggaggcagggctcccctcctttacctggctttccttgcttcgtttccatagatacatgtggggacgggtggtacactgaagtctaggccgcatccagcatccgaggcgagctcgctaagatgatgttaagagggaacctgaagcaagtacgcattgagaaaaacccggctcgccttcgcgctctggagtcggcggccggcgagggcgagccggtgcccgcggcggccatggcgctgaccctggccggggaacaggcgccgccacccgcgccttcggaggagcacgcggacgaggagatgggcttcaccatcgacatcaagagtttcctcaagccgggcgagaagacgtacacgcagcgctgccgcctcttcgtgggtaacctgcccaccgacatcacggaggaggacttcaagaggctctttgagcgctacggcgagcccagcgaggtcttcatcaaccgcgaccggggcttcggcttcatccgcctggaatccagaaccctggctgaaattgcaaaagcagagctggatggcaccatactgaagagcagacctctccgaattcgctttgctacacatggagcagccctcacggtcaagaatctttctccagttgtttccaatgagcttctagagcaagcattttcccagtttggtccagtagagaaagctgttgtggttgtggatgatcgtggtagagctaccggaaaaggttttgtagaatttgcagcgaaacctcctgctcgcaaggctctggagagatgtggtgatggggccttcttgctaacaacaacacctcgtccagtcattgtagaacccatggagcagttcgatgatgaagatggcttaccagagaagctaatgcagaaaactcaacaataccataaggaaagagaacagccaccacggtttgctcaacctgggacatttgaatttgaatatgcatctcgatggaaggctcttgatgaaatggaaaagcagcaacgagaacaggttgatagaaacatcagagaagccaaagagaaactggaggcagagatggaagcagctagacatgaacaccaattaatgctaatgaggcaagatctaatgagacgtcaagaagaactcagacgtttggaagaacttagaaaccaagaattgcagaaacggaagcaaatacagctgagacatgaagaggaacatcgtcgtcgtgaagaagaaatgatccgacacagagagcaggaggaactgaggagacagcaggagggctttaaaccaaactatatggaaaatagagaacaggaaatgagaatgggtgatatgggtccccgtggagcaataaacatgggagatgcatttagcccagcacctgctggtacccaagggcctcctccaatgatgggtatgaatatgaacaacagaggaactatacctggcccaccaatgggccctggtcctgccatgggaccagaaggagctgcaaatatgggaactccaatgataccagataatggcgcagtgcacaatgataggtttcctcaaggacctccgtcccagatgggttcacctatgggaaatagaacaggttctgaaaccccacaggcaccgatgagtggtgtaggtcctgtgagtggaggtcctggtggttttggtagaggaagtcaagggggcaactttgacggccctaataagcgtcggagatactaaatattctttcattcctgatacttagaaaaactctttcaatggtatgcctttacactttgtctgttacctggaaaaaaaggtttaattgttaatgtatgtagactgaagttttcttttgtaaaacttgaggtttttgtttattttgtttatt

SEQ ID NO: 2827 - DNA, 1852 bp, Cricetulus griseus
gggatgcaaacttggttgatgtcagtggtctggagacagaatcttctaatggaaaagatactatagaaggcgccggggatacttcagaagtgatggatacccaggctggctcagtggatgaagagaatgggcgacaattgggagaggtggagttgcagtgtggaatatgtacaaaatggtttacagctgacaccttcggaatagacacgtcatcatgtctaccttttatgaccaactacagtttccattgcaatgtatgccatcacagtgggaatacctactttctccggaagcaagcaaatttaaaagaaatgtgccttagtgctttggcgaacctaacatggcagtctcgaacacaggatgaacatccaaaaaccatgttctccaaagataaggatattataccatttattgataaatactgggagtgtatgacaaccagacagagacctggaaaaatgacttggcccaataacattgttaaaacaatgagtaaggaaagagatgtgttcttggtaaaggaacatcccgacccaggaagcaaagacccggaagatgattatcccaaattcggacttctggatcaggatcttagtaacattggtcctgcttatgacaaccaaaaacaaagcagtgctgtgtctgctagtgggaacctaaatgggggaatcgcagcaggaagcagtgggaaaggaagaggagccaagcgtaaacagcaggatggagggacaacagggaccaccaagaaggcccgaagtgaccctttgttttctgctcagcgtctcccccctcatggctaccctttggaacacccatttaacaaagatggctaccggtatattctagctgaacctgatcctcatgcccctgacccagagaagcttgaacttgactgttgggctggaaaacctattcctggagacctctacagagcctgcttatatgaacgagttttgttagctctacatgatcgagctccccagttaaagatctctgacgaccggttgactgtggttggagagaagggctactccatggtacgggcctcccatggggtacgaaaaggtgcctggtactttgaaatcactgtggatgagatgccaccagatactgctgccaggctgggctggtcccagcccttgggtaaccttcaagctcccttaggttacgataaatttagctattcttggaggagcaaaaaaggaaccaagttccaccagtctattggcaaacactactcatctggctatggacaaggagatgtcctagggttttatatcaatcttcccgaagatacagagacagccaaatcactgccggatacttacaaagataaggctttgataaagttcaagagttacttgtattttgaagaaaaagactttgtggacaaagcagagaagagcctaaaacaaactccccatagtgagataatattttataaaaatggtgtcaatcagggtgtggcttacaaagatatttttgagggagtttactttccggccatctctctgtacaagagctgcacggtttccattaactttggaccatccttcaaatatcctccaaaggatctgacttaccaccctatgagcgacatgggctggggtgctgtggtagaacacacactggcagatgttctgtaccatgtggagacagaagtggacggaaggcgcagtccaccctgggagccctaacccatcctcgcttcacacagctttctgtggagtaatactgggtttttgcttttgtttatcaagtgtcaaatgttcttccaaagatgctgcaatacactttttgtcgaggtcagagagtctggtgggtgggactgcagcagatgccctgcccttca

SEQ ID NO: 2828 - DNA, 1852 bp, Cricetulus griseus
gtaccattgaaacattggtctacttcgattcacagacagttcaccttttctactgagaagccttattttattttatggcttaggcccaccgaacttatgacatcatggcagaaggaaagacccgagtcacctgggcccaaaaggcgtggcccatacatttcctctgtcaccaggcccagagtgtgaacgtggtgatccgaggggtggtggctcttcttcattggagtgttccttgccttagtgttgaacttgctccagattcagagaaacgtgacactttttccacctgatgtggtctacgagcatcttttcatctgcctggtgggtaccaccttgctgcggcacagcctcagctgtgattggattattgtacccctgcattgacaggcatctaggagaaccacataaaattttaaaagagaatggtccagtgttatgcgctgtgtggcggtgttcgtaggtatcaatcacgccagtgctaaagtagacttcgacaacaacttccagttttctctcacactggctgcactgtcagtaggactgtggtggacttttgacagatctagaagtggttttggccttggggttggaatcgctttcttagcaactgttgtcacccaactgctagtctacaatggtgtttatcaatacacatctccagattttctctatgtccgttcttggttgccatgtatattttttgctggaggcataacaatgggaaacattggtcgtcaactggcaatgtatgaatgtaaagttattcctgaaaaatctcatcaagaatgaagaaggcaaaatctgtcttttctctaggaagccatggaaaagcgacgtgtatatgaaagacacaccaacgcagttttttcttgattggtgtgtgtgtgtatgtgtgtgtgtgtgagacacacatgtttctgcagtctgtgattgcttctgtaaatcagttaccaacgtttcggtatttgatttcaataaatgtaagatatatgtgcactacatgaaagatatgtttatgagtacatgaaatttctaaattttgtaaacataccatgcattgtatcacaatgttgatgtgccaaactatgctattactatcacagagaataagaatgctttgaacaatttagaaatttagtgaaacagaagaagaaggctacaaacaaaccaaacagaaagcaaatgggcagctggtgttcccctctcactgactgtcgtgccttttcctgtttctaatcagcagtgtgcattatgagcaccccacatgtgctctgtttctgttgctgttgtttcagacacatctcattaacaactcctgccatttacttatggtttaagtatataagctgactttccacttgcttttcttttctgaaattgttaattatctggaacacaagggtaaaataatctgactgactgtggtgtgtgtgtgcttatatgctgagtgagagaaaatgtatacatgtgtctgtgtgtgcatgtgcccatgctttcctacagtgtcaaatagatattttcagtttgtttcttttaaagcaatgctgaaatcttgtactccagagtgtaatgtgctttgtgttctcaggctaagagtgtgaacatcccaagagtactccgagtggaatatgtgtttgcaagcctaatgctaggagtggcgaacactatcatttattattttgtctttcagatgttattcatttagaacaaataaggtatatttttagaatcaaatttgtaaacactataaaatctttaataagttataaggtctatgatatgtttactttgaaaattgctgttgaaagcaagatgtattaaatatgtaattatcaccaaaaaaaaaaaaaaa

SEQ ID NO: 2829 - DNA, 1852 bp, Cricetulus griseus
ggaggaagaggaagaagacagcctttcggagacagtggaagaggaggagccggagagctttgcagacatgatgaagcatgggctcacagaacttgatgtaggcatcaccaagtttgtaagccctcatgagggcttctcagggatcttaaaaagaaagaataactctgacttcgttgttcatgaaattggaaaagatggacggatcagccatttggatgacttatctgttccagtggacgaggaggaaccttcagaagatgcactcactgttctgacagctgaggacagacagcagctggaggagctccagcttttcaaaaataaagaaaccagtgttgccatcgaggtcattgaggacaccaaagaaaaacgaccatcatccataaacatattctcttatatgggaaccaaagacaaaagggccatcacagtccaggagattgctgtcctcaaaataaagtgcacaaagactcgcccacctgaataagtgcttgatgaactttaaactagggaatttcagctaccagaaaaaccctctgaaattgggagagcttcaaggaaatcacttcactgttgttctcaggaatataacaggaactaatgagcaagtacagcaagccatgcaatctctgaaggagactggcttcattaattactatggcatgcaaagatttggaaccactgctgtccctacataccaagtgggaagagctattctacagaattcctggacagaagtcatggatttaatactgaaaccccgttctggagctgaaaaggggtacttggtgaaatgcagagaagaatgggccaagaccaaagacccagcctctgctctccgaaaactaacctgtcaaaaggtagtgtggaagggcagctgcttcgaggactttcaaaatatggaatgaagaatatagtctctgcattttgggcataatcccaagaaataatcgattaatgtatatccatagttatcaaagctatgtgtggaataccatggtgagcaaaaggatagaagactatgggctgaaacctgtccctggggaccttgttctcaaaggagccacagctacctatattgaggaggaagatgttaataattactccattcatgatgtggtgatgcccctgcctgggtttgatgttatctaccccaaacataaaattagtgaagcctacagggaaatgctcgctgcagacaatcttgatattgacaacatgagacacacaattcgagattactccttatcgggtgcctaccgaaagattattattcggcctcagaatgtcagctgggaagtcgttgcatatgatgatcctaaaattccacttttcaatacggatgtggacaacctagaaggaaaaccaccaccagtatttgcttccgaaggcaaatacaggcctctgaagatggacttttccttcctccttctacttacgccaccatggccattcgagaagtgctgaaaatggacaccagcatcaagaaacagacacagctgaatacaaactggctccgatgagtagtgtgttcttctgagaggagacacagagaagtacctgcccaatgacctcctgttcttttcttttttaattgctgactcatatttgattttaaaacttttatagtaaaggattatttgtatttttagagttttttatcagcttaaagaaaataatttgcaatatttgtacacatatacaaatcctgagggtcctaattatagctcagaagatataaattggtcagaatgtactttaggtgcttaagtcctagtgcagcatcagctttatggctttataacagtaaaaggaggacttgtttaaagtagcagttctaggttttgctgca

SEQ ID NO: 2830 - DNA, 1851 bp, Cricetulus griseus
aagaaatcatcaggcaggcagccactgctgttcctggggctgttggtcacagtagctgccatccaccttattgcctgtccctataccaaggtagaggagagcttcaacctacaggctacgcatgacctgctgtaccaccagctggatatagacaagtatgaccaccatgagtttcctggcgttgttcccaggacattccttgggcctctgttgattgcagtgttctccagtcctgtggtttatgtgctttcactgttggaaatgtccaagttttattctcagctgacagtcagaggagtccttggacttggtgtgatttttggactctggacattacaaaaagaagtgaggcgacagtttggggccacggtggctgccatgttctgctggatatcagctacacagtttcacctcatgttctactgtaccaggacactccccaatgtgttggccctggctgtggtcctaccagtcctcacagcctggctgcagcataggtgggccctctttgtctggctctcagcctttgccattattggcttcagggctgagctctgcatgctgctgggccttatgctactgctgaccttgtaccaaagaagattgtctgtagccagattgttccagcatgccatcccagcagggattctctgtctaggactgacggttgctgtggactcctatttctggagataccttgtatggccagaaggagaggtgctttggtacaacactgtcctgaacaaaagttccaactggggcacctccccgctcctgtggtatttctactctgccctgccccgaggcctgggctgcagccttctcttcatacccctgggtgtagtggacaggaggacccatgcactggccctgccaaacctgggattcgtggctttgtattcgctcctcccgcataaggagctgcggttcatcatctataccttccctgcactcaacatcatggctgccagaggctgcacctacatcctgaataactataaaaagtcttggctgtacaagatgggaactctgcttgtgataggacacatcatggtaaatgtggcatatacagccacatccctctatgtgtcccatttcaactaccctggtggtgttgcaatgcagcggctacatgagctggtgccaccccagacagatgtccttctgcacattgatgtagctgctgcccagacaggtgtgtcacggtttctacaagtcaacgaaggctggaggtatgacaagagggaagatgtgcagcctggagcagaaggcatgctggactacacacacatcctcatggaggcagcacccgggcacctggccctctatagggacacacatcgtgttctggccagtattgagggcactacaggtgtgagtctgactctgaccaaactgccaccctttgatgtcaacctgcagacaaaactggtgcttctggagaggcttcttaggccagcctgagagggtgggagttcaccaggaacatcaagtatggtcacccttctaactcagtgaagacagttcaggaaaacaaagcaaacaaccaaggacttccatcatgctcctagtgctgtcctgtagcagtctgggccctgagatagccacacttaggacacagggctcagagaatgtggagcacaggacccaccaccaggtgtgataggcctgctcagactgtctgccatggttaggtcgcccacaggatgatttatattcaaactgggagctatttataaccaagagggaacagtgagccaggctagaacattctgccaccctagctctgtagtgaccctgagtgtgtatttcctgtccctgaaccatacttgttgcccatagcctcaggag

SEQ ID NO: 2831 - DNA, 1851 bp, Cricetulus griseus
agattcaatataccaagatcttcataaacaatgaatggcatgactcagtgagtggcaagaaatttcctgtcattaaccctgcaactgaggaggtcatctgccatgtggaagaaggggacaaggcagatgttgacaaagccgtgaaggctgcaaggcaggcttttccagattggctccccatggcgcaccatggatgcttcagaaagagggcgtctactgttcaagctggctgacttaatggagagagaccgcctcctgctggctacattggaggcaatcaatggtgggaaagtctttgccagttcatacctgtttgatatagcaggctgcatcaaagcattgaagtactgtgcaggctgggcagacaaggtccatggtcaaacaataccaagcgatggagatagttttacttacacaagacgtgaaccaattggggtgtgtggccaaatcatcccttggaatttcccattgctcatgttcatttggaagataggccccgcccttggctgtgggaacaccgtaattgtcaaaccagcagagcaaactcctctgactgctctttacatggcatctttaataaaagaggcagggtttcctcctggcgtagtaaacattgtccctggttatggaccaaccgcaggggcagccatctcctctcatatggacatcgacaaggtggcctttacgggatcaacacaggttggcaaattaatcaaagaagctgcagggaaaagcaatctgaagagggtcaccctggaacttgggggaaagagcccctgcattgtgtttgcagatgctgacttggacacagccgttgagtttgcacataatggggtgttctaccatcaaggccaatgttgtgtggcagcatccaggcttttcgttgaggagtcaatttatgatgagtttgtgagaaggagtgttgagcgagctaagaaatgcgttcttggaaatcctctgaacacaggaataaaccaaggccctcagattgacaaggaacaacatgagaaaatacttgatctcattgagagtgggaagaaagaaggagccaaactggagtgtggtggtggacgctggggaaacaagggctactttgtccagcccacagtgttctccaatgttactgatgacatgcgcattgccaaagaggagatatttggaccagtgcaacagatcatgaagtttaaatccctagatgatgtgatcaagagagcaaacaatactagctatggcctagcagcaggagtctttacgaaagatgtggacaaggccatcactgtgtcttctgctctgcaggctggggtagtgtgggtaaattgctatatgatgctgtcaccccagtgcccctttggtggattcaagatgtctggaaatggacgtgaactgggtgagcatggtatttatgaatacactgagctcaagacagttatcatgaaaatttcccagaagaactcctaaagaagccaacagagtgaagagaaacccttcagaaatgactacccatctcctattgtcaccattatagtggtgttttcctttatctctttcatttattgatttcttaaacataagcgattcatcagtattaatgtcacacataaaaagcatgtagcttaatctgaaagaatcattggccttctaatatgtgaccccaattcgtgccctagactaaaaggatggatttaggtgcaagctctctgtgactctgtcatggtcatgtgctttccattgtagaatgtttggaatatttacttggtaaggaggaccacttgtgatttaagctttgtccctctgtccctccttgaattactccatatgcacaatggctacagagtgagttgctctgctccc

SEQ ID NO: 2832 - DNA, 1851 bp, Cricetulus griseus
tctgtctcttttacctagaccctaacactccgagggactaagaagcttgcagcgaggttcctgggactgtccgccacacaccctctcaaactcaggctagcagatgcgaccaaggatacccgtgggacaaacggtgcttccttctctcggcaaatgccctggaaatcaggaagatcgaagagttgattgagacacactttggcagtcacagcagaagggccatcctcttcaggtctccttcacacagcagaccagagcttcagaccctccagcacctccttggtcagcatggctacagtgttgtcactgttgaagaaagacttggtactggcctaggtctggagctgttggaccaaggtgatttgaactcctggaggaaattcactcaattaggacctttgtaaaggaacttgggagtctgggagaattccaactgctcttcccatccacagttcctggaattcagtctgtgatgcatgaattttatgatatggcaaatcctagctcactactgtcccgatactggtctcttttaaatatatctgaacaattttggcccatgaataaaaaggaacagctacatccactggaatggaattcttcaacaagaaacaagaccattcagaaaacaccagagtcactagaagcaatcaaaagcaaagaagatgcagttccaagagtttttcatgaaaataaagatatacactgcagtaatgggaaaggcacagtctgcaatatcaagatcttcacccactccccgtctggaactaaatcccgaagtttaatccggaaggtgaaagattattactgtagaaggagttgtccatctggggacactaaaggccagtggattgtgccttgccttagttgctctgacaacaggacctgtgactggagagaaataacctggcagccacacaactgccaacacaatgtcctaaccaagccggaacttcagcagtgcctgcgaggaaggaagatccttttcattggggattccaccaacagaggaatgatgtactatcttattgaaaggctgaatgaaaccctgcaggagtggcagaaagttcacggcactaaactctaccccagtgtcaatggggggaagactttgatcagttactcctactatccccagttttggataagcccttcgttgagaccaacatttgagaaagcacttgagcatctcttgcaaagatcacatcccttagagaatactgaccagacagtattggttgttggtggtgttcagtggcttaattcccagcacctgcaaatcattcacaaggttttaaagagggaaaatttgctcaatatcctagtgatcatcaaaactttggggattggatttcacctgccagtggatggagtgcatttcctaacacagactgaagtacaaaacttgcataaagaaaatctgagcattctggaagctgcaaaaaaatatggctatgaagtagtagacactttcactatcacaatgggacgacacaaggaatttctgcagggaaattgtggatgtcatttccatgaggtagtgaaatcaaagttatccagagagcaccatgttatcaagatgaaaagatccaagaaccatattgtggggaaatacttcagcagtcaaaacaaactacaacggcaaaattctgtcccaaatgttcattcaccatatcatgtcagaggtccaataaaccaggtttgttctgaaatcctgctcagcaggatgtgtgcgagtcagaggtctgcacgggctccctgaaggagattagatggggagcacagtctaaattggtgatatgcataattttaaagtgtgaaaaaataaaagttccccatttgttactttgt

SEQ ID NO: 2833 - DNA, 1851 bp, Cricetulus griseus
ggtgccgtacctcacagtggcatcgagcaggtccggatacactggctgctggatctcattacagccagaaagtcatctgcgcagggactgatatacaacttcacctacttggatgttttcctggacctcctcatgaagaaccagcttctccctgggtttgagctgatgggcagtccttctggccacttcacggactttgaggacaagcagcaggtgtttgaatggaagaacttggtttctctcctggccaggagatatattgataggtatgggctgacacatgtttccaagtggaacttcgagacttggaatgaaccagaccaccacgactttgacaatgtgtccatgaccacacaaggtttcctgaattactatgatgcttgttctggaggggttgcacgatgccagtcccatgttgaggttgggtggcccgtggggccttccaccccctcgccaaagtcaccactgtgctggagcctcctgcgtcattgtgccaatggaaccaacttcttcactggtgaggtgggcgtgcgtctggattatatctccctgcacaagaagggcgcaggcagctccatgtacatcctggagcaggagatggcagttgtggaacagatccagcagctcttccctgagttcaaggacacccctatttacaatgacgaggcagaccctctggtgggttggtcactgccacaaccttggagagctgacgtgacttatgccgccttggtggtgaaggtcattgcacagcaccagaacctgctgtttgccaatagcagctcctccatgcattatgtgctcctgagcaacgacaatgccttcctgagctaccacccacaccctttctcccagcgtacacttaccgcccgctttcaggtcaacaatacttgcccaccccatgtgcagctcctgcgaaagccagtcctcacagtcatggggctgatggccctgttggatggagaacaactctgggcagaggtgtcacaggctggggctgtgttggacagcaatcacacagtgggtgtcctggccagcacccatcgccctgaagtctcctcagaggcctggcgtaccacagtcctgatctacactagtgatgacacccatgcacacctcaacggcagtatccctgtgactcttcaccttcgtggggtaccccctggcttggggcttgtctacgtagtactctacctcgacaatcaactctgcagcccctccagtgagtggcaacacatgggccagccagtcttcccctctgcagagcaattccgacgtatgcgcatggtggaggacccagtggttgaggcaccacgccctttccctgctgggggccgcctgactctacacaggaagctttctttgccgtcacttctgctggtgcatgtatgcacacgccccttgaagccaccagggcaggttagccggctccgcgcactgcccctgacacatgggcagttggttctggtctggtcggatgagcatgtgggctccaagtgcctgtggacatacgagatccagttctcccagaagggtgaggagtatgcaccaatcagcaggaggccgtcaacttttaacctctttgtgttcagcccagacacagctgtggtctccggctcctatcgggtacgagcattggactactgggcacggccaggccccttctcagaccctgtgacttacctggatgtccctgcctcatgagagccactggctcctagtgactggtgagcctgtgctgactggcgagtggggtcagccaggttgagctggactgccattagctagtcagttgactatggacttcttttgttgttcccccatttcctttaaagtatctttctctaacct

SEQ ID NO: 2834 - DNA, 1851 bp, Cricetulus griseus
ggatgtgctgctcccgggtgggggctgttcatggcggtttcggggtctctaacagtttggcaggttgaggtccaagaacctcccgaagcggggtcagcggagcttgaggtttttgctggtgtgaaatgactgagtacaaactggtggtggttggagcaggtggtgttgggaaaagtgctttgacaatccagttaatccagaaccactttgtggatgaatatgatcccaccatagaggattcttaccgaaaacaagtggtaattgatggtgagacttgtctgttggacatactggacacagctggacaagaggagtacagtgccatgagagaccaatacatgaggacaggcgaaggattcctctgtgtatttgccatcaacaatagcaaatcatttgcagatattaacctctacagagagcagattaaacgagtgaaagactctgatgatgtgcctatggtgctggtcgggaacaaatgtgacttgccaacaaggacagttgacacaaagcaagcccatgagctggccaagagttatggaattccattcattgaaacctcagccaagacccgacagggtgtggaagatgccttttacacactagtaagggagatacgccagtaccgaatgaaaaagctcaacagcaatgatgatggcactcaaggttgtatggggttgccctgtgtggtaatgtaataagaccctttagaagtctgtcatcagaaaagagccactttcaagctgcactgatgccctggttctgacaaccctggaggagaagtgtccctgctgctctctgcatctcattgaagctcctgcttcctgcttctctgactcaatagatgagcacagtcatctaatctgagacctcctcagaataactacctcctcactcggctgtctgaccagagaaatgcgcctgttactccccagtaattttctgatctgggttctcctccttagaaacaaacaccctctgccaaccgggtttgtcctctgaaaagcaatttacactctgatacagagaaccaaactatacatgcaattctgttgataagtttcttaagctctaaggtagcaactgtttgtaagtgggatagacgttttcaagaaccattatataggaaagtgactatgagccatctatctttgagggaaaggtgtatccacccgatggcagatgccatgtctatgtacatgaagatagtttccctgtttgggttctcccaagagaaagatgatactgaaacaattatgagtaatttcacttaattttcatctaatcttttttttttttttttttttttttggtagtgtgtgtgtgtgtgtgtgtgtgtgtgtgtgtgtgtgtgtgtgtctgcacaagtatgtggttggttttagtcagccacctgtagaatcagccttttaactgctgtgaactttctcatgacttgaatatgaagatagacaaaaactttataaggagaaatgtttggttttcctcattccagaatgtgtgagcttagtcttatcttcctttgtatttagtcataaaactcttaagctggcagcttgttttaagagtgttctcatgagattagttgtagatatttttaaaatacaactgcgttttaaaagtctgagtactgctctagacaagtattgaactctggagagaagggaggtggtggaagctgtatgacttttgtatttccgtgttgtcaaataaaggtcagaacatcaactgtgcacacctgctgttccaatgaggactgttggcctctgtggctctaagtaaaggggctcatattttaagttgactgttatgttgtacattaatccactcttaattttaaaatcttgattgact

SEQ ID NO: 2835 - DNA, 1851 bp, Cricetulus griseus
  modified_base (195)..(195): a, c, t, g, unknown or other
  modified_base (1843)..(1843): a, c, t, g, unknown or other
gcagcctggactgactatggttgtgggtccacctggtacagggaaaacagatgttgcagtccagatcatatccaacatttaccacaattttccagaacagaggaccttaattgttactcattccaatcaggctctgaaccagttgtttgagaaaatcatggctttagacatagatgaacggcatctcctgcgtcngggtcatggagaagaagagctggagacagagaaagattttagcaggtatggaagagttaattatgtcctggctcgaagaatagaacttttagaagaagtcaaacgattacaaaagagtctgggggttccaggagatgctcatatacctgtgaaactgcaggttattcttctatacagtaatgtcacgctgctgcagaggtcgcctcattcttcccattccatgagtattttgccaatgcgcctcaacccatctttaaaggcagatcttatgaagaagacatggaaattgctgaagggtgtttcaggcatattaagaaaatcttcactcagcttgaagaattcagagcctcagaactgcttcgcagtggactggacagatctaaataccttttggtgaaagaagccaaaatcattgctatgacctgtactcatgctgccttgaaacggcatgacttggtgaagttgggtttcaagtatgacaacattttaatggaagaggctgctcagattctggagatagaaacctttatacctcttcttctacagaatcctcaagatgggttcagccgattgaaacgatggattatgattggtgatcaccaccagttacctccagtcattaaaaatatggcctttcagaagtattcaaatatggagcaatctcttttcactcgctttgtccgggttggcgttcctactgtggatctcgatgctcaagggagagccagggcaagcttgtgtaacctctacaactggcgctacaagaatttaggcaatttgccacatgtgcagcttctgccagagttcagcacagccaatgctggcctgctgtatgacttccagctcatcaatgtggaggactttcagggagtgggagaatcggagcctaacccttacttctatcagaaccttggagaagcagagtatgtggtagcactcttcatgtatatgtgcctgcttggctaccctgcagacaagatcagcattctaacaacatacaatggacaaaagcatctgattcgggacatcatcaatagacgatgtgggaataatccattgattggaaggccaaacaaggtgacaactgttgatagatttcaaggtcaacagaatgattacatcctcctttctctagtgcggaccagggctgtgggtcatttgagggatgtccgtcgcttggtggtagccatgtcaagagccaggcttggcctttatatcttcgctagagtgtccctcttccaaaattgttttgaactgactcctgctttcagccagctcactgctcgaccactgcatttgcatattattccaacagaacctttcccaacctccagaaagaatggagaaagaccacctcatgaagtacaggtaataaagaacatgccccagatggcgaactttgtgtacaatatgtacatgcatttgatacagactacccatcattatcatcagactttcttacaactaccacctgcaatggtggaagaaggtgaggaagttcagagtcaagaaacagaaatggaagcagaagaagaaaccatgactgcccaagctaacatcatacccagtccagcagaagccagcctgagtcaagagactccagcctctcagcctgagagctccaatcagacatttactatcaaaaaanaaaaaaaa

SEQ ID NO: 2836 - DNA, 1850 bp, Cricetulus griseus
gttaggtcgcgggcccgacccgtgagcctcgcgcagtatgggcagatgttgcttctacacggcggggacactgtccctgctgctgctggtggctagtgtcacgctgctggtggctcgagtcttccagaaggcggtggaccagacgatcgagaagagtatggtgttaagaaatggtactgaggtctttgactcctgggagaaaccccctctacctgtgtacacccagttctacttcttcaatgtcaccaatccagaggagatcctccaaggagaaattcccatacttcaagaagtgggaccatacacatacagggaaatcaggaacaaggcaaacatccaatttggagagaatggaacaaccatatcggctgttagcaataaggcatatgtttttgaacgaaaccaatctgttggcgacactaatgttgacttgattagaacgataaatattcctctgttgactgttgtggaactgacccagctgcccctgcttaaggaaatcattgaggccatgctgaaaacctaccagcagaagctgtttgtgactcacacagtgcacgagctgctctggggctataaagatgagatcttgtccctcgtccatgttttcaagcctggaatctcccctaactttggcctgttctacgaaaaaaatggaactaatgatggagattatgttttcctaactggagaagacaattacctcaactttacaaaaattgtggagtggaatggtaaaacgtcactggactggtggaccacagacgaatgcaatatgattaacgggacagatggagattcttttcatccactgataaccaaggatgaagtcctctatgtgttcccgtctgacttctgcaggtcagtacatataactttcagtggttttgagactgtggagggtttgcctgcttttcggtataaggtgcctgcagaaatactagccaacacctctgaaaatgcaggcttctgcatccctgaaggaaactgcatggactcgggagtgttgaatgtcagcatctgcaagaacggtgtaccgattatcatgtctttcccacacttttaccaagctgatgaaaagttcgtttctgccataaaaggcatgcacccaaacaaggaagagcatgagacatttgtggacattaatcctttgactggaattattttaagagcagccaagagattccaaatcaacacttatgttaaaaaatagatggctttgttgaaatgggaaacattaggactatggttttcccagtgatgtatctcaatgagagtgttctcattgacaaagagactgcaagtcgattgaagtccgtgactaacacgactttgatagtcaccaacataccctacatcatcatggcattgggagtgttctttggcttggttttcacatggcttgcatgccgaggacaggggcccatggatgagggaacggcagatgaaagagcacccctcatacgaacctaatcaaacttacctgttgcctgagcttggtgagagaatgtgtgaactgacctgatctggaccaggacaggggaatccctgagtcctcacaggctcctggcctgtcaagaagagggagaagtcacagtgccggcaagtgaggaacgcttcctggacagagggtaatgagcagggtgacatggctggccattatgctttataaaatcatgtctctgaaattgttctaatgtgtctaggaagtatctaataaacttgtgtagaaactttttgggttgggctctgggagctgtgggatttctgtgacccccattgtagatacaaagtctgcatcacttgttaacgttagttgacctgacctgattcagtatgcctcattctcc

SEQ ID NO: 2837 - DNA, 1850 bp, Cricetulus griseus
catggcagctcatctcacagatgtggtattcatttggtgatccagctagttcgttagtcaatgcatctagaaactcacctgtggaagatgatgatgttgtgtttgttgaatcagtacagcctccagtttgtactccagcaagagctgaggaaaggaactttgtatttgcatcttcaaaacacgaaaatccacagggaaattattccataattcctccttctttgaaagatttgacttctcaaaagggaaatacatatgaaacaattgttattgatgatgaaggggacacagaaacaaatggaggggatgagaaaaatcctaccaattttactgaatgggaacctcatggaaacaaacatagtaccaagaatttggatttcttcatttccagtctatcaagaagtaagaccaagactggtgtaggaccttttaatcctggtaggatggatgcagcagatgcacttcagaatggaagatttgcagcacaccacaatcctgattcatggatctcacaatcagcatcatttcctcgtaaccagaaacagcaagggatggattctttatcaccagtggcctcacttcctaaacagaatttccagccctcaaaccagtatcttactaaacctaaaatcacttgtgcaaactgcaaaaatcctctacagaagggacagacggcttatcagcgaaaaggatcagctcatctcttctgttcaactacctgcctttcttctttctctcataaacgcactcgaaagacacggaatgtaacatgtaaaaaagattatcctatgaagacagcaactgttattcctccagtggagtcaagcaagtctttaccagaacttcatagtgcatctctgtcttcctgtgaatactcccagagtctcagaaaagaagtttttactaagtcaagatgtataatgtgtaataaattaggagaggttcgccatgaaatcagtgttaacaatgtaacacataaactgtgtagtaacaattgctttaatgaatacagatttactaatggtttaataatgaactgctgtgagcaatgtggcaagtacatgcccaaaaacactggacacagggtcctgattacaggtcagcaaaagagcttctgctgccagaattgtgccactgaatataaagagataatggaaacaaaatcaaaaatagcacttttacagaacaggaaaaggaatgctgtcagagaagaaaatgaaagaaaattacatgaatcaagtacactttcagaaaaaataggagaaataccagagaaaaaggaaaaggtttcagaggtaataggagttgcagtacaatgtagccaggatgcatcaccaggttcatggccccgaatattgaatatgaaacaacgtgatactcttgtcaaaaataatccacctcaagtaagaaattttaattttccaaaagacagcactggaaggaagttttcagaagcgtactacacacggattcttccaagtggtgagaaaaccaccaggtcctggctactctattcggcctccaaagactcggtgttctgcctctattgcagactctttggggaagggaaaaaccaactgagaaatgagaacgggtgcaaagattggcagcatttgtcacatattcttagtaaacacgaagagagtgaaatgcacatcaacaacagtgttaagtattcaaaattaaaatcttacctggaaaataaaaccagtgaagctacagatctgcactggcatgatctttagagccgggcattggtggagcacgcctttaatcctagcactcaggaggcaggggcaggcgggtctctgagttcgaggccaccctggtctacagagagagtgccagga

SEQ ID NO: 2838 - DNA, 1850 bp, Cricetulus griseus
cccgtggatcgggagtgagtggaggtaaccagggcaccctgtgctgattgggtctggaaccatggacgtgggcgaacttttaagctaccagcccaacagaggcacaaaacgaccccgggatgatgaagaagaggaactgaagactcgtcgaaagcaaactggtcctcgagagcgtggccgctatcgagaggaggaggccacagcagctgaagaaacagacgatgataaaaaaaggctgttgcagattattgacagagatggcgaggaagaagaggaggaggaagagccactggatgaaagctctgtgaagaagatgatcctcacgtttgaaaagcggtcctacaaaaaccaggagcttcggatcaagtttcccgacaacccagagaagttcatggaatccgagctggacctcaatgacatcattcaggagatgcacgtggtggccaccatgccagacctgtaccaccttttagtggagctgagtgctgtgcagtcacttctcggcttgctgggacatgataatacagatgtgtccatagccgtggttgatctgcttcaggagctgacagacatagacaccctccatgaaagtgaagaaggggcagaagttctcatcgatgctctggtggatgggcaggtggtggcactcctggtgcagaatctggagcgcctggatgaatccgtgagggaagaggccgatggcgtacataacaccttagctattgtggaaaacatggcagagttccgtccagagatgtgcacagaggctgcccagcaggggctcctgcagtggctgttgaagaggctgaaggccaagatgcccttcgatgccaacaagctgtactgcagtgaagtgctggccatcctgctccaggacaatgatgacaacagggagctgctgggggagctggatgggatcgatgtgcttctgcagcagttatccgtgtttaaaagacacaatcccagtacagcggaggagcaggagatgatggagaacctgtttgacgcgctctgctcctgcttgatgctcagctccaatcgtgagcgcttcctgaagggcgagggccttcagctcatgaacctcatgctcagagagaagaagatctcccggagcagtgccctgaaggtcctagaccatgccatgattgggcctgagggcacagacaactgtcacaagtttgttgacattcttggcttacggaccatcttcccactctttatgaagtctccccggaagatcaagaaagtgggaaccacagagaaggaacacgaagagcatgtctgttcgatcctggcttccctcctgcgcaacctgagagggcagcagcggactcgccttctgaataaatttaccgagaatgacagcgagaaggttgacagactaatggagctgcattttaaatatctgggtgcaatgcaggtggccgacaagaagattgaaggggagaaacacgacatagtgcgacgtggagagatcatagacaacgacctagaggatgagttctacctgcggcgcctagatgcaggcctcttcattctacagcacatctgctatatcatggctgagatctgcaatgccaacgtcccccagattcgccagcgggttcaccagatcctgaacatgcgtggcagctccatcaagattgtcaggcacatcatcaaggagtacgcagagaacattggggacggccggagccctgagttccgagagacagagcagaagcgcatcctgggcttgttggagaacttctagaagactgggcagagtgtgcctcagaccccagatccctgctcgaaaccatttttacacttgtgtggcttgaacaaataaaagatagttttggtatcct

SEQ ID NO: 2839 - DNA, 1849 bp, Cricetulus griseus
agcggatttcttaggaacggtcgtgcgagcatctcggcggcctcgggatgtctctggctgatgagctcttggctgacctcgaggaggccgccgaggaggaggaaggagggagctatggcgaggaagaagaggagccagccatcgaggacgtccaggaggagacgcagctggatctctccggggattcggtcaagagcatcgccaagctatgggatagcaagatgtttgctgagatcatgatgaagattgaggagtacatcagcaaacaagccaaagcctcggaagtgatgggaccagtggaggcagcccccgagtaccgagtcattgtggatgccaacaacctgaccgtggagatagaaaacgagctgaacattatccataagttcatccgggataagtactcgaagagattcccggagctagaatccttggttcccaacgctctggattacatccgcacagtcaaggagctgggcaacagcctggacaagtgcaagaacaatgagaacctccagcaaatcctgaccaatgctaccatcatggtcgtcagtgtcaccgcatccaccacccaggggcagcagctgtcggatgaggagctggagcgcctggaggaggcctgtgacatggccctggagctgaatgcttccaagcaccgcatctacgagtacgtggagtcccggatgtcgttcatcgcacccaacctgtccatcatcattggggcatccacagctgccaagatcatgggtgtggccggaggcctgaccaatctctccaagatgcctgcctgcaacatcatgctgctgggagcccagcgcaagacgctgtcgggcttctcctctacctcagtgctgccgcacaccggctacatctaccacagtgacatcgtgcagtccctgcccccagatctccggcggaaggcagcccggctggtggctgccaagtgcactctggcagcccgtgtagacagtttccatgagagcacggagggcaaggtggggtacgaactaaaggatgagattgagcgcaagtttgacaagtggcaggagccaccacctgtgaagcaggtgaagcccctgcctgctccccttgatgggcagcggaagaagcgagggggccgcaggtaccgcaagatgaaggagcggctggggctgacagagatccggaagcaggccaaccgcatgagctttggagagattgaggaagatgcctatcaagaagatttgggctttagcctgggccacttgggcaagtcaggcagtgggcgtgtgcggcagacacaggtgaatgaggccaccaaggccaggatctccaaaacactgcagcggaccttacagaaacagagtgtggtgtacggcgggaagtctaccatccgagaccgctcctcagggactgcctccagtgtggccttcactccactccagggtctggagattgtgaacccacaagcagctgagaagaaggtggcagaggccaaccagaagtatttctctagcatggctgagttcctcaaggtcaagggtgagaaaagcggcactatgtccacctgaaggggccaggccccgggtggccacccactggaaggacatggacaactggagctttgaagtgaccgacctccggcaaggaagttgtggtggaggcagcctgccctgctctgtccttggcccaaggccagagcatccaagaaacggggtgaagagcctcggcccgtctccccagaacccagactgctgctgccccagttaaatgggcggaggtcttcctcacactcgtcttttttacttacatgggtaaaggaagtggttttctagaaagagtacaattaaatgcacagtgtcaggctctagaa

SEQ ID NO: 2840 - DNA, 1849 bp, Cricetulus griseus
atattgttttacaaaacattgcaactatgtcaattcagagaaagggtatgtttgaaccttacctgaagagtttctatgtcaggtccactgatccaactatgatcaagacactgaagcttgaaattttgacaaacttagcaaatgaagccaacatatcaactcttcttcgagaatttcagacctacgtgaaaagccaagacaaacagtttgcagccgccactattcagaccataggcagatgtgcaaccagcatcaccgaagtcaccgacacttgcctcaatggcctggtgtgtttgctatccaacagggatgagatagttgttgctgaaagtgtggttgttataaagaaacttcttgacaaatgcagcctgcacagcatggtagaaattattaaacatatggacaagatcaaaactacgacatcagagaccgcacaagatttattaggcagcttattgttccgaatgagaagagtggagcaagaggaaaagtagattcagaagatgggagagaaaaatgaaaaaatctaaaaacttcagaatcatccagtgcagaatccagttccatggagaaagttcttcaggctctgagtcggcatcagagtctgacaatgaacctgtgcccagaaaagttgctcaggcaaaagaaagaaaaccccaacaagaaagacatctccccccaaagatgtttccttttagatctagacgattttaacccagtatccactccagttgcccttcctacaccagccctttctccaagcttgatagctgatcttgaaggtctaaacttgtcaacttcttcatccgttatcaacgtcagtacacctgtctttgtgccaacaaaaacacatgagctgcttcacagaatgagtgggaaaggactggccgcctggtactgcttcccaagacagccttggcagttttcggtgacaagatggtctctgtacaaataacactgaaaaatacttctgatcgaaagatagaaaatatccacataggggaaaagaagcttcccgtaggcatgcaaatgcatgtttttcatccaatagactctctggagcctgaggggtctgttactgtatcagtgggtattgacttctgcgattctacacagaccgcttgtttccagttgtgcaccaaagatgattgcttcaacgtcaacattcagccacctgttggggaactgcttttacctgtggccatgtcagagaaagactttaagaaggaacgaggaatgctcactggaatgaatgagacctctgctacagtcatcgctgcacctcagaacttcactccctccatgatcctccagaaggttgtaaatgttgccaacctgggtgcagtgccttcaggccaagataacgtacacaggtttgcagctaaaactgtgcacagtgggtcattgatgctagtcacagtggaactgaaagaaggctccacagcccaacttatcataaacactgagaaaaccctgattggttctgttctgctgcgggagctgaagcctgtcctgtcccaggggtaacctgcttacatctgggcttcaggatctggcacacaacaaaagtgcctggcacccactactgctgcctttcatttataataatagcccttccatctggcagcggggaagagcacactcttgacattcttgtctctgctttagaatgctggtgtgtatctatcgtgtatgcaatcctttcttctcttcgctttgctaaccaaagaacatatattttactgtcagttttctcaactcctgaatccatgcagcattttctccgccctcagacttctttttggcctcatcttccttctggtttttgaaaatgatggacgtgaatcag

SEQ ID NO: 2841 - DNA, 1849 bp, Cricetulus griseus
ccccaaaataagactaaagaccctcgctgcgctggtagattactgccaaggacggaaaggaaggtgagctggcctctgctgtccatgcatacacaaagacgggagacccctacatgaagtccctggtgcagcacatcctgagcctagtgtctcaccctgtgctgagcttcctctaccgatggatatatgacggggaggctggaggaccacctaccatgaatttttttgttggcatcagatccaactgttaagactgaccgactgtggcatgacaagtacacattgaggaaatcgatgatcccttccttcattacgatggaccagtccagaaaggtccttttgataggaaagtcaataaatttcttgcaccaagtttgtcacgatcagacaccaactacaaaaatgatagctgggaccaagactgcagagtcaccccgtgaagctgaagatttattcacagacttagaaaatacatttcaagggaaaatagatgctgcttatttcgagaccagcaaatacttattggatgtcctcaacaagaaatacagcttgctggaacacatgcaggctatgcggcggtacctgcttcttggccaaggagacttcataaggcacctaatggatttactaaaaccagaacttgttcgcccagcaacgactttatatcagcataacttgacggggattcttgaaactgctgttagagccaccaatgcccagtttgacagccccgagatcctcaggaggctagatgtgaggctgctggaggtctctccaggtgacaccggatgggatgtcttcagcctggattaccacgtcgatggaccgatcgccactgtgttcacacgagagtgcatgagccactacctgagagtgtttaacttcctgtggagggccaagcgcatggagtacatcctcactgacatacggaaagggcacatgtgcaatgcgaaactcctgaggaacatgccagagttctctggggtgctgcaccagtgtcacatcctggcctccgagatggtgcatttcattcatcaaatgcagtactacatcacctttgaggttctcgagtgctcctgggatgagctttggaacagagtacaacaggcccaggacttggaccacattatcgcagcacacgaggcattcctggacaccatcacctcccgctgtctcctggacagcgactccagggtacttttaaatcaactcagagctgtgtttgatcaaattattgaacttcagaatgcccaagatgcaatgtacagagctgctctggaagagttacagtggcggctacagtttgaagagaaaaagaaacaacgtgaaatcgagggccagtggggagtgactgcagcagaggaagaggaggagaacaggaggatccgagaattccaggactccataccaaaaatgtgttcacagttgcgaatattgacacacttctaccagggtgttgtacagcagtttctggtgttgctgacgacaagctctgatgaaagtctccggtttctcagcttcaggttggacttcaatgaacattacaaagccagggaacccaggctccgggtttctctgggcagtagggggcggcgcagcacccacacgtgaggctgcagggttattagatgcccactcaaactaagaccctccaggcatcggggagctgcaggtgccccctgtctgcacacaggccacagtgtttcagctctgctggaagaagtctcattacccactggacttttttttgtaaaaatgtactatccagtcacataattatgccttttttatgttgcataagtgagaattagagaattaaaagtattatactttcaaaaaaaaaaaaaaa

SEQ ID NO: 2842 - DNA, 1849 bp, Cricetulus griseus
gcggcggcgactgctgtgcgagcttcccgagtgcctagggtcttcacggggacgcaccgccggctgcacaccagtctgcagagctgctcttttgccaaggagctcttcctgggcaacatcgagcagaaaggagttttcccgtttccagagattagtcaagatgaacttagtgaaatcaatcagtttgttggaccagtggaaagattctttaccgaagaagtggactctcgaaaaattgaccaggagggaaaattccagttgacaccttagagaaattgaagagcctgggactttttggggatacaggttccagaagaatatggtggcctaggcctctccaacaccatgtatgctcggcttggggagatcatcagcaatggacgggtctatcacagtgaccctggcagcacatcaggctattggcctcaaggggatcatattggtcggcaatgaggaacagaaggccaagtatttgcccaaactggcatctggggaacacattgcagccttctgcctaacagagccagccagtgggagtgatgctgcctccattcagaccagagctacattaagtgaagataagaagtacttcatcctcaatggatccaaggtttggatcaccaatggaggactagccagtatttttactgtgtttgcaaaaactgaggtggttgattctgatggttccataaaagacaaaatcactgcattcatcgtagaaagagactttggcggagtcactaatgggaaacctgaagagaaattaggcattcgaggctccaacacatgtgaagtccattttgaaaataccagagtgcctgtggaaaatgtccttggagaagttggaggtggctttaaggtagccatgaacatccttaacagtgggagattcagcatgggcagtgttgtggccgggatgctcaagaaactgattgaactgactgctgaatatgcctgcacgaggaagcagttcaataggaatctcagtgaatttggtttgattcaggaaaagtttgcactaatggctcagaaggcatatgtaatggagagtatgacctacctcactgcggggatgctagaccaaccaggattccctgactgctcgatcgaggctgccatggtgaaggtatttagctctgaggctgcctggcagtgtgtgagcgaggctctgcagatccttgggggctccggctacatgaaggactacccctatgagcgttttctgcgtgattcccgcatcctcctcatctttgagggaaccaatgagattcttcggttgttcattgccctgacaggcctacagcacgccggacgcatcctgacctcaaggatcaaagagcttaaaagaggcaatgtgactgtagtcatggagtcaattggtcggaagcttcgggattcactgggccgaactgtggacctgggactgaccggcaatcttggcgttgtacaccctagtcttggagacagtgccaacaagctggaggaaaatgtgtattattttggtcggactgttgagaccctgctactccgttttggaaagaccattgtagaggaacagctggtattgaagcgggtagccaacatcctcatcaacctgtatggcatgacagctgtgttgtcacgggccagccgctccatccggattgggctcccaaatcatgatcatgaggttctgttggccaacatgttctgcgtggaagcttatttccagaatctcttcagcctgtctcagctggacaagtttgctccagaaaacatggatgatcagattaagaaagtgtctcagcagatccttgagaagcgagcctacatctgtgcccaccctctgaacaggacatcctgaggctgg

SEQ ID NO: 2843 - DNA, 1848 bp, Cricetulus griseus
gttcttgggttgtgatcgatcctaccatcaaccctcggcacatggagatgtacgctgacagagaaagcaggggatctgttctggaaccagaagggacagtagaaatcaaattccgcaaaaaggatctagtgaaaaccatgcgtcgggtagacccagtctacatccacttggctgagcgattgggcaccccagagctaagccccattgagcggaaggagctggagaacaagttgaaggaacgggaggagttcctaatacccatttaccatcaggtagctgtgcagtttgctgacttgcacgacacaccaggccggatgcaggagaagggtgttattaacgacatcttagactggaaaacatcccgtagcttcttctactggcggctgaggcgtctcctgctggaggacctggtaaagaaaaaaatccacaatgccaaccctgagctgactgatgggcagatccaggctatgttaagacgctggtttgtagaagtggaaggcacagtgaaggcttatgtttgggacaataataaggacctggtggagtggctagagaaccctgccctgtctctggagaagagagctgggctgcctcttacatctgaaaccactgtaatgagaaggcaccggaagccagtactgcagtcagagaggcagttgcttccccttgagtgtttcaggttctgcatgacattctgggctctaggatcacaaagcccagtcacacatacccggttcagtatttattagcccagctgtgatgacagttctctttccatgcacaggactgagaaggcaatgaagggtacatccttgtaccatgaggtcttactagactaaagcaggactgccctcctgtccagcctgccccagcacaggaccgggccatgtgaacagtgtccaagtgtctgtagcccctgccccatgagccacagccccatccctattcctgatagaaagtgtggcaggtcacccaccttgatgacagctgtgctttcagcaccagaaactggctttcctggtgtgaggaggcttctagggaacaagaattcacctactcttaagattctttacagttcagtcacggtgctggtgtttccagactttctgggctctccatggccagcaacagggcctcctcaggggtgacccggagagcttaacaacccatttatccaagaacagccttggtgttcctaaagcaagagtggagatggtcagagctgtagcatccagttcctacagtgtgactcatgcatcttttgctggagatcaaggaggaaatcactaagatgccacagaaaccattggcatgaatacttctgtctgagccttaaccctggattccacaaaaggagctggcctccccttcaggaacacctcatgcagatattccagaggaccttctcatcagctccacatcacaagtggacatccaggggaccagatgcaagctgtcccacccccacaagccctggtggaaggaagaggtgaggtgggctgtgcttctaactcccctctccctgctgccccatccccaggacaggagcttttcatatggagaagtcagagccacaacacatgagcgatctgatggtcccacagcccattacacatgcaaggttactgagggaggaggatgaatgatgtattgacccagacttgcttgaactgagattgccatattatctgttcacttcgttcacaaagcagccttcactcgtgtcagtgagaattcgatggacacacacgccaacgagcaaggggcttcagtccaatgcactcttttcacattttgttgaaataaacctccacatttgtagaagaaaaaaaaaaaaaaaaaaaaaaa

SEQ ID NO: 2844 - DNA, 1847 bp, Cricetulus griseus
tgaggacattggttattcaagctcttcagaaaactaataacagaagcatagaagcagctgttgaattcattagtaaaatgagttaccaagaccctcgtcgggagcaaatggctgcggtagctgccagacctattaatgccagcatgaaaccaggaaatgtgcaacaatcaattaaccgaaaacaaagctggaaaggttctaaagagtctttagttcctcagagacacggcccacctctaggagaaaatgtggtctatcgttctgaaagccccaactcacaggcagatgtaggaagacccctgtctggatccggcattacagcatttgctcaagctcatccaagcaatggacagagagtgaatcccccaccaccacctcaggttaggagtgttactcctccaccacctccaagaggccagacctccccctccacgaggcacaactccacctccttcctcatgggaaccaaactcgcagacaaagcgctattctgggaacatgggaaatatgtaaatcctcccgaatctctcctgttccacctggcacatggcagggagggcctaccctccaccacctcttaacacttctcccatgaatccttctaaccaggaaccaatcatcatgcaaagtactaacaaatttacctttccaccagggagacctggagttcagaatggtggtggtcagactgattttatcatgcaccaaaatgttgcccaagctggggctgtaaatcggcagccaccacctccatatcctctgaccccaactaatggacagagcccttcttgctttacaagcagggggatctgctgctcctccatcatatgcaaatggaaatattccccaaaatcaatgatggtgccaaacaggaacagtcataacatggagctttataatatcaatatatctggactgcaaacaacttggcctcagtcatcttctgctcctgtccaatcatccccaagcagtgggcatgaaattcctacgtggcaacctaacataccagtgaggtcaaattctttaataacccactaggaagtagaccaagtcactctgctaatttctcagccttcagccactacagtcactgcaatcacaccagctcctattcaacagcctgtgaaaagcattcgtgtcctgaaaccagacgttgcagactgctttaaaaggaacctttgcagtacagtgacccatattgttgtgttgtcagtgctgtagattcctttcatgacagtgctacaatgcaaatcactggcacaggaaaatgtttctatttggcactattatacctaagagtagattaactggttaaaagataattattaataaactcctaattgggatgaccattcctaattagaagaagatacatagtggtttagaaattaaagaactcctaacttatttaagattaatgtgcctatttatataatgtttaggttctaaggaagaattgtggcttcataacaaaatgcatagtaacatcttttaggaagaagaatcgggctgtattctgaccttagtaacatttgtatattatttccttttcttaaggtttaaaaaaatccctttggtatttaaagtgaaagtctgttttttaatctaaactaaaatgtaatttgggtcaacatattgggatatttgtaaagtgccttagtatatcctttgtggagggcacttcccagtttacttttatattgtattatgtatataagtattttgtattaaaatggaatcaatggcaacactaccattttataaaataatgctttgctagagaaaaagaattacagctttgcaaatataacaactgtttttgcatatttctgaatgtaatagcacaa

SEQ ID NO: 2845 - DNA, 1847 bp, Cricetulus griseus
tgcgggagaccgggtcacagctttcttcctcccccagatctcacgcacacacctcagccccggaagatggggaactgcctcaaatccccgacctcggatgacatctccctgcttcacgagtctcagtccgaccgggctagctttggcgaggggacggagccagatcaggagccgccgccgccatatcaggaacaagttcccgttcccgtctatcatccaacacctagccagactcggctagcaactcagctgactgaagaggaacaaattagaatagctcaaagaataggccttatacagcatctgcctaaaggagtttatgaccctggaagagatggatcagaaaaaaagatccgagagtgtgtgatctgtatgatggactttgtttacggggacccaattcgatttctgccgtgcatgcacatctatcacctggactgtatagatgactggttgatgagatccttcacgtgcccctcctgcatggagccagttgatgcagcactgctttcatcctatgagactaattgagccagggtctctcgtctgacttcaagtgaaccatcattttgggtggttttgatcttttgtcactgagcccaaagagccagggattaggaattaagatcatgcacaaaagtttcctaaaaattcctggatggctgcagatgttgaggaaagtacgtgatattttagaaacttaggggaaagtaggatggatggtatttttatgtaaagccttgacccagtgtttaaaatataattgttattagaccttgttcttgctccagtacataggaattgtgtaaagtgttacagcaactgtacatgtttaaattgtgtgtgttgaagattaggaaaaagatagttatttttcctaaatgaaataagtttcttctcccttccacccaaattcttttctgaaaagttactggcatttgggtcaaggttttattaaaagctacattttataacactggcacaaaaaaaaaagtagttgtaagcttgtttgcacagttctttttttccattggaaatggaattcattgccttaggtctttttaaatagtgtattattatcgttggggctggctctatgcttgaaaaccagtttatttataacctgttgtaagtgctatattctgtttgcagttaggaaatgcagaattcacattctcctagcttgtaagcaaactgagatgcactatcccttttctattaaaaatgagttgatgtgtcaggaaaccaacgctagcaaaatggatttgatatccccttccttgtgtgtcttatcttattgttttggttgttaatatggtgataattgaaagtcaagttgaaatttaaatattaatatttctgatttattgagctttgaactgtgccaccacacttatgtaaaaatgaaggtggcaccatggtgaaacttaacaagtagtttttcagctgtaacagttttgattctgtttcctgtgacctctttccccactgtctggaaccatagcaaaaggatgctgcatctcttgttactgtagtgctgaggttatggagttacagaaacacatctagtctgtttcttggaaaggtgtctgttaagtcttgctaggtgactgacaagaaaggtaaatgtgtttcatgtttcacataccaatgcagcaggacttgtataaccatatgatttcatagttgtgatctcaaaggaacttctttcccttttcttgcaattaatgtaagaatactccaagtctctaaacttctgaagtgttagaggtagagatggtttagtaaagatgtaatgttttatccacttagcatgtgtttatttctccttctgttctaaaggtgat

SEQ ID NO: 2846 - DNA, 1847 bp, Cricetulus griseus
cctgagggtcactgtgtgccaggccctacgcactctcatcaccaagggctgcgaagcagaggctgaccgtgctgaagtgagccgctttgctaagaacttcctgccaatccctcttcaacctgtatggacagcctgttgcagctggcgaggcggcagtccctcgccgtgctgtgttggaaaccatcaaaatttacctcaccataaccgagtctcagttggtgaacggcttcttggaaaaagccactgagaaggtgctcgatcctgccagctctgacttcaccaggttgtctgtcctggacctggttgtggctttggctcctcacgcagatgaagccgccatcagtaagctgtactctaccatccggccctaccttgagagtaaggtccatggggttcagaagaaggcctaccgggtgctggaggaagtgtgtgcgagctcccagggccctgccgaccgttttgtgcaaagccatttggaagatctgaagaagactctgctagactcactgcggagcacatcctcgcctgcgaaaaggccccgttgaagtgcctcatacacattgtgaaaaagttgtcagctgaacatgaggacttcatcgctgctctcatcccagaggtgatcctgtgcaccaaggaggtgtcagtcttgtcctcatctatcctggccttctgggtgcggttaccacagtgagctgcagcatcttggctctgacccacctcttgtttgagtttaaagggctgatggggacaagcactatggaacagctcctggagaatgtctgtctgctgctggcttcccgcacccgtgatgtggtcaaatccgcactgggcttcatcaaggtggccgtggtggtcatggacgtggcgcatcttgccaagcatgtgcagctggtgatggaagccatagggaagttgtcagatgacatgcgacggcacttccgcatgaagcttcggaacctattcatcaagttcatccgcaagtttgggtttgagctggtgaaggatctgctgcctgcagaataccacaaagttctggtcaacatccggaaagctgagacccgggccaagaagcatcgtgccctgagccaggatgctacggaggaggaagaggaagaggaggaggaagaggagcccatccagagcaaaggtgacagcattgaggagattttggctgactctgaggatgaagatgaggaagaggaaagaggccgaagcaaggagcagcggaagctgacaagacagaggagccgggcatggttaaaggaaggtggtggggatgagcccctcaatttcctggatcccaaggtggcccagcgagtccttgccacccagcctgggcccaggcagggcaagaagaaggaccatggcttcaaggtgagcgctgatggccggctgatcatacgggaggaggaagatggagacaaggtggaagaagatggcacgaaaggtgaagatgaagagatgattgacccattggaagatgctggtgtcagaagtaaaaagaagcttaagcggcagagggaggccgaggaggatgaactagagatcccacctcagtaccaagctggaggctctggtatccatcgccctgtgggcaagaaagctacacctggagctgagtacaaggccaagaaagcaaagggcgatgtgaagaagaagggtcggcttgatccctatgcttacatcccactcaaccgaaccaagctcaaccgcaggaaaaaggtgaagctacagggacagttcaaaggtctagtgaaagctgcccagcgtggatcccagcggggacacaaacttcgaagaaaagatcctaggccctgaacccttgggggaatggagctgttctttgc

SEQ ID NO: 2847 - DNA, 1847 bp, Cricetulus griseus
  modified_base (14)..(14): a, c, t, g, unknown or other
  modified_base (73)..(73): a, c, t, g, unknown or other
aggtggagtgtcanctttggtcaccagttcccatgaggacttgggcaacatggtgcccactggccaggtggcngaaaagcaggcatggtgaggagcccaggcaggaccgcgaactcaagtcctggagatgcctagtattctatctctgcttcttcggcttcatggcacagttgcggcctggggagagcttcatcacaccctacctcctgcaacaaaacttcacgagcaggtgaccaatgagatcattccggtgctgccctactcccacctggccgtgctggtgccaatctttctgctcacggactacctgcgatacaagccaatcctgatcctgcagtgcctgagcttcatgtgcgtctggctgctgctgctgctgggcacctctgtggtacacatgcagctcatggaagtcttctacagcgtcaccatggctgcgcgcatcgcctactcctcctacatcttctccctggtgcgcccttcccgctaccagcgcatggccagctactcaagggcagcagtgctcctgggagtcttcaccagctctgtgttgggccaggtgctgtggcccctggaacaaaaatcccagaactccaacatgctcaactacatttccctgggctttatcatcttcagcctgggcctctccctctttctaaagcgtcctaagcacagcctctttttcaaccgcagtgcacttgtgcacaaagccttgccctgcgagctggaccagatgcacccgggccctggccgaccagaacccgggaaactagagcgagtgctgggcagttgcaggaactccttcctggtgtgcatgctaagtgaactggtgggaaatttacgacaaccacagctgcgcctctggtgcctttggtgggtcttcaactctgcaggctactacctgattgtctactatgtgcacgtcctgtggagtattgacaaaaacctcaactacaatggcgccgtagatgctgcctccacactgctgagcgccatcacatccttctctgcgggcttcgtgaagatccgctgggctctgtggtcaaagctggtcatcgcaagtgttatagccatccaggccggactggttttctgtatgtatctgggtactctacatgacctacgtgcttttccgcggggcctaccagttcctcgtgcccattgccacttttcagattgcatcttccctatctaaagagctctgtgccttggtcttcgggatcaatacattccttgccactgcgctcaagactgccatcacgcttgtggtctccgacaaacggggtctgggcctcaaagttgaaaaacagttttgcatctactccgtgtacttcatggtgctttctgtcatctgctttgtcggggccgtgctggatggcgtgaggtactgccggcgtggtcgccaccagcccctgcccctgccccaggagctgagtcccttggagaattctgtgcaggtgccaagtatgcaggatggaggcctagggggactgcagccctcagcaccacagctgctcccagaggatggcgtggaggacagcgaggcaagcttgagagctgaagccaaggcctgactctgaggaccgtaggcccagcctacatcatgctttagctgtggccaaagcctgctgggaacactcagggcagctgcctggctttgtgatccacgtgccagggcgctgtgagcctggattgcctatggcttgccaagaagagcccgtgttggggtcaactgtgcccaccaggccagcccgccttagccccaggaagctcaggacaaatcatgtctgtcctcagggctggtgaggtagcccagacaccagccaaggcacactgggcctgccgggtgc

SEQ ID NO: 2848 - DNA, 1847 bp, Cricetulus griseus
cgtagtggccgctgggactcggtgtgggtcgtgtcctgtcccggtatggttgcaaattagggtcgagttcagtgctggtgagccatgaagtgcctgatcaccggcggcaacgtgaaggtgctgggcaaggctgtccattcgctatcccgaatcggggacgagctctatctggaacccttgaaggacgggctctctctaaggactgtgaactcttcccgttctgcctatgcctgcttcctctttgccccgctcttcttccagcagtaccaggcggcttcccctggtcaggacctgctgcgctgtaagatcttgatgaagtccttcctgtccgtcttccgctctctggcgatggtggagaagactgtggaaaagtgctgcatctccctcagtagcagcaacagccaccttgtggtccagctccactgcaagtatggggtcaagaaaacacacaacctctccttccaagactgtgaatccctgcaggctgtcttcaacccagccttgtgcccccacttgctccgagcaccagcacgggttctggcagaggctgttctgtcttttccccctgcactgactgaggtgacactgggcattggccatggccgacgggtcatcctgcgcagctaccaggaggaggaggcagatagcaccaacaaagccatggtcactgagactagcattggggaggaggacttccagcagttgcatgccccagaagggatagcggtcactttctgcctcaaggaatttcgggggctcctgagctttgcagaatcagcaaacttgcctcttacagtccactttgatgttccaggcaggccagtcatctttaccattgaggattctttgctggatagtcactttgtcttggccacactcttagagcaagacccatgttcccaggacctgtgctccccaaatccctgccagccagtgcctcagaagcaggctcacagcataccccacttagatgactttaccaatgatgacatcgactgttacatgattgccatggaaaccaccgtgggcagtgagggctcccgggcacagccttccacttccctcccacctgtctcccagccctcccatgaccttgtccccccctcagaggaggaagctgagcccagtacagtgcctgggactcctccacctaagaagtttcgctcacttttctttggttccatcctggcccctgtacactccccccagggccccagccctgtgctggcagaagacagtgatggtgaaggctgaactcgaaaaacctgaagcctgtgtccaaaggccatagacctgaagccaccccagccattggcagggctgaaaccttagtccctgggcgtggaaaaggggctatgcttggtgtaggcacttatctgtatgctacagagctgcctaggcaaccatgtttggtctgtgttgtatattattcactcaacctgtatcaatcatgtctctctttcccaatacttgggccttggcctggaatcctaatagcctctagaccaaagtgtgctattggggttgccctgactggacccatgtccagctagtcagtttgccctctcaggtggctttgtaccaaagggctactggcccactgtctgaaacaagtgagacagaggccatggtgagaatccagctttgacctttattcaagagaccagatgggttgctccaggatccagctgccagccatgcaaggctggagacccacaatctggtctgccattgccctgagctgcagccttggccccaggattccacttgaagccaccacaggtgctggtgggagggagccctgggaggattagacgctgctattgattcaaataaaaaaagaaagg

SEQ ID NO: 2849 - DNA, 1846 bp, Cricetulus griseus
gctgcgcggctgcgggatgccccttcgctgaccgccccgggcccgcgcctgcccgcgctaatgcggccgatcccgctccaccatgtaagcggcacctgcaggtggatgctggcttctccgcccgggacccctgcgccctgtctcgggcccgggcccctcgatgacctcaggacacaccatgctgaccggggtgacagatggtttcttctgctgcctgctggggacgccccccaacgccgtgcgacctctggaaagcgtcgagtccagcgacggctacacgtttgtggaagtcaagcctggccgggtgctgcgagtgaagcacgcaggtcctgcgccaattcccacgccaccaccaccaccgccgcttcccgaagacgatcctggggtcaagaccggccttgtgcgctgccagcggcgcatcacggtgtatcgcaacgggaggctggtggtggagaacctgggccgggcgccacgtgccgaccttcaaggccgcagtggctcgggggacccgccctctgctcttgaggtggagctggcggatcccgcagggggtgacgcccgagttatcccaggcagcggtcggcgacggcgccctcggcgtcccaagaggaccatccacatcgactgtgagcagcgcatcaccagctgcaaaggcgcgcaggcagacgttgtgctgttcttcatccacggtgtgggcggctcgctcgccatctggaaggagcagctggacttctttgtgcgacttggctatgaggtggtggcacctgacctggcgggccatggagccagctctgcgccgcaggtggcagctgcctacaccttttacgcgcttgcagaggacatgcgggccatcttcacgcgctatgccaagaagcgcaatgtgctgatcggacactcttatggggtctctttctgtacattcctggcccacgagtacccagatcttgttcacaaagtgatcatgatcaacggcgggggccccacggcgctggagcccagcctttgctccattttcaacatgcccacgtgtgtcctgcactgtctgtcgccctgcctggcctggagtttcctcaaggccggctttgcccgtcaaggggctaaagagaagcagctgctgaaggagggaaatgcattcaatgtgtcctcctttgtgctgcgggccatgatgagcggccagtattggcctgagggtgacgaagtctaccatgcggagctgacggtgcccgtgctgctggtgcatggcatgcatgacaagttcgtgccagtggaggaggaccaacgcatggctgagatcctgctgctggcctttctcaagctcatcgaggaaggcagccacatggtgatgctcgagtgtccggagacagtcaacactctgctgcacgagttcctgctgtgggagccggagccggagcccgagccacagcccgagccacagccctttgactgggcatgtgctggatgggcggggcctcacgccaatgggcggggcttggatagaccccagggcgggccgggcgcagccagtgttggagactcagtgcccagtgcagccactgtgtcctctgcacgagtgatcgcaggtgtgaccttgtacagagccctctccctgcctccccgagtccccaatgctgcagcgggtgggctgccaccccactcggtcttcccctctgctgtgctccactctgcactgggaagccccaaagggagccctggggaggggctcccgtcctgtcaggggagacccgctgaaccgcacccatagtttgggactgggagctgggcacccaaggagagaggggtcggagccacaaatccccgcacatggcaacttgtaactcaataaaat

SEQ ID NO: 2850 - DNA, 1846 bp, Cricetulus griseus
ggcgaggcccaggtcggtcaagacttctctgatcctgtcgctggtcggcgaggagtttcccgaggaggtccctgcccgcgccgaggagataaccatccccgccgacgtcaccccggagaaggtgcccacccacatcgtggattactcagaagcggagcagacagaggaggaattacaggaggagatccacaaggccaatgtagtgtgtgtggtgtacgatgtgtctgaggaagccaccattgagaagatccgaaccaagtggatccccctggtgaatggcaggactgcagcagggcccaggtctatgcccagaaggctgttttgcaccccacggcccccctttactgaccctgaggccaaacagctaagacctgcgtgcgcccaggctctcacacgcatcttcaggctctcggatcaggacctagaccaggcactcagcgatgaggagcttaatgccttccagaagtcctgctttggccatcccctggccccacaggccctagatgatgtgaagagggtagtatgcaagaatgtggcaggtggcgtgcaggacaaccagctgaccctggaaggcttcctcttcctgaacacactcttcatccagcgtggccgtcatgagaccacgtggaccatcctgcggcgctttggttacagtgactcactggagctgacgcctgactacctctgcccaccgctccatgtaccccctggctgcagcacagagctcaaccaccgtggctaccagtttgtgcagcgggtatttgagaagcatgaccaggaccatgatggtgccctctcatccacggagctacagaatctcttcagtgtgttctcagtggctccctggggcccggagctcccatacacagtccccactcaggctggccggctgaccttacatggctatctctgccaatggaccctggtgacctacctagatgtccagcaatgccttgcacaccttggctacctgggctaccccaccctctgtgagcaggactcccaagcacaggccatcacagttacccgtgaaaagaggatagaccaggagaaagggcagacacagcgcaatgtccttatgtgcaaagtgttgggagcccgaggagtgggcaagtccgccttcttacaagccttccttggccacagtctgaaggaagccagagaactccccgaggaacaccccatgcacaccatcaatacagtgcgggtcagcggacaagagaagtacctgattttgtgtgaagtgagtgctgacagcctgctggatgcctctctggaccctacctgtgatgttgcctgcttaatgtttgatagcagtgaccccaagacctttgtacactgtgctaccatatacaagcaccattacatggacgggcaaaccccctgcctctttatctcctccaaagctgatctccctgaaggtgttgccgagccaggcctgtcaccggctgatttctgcagaagacaccggctgcctgcccccacctcattctcctgcttaggaccagcccagcccagcccagccgtctttacccaacttgctaccatggccaccttcccacacctgatgcacacagagctgcacccccctccttttggctccgaggaatgctggtggctgtcgggactgcggtggctgctgtccttagcttctcactatacagggtcctagtgaagagccgatgataaaggacccatgagcctctccttaaccaaggcacagcacacctgctgccttgtgggtgcccacacggcagagaagtatgagttttcagcttggtggtgtaatggctgtgtggctacagggtccccggggactgatgtagggggacctgctcagggactt

SEQ ID NO: 2851 - DNA, 1846 bp, Cricetulus griseus
aaagaaggaagcattattgatgccaacctgaaattgctgcaggaagctgagcagcgtcttaaatccatagtagcggagaagtttgctctggctaccaaagaaggtgatttgcctcaggtggagcgattcttcaagatattcccactgctaggtttacatgaggatgggctaagcaagttctcggaataccttgtaaacaggtggccagtaaggctgaggagaacctgctcttggtgctggggtcagatatgagtgataggagagctgcagttcatttttgcagatactctcactctcctgttttgaagggattgcccgaacttgtggaaacccaccaacccatagtggagacttattatggacctgggagactctataccctgatcaaatatcttcaagtagaatgtgacagacaggtggagcaggtggtgaacaagttcatcaagcagagggactaccaccagcagttccggcttgtccagagtaacttgataagaaattctgcaacagaaaaaattgaaccaagggagctggaccctgtcctgactgaggtcaccctgatgaatgctagaagtgagctgtacttacgcttcctcaggaaaaggatcagtgcagattttgaggtgggggactccatggcttcagaagatgtaaagcaagagcaccagaagtgcctggacaaactcctcaataactgcctattgagctgtaccatgcaggagctaattggctactatattaccatggaggagtacttcatgagggagactgtcaataaggctgtggctctggatacctatgagaagggccagttgacatccagcatggtagatgatgtcttctacattgttaaaaagtgcattgggcgagctctgtccagctctagcatcgattgtctctgtgccatgatcaatcttgccaccagagagctggaagctgacttcagagatgttctgtgtaataagctgcggatgggtttcccagccaccaccttacaagacatccagcgcggggtgacaagtgctgtcaacatcatgcacagcagcctccagcagggcaagtttgacacaaaaggcatcgaaagcactgacgaagccaagatgtccttcctggtgactctgaataatgtggaagtctgcagtgaaaatatctcaactctgaagaagactctggagagtgactgcaccaagctgtttaatcagggcattggaggggaacaggcccaggccaagtttgacagttgcctttctgacttagctgctgtgtccaacaaatttcgagatctcttgcaggaagggttgacggagctcaacagttcagcagtcaagccgcaagtgcaaccttggatcaacacttttctctcagtctcccacaacatcgaggaggaagaattcaatgactatgaggccaatgacccttgggtacagcagttcatcgtcaacctggaacagcagatggcagagttcaaggccagcctgtccccagtcatctatgacagcttgactggcctcatgaccagccttgttgctgttgaattggaaaaagtggttctgaagtctaccttcaacaggctaggtggtctgcagtttgacaaggaactaaggtcactcattgcataccttaccacggtgacaacctggaccatccgagacaagtttgcccggctctcccaaatggctacaatcctcaatctagagcgggtgactgagatattagattactggggtgcaaactctggccctttgacatggcgtctcacccccgctgaagtgcgacaggtgctggctctgcgcatagacttccgtagtgaggacatcaagaggctgcgcctgtagctgccatgtgg

SEQ ID NO: 2852 - DNA, 1845 bp, Cricetulus griseus
actgtcatcagatgaatgcttccaaaggaggtgagaaagaagaggtgatgaaggccaagatcttaggagaacagagtcggatagtggtctgaaaaaagggtggaaatgctaacctggtatttatgcttaaagaacagtgagcaggttgtccagagcatcgtccacctccacgagctccttagcatgctgcagggtgttgtgctacaacaagatagctacattgaggaccagaagctggtgctgacagagaaagtactcacaaggagtacatcccgccccagctctctgattgagcaggagaagcagcggagcctggagaagcagcgccaggacctggccaacctgcagaagcagcaggcacagcacctggaggaaaagcgcagacgtgagcgtgagtgggaggcccgggagcaggagctaagagaacgagaagccaagctggccgaaagggaagagacagtccgccgtagacagcaggacttggagagggaccgcgaggagctccaacagaagaagggcgcttatcagtgtgatctggagagactacgggctgcccagaaacagctggaaagagaacaggagcaactgaagcgggacacagagcggctcagccagaggcagatggaccaggacttctgccaggtctcaaataaacataccaggctgatgcgagtcccatccttcttgcccaatccggatgaattctcctcgccatctgcaccttccataaccaatcaggtcattggactcagaactttcagtgtctcctaaaaggaacagcatctctcggacacacaaagataaggggccttttcatatactgagttcaacaggccagacgaaaagtaccagaggggcagagccaggccccgcccagcacctccacttccacccgcctttttgggttagctaagccaaaaggaaaaatactaggaaatcatgtttctacatcaagctgaagaaaacactgctttgggggacgggtgtaaattggcctcagcattgtggaatccagtgaactttctagaagagtgtctcttctctcaaaattaaaatcatctcagtagttgtcgtcccatctgggtgacatgtgcactttaaatgacctctcatcagctggcttcatttttgagacaatcaaacctgttgactgttttcttagaagatggagagggttgagataaaagcataccagcatgcccccaccagtctgttgcctgctggccaggtttagaaatgcaaagtattctaatgctgccataaaagggggagaggtggcagcagaggccttttccaggtcctgagttacttctccatctcactaaggtgtaaaagtgggtggcccccactgcttcaggtgtgccctgctttgaaaccaggcaggtgccactgccacagaccccagagggcctctgcaggaagcacagaacctatgccttagaccctctagcatcagctgccctgccttggttgcctcctgttgggatggacctacccagctggtttgtctcaggtttcctcctgaggcctgggctccacacaaggtgggcaggatacacctatacctctgtttttgttaagtcgtctccaagtgctgtatggacatttctgtactaagccctattaaataaatgttgggttaaacccaagcgctgtatagtaatttgtaattatgtataaaagtgaaacagttttgaactgtaaagattttcaatgtgttttctggaaatttgccacaacgtactggctttgtattttatttatcatcctttgtagttactggcttcagactcttgtaaagtccccctcagacctttcaaaaataataaatttctttaaaatctt

SEQ ID NO: 2853 - DNA, 1845 bp, Cricetulus griseus
ggcagagcgtctccgcctccgccggcggggaccccaagctaccacgactgcgggacccacagcccgcaggatacggagccacgatgttcccgagggagaccaagtggaacatctcgttcgctggctgcggcttcctcggcgtctaccacattggcgtggcctcctgcctccgtgagcacgcgcccttcctggtggccaacgccacgcacatctacggcgcctcggccggtgcgctcaccgccacggctctggtcactggggcctgcctgggtgaagcaggtgcaaacattattgaggtgtccaaggaggcccggaagcggttcctgggccctctacacccttccttcaacctggtgaagaccatccgtggttgtctattgaagaccttgcctgcggattgccatgagcgtgccagtggacgcctaggcatctccctgactcgtgtttcagatggggaaaatgtcatcatatctcactttagctccaaggacgagctcatccaggctaatgtctgcagcacttttatcccagtatactgtggcctcattcctcctaccctccaaggagtgcgctatgtggacggcggcatttcagacaacttgccactctatgagctgaagaataccatcacagtgtccccattctcaggcgagagtgacatctgcccacaggatagctccaccaatatccatgagcttcgagtcaccaacaccagcatccagttcaacctgcgcaatctctaccgcctctcaaaggctctcttcccaccagagcccatggttctccgagagatgtgcaagcagggctacagagacggacttagattccttaggaggaatggcctgctggaggcctgtgtggagcctaaggacttgatgaccactctctccaacatgctgccagtgcgcctggcgactgccatgatggtgccctatactctgccgctggagagtgcagtgtccttcaccatccgcttgttggagtggctgcctgatgttcctgaggatatccggtggatgaaagagcagacaggcagcatctgccagtatctggtgatgagggccaagaggaaactgggtgatcatctgccctccagactgtctgagcaggtggaactgcgtcgagcccagtctctgccctctgtgccactgtcttgtgccacctacagtgaggcactgcccaattgggtacgaaacaacctctcactgggggacgcgctggccaagtgggaggaatgccagcgtcagctgctgctgggtctcttctgcaccaatgtggccttccctccagatgccttgcgtatgcgtacacctgccagccctgcctccacagaccccgccaccccacagcacccacctggcctcccaccttgctgagaaccatcattccccatttccttggttaccagccaagctccgagttgctctgccccacttaagaggagccctggggcagaccaagtccctgtcccttggctcccttacatgctgtggaatgaggacatagggccctgcatagctggaaaggggtttttgatgtaaaaccttttaccagccgctccaatgctgctcctggtagggagggatgaggagtaacctcccctggagcccacagagcccttcccttcacctgtgccttactgtcctcctcctgcccaccaccttttcagtgcagggtcagtcctgagaactccacagctgctgctgcttctcccagcctttcaagtttccttgcagagtgtgtgaagaattatttatttttgccaaagtagatacaataaaagccacagctcagcttctgccttcctcacttctgcatgttactcatgcctctgattgaggtcag

SEQ ID NO: 2854 - DNA, 1845 bp, Cricetulus griseus
cgacatttggacaactgggaatagaatcatagagggcttgaggtttccaaatgagtttgatgaattagcaatacaagggaaattgccagatccaattaaagaatatggctgtgctccatggcctatggttgagaagttaattaaagagtgtttgaaagaaaatcctcaagaaaggcccacttctgcccaggtatttgacgttttgaattcggctgaattgatttgtctcatgcgacacattttaatacctaagaacattattgtggaatgcatggtggctacaaatcccaacagcaagagtgcgactctctggttgggctgtgggaacacagaaaaagggcagctctccttctttgacttaaacacagaaagatacagttatgaggaagttactgatagtaggatactatgcttggctttggtgcatcttcctgctgagaaagagagctggattgtgtgtggcacacagtctggggatctcctggttatcaatgctgaagatgagacaaagaggcacaccctggaaaagatgactgactccattacttgcttatattgcaattcctttgccaagcagagcaagcaaagtaattttctgttggtgggaaccgctgatgggaatttagtgatatttgaagataagaccattaagtgtaaaggagctgcccccttgaagacactacacataggtgatgtcagtacacccctgatgtgcttgagtgtgtccatgaattcatctgaaagacacatcacatggggagggtgtggcacaaagatcttctccttctccagtgatttcaccattcagaaactcattgagacaagaaccaaccaactgttttcttatgcagccttcagcgattctaacatcatagcggtggcagtagacacggctctctttattgccaagaaaaatagtcccgtggtagaggtgtgggacaagaaaacggaaaagctctgtgaattaatagactgtgtgcacttcttaaaggaggtgatggtaaaaatgaacaaggaatcgaaacacaagctgtcctattcagggagggtcaaagctctctgcctgcagaagaacacagctctctggataggaaccggaggaggccacattttactcctggatctttccactcgacgtgttatccgcaccatccacaacttctgtgattctgtgagagccatggccacggcacaattaggaagccttaaaaatgtcatgctggttttggggtacaagcggaagagtacagatggtgcccaagaacaaaagaaatacagtcttgcttatctatttgggacatcaatcttccacatgaagtacaaaatttagaaaaacacattgaagtaagaacagagttagctgataaaatgaaaagaacatccgttgactagaggacaccaggcatccttgcccttgggttggaaaatgatcctcttgtttttaacatgtatttttaaaatgtttacattgaaaagtgtatgtctattctttggaaagctcagatgtatatgaaggaatgtgtatattttatgcctaatttaatatatgtaaaatactatcagcaaacatgttttaaagaactatttaatttagtactatattttctatatgctttaactaatttgatggaataatcaaaagaagtctacaaagcattaaatttcagcatttatactaaaatgtgtaaggcattcatgtttgttttgtctatgcattatgaagataaaatctattttaagttgttgctaagatgtggatgttacttgtttactatgaattatgcagagtagaataaaaatattgggcagcttcccatgaaatagattctttcattaacttgtttt

SEQ ID NO: 2855 - DNA, 1845 bp, Cricetulus griseus
ggagaagccttcagcaacacaactttacccaccgccttctggctgcagcactaaagagccatagtggaaatataacttgcatggactttagtagcaatggcaagtatctggccacctgtgctgatgaccgcaccgtccgaatctggagcaccaaagattttcttcagcgggaacaccgcagtatgcgagccaatgtggagctggaccatgccaccttggtgcgcttcagtcctgactgcagagcctttattgtttgttggcccaattgggggacaccctccgtgtctttaagatgaccaagagagaagatgggggctttacgtttcactagccaccccctgaggactttcctaaggaagcacaaggcgcccatcatcaacattggcattgctgacacagggaagttcatcatgacagcctccagtgacacaactgtcctgttatctccccatgtagcaggtttgtgggttcgtgtggcttcaccccagatgtgaaggtttgggaggtctgcttcgggaagaaaggggaattccaggaggtgcagcgagcctttgagctgaagggccactctgcctctgtccactttttcgctttctccaatgactctcggaggatggcatctgtctccaaggatggcacatggaagctctgggacacagatgtggaatacaagaagcagcaggacccctacttgctaaggacaggccgatttgaagaagcaagcaccatgccttgccgcctggcactctcccctgacacccatgtcctggccttggctactggtaccagtattcatctcttcaacacgaggcgtggggagaaggaggagtgcttcgaatgtgtccatggggagtgtattgctgacttgacttttgatatcactggccgcttcctggcctcctgtggggaccgtgcagtgcggctcttccacaacacccctggccaccgggctgtggtagaggagatgcagggcctcctgaagcgggcatccagcgagagcacccgccaaaggttgcagcaacagctggcccacggcccgaggagggccctaaagaaacctgggtgcccgtgaagaagtgactctggctctggatggattttggctccctgccccagtggttgctattctttttcccaggtgcctctggggtggagacctggaggaacttccaagtattcttcctggtggccccgactttttcccattgaaactgttcttgcatacttagatctctctctctctctgtctcccttgtggcctgcatagtgtagtgatatttagcccctcctgtggtctttcttttcgatggatcaacccaccacattcttgctgtttgctgacccaatcagttcactggctccaggtatggctggtccctcttgtttgctgcaagcatttttcctttctgttggcagacttgtcaatgcgattcagtccttggtaactttgactgcaaacagttgcctcttcaaacactccatccgaagtagccctttccaccaatcctgtcctatcagttgcattggtgcttttctttcttttgtatgacttggtggtttctgaaataatcttgtttggctatgtatttgctccagtgccagtgacaagggcagtcaagtgtgtagcaaaagtgggaaataggcaggtcacctgagatgggagggaatggtagagactgcagtgggctggagggcaggtgtcctggaggcacagtgggtaagctctcaataaatagagctcaaactagaagtaataatatattttgttctgttaaaaaaaaaaaaaaaaaaaaaaaaaaaaaaaaaaaaaaaaaaaaaaaaaaaaaaaaaaaaaaaaaaaaaaaa

SEQ ID NO: 2856 - DNA, 1845 bp, Cricetulus griseus
gcctctcgagcatggactacccggactgcgattccacctgggaggacgagagcgaggaggacggcgaggacggccaggcggatgatacgggcgatgaggacacgggcgacgaggacggcgacgcggaggagacacggccaggcgtgttccagtccaggatgacagggtaccgaaactggcgagctatgcaggacatgcaaaggtaccggcaccactacccggatttggcagatcaagactgcaatggcgacatgtctaacctgagcttctacaaaaatgaaatctgcttccagccaaacggtcttttaattgaggaaattcttcacaactggaaagacaactatgacctccttgaagagaatcactcctatatccagtggctgtttcctctgagggaaccaggagtaaactggcatgccaagcccctcacactcaaggaggttgaggcatttaaaagctctgaggaagtcaaagagcgtcttgtccgggcctatgaactcatgctgggcttttatgggatccaacttgaggaccgggacaccggtgccgtctgccgtgcacagaacttccagccacgcttccacaacctgaacagtcacagccacaacaacctgcgcattacacgcatcctcaagtcgctgggagagctgggcttagagcactaccaggcaccgctggtccgcttcttcctggaggagacactggtacagcacaaattgcccagcgtgcgtcagagtgtcctggactacttcctgttcgccgtgcgttgccgacaccagcgccgggagcttgtgtactttgcatgggagcacttcagacctcgctgccagtttgtctgggggccccgtgacaagctgcggaggttcaagcctcatggtataccccggccactgatggtactagggcaggcagataaggatgagggctccgggaaccccttccaagaggctggcacccagggtcggacctatggatctggaagggacctgagtggggacagtggaacagctgaggatccctcattgctgagcacaaagccccaggatgtgggaaccctggatgaggaccagggggatgaggctgagtcactgagccccaaagagagcaagaagaggaagttggaggggaacaggcaggagcaggtcccaggggagtcagataacggaggaacgatggaggagagggctgagggtgatggagtagccagtaaccatcacactgacaggcaagccccccgcctccttacgccttcagagggccctgaggcccaaaaggatgagaatgggccagaggacccagaaagccaggtggggccagagggccagaggtaccctagaaagccaggtggggccagagtggggccagaggacccagaaagccaggtggggccagagcaaggtgcccctgggagcctggtggaccctgaccctgacactacaggaatcccagtggatgactctgagatgtcgtcaaggctgggggactctgctgaacccccaaagccttagaggtgcatctcagtcctagtcagcccactgcaggggttgtcttgagtcccagagccctgttgttggctcttctcggtgccccacagtgctggcctcgccctggtggtcactgaagcagccaccagagggactgaggccctgccctcagggaaggccatggccttcagaaccctctttacctcactgtgtcctcccccactgccctctgagccccatgtttgtgaacaaaccctaagggtctcgggggaggggcctcttttcttagtctggtgccaagtgaggccttttccgaataaactctttagactttgaaaaaaaaaaaaaaaaaaaaaaaaaa

SEQ ID NO: 2857 - DNA, 1844 bp, Cricetulus griseus
  modified_base (180)..(180): a, c, t, g, unknown or other
ggtgaatccgggaagagcaccattgtcaagcagatgaagattatccaccaggatggttattcactggaagaatgcctcgagttcatagccatcatctatggcaacactctgcagtccatcctggccatcgttcgggctatgacgacgctcaacattcagtatggacatcattcagcgctntggaagatcgggatccaagcttgctttgagcgagcctccgagtaccagctcaacgactctgctggctactatctttcagacctagagcgcctggtgactccaggatatgtgcccactgagcaggacgtgctgcgttcttcgtgtcaaaaccactggcatcatcgagacgcagttctctttcaaggacctcaacttcagaatgttcgatgtgggcgggcagcgttccgagcgcaaaaagtggatccactgcttcgaaggtgtgacgtgcatcatttttcatcgcggcactgagcgcttacgacatggtgctggtggaggacgacgaagtgaatcggatgcacgagtagcctgcacctgttcaacagcatctgcaaccatcgctacttcgccaaccacgtccatcgtgctcttcctcaacaagaaggacgttttctccgagaagatcaaaaaggcacacctcagcatctgctttcccgattacgatggacctaacacttacgaggatgccggcaactacatcaaagtgcagttcctcgagcttaacatgcggcgggacgtgaaggagatctattcccacatgacgtgcgccacggacacacagaacgtcaagtttgtctttgacgctgtcaccgacattatcatcaaggagaacctcaaagactgcgggctcttctgagatacctgtattcaattatgtcccttgctccgagactcagtagcccagctgccctgtagccctgtagtcccccaataactcctgtgcctcaacctccgctccactagccacacccaagccccgaggcttaaagtgcagaccctcccccaattccccaaccccgccctgcccttcaacgcctggctgcactggcctcttggacccacagcaactagccccaactaggacaaggcaggacttgggacagctggcgctcacagtgactcagcagtgcccaagtgacccggtcttctgacgcccttctgccacccccaccagcagcagctcacctggcagatctcggttcagcaaacagccctccctgccctccccagctttcatgaagggcttgaggtatccctccctcaagcagttccagcctgctacctgcatttgacaagcccaacatctgttccacccagtggtcagtgactgtccctcccagaagcccaagggatccaaagtccaagctctggtctaagtaggctcacagataaattagtgactttgaggtaggtaccagggagagacacaagccaaacccatccccaagtaccagtctcagggcatctccccgtccctttctctctctgggtcttcccctctgtccttggacacttctggaccccacctcctccacccacacacaatactgagggctggctgatcaaggtgtggtgtattgaaggagagcactattgacatcagctctgaccaataatcaagctacgctgaggggtggctgagggcagagtccaactctatcgatcaaccatgggcaaagaatatcccatgtgaggttccagtcgactccatgtgactctgctgtccctccggatgtagggccccttcctggagagagtgaactgaaagtcatgcctgagccattagagacaatgtcccacacccccagccactaataaacatttgaaccagaaaaaaaaaaaaa

SEQ ID NO: 2858 - DNA, 1844 bp, Cricetulus griseus
ccaaaatggcgagctgggctgcggagacgcgctgagtgccggaggcgagcgaacagagccgctacggccctggtagtccggagttctgccttagggaacatgcacttttccattcccgaaactgagtcccgcagcggggacagcggcggctccgcctacgtggcctataacatccacgtgaatggagtcctgcactgtcgggtgcgctacagccagctcctggggctgcacgagcagcttcggaaggagtatggggccaatgtgcttcctgcattccccccaaagaagcttttctctctgacacctgcagaggtagaacagaggcgagaacagttagagaagtacatgcaagctgttcggcaagacccattgcttgggagcagtgagacctttaatagttttctacgtcgggcccaacaggagacacaacaagtccccacagaggaggtttccttggaagtgctactcagcaatggacagaaagttctagtcaatgtactaacttctgatcaaaccgaagatgtcctggaggctgtggctgcaaagctggatcttcctgatgacttgatcgggtattttagtctcttccttgttcgagaaaaagaagatggatccttttcttttgtacggaagctgcaggagtttgagctgccttatgtatcggttaccagtcttcggaatcatgagtataagattgtgctcagaaagagttactgggactctgcctatgatgacgatgtcatggagaaccgggttggcctgaacctgctttatgctcagacggtgtccgatattgagcatggctggatcctggtcaccaaagagcagcaccggcaactcaaatctctgcaagagaaagtctccaagaaggagttcttgcggctggctcagactctgcggcactacggctacctgcgctttgatgcctgtgtggctgactttccagagaaggactgccctgtggtggtcagtgcaggcaacagtgagctcagtctccagctgcgattgcctggccagcaactccgtgaaggctccttccgggtgacccgcatgagatgttggcgggttacctcctctgtgccactccccagtggaggcccaagcagtccaagccagggtcggggagaggtgcgcctggaactggcttttgaatacctcatgagcaaggaccggctacagtgggtcaccatcaccagcccacaggccattatgatgagcatctgcttacagtccatggtggatgagctgatggtgaagaagtccgggggcagtatcaggaagatgctgcgtcggcgggtggggggcaccctgaaacgttcagacagccagcaagcagtgaagtccccaccgttgcttgagtcaccagatgccagccgggaatccatggtcaaactctcaagtaaactgagtgctgtgagcttgcggggaattggcagtcccagcacagatgccagtgccagtgctgtccatggcaatttcgccttcgagggcattggagatgaggatttgtaatctcagctgcctggatgtctgccctctaccccagaggaaatttacacagacttgccctgtgcctgtgctcccaagttagcggagtcttttcctactcccttctgacttctcttctttcctcttggccaggggcctcctaacctaccttccctttcctggctggcaacacaaaagatcactgtctttttcagaactggcccttgatgccaaattagcatttagtattttgcacaaagtccaagggaccatggctacttgccttgggaagaacagaggtctgtgaatggtctgaccagctccccactcattaaactcagcctgactgctgccta

SEQ ID NO: 2859 - DNA, 1843 bp, Cricetulus griseus
  modified_base (148)..(148): a, c, t, g, unknown or other
  modified_base (291)..(291): a, c, t, g, unknown or other
gagcagcctggcaggttcgccaagctgctgcttcgcctgcccgcactgcgctccattgggctcaagtgcctggagcacctgttcttcttcaagctcatcggggacacgcccattgacaccttcctcatggagatgctggaggccccanatcaaaccacctaggccccctgccacccgtgtgctggtcccgtgccctgcctggacacagctgctcagctccagtcctgttcctgccctttctgctggcccatgtgaacctttggggtgcagtatccctatggtctctaaagntgcgtcaccatcttcgtcatctttattactgcttgcctttggcccagggccagccatgtctgggcttggctggctctcaggcactggggccatggcccctggccccactgtctcacatagccttacttgccactgcttgtcatcatagactccccggtgagcttcctgttcctttagcctcattgtcaccatcattgtgtgtacagtgctgtttgtttgcaggggaggtgtgggcatggtgtcactaaggagagaattgggttcatttaaccagtccttcagtcgtgttaccaatctggctcaattaaggtgattataattgttattgttattattattttggtgggacaatctttaattttctaaagatagcactaatgtcagctcattagccaccctgcgcccatccccacctcagcctggttggataacagctgccatcgatggtcataggacatccacactgctgctttggggccatattcttcatctgtgtcacctccctgcttggagattcattgggggctcctgtgactgagaattgaagatgaccacagagcctgtggcagcttctggtctgtgtcaccctgaaaccacagtcactgagggaatttggtctcaacgccctcagttttccaaattacagcgtccctaaggatcctaggcagattggcgacagtgccaagggacacctgagccccctcccctgggatcccagaagatctggccggagcaggcaaccagtggctaatcatttgctgtccccatccaaaggatcgggacatgtgacctggtccccatacacacgacaggagatgcggcacagttactggtgttttgtgttctctttaatcaagactttcccgttttcctgtacatttgcttcttgtgagcaaggacctgaggtccccttctgtggggaagtcgggctctggtgactctggaggcaggggatgcatctattttcagatgctgcagggctggagtgccctgatctctagccatgccttagctgggatgcgcggccactgtggggaggatgccgcgtccgcagggaataaagatagaggaatgtttaatgcaccgggaagggtaaatgaatctatttttgtacaaatgtaattttatccctcatgtaaactggatggcatggcgggggacctgttttgtttctgctttgagtgtcgagaagtgttgggacacccggacgctgagatggcagaggaggcccttccaaggaggctgaagactcgtgagaacagcacagacagacatttcctttggtgggagggagggccacaaccagcagggtttccttccccttcttggtgattggaacaaccttgctatatcctcggtgcctgcctgccggcctcgccgcaactcgtctgactgtgaaatgacttccctgcgtaactgctctctgggacattgtggctcagacgctgggggttgatgaacagcagtctcaggattgtagaaaagaaacacaaaaaacgtgagaggagagacaaatatgagcgtttcaaaatatatctccattcagttctca

SEQ ID NO: 2860 - DNA, 1842 bp, Cricetulus griseus
aggaaggaccagattgctgcccctaggcgactgtgcgtaaagtggcagacgttctggcgagccgccggaggggcggacgccagcacccgtagtgacgggggggcgagcgccgctggctccgccgggggaggctcaaaccagccaacaaacaagccggtgtcagtgacagcatggtcttctgtttggaaaacgagatgccacaccgcctgctgcgaagcaccatggtccacttccaagcctccgaagtccagcagctgctacacaacaagttcgtggtcattttgggggactccatccagagagctgtgtataaggacctggtgcttctgctccagaaagactcactgctcacagcttcccagttaaaagccaagggggagctgagctttgaacaggatcagctggtggctgggggccagctgggcgagctacacaacgggacacagtaccgagaggtccgccagttctgctctggttctggccaccaccttgtgcgcttctacttcctcacccgtgtttactccgagtaccttgaggacgtcttgaaggagctgtcatatggacctgcccctgacctagtgatcatcaactcctgcctctgggatctctccagatatggccgctgcccaatggaaagctacagagagaacttggaacgagtgtttgtacgaatggaccaggttttgccagactcttgtctgctggtgtggaacatggcaatgcctttgggggaacgtgtcactgggggtttcctcctgccagagctccagcctctggcagtctctctgcgacaggatgtggttgaagggaacttctacagtgctacactagctgggaaccactgtttcgacgtcctagatctccacttccatttccggcatgccgtacgtcaccgtcatcgagatggtgtccattgggaccaacatgcacaccgccacctctcacacttacttctgacccatgtggctgatgcctggggtgtggagctacccaaacatgaccctctcccagacccatggattgaggactggccagagatggatcatccattccggggaagccataagcagcccccagacttcagggagaagctggccttgcccctactcccacctttccatttgcctcctcccatgtcttttccctacccacttcttcagccctcaccgcctcccttgatcccacccctgcaccagaatgccccctttttccaaggccagccctttccaccctatgaattcttcaaacacagtgcaatggaggacttctcgatgccaggatgtggccctggaatgaactttgtacctggccccctgccaccaccagtctctggccctgtctcccatggtcaacaccggggtcctgtggtccaccggggcaagccacgatgtgttcccaacaacccctaccatgtaccaaggattgggggaacatgtagacagcgactcaggcactcagacagactgatgcacacatataaacaggacagacggggacatgcccattcggggacatggcctggatagacaggatcttaggttgggactagaggtgccaatggctctgaagggtctggtctgcctgataccttagctgttgggccgaggtattcttgtccattgctgatgtcaataaaagcatggaaggacagagtgacattcctgtgtgagggagtgggcctcccaaaccgtggccttaagggttggggaagctgcctcttgggcccttgtgcaaactttttagaaatcaatgaaaacacttttctaacacagttctgtcttcacaataacacatacactaaataaagatgccagtgaatcccttgttatcagcaggtctttg

SEQ ID NO: 2861 - DNA, 1841 bp, Cricetulus griseus
agacaagcaccctcggcagaccttggaagtgatcaaccttctgagaaagcatcgagagctatgtgatgtggtgctagttgtgggcgctaagaagatatatgcccatcgagtcatcttgtcagcctgcagtccctacttccgagcaatgtttacaggagaattggcagaaagccgccagacagaagtagtgatccgagacattgatgagagggctatggaactactgattgacttcgcatatacctcccagataactgtggaagaaggcaatgttcagactctcttgcctgctgcttgcctcctccagctagcagaaatacaggaagcctgctgtgaattcttaaagagacaattagatggacaggatggtgtctcttgtctcaatattgttgagaggtatgatccaaaggagaacaagtggactcgggtggcttctatgagcactagaagactaggagttgctgtggctgtgctgggaggcttcttatatgctgtaggtggctctgatggaacatctccactcaacacagtggagcgctacaatcctcaggaaaacagatggcacaccatagcccctatggggacccgaaggaaacacctaggttgtgcagtgtaccaggacatgatctatgctgtaggagggagagatgacaccacagagcttagcagtgctgagagatacaaccctagaactaaccagtggtctcccgtggtggccatgacatcccgtaggagtggagttggtctggcggtggtcaatggacagctcatggcagtaggaggctttgatggcacaacatacttgaaaaccattgaagtttttgacccagatgccaatacatggaggttatatggaggaatgaattaccgtcggctaggaggtggtgtcggagttattaaaatgacacattgtgaatcccatatatggtgaacacagaaaaaagtcttgcatatgctctttatatttggaagagccttgactttgaaactttgtacagcttgagaaaacattagaacaaattttattctttgccggtgcctcaacctacagaactacaagtctaacgatggaactcacctgcagatgccacctttgcacaatacctttccactctctgcagaagagtgtatatttttggctttaatttatcatggagttgtgatggggatttttgttttgttggcttgggtcaatttggggtttttttgtttgtttggttgtgtttgttttgctgcttttgcagaggacccaagttcagttcccagcaccacatctgaaagctcacaactgtgtgtaactccagctaggtcagtggttctcaacctccctaatgctgcaaccctttaatacagttccttgtgttgtggtgacccacgaccataaaattattttcatttgctacttcataactaatttttgctactgttatgaattataatgtaaatatcttatatgcaggatatctgatatgcaaaccctgtgaaactttcatcccataaggccactgttactatgtctcttaagttgcactttctgatgaaaggttaaaatttttaaggaaataaatgaaaattgtagtgcctaaggtcctctccccactatagtcatagactgatttttctttcagtgtattttgcaggaaaacctttgaatgagactttagccaacaaaccaaaaaggaataaccttgacctttcttcctctcccctacaacaaaacgtctggcaacttttgtgtttacatttaaacatcatttgcacctttttcaaggaaaaaatagtatttggtaaacaattgtttacatgtatcatttatgctttttctagcatgtataactttt

SEQ ID NO: 2862 - DNA, 1841 bp, Cricetulus griseus
  modified_base (810)..(810): a, c, t, g, unknown or other
catcaacctgggcattaccttgtgtattgagtgctctgggattcatcggagtcttggggttcatttttcgaaagtacgttctttaaccttagacacttgggaacctgagcttttaaagcttatgtgtgaattggggaatgatgttataaatcgtgtttatgaagctaaactagaaaaaatgggaataaagaaaccacagcctggacaaagacaggagaaagaggcatatatcagagcaaagtatgtggagaggaagtttgtggataagtactcggtgttatcatcgccttctgagcaggagaaaagggttagctccaaaagctgcgaggaacggaggctgagccaaagtcaggggtgtctgtccacaccacagttaaaagtaatgacagtgggatccagcaaggctctgatgatgggcgagaatctttaccttccaccgtgtcagccaatagcttatatgagcctgaaggagaaaggcaagagtcttctgtgtttcttgactctaaacttcttaatccaggacttcagctttatagggcttcatacgaaaaaaccttcccaaaatggctgaggctttggctcatggtgcagatgtgaactgggctaattcggacgagaaccaagcaacagcactcatccaggctgtactagggggctctttggtgacatgcgagttcctcttacagaatggtgctaatgtgaaccaaagagatgtccaagggcggggaccacttcaccacgccactgtcttaggacacacagggcaggtatgtttgttcctaaagcgaggtgccaatcaaactgatgaanagggcaaggaccctttgagtatagcggtggaagcagccaatgctgacatagtgaccttgttacgtttagcaagaatgaatgaagaaatgcgggaatcggaaggactttatggacagccaggtgatgaaacttaccaggacatttttcgtgatttttctcaaatggcatccaataatccagagaaactcaatcgcttccagcaagattcacagaagttctgagccctttaaagaggggagtctatgaaatttggtgaattcctaatgtgtaccaccaaaatctcacacctttctagattctacttgattttggtagacattgaattaattgttcagaaaaaatggtacccatttattggtatttttgtaaatgaaaacaaatgtctcatagttgggaaagggagaaatccactatagttcctcttttatttaagaagaaagaaaagcctgtttaatgggttgtgcttttagtgggtgtctttttctgtttacatagagggggatcatgtggacaaagaaatatttaattaaatacacatttctttgcattggtcttcttactattttattttctagatttttctcattccccagccttattttgggtattaatttttagcagggaaagcttgctgtgctatgaaggttgttagcaccatttaacacgaaggctaaaggttagcttttggaaatgacaagctgctttttacatctttgtttcagtgtgcttcgctgtgttctcgatcattccggtcataaagattggtcacatgtactatttcttgctacctgtgaaaatgatttacgaatgtataaccaacactccattaatttttattagtgtgtagaagatttgtatctaattcatgaatgtagtttttctgtagtttgtcattgtaaatggagcaaagtacattatctttatagttattctaaaatgtacattatgtaagaattgtaaatatacttgattactttgtatgctgaaaatttacaataataagtcaataaaaaatatctcacttctggcac

SEQ ID NO: 2863 - DNA, 1841 bp, Cricetulus griseus
cgcttccccgacccctgcccgccgccccgtccccagccccgcccaagatgtcagaggacctggcaaaacagttggctagctacaaagctcagctccagcaagtagaagctgccttgtctgggaacggagaaaatgaagacctcttgaaattgaagaaggatttgcaagaagttatagaattgaccaaagaccttctgtcaactcagccttcggaaacccttgcaagttcagacagttttgcttctactcagcctagccactcctggaaagtaggggacaaatgtatggccatctggagtgaagacggacagtgttacgaagcggagattgaggagatagatgaagacaatggcacggctgcaatcacctttgctggttatggcaatgctgaagtgactccattgttgaacctcaaacccgtagaagaaggaaggaaggcaaaagaggacagtggcaacaaacccatgtccaaaaaagaaatgattgcccagcagcgtgaatataaaaagaagaaagctctgaagaaagcacaaagaataaaagagctagagcaggaaagggaggaccagaaggtgaagtggcagcaattcaacaacagggcgtactccaagaacaagaagggccaggtaaagaggagtatttttgcttcgccggaaagtgtgacgggcaaagttggagtaggaacctgtgggattgctgacaagcctatgacccagtatcaagacacatctaaatacaatgtcaggcacctgatgccgcagtaatcagagagactgttggagttcatctctgcagggctttacattacattacctttttatccttatatttttctaaaggtaaattatttgctagatgagtaaggaagataaattgttgtcattgtttggctttggtagaatgaaacttgaagacatttgataactgctatcatttaacttttcattactacttatgacagatccctcgagtttgttgaacaaggcaacttttctaggtagatgctgcttaagtcagcacttagatgattactggacttctggcccccacttaactaatgttgagtagacattttataagtcctaatttggagttttcaggtgctttgcacttgacgtatcccaacagttcattggaacatcaccgcaaaatgccagcctgctaaagacatcttcagtttgataacctggccattgtgcagacaagcccgagtatgggttaatttataaacagcaaagtttggtttgaggtttctccttgaattacttgtttctcgggcctattgactcactttgtatttttttttttgtcattgagtttgaatttttatattaaaaaaacaagcaaaaccatgtttaggatgtgctccccttctctggtgtttatttggtgttttgtattgttttttcccctttgttgatttttcacttgtggcagtggtaccatttttgggatgtgtgatgtttatatgggaaaacaaaagctgatgtatacccctgtatacagtgtagatactatttttgtcaaggctaaattaatgaacaagagtactaaatgtttcacaattaaattttttctgtatttcttgtgcattaatctgcccataatttccctgtatattatgttcatgtagctgagtttgtaatttttattaactagatcaagttgccagcatttgttggcctaagtgagcaccacagttattccaagttgagtttaagccaaaaacatggatagaaaaaagggtcttcctgttattggaagaagacacttttgggtgtgtgctaatttcagttttgtatgtttaactttaattaaataaagttagtttttaaaatctc

SEQ ID NO: 2864 - DNA, 1841 bp, Cricetulus griseus
  modified_base (310)..(310): a, c, t, g, unknown or other
gctttgatgtccgcgcacatctagaccacatccccgactacacccccccactgctcaccaccatctccccggagcaggagtcggacgagcggaaatgtaactacgagcggtaccgaggcctggtgcagaacgacttcgccggcatctcggaggagcagtgcttatatcagatctacattgatgaactgtacggaggcctgcagagacccagcgaggatgagaagaagaagcttgcagagaagaaggcttccattggctacacctatgaagacagtactgtggccgaggtagagaaggtggccgagaaccngaggaggaggagcaccagctgaggaggagagcaagttcggatgaagatgagggacgtcggaggtggatgtggacgagcctgaaccaggagcaggtggtctgatactcaataagcaggccacgacctacggcatggctgacggagactttgtcaggatgctacggaaagacaaggaggaggcagaggccattaaacatgccaaggccctggaggaggagaaagccatagtaactcgggccggcgttcccggcgacagcgaagagaattcagggagaagcggctgaggggccggaagatcagccctcccagttacgcccgccgagacagccccacctatgacccctataaacggtcaccttccgaatccagctccgagtcccgttcccgctctcgctccccgagcccagggcgcgaggagaaaaatcactttcatcaccagtttcggaggcagcgacgaggaggcagcagctgccgccgccgccgccgccgcatcgggggccgcccccgggaagccccccgcgcccccccagcccggcggccccgctccaggccgcaatgccagcgcccgccgccgctcctcctccacctctgcctccaggacctccagctcccgctccagctcgcgctccagctcgcgctcccgccgaggctactaccgctctgggcgccacgcgcgctcgcgctcgcgctcctggtccccgctccccgctcccgctcccggcgctattcgcgctcccgcagccggggaaggcggcactcggaaggcggttcccgcgacggacaccgctactcgcgctcgccggcccggcgtggcgggtacgcgccccgccgcagaagcaggagccgctcccgttcaggtgaccgttataagcggggtgctcgggcccccaggcaccatagtagcagtcggagccgcagcagctggtccctcagcccttcccgaagccgcagtctgacccgtagtggaagccgtagccagagccgcagcagaagccgcagccagagccagagccagagtcactcgccatcgcccccaagggagaagccgaccaggccagccgcgtccccagctgtgggcgagaagctgaaaaagaccgaacctgccgctggtaaagagacaggagctgccaaacccaagctgaccccacaggagaggctgaagctgcggatgcagaaggctctgaaccgccagttcaaggcggataagaaggcggcccaggagaagatgatacagcaggagcatgagcgccaggagcgtgaggatgagcttcgtgccatggcccgaaagatccggatgaaggagcgagaaagacgggagaaggagagagaagagtgggaacgccagtacagccgccagagccgctcaccctccccacgctacagtcgagagtacagttcttctcgaaggcgctcgaggtccaggtcccgaagcccccattacaggcattaggcggactgcgtgggactgcagcgctctgggtttctgtagtgaaataaaagcaaacattatttaatacccaaaaaaaaaaaa

SEQ ID NO: 2865 - DNA, 1840 bp, Cricetulus griseus
tccggtgccctgagccagcaggcggagctgatctcccggcagctccaagagttacgacggctggaggaggaggttcggatgctccgggagacctccctgcagcagaagatgaggctggaggctcaggccatggagatggacgctcttgcggtggcagagaaagctggccaagctgaggctgagggcctgcgcgctgccttggctggagccgagatggtccggaagaacctggaggaggggaaccagagggaactgcaggagattcagactctgcaccaagagcagctatcctcaatgacccaggctcacgagatggctcttgccagtctgaccagcaaggccgagggcttggagagggccctgaatagcctggaaatgaaacgggcaggggaaatcaaacagctgtcggtggcccagaaggagaccgagctgcttcggggtcagctgagcaagactcaagaagagctggaagctcaggtgaccttggtggaaagtctgaggaagtacgtgggggaacgaagtccctcctgaggttcacaggcaggcatgggagccagaacgggaggagcttctagacaccgtgcagcacttgagggaggaccgggctgaccttcaggccaccgtggagttgctgcaggttcgggtacagagcctcacgcacatgcttgccctgcaggaagaggagctgaccaggaagatccagccttcagatgtgctggagcccgagtatcctaagaagtgccgatctctgctgagcagctggcgggaaaaggtgtttgtcctcatggtacaactcaaggcccaggacctggagcacagggactccatgaaggggctgagggaccaggtagcagagctccaggaacaagtgatggcccagagccaggagcaggccatcttgcagcaagccctgcaagacaaagcggcggagctggaggtggagcgcatgagcatcaagaccctgcaaatggagctgaatcgggctcaggaggccaggcggcggcagaagcagcggacagactctgtcgaggagcagctgaagttcgtggtcagcgccatgaaaagcactcaggacagcatccatggcaccatgaccaggctgaaccagactgtagcccggattcccagcctcagcaaccgactcagctatgccatccggaaggtccacaccattaagggtttgatggctcgaaaagtgtcccttgctcagctgcgcctgcaaagctgtccccccccccaacccgcacccccagtggatgccgacctgagccttgagttggagcaccttcgggaagaacggaaccgcttggatgctgagctgcagctgagtgcccacatcatccagcaggaggtgggccgggcccgggagcaaggggaggcagagcgcctgcagctgaacgaggtggcccagcagctggagcaggagctgcagcgtgcccaggagtccctggtcaacgtggggcagcagctggagtcggcccgccaggggcagcaggagagcacagaggaagctgccaacctccggcaggagctgacacagcagcagcagatctacgggcaagctctgcaggagaaggtggccgaggtggaaactcggcttcgggaacagctctcagacacaaagaggaggctgaatgaggcgcggagggagcaggccaaggccgtggtttccttgcgccagatccagcacagagccacgcgggaaaaggagcggaaccaggagctcagacgccttcaggatgaggcccggaaggaggaggctcagcgtgtggcccgcagagtgcaggagctcgagagggacaaaaacctcatgctgcagcggctgttggcaatgcttccc

SEQ ID NO: 2866 - DNA, 1840 bp, Cricetulus griseus
gagaggagcggacgcaggaacccgcgggtctcagcatctgtgcttgtgttcttacccgcgtcccgcagcatgccgctctcccgtgcgctggccgtgctatgcggcgtgttgctttgcgcctccggccttttcgccgtgtccggtgacttctgtgactccagcttgtgccagaatggtgggacctgcctgataagccaagacaatgatgtctactgcctctgtcccgagggcttcacaggccttgtgtgcagtgagactgagaaaggaccctgctccccaaacccttgctacaatgatggtaaatgccaagtgactgagaacacacagcgaggagatatcttcactcagtacatctgccagtgctctctgggctactcgggcacccactgtgagatcagttgtacctcaacactgggcatggaagggggcgccattgctaactcacagatttccgcctcatctgtgtacgtgggtttcctgggcgttcagcgctggggcccagaactggctcgtctgcacagctcagggctggtcaatgcatggacagccagtgattatgacagcaagccctggatccaggtgaacctccttcggaagatgcgggtgtcaggtgtgattacgcagggtgccagccgcgcagggagagcagaatacctgaagaccttcaaggtggcttatagcctagacggactcaagttcaagtttatccagaatgcaagtggatggagacaaggtgttttgggggaacatggacaacaacggcctgaaggttaacatgttcagtccctctctggaggcacagtacatcaggctgtaccctgtttcgtgctaccgagcctgcacccttcgcttcgagcttctgggctgtgaattgaatggatgttctgagcccctgggcctgaagaataactcaattcccgacagccatatgacagcttccagcacctacaagacttggaacctgcgtgcctttggctggtacccccactatgggcggctggacatgcagggcaagatcaatgcctggacagcccaaagcaacagcaacaaagagtggctgcaggttgacctgtgcactcagaggcatgtgacgggaatcatcacccagggggcccgtgactttggccaggtccagtatgtggcatcctacaaggtggcccacagtaacgacggtgtggagtggaccatatataaggaacaagggactgacaaggtcttccttggcaactcggacaacaactcacacaagaagaacatttttgagacgcccatcgtggctcgctatgtgcgtgtccttcctgtctcttggcataagcgcatcactctgcgcctggagctgctaggctgttagtcctctgtccttccagcccaatcgaccaggggggccagccagcgctgagatctccctcccctgcctcctgtgcctgctgcctctggctggctgccttcttagcccttcctcctgattggattggggctggaggcaggaagggggaggcagggtaccagacttgcccttcaccttttccctcgccctgcagcctccacaggccttctgctagccccctttctcaggcattctggggagttggatgggtctgagatgaacagggaagaagactgaagtccgggtatatgggctatatctctaccaactgccccaagtcctaacctccctgtcaggggttgactcaagactaaaaagggacctctggtttcctgcccctctctgcacaccacacattcctggctttggggcctctgctggcttgctactcaaagttaataggcagactcgaaaatacattgtgttctccactggaaaaaaaaaaaaaaaaaa

SEQ ID NO: 2867 - DNA, 1840 bp, Cricetulus griseus
cttgcatacagtaatgtgcaagaaagggaagcacagtttggaacgacggcagagatatatgcttatcgagaagagcaggagttcggaattgaagtagtgaaagtgaaagcaattggacgacagaggttcaaggtccttgaacttagaacacagtcagatggaattcagcaagctaaagtgcaaattttgccagagtgtgtgttgccgtcaaccatgtctgcagttcagttagaatcactcaataagtgccagatatttccttcaaaacctgtctcttgggaagaccagtattcatgtaaatggtggcagaaataccagaagaggaagtttcactgtgcaaatctgacttcatggcctcgctggctgtattcattatatgatgctgaaacattaatggatagaataaagaaacagctacgtgaatgggatgaaaatctcaaagatgattctcttcctgcaaatcctatagacttttcttacagagtagctgcttgtcttcctattgatgatgtgttgagaattcagctccttaaaattggcagtgctattcaacgacttcgctgtgaattagacatcatgaataaatgtacttccctttgctgtaaacaatgtcaagagacagaaataacaaccaagaatgaaatatttagtttatccttatgtggcccaatggcagcgtatgtgaatcctcatggatatgtacatgagacactgactgtgtataaagcttccaacctgaatctgataggtcggccttctacagtacacagctggtttcccgggtatgcatggaccattgcccagtgtaagatttgtgcaagccatattggatggaaatttacagccaccaaaaagatatgtcacctcaaaaattttggggcttaactcgctctgctctgttacccacaattccagaaactgaagatgaaataagtccagacaaagtaatactttgtttgtaagtgcattgtagggataacttcctaacaaattgtttcctcaagtcagatctgccccagacaccactgcctctgatgtatgtgtatagtggtttcagcgtttgactaccaacttcaagagcacacttgttcagaggatgaaaaagcagcataaaacacacggttggattcagaagtatctgctttagtagcttggtgccattaattatcctgttgaatatgtgtcattgagagggcaagaaaacatgtttgaaatgatgagaatggctgtggaacaggataagggcaccacggttctaaatgatgaagctcattttaggtcttctttatataacttagaagttcatctttttccatttggtaaccacttttcttccactgttcacgcaactgctgtaacagggccccaatttccttccctgaagaaatgcccactttcctgatgtcatgtccactcacagggaacggtggcacagaccactgctgcatctccttgagcagaccatgctctccttggtacttcagcagctcacacacacgagcaattgcatcaggttcccttgactaagtgacaaagtttttcacatattaaacactatttcattctactacttaaatacttatgtaaagtctacagtttgaaaaaattagttatgcagttagtgaagaactatttttctgaccaaacctaatacatacttacatctataacgaagtcttgatatggtctcaatggctctgaactatctgttgctttaatcaaatctttccttgtttttaactataaaataaaaccctaagtttttctcttcttttgaaattttcaatctcaaatccagttttgtgacatcatcttgtactttgaataaagaggaccaaaa

SEQ ID NO: 2868 - DNA, 1840 bp, Cricetulus griseus
gctgaggcggcagcggtggcggcggctccggaggccgcagtccgcgtcccggcttcggcccgtgccgcaccatggtgacgctcgcggagctgttggtgcttctggctgcgctgctggccacagcgtcgggctacttcgtcagcatcgacgcacacgcagaggagtgcttcttcgagcgggtcacctcgggcaccaagatgggcctcatcttcgaggtggcggagggcggtttcctggacatcgacgtggagatcacaggaccagataataaaggaatctataaaggagatcgagagtccagtgggaaatataccttcgcagcccacatggatgggacatacaagttctgctttagtaataggatgtccaccatgactccaaagatagtaatgttcaccattgacattggggaagctcccaaaggacaagacatggagacagaagctcatcagaacaagctagaagaaatgattaatgaactggcagtggcgatgacagctgtaaagcacgaacaggagtacatggaagttcgggagagaatacacagagccatcaatgacaacacaaacagcagagtggtcctttggtccttcttcgaagctcttgttctagttgccatgacattgggacagatctactacctgaagagattttttgaagtccggagggttgtttaaaaggccttttcctgttgatcccaaattcacaattcagttgtttaccaaacaccttggtcataataatgtcattagttgatacatttttattttctgaacgttcatgacttatgtttctttgtgattaattggtgttggggaaaacctgtttaggaaagttagagtgaaaatttgacatttgattggcctctaattcttacttgaatgctgccccattatataggtccttccaagagttcagaggctgttgatgctgtatgggtctttattgtactttcaccttcagttttcataataaaatgcagtttgttcaggaagtagcccacagcctgaccaacactttccccgtaaagttttatattgacacttagaactcaatcacctctatttgaaatcgacacaagcagttgataatttagaagtctgtggaagccagtattttgggttttggaacagactactctcccttttgtgctgcatagtatgtccgttgttggcacttaggaagagcgaaattgctcaagtggaagcctgcatttctcatgccaaagggttaagcctcttggatggcttgcaatgataggcaaccactattttgtccatttagtcactggccttagtgccctggtcttcaatgtcagcactagggttttatttgtcctctggtgtctctttttttgacaagtcagttttgtttatagaaaatgaagagactctctctctgatgatgggtttaatgaaagtcgctctgctttgcatatgggcgatccaggattatgtggtgactgatgtctggtagctacctggatattttattttcctttttggatcttgcaaggggaaaactacaaataacaagttttgtaaaattaatttaaatttgttatcggttttcatgttcaggacaaatagtttttcaaccctggatgactatccttgcaacagtctgttggtaaggtgactttcaccatagggcagctgttgcatgccaattttttgtgtgtgtttgtgaaaacacttcagaattgaattaaaagatgtaaatctaaaattggttgtgtatctaatatgccccaggttcagtaaataaacagttctttttaaaaacaaaaaaaaaaaaaaaaaaaaaaaaaaaaaaaaaaaaaaaaaaaaaaaaaaaaaaa

SEQ ID NO: 2869 - DNA, 1839 bp, Cricetulus griseus
gcgctttcctcgcggatcgaagagactctagctacagcttgtggctggaagggagacggaggccgcagctcagggaaagtgaagctgcagtagtggtggtaggaagatgtcgggcgaagacgagcagcaggagcaaactatcgccgaggacctggtcgtgaccaagtataagatggggggcgacatcgccaaccgggtactccgatctttggtggaagcctccagctcaggtgtatcagtgctgagcctgtgtgagaaaggcgatgccatgataatggaagagacagggaaaatcttcaagaaggaaaaggaaatgaagaaaggtgttgccttccctaccagcatttccgtaaataactgtgtgtgtcacttctcccctttgaagagtgaccaggactatatactcaaggaaggtgacttggtaaaaattgaccttggggtccatgtggatggcttcattgctaatgtggctcacacttttgtaattggtgtggctcaggggacccaggtaacaggccggaaagcagatgtcattaaggcagctcatctttgtgccgaagctgccttacgactggtcaaacccggaaaccagaacacacaagtgacagaagcctggaacaaagttgctcactcatttaattgcacaccaatagaaggtatgctgtcacaccagttgaagcagcatgtgatcgatggagagaaaacaattatccagaatcctacagaccagcagaagaaggaccatgaaaaggccgagtttgaggtacatgaagtttatgctgtggatgtcctagtcagctcaggagaaggcaaggccaaagatgcaggacagagaaccaccatttacaaacgagacccctctaaacaatacggcctgaaaatgaaaacttcacgtgcctttttcagtgaggtggaaaggcgttttgatgccatgccatttactttaagagcatttgaagatgagaagaaggctcgaatgggtgtagtagagtgtgccaaacatgagttactacagccatttaatgttctctatgagaaggagggtgaatttgttgcccagtttaaatttacagtcctactcatgcccaatggccccatgcggataaccagtggtccctttgagcctgacctctacaagtctgacatggaagtccaggatgcagagctaaaggctcttctccagagttctgcaagtcgaaaaacccagaaaaagaagaaaaagaaggcctccaagactgcagagaatgccaccagtggagaaacattagaagagaatgaagctggggactgaggtgggtcccgtatccccagcttgccattcctgcctcatccccttcccaccgcaccccaggctctgtgaagtgcagttcgtcttctccacccaagaccaccagcagagtgagcggggtcttctgccccacccagttcccacacattcgcccacccactctttccaacaaaaaaccagctccaactgactctggtcttgggaggccaggcttcccggccactgaagactactttcagtagaaaaagaaattgaataataaaatcaggagtcaaaacccatcgtcttcaagccccctctttctggccttttctactctgcttggtcaaggtttgtggctctacaacagaacaaaggaggctaagttagccaccaccatccagctggcttcaaactttttgagttccctcccaagaaagaaaaaccaggaaccagaggagtagactgaagagaactgactttcagattgtggacttggatggctcctggggatttgtagagaaaaggttacaatttgtacctctggcatgctgtcccagggaaccaaggct

SEQ ID NO: 2870 - DNA, 1839 bp, Cricetulus griseus
  modified_base (279)..(279): a, c, t, g, unknown or other
catccatcagcaccttggccgtcgggaaatgaccgatgtgattattgagactatgaaggccagcccagatgagttgagagacacaatggaagaaaaaaagtcttcagcagcttccctgtctgcacagaaaagcaggaagcaaagcgagtcggtgaatacagccccagattccccatccaagcagctcccagaccagatttccttcttcagcggcaacccctttctgttgagatcgtgcacggcatcatgcatctatataagacgaataagaatgacctnccttaaagaagatgagcctcgcagcgccatgctgtgtgtcctcacctgtccctgccaccatgaccagtcacgaccttatgaagtttgtcgccccattcaatgacgtgattgaacaaatgaaaatcatcagagactctactccgaatcagtacatggtgctgatcaagttcagtgcacagactgatgcagatagcttctacatggcatgcaacggccgtcagttcaactccatcgaagatgacgtttgccagctggtctatgtggaaagggctgaagtgttgaaatctgaagatggcgccagtctccctgtgatggacctgacggagctccccaagtgcactgtctgtctggagcgaatggacgagtctgtgaatgggatcctcaccaccctatgcaaccacagcttccacagccagtgtctgcagcggtgggatgacaccacgtgtcctgtttgccgatactgtcaaacgccagagccagtggaagaaaacaagtgttttgagtgtggtgtccaggaaaacctctggatttgtttaatatgtggccacataggatgtggacggtatgtaagtcgacatgcttacaagcactttgaggaaactcagcacacgtatgccatgcagcttactaaccaccgggtctgggactatgctggagataattatgtccatcgactggttgcaagcaagacggatggaaagattgttcagtacgagtgtgagggcgatacctgccaggaagagaagatagatgccttacagttagagtattcgtacttactaacaagccagctggaatcgcagcggatatactgggaaaacaagattgttcgcatagagaaggacacagcagaggagattaataacatgaagaccaagtttaaagagaccatcgagaagtgtgacagcctggagctcagacttagtgacctcctgaaggagaagcagtctgtggaaagaaagtgcactcagctgaacaccagagtggccaaactcagcacggagctgcaggaagagcaggagctgaacaagtgtctccgtgccaaccagctgctgctgcagaacaagctgaaggaagaggagaggctgctgaaggagacctgtgaccagaaggaccttcaaatcacggagatccaggagcagctgcgtgatgtcatgttctacctggagacacagcagcagatcagccacctgcctgcagagactcggcaagagatccaagaagggcagatcaacatcccctcagcccccaacccgccctcttcaggggccggtgggaagctgccatccaggaagggccgtagcaagaggggcaagtgaccttgagagacttgtccctgagacttcctgggcactgcagggtgtgctgggaccttttgctgagtgggagggtgggccctaataagtatgcctgaggacgaactgggaaaggctgtggccagaggaagcagcagatgggcagaggtttccaaactacttgaaggtcttaaaaaaatgttccaggaaagcaaaaatcaagatgtgtaaataaaatgttattttaaaaggtcaaaaaaaaaaa

SEQ ID NO: 2871 - DNA, 1839 bp, Cricetulus griseus
ggtcgggccagcgggcgggcggcgagcaccggagcctggcggcgcccacgaccgaggcccgcaatggtgatctgctgcgcggcggtgaactgctccaaccggcagggcaaaggcgagaagcgcgctgtctccttccacaggttccccctaaaggactccaaacgactgatccagtggttaaaagccgttcagagggataattggacccccactaagtattcattcctctgcagtgagcatttcaccaaagacagtttctccaaaagactggaggaccagcatcgcctgctgaagcccacagctgtgccctctattttccacctgtcggagaagaagcggggggctggaggccatggccatgctaggagaaagaccacagggaccatgagaggccacacaagctcagcaacagggaaaggaactgtaggtccctcactgccctcaaatgataactcgatggcgaagcctgagccccgaaagttgaagcgagcttctccacaaagtgatgcagctgccaaggccaccacaggtgctgccagtcaggagcaggggcagtcccaagagagaactccaggagctgaactggccaccccactgacccaaagcccggaagaatcagaagtatcgactacagtgtctgaccagcagaaggcctcttcctctcatgatgcaggcggggcagacaagagtggtatctccatggacgacttcacacctccagggtctggagcttgcaagttcattggctcacttcattcttatagtttctcctccaagcacactcgagagaggccagctgtcccccgtgagcccattgaccgaaagaggccgaagagagatacagagccaaggtgcagtgggaatagtgtggcccagagtcctccaagttcctcacttacagcaacccctcagaaggcttcccagagcccctctgcgcctcctactgatgtaaccccaaagccagctgcggaagccgtgcagagtgagcacagtgatgccagtcctatgtctatcaatgaggtcatcctgtctgcctccggggcctgcaagctcatcgactcactgcactcctactgcttttcggctcggcagaataagagccaggtatgctgcctgcgggagcaggtagaaaagaagaatggagagctaaagagcctgcggcagagggtcagccgctctgacagccaggtccgaaagctgcaggagaagctggacgagctgaggagagcaagtctcccctacctcccctacctaagtggcctgctgccccccagccacgagcctcccaagatgaacccagtcgtggaaccgctgtcctggatgctgggtacctggctgtcagacccaccaggagttggtacctttccgactctgcagcccttccagtacctggaggaggtgcacatctcccatgtgggccagcctatgctcaacttctcgttcaattccttccatccagacacacacaagccaatgcacagagagtgtggcttcatccgcctcaagcctgacactaacaaggtggcctttatcagtgcccagaacacagggattgtggaagtggaggagggtgaagtgaacgggcaggagctctctatctcatcccattccatctccaggatctcctttgctaaggagccccatgtggagcagattactcgaaaattcagactgaattctgaaggcaaacttgaacagacagtttctatggcaaccactacacagccaatgactcagcatcttcacattacctacaagaaggtgaccccctaacttggagcagcaaccagagcctgtgttgtccagatgatcttgtaatggcatagaaaaccaaataaa

SEQ ID NO: 2872 - DNA, 1839 bp, Cricetulus griseus
gctgctctcaatgccaagcgggctggggatctagatcgtgcccgggagctcatgaggattgggaagagatttggtactgtcctggaggccctggagaaggggcagcctgtggatctgagtggcatgcccccagcacctgaggatctgaaggctctcccacaggcttctaaggcccccacagcaccccgagtcctatccccagcagtggagcaagtgcaaccagtgatgacctctgacctcccagccaccccagtggcccctgcagagccaaaaacagtgctggatgctttacagcaaaggctgaacaggtaccgtgaggcaggcatccaggcccgggccaatggggatgagcgtaaggccaggatgcatgatcgcattgcaaagggccaagaagccagcacagcctctggcccattcatctcgtcttctgactgagcccaaggcctcaagttctaaggaatcactgagtccgtctgctcgggagcagctggcactgctggaggctcggaaactgcaataccagcgagcagccctgcaagccaagcgcaggcaggatctggagcaggccaaatctcatttacgagtggctaaaagtcttgaggcccagatcatccaagccagagcaggtcaacccattgacctttccaaggtgccttcacccttgacggatgaagagggtgacttcatcctcattcaccatgaggatctgcgactttcccagaaggctgaggaggtgtatgtccagctacagaaaatactcctggagcaacatgagaagtgcctgctgttctccaagcagttcatgcaccagggcaatgtggctgagactacccggtttgagaagcttgctcaggaccgaaagaaacagcttgagatactgcagctagctcaggcccagggccttgaccctcccagccaccactttgagttgaagaccttccagactgtgaggatcttctcagaactcaacagcacagaaatgcatctgatcatcgtcaggggaatgaacctcccagccccaccaggagtgacgcctgatgacttggatgcttttgtacgctttgagtttcactaccctaactcggaccaggctcaaaaaagcaaaacagccgtggtaaagaatacaaactctccagaatttgaacaagttttcaaattaaacatcaatcgaaatcaccgtggctttaagagggtgatccagagcaaaggaatcaaatttgagatctttcacaaaggatccttttttagaagtgacaagctggttggcacagcacacctgaaattggaaaggctggagaatgagtgtgagatcagagagatcatggaggttctggatggaagaaagcccacagggggcaagctggaggtcaaggtgaggcttcgggagcctttgagtggccaggatgtgcagatggtcactgagaactggctggtcctggagcccaggggcctgtgatgtggatgaagacaaggatacccccactgctctgtgccatagagtcctattgccccttaacctctgcatagtaatgatgtacagtttaacccggccccacttgtaccatttctggatgtgcctttcaaagatttaactgtaagtgatgggaaaacttgagggtgatcggtaccttccctgcttaggggagggacaggattccgtgacccagctggtcagtggcagcctgtcccgcccagctgttttccccatgcttgtgcctttgaccctgacacctgctgcactagcctttctgattcccagcggacttgggacaggaaaattactttggtactattggtgggaaggggaaggttttctttggtttggtccatgtaactaag

SEQ ID NO: 2873 - DNA, 1839 bp, Cricetulus griseus
gcaggcgggcgggcaaagtcggggcgccgaggactgcgggccgatagggccgcgggatgaggaagcggaccgagccagtcaccttggagcatgagagctgcgccgcctcaggctcgtcctcctccggctcggccgccgcggcgctggacgccgactgccgcttgaagcagaacctgcgtctggcgggcaaggggccggcagagccgcgcagcggagcggacgcaggcatgaagcgggcgctgggcagacgaaagagcctgtggttccgactgaggaagataattctctgtgttctggggttctacattgccattccgtttcttgtcaaactgtgtcctgggatacaggccaaactgattttcttgaatttcgtgagggttccctatttcattgacttgaaaaaaccacaggatcaaggtttgaatcatacctgcaattactacctccagccagaggatgatgtgactattggagtctggcacaccatcccctccatctggtggaaaaatgcccaagggaaggaccagatgtggtatgaggatgctctggcttctaaccaccccatcattctatatctgcatggaaatgcaggcaccagaggaggtgaccaccgtgtggagctgtacaaggtgttgagttcccttggttaccatgtggtcaccttcgattacagaggttggggtgactccgtgggaacaccatcagagcgaggcatgacttatgatgcactccatgtttttgactggatcaaagcaagaagtggtgacaaccctgtgtatatttggggccattcactgggcactggagtggcaacaaatctggtacggcgcctctgtgagcgagagacgccaccagatgcccttatactggagtctccattcacaaatatccgtgaagaagcaaagagtcatccattttcagtgatatatcgatacttccctggctttgactggttcttcctcgatcccattacaagcagtggaattaagtttgcaaatgacgaaaatgtgaagcacattgcctgtcctctgctcatcttgcacgctgaggatgacccagttgtgccctttcatctcggcagaaagctatacaacattgctgcaccatctcgaagcttccgagacttcaaagttcagtttgtcccctttcactcagacctgggctacagacataagtacatctacaagagccctgagcttccacggatactgagggaattcctagggaagtcggaactggaacgccagcactgagactagcccgtgaaggcgcatgaagacccaccttccttcccttctccctggccagcagtctggcacccagtagcccagggtgccaccacctgtggtgctcaggagcccagcgcatacctagaaagaggactcagacacagtgggcagagcctccgcagatgtggatctgtgagggaaacacggtggcaggcaggcggcctcctgagcctctggtggccaccctacctgagttctttttgggaatgtttactgacagcaagtggaccccatatgctgggcgtagagaacctgggaggggcccaggagcgcaggaccactccaagttttctggcaccaccacttaaaatatggggaaatggttttctgccctctctggcgtacacagaatggactccaagtggttgggttgtccccttcagctcatgtacctgcttgccttcctcagctgaccctgcctcccatggcatctgctcacccacagtaaggggcacctggatctgcactcccttccattgtgcccacctgtctgtcatctaacctggctgtagactgagcatttatttaagaataaaatcttggtggtggt

SEQ ID NO: 2874 - DNA, 1838 bp, Cricetulus griseus
gacagggcggggcgcctcacgaagatggtggcgcgcgcggcgtgtggctcctgtcgtcttccccagtctcaactcagcgcaccggccagcgtttcgctggtttggagtccccgccctcccggtccctgaccccgcgcccccttaccgtgtccccgactcctagttccaggaatgcctcgtgctcgtaagggcaatgcgctccgcaagggcggtcagcgccgtggaggaggtgccaggagcagtacccaagccgactcaggttccagtgaggatgaagcagccagtgaggcccggagtactaccagtgactgtcccagcctgctcagtaccactgcggaggactgcctgggtggggaagctgtggatgagcagagccaacaggaaaacctggaggaaaagctgaaggactgcgtggactgcctcaccgacaagagtgccaagacccggcaaggagctcttgagagcctgcgcctggccttggcctcccacctgctccctgacttcctgctggaacgcagcctcacgctggcagatgccctggaaaagtgccttaagaaagggaagggtgaagaacaggccctggctgctgctgtgctgggcctgctctgtgtgcagttgggccctggacccaagggcgaggagctgttccatagcctgcagccgctgctaacctcggtgctcagtgacagtgcagcaagccccactgcccggctccattgtgcttctgctcttggtttgggctgctatgtggctgccacagatgtccaggacctggtctcttgcttgacctgcttggaaggtattttcagctggtcttgtggcactagtggctccactgctgctctggtccctgccagcctacatggtctgctctgtgctgccctgcaggcctgggcattgctgctcaccatctgtcctggtacccacatcagccacatccttgacaggcagctgccccggctgccgaagctcttgtccagtgaaagtgtgaacctgcggattgctgctggggaagccatcgcactgctctttgagcttgcccgggaccttgaggaggactttgtttatgaggacatggaggctctctgcagttccttgcatactctagccactgacagcaataagtaccgtgccaagattgaccgtcgacgtcagcgctccattttccgagctgtgctgcacttcgttgagggtggtgaatatgaggaagaaacaatccgctttggactggaagtgctctgcatagacagctgggctcgccaccgcatctacacagccttcaaggatgtgttgggctcaggcatgcactatcacctccagaacaacgagcttctccgtgacatctttggcctgggccctgtgctggtgctggatgccgctaccctgaaggcctgcaagatctcacgttttgaaaagcacctgtacaatgctgccgccttcaaagctcggaccaaggcccggagtcgtgcgagggacaagcgggcagatgtcttgtgaagctgactggccaatgagaaggctactcatacccttaccatatttttaacagaagacagtgcaagaactggtccccgccagcaattgtcactttatttttttaatgatgaaaccaaaaatagacaaatgtgggagggccatgggatcaggacacttaagactctggccctttgtgtctgcactcagccctgtggctatggcctctgtcctgtctcaggtgaaaccaaatgcgagctggtccgggggtctggcacctgtccaccatggtatagggtaggcaaagctgcctagaatggatgtgtgctgatttttaaaaataagagagaattaaacagtactta

SEQ ID NO: 2875 - DNA, 1838 bp, Cricetulus griseus
  modified_base (1831)..(1831): a, c, t, g, unknown or other
ggggcctgtggtgccatgatccggaacgggcacggggaggccggcgcggctgggcgcaggggcccggtgggccagcgcgccgtgcgggtgtggtgcgatggctgctatgacatggtgcattatggtcactccaatcagcttcgccaggcacgtgccatgggggactacctcatcgtgggtgtgcacactgatgaggagattgccaagcataaggggcccccagtttttacccaggaagagaggtacaagatggtacaggccatcaagtgggtggatgaagtggtacccgctgctccctacgtcaccacactggagacactggacaaatacaactgtgacttctgtgttcatggcaatgacatcacgttgacagtagatggccgagatacctacgaggaagtgaagcaggctgggaggtacagagagtgcaaacgcacccagggtgtgtccaccacagacctcgtgggtcgaatgctgctagtgaccaaggcccaccatagcagccaggagatgtcctcggagtatcgggaatatgctgacagttttggcaagccccctcacccgacacctgccggggacacactttcctcagaagtctcctcccagtgccccggggggcagaacccctggacaggggtgtcccagtttctacagacatcccagaagatcatccagtttgcttctgggaaggagccccagcctggggagacagtcatctacgtggccggtgcctttgacctgttccacattgggcacgtggacttcctagaggaggtgtacaagctggccaagaggccctacatcatcgccggcctacactttgaccaggaagtaaaccgatacaagggcaagaactaccccatcatgaacctgcatgagcggactctgagcgtgctggcttgccggtatgtttcagaagtggtgattggggcgccatactcggtcacagcagagctcctgggtcacttcaaggtggacctcgtatgtcatgggaagacagaaattgtacctgacagggatggctctgacccttaccaggagcccaagaggagaggaatcttccggcagatcgacagtggcagcaacctcactacagacctgatcgtgcaaaggatcatcaagaacaggttggagtatgaagctcggaatcagaagaaagaagccaaggaattggcctttctggaggccatgaggcagcaggaggcacagcctgcaggggacactgcctagcttctgacctggaggatgttactcaagccctcgccctgtgcccacctcttctcgccccgccctgccctgctgctgtgtcttggtgtcagctcacacaattccagaggaagctgccttgctggagggtgtgagctgcccagagagggtggctcacacagtgaagcagcccagtggacaggataagcagagggcacctgtgactggaggagtattgctatgtgtccttggcatccacagttccaactgccactgccctagtcttgtctgggacacacccctcccgcctgactggaagctgcccacccagctttggtgaaaaggttcagaggttcagagggatgactttggggacctcttgtcctgggtcaccctgcaagtgggtaccctctactttggggcacgttctagcaccccattcctgattcctagaagacgcacttgccccggtggctgggccagcttgactgttctctgcacagacttctggtcctcattttgtacctcagtggctgctgtaaatctttttggcacagcaaaaaaaaaaaaaaaaaaaaaaaaaaaaaaaaaaaaaaaaaaaaaaaaaaaaaaaaaaaaaaaaaanaaaaaaa

SEQ ID NO: 2876 - DNA, 1838 bp, Cricetulus griseus
  modified_base (23)..(23): a, c, t, g, unknown or other
gtggggacctttctgcccttgcnctgcctggcacccccctcgcttttctctctgagagcgctggtgggaggcaccatgagtgccccagcagtcagagtggcctctgcctcttggggctggctgctggctgactatggggctgccacactgggctgggccgtgtgggctgtgctgagccctccaggagcccaggagaaagaaccaggccaggagaacaacaaagccctgatgtggcggttgctccttcctcttcaccatgtccagaatcaacctgcggattcgagagctgcttttctcctccttgctgcgccaagaccttgggtttttccaggagaccaagacaggggagctgaactcaaggctgagctccgacacctccctgatgagccgctggctccctttaaatgccaatatcctgttgcggagcctggtgaaggtggttgggctctactacttcatgctccgggtgtcgcccaggcttaccttcctctccctgctggacctgcccctcacaatagcagccgagaaggtgtacaacccccgtcatcaggcggtgttaacagagatccaggatgcgatggctaaggccgggcaggtggtgcgtgaggcggtaggagggctgcagactgtgcgcagctttggggccgaggagcaggaggtcagccgctataaggaggccctggagcaatgtcgacagctgtggtggcgccgagacctggaaagagcattgtatttagtcatacggagggtgatggccttgggcatgcaggtgctaatcctgaactgcggtgtgcagcagatcctggctggtgaggtcaccaggggaggcctgctctccttcctgctattccaggaggaagtgggtcactatgtccggaacctggtgtacatgtatggggatatgcttagcaacgtgggcgctgctgagaaggttttctgctacatagacagaaagccgaatctgccccagcctgggaccctggccccaaccaggctggagggccgcgtggaattccaagacatctccttttcgtacccgagtcgccccgagaagcctgtactcaagggcctgacgttcacgctgcaccctggaaaggtgacagcgttggtgggacccaatgggtcagggaagagtaccgtggccgccctgctgcagaacctgtaccagcccacggggggccggctgctgctggacggacagcccctggtccagtatgatcaccactacctgcaccgccaggtggttctggtgggacaggagcctgtgctcttctctgggtctgtcaaagacaacattgcctatggcctgagggactgtgaggatgcccaagtgatggccgctgcccgggcagcttgtgcggacgacttcataggggagatgcctgatgggatacacacagaaataggggagaaagggggccagttagccgtgggacagaaacaacgtctggccattgcccgggcccttgtgaggaacccacgggtcctgatcctggatgaggctaccagtgccctggacgcccagtgtgagcaggctctgcaggcctggaggtcgcagggagacaggacggtgctggtgattgcccacaggctgcacacggttcagaacgcagaccaggtgctggtgctcaagcaagggcagctggtggagcatgaccagctcaggaaggatcaggatgtctatgctcacctggtacagcagcggctggaggagtgaggcttccggacacagagccccactgagttcttcaaccgaggccagaacccagacccacggggactgtgctggaggctggggtcgggataaagactgggaccattttggactttgtatgttt

SEQ ID NO: 2877 - DNA, 1838 bp, Cricetulus griseus
atacgagtctgtgctgtgtgtgaagcctgacgtcagcgtctaccggattccgccgcgggcctcgaaccgcggctacagggcatctgactggaagttagaccagccagattggactggccgcctccgaatcacttcaaaagggaagatcgcctacatcaaaactggaagataaagtttcaggggagctctttgctcaggcaccagtagaacagtaccctggcattgctgtggagactgtgacagactccagccgctacttcgtgatcaggatccaggatggtaccgggcgtagtgcatttattggcattggcttcacagatcggggggacgccttcgacttttaacgtttccttgcaagatcacttcaagtgggtgaagcatgcttctaagccccgggcctcagggactgggggcctgagcttactcccacctccacctggaggcaaagtcactattcccccaccatcctctgttgctatcagcaaccatgtcaccccaccgcctattccaaaatctaaccatggaggtaatgatgcagatatccttttagatctggattcccctgctcctgtcacgacttcagcaccagctccagtttctacaagcagtgacttgtggggagacttcagcactgcatccagctctgttccgaaccaggcaccacagccatccaactgggtccagttttgagtgtgattggcgtgatgtgaaggacacacttgaagaataaaaatgaccctgagggcaccattctgtgagggagttgagggaccgcatcatttcccagaaccaaaatcagtggacaatcttttccgtagcttctctgttgctttcgggctggattattttgttacctctgtgttacttgctgtacgccaggagaccacctgttgtttcctgctcacaaccaaggcaggggagtagcggagattatcacactggccgactgtgcagagttcagaaggccaactttgagagtgcgagtgacctcagacatttgtaaattcttgaatttgtctcagatcatctcatgactccttgctacatttgaagcatagcattaattttactcaccgtgggtttgacctgaacattaagagttttaacttgatgtgtagagcagagcagtagaagcgcttagctctcatgcagtacccacacgccttgctgcctggtgtggatcccttttcataaacatttcttgtagtccatttagctgttccatggaaagctgctattacataattgtcagtgtgaaggaggctaaatcacagctttacctgtgacagtagcctttgccccaggctttgatacccagctaggatatcttaaagcaagttaccgtcccgtcacttttctctccctctgcccgccattccttttacaatgctgtgaagagagccctgttcaggtctgggtactgtccactttgttgggcaatttgaggaggggattggggaggatttatattcttctgtgagcacctgtttggatatgtatgttctacctgaagagggcccttttagctgtttcaaactttgggtccattttttccccctcattgcctcccctttccaggcagctctcttcttgcagagccatggcaggacgtttaaggttccaataaaaacactaagaggaaaatatagaaaatatagtgactagctattgggaaacctattttctcaatcttcctccattttgtgttctttgtattcttaagatgataatatattatgtatttgaattgctgaaaattgcaaatgaagctgaagacaaatgtatataaggcatatgctgtattggtgcaataatggtaattagagatgtgaaaaaag

SEQ ID NO: 2878 - DNA, 1837 bp, Cricetulus griseus
gcgtctcctccgctgggccgagtccgccagcctcccggcgggcatggaaaactgtccccgaagcccccgcgcggcccgcgaccgcacgcccgcaggccctcgctagctgttggcatcgggcgttttctcagggagcttcttgttgcccttcacgccctcaacaatgtcttccaggacagcacttcacgagggaaacgctgcaggagattttccagaggttgtctccaaatactatggtgacgccccacaagaagagcatgctgggaaatgggaactatgatgtgaatgtcatcatggcagcacttcaaaccaaaggctatgaagctgtttggtgggacaagcgcagggacgtgggtgtcatcgctctcactaatgtcatgggcttcatcatgaacctgcctccagcctgtgctgggggtcccctcaagttgcctctcaaaggcagcactggatctgcgttcgtgaggtgggaggggcctacgtacaaccttgactccaaactcaagatgccggagtggattggaggcgagagtgagctcaggaaatttctaaaataccatttgcgaggaaaaaactgtgaactcctactggtggtaccagaagaagtggaagcccatcagagctggagggcagatgtgtgacagttctggacccgctctttgcctcaaccctccagcccctctttgatgtgctgtggcctctccacctcctcaaacatctcattgggtttccccctcagatttgccagtgcaataggacaggtgtgtggactgtcacagaaccaccaagcactgtttgtgcctgggggaagaaggtaggagctctgaacacttagagcaagccattgaataccttttttatttcagagagggaactaaaagaggggtccttgccggggcttgcttattttcccttctatgaggactcaccacaggttctgctagtacttgtcactgatgactcaaggctctagttctagatcactttttttggaaataaataccataccacacacgaatgtggttatgttggccttcagaacaggtgacctggccagcccttagggagccatggtctctgcaggtctgagagctgccccactggccaggtttctcccttggcagcagagctagcctgggggcttgcatgtcaatcctgagtaagcttattggggtgaagcaggggctatctccccactgtgactggagtgcatgtttacaccagcactttttctgcacatgtatcttcaatccaacaaagctgttttctattcaagtagcagaggccccaagtggctactgcattacaatcaaccacggtcatctgtaccattttctacaccagatctgcttggcaccatggggagctctgaccctgcacaatgacattccaatcactaccagccagatgttctagccgaccttgctgattgtcacagcaggacccttaggtccattggcactgtcggtggtagtaagccatttcttgggaagaggttcctccctacggatctgcttgggcctgtgcaaacggcactgcaaagaagtcccatgcacgtggaatccatgagccagtgggatgtacaaagacgcttaagcatttcagggctggttctgttcatatccaattctggtgcttaggaacagggacccatgttgatgcccaagggcaaaaagctccattccctttaaggaagtcgcatcctgaccctgatgcccagtaagggacagccctaggcttttttcttgctttattctttttttgttggccttgtgctgggtttgtttacaaagatgtattttgtttaaccaaataattaaaaaacgaaaaactaaac

SEQ ID NO: 2879 - DNA, 1837 bp, Cricetulus griseus
agtttgcaagctcagctctgggcttaaggcagcgacagcagcaggaaaaacctgcctctgccctccctcgccacctcctctcccctgttctccagtcactaaccaggcacccccagttcccacaaggccctcctgccatgtcggacccagatgtccccaggggcccccgatgtccctgccatgtggcccccttgttccagaggtgcctgagcccctcttcaggagcccagcccctccccacccgagcctagtccggagccccagggaccatgagtggcggaaagaagaaaagtagttttcagatcaccagcgtcaccacggactatgagggcccaggaagcccaggggcttcggattcccctgcctcaccggctcccgttggacccccgccccgcctccccaatggggaacccaaccctgattcaggaggcaggggcacccccgcaatggctccccgccacctggagcccctgcctcccgcttccgggtggtgaagctgccccagggcttgggagagccttatcgtcgaggtcggtggacgtgtgtggatgtttacgagagagacctggagcccccaaacttcggccggcttctggagggaattcgaggggcctcgggaggcactggaggcagatcattggattctaggttggagctggctagcttgggcataagcacctctatcccacaaccaggcctgtctcagagccccacctcttggctccgcccgcccccacttctcctggaccacaggcccgctccttcacaggggggttgggccagctggcagggcctggcaaggccaaggtggagacacccccgctgtcagcctctccaccccagcaacgccccccggggcctgggactggagatagtgctcagcccctgccctctctgagggtagatgtggaatctgggagttcagcggcgggcacccctccactgtcacggagaagagatggagcagttccgctgaggatggagttagttggtccagacgagtcagggaaggtggcttcgatcgactctcgccccagctccccagccctctacttcgatgccagcctggcccacaagtctccagatccctttggagccgcagcagcccagagtctcagcctggctcgttccatgttggccatcagtggtcacctggacagtgatgatgatagtggttccggaagcctggttggcattgacaacaagattgaacaagccatggacttggtgaaatcgcacctcatgtttgccgtgcgagaagaagtagaggtactgaaggagcagatccgagacctggcggagcggaatgctgcattggagcaggagaatggactgctacgcgccctggccagcccggagcagctggcccagctgccatcctcgggacttgcacggctcgggccctctgcgcccaatgggccttccatctgaacctcctttccctcacaatgtgcctttggggggctgccactggctgctgggccttgtgccagccgcctgcccccctttcctatgtagctttaatacccacatccaaccccgccgcccagggatgggagctaaatgctcagtattggcctgtcccttcctacctggtctccccagagtcctcaggcctttcgggaagagggaaaactcaggagggggtgcttatcgagagccctcatccatgaaagaaaccatccccacctccttccctaggtttcagtgttctggggaccctgcccccagcagtagatggcctggaaagatttggaggtgacctggcaggccccaccccgttaaaataataattataaaattaaaaaaaaatctgaagaaacttaagaaaaaaaaa

SEQ ID NO: 2880 - DNA, 1837 bp, Cricetulus griseus
gcaagcagcggctaccggcgacgccccagagcggaagagggaagtgagccgcgccgggctgggctcgcgaaaggctagaggcaccgcggagggaaggccagcgtcgcgtcgcgatccgggatgtcgaagaacacggtgtcgtcggcccgcttccggaaggtggacgtggacgaatatgatgagaataagttcgtggacgaggaggacggcggcgatggccaggccgggcccgacgagggcgaggtggactcttgtctgcggcaaggaaacatgacagctgcactccaggcggctctgaagaacccccctatcaacacaaagagtcaggcagtgaaggaccgggcaggcagcattgtcttgaaagtgctcatctcttttaaagctaatgatattgaaaaggctgttcagtctctggataagaatggtgtggacctcctaatgaagtatatttataaaggctttgagagcccctctgacaatagcagtgcaatgttactacagtggcatgaaaaggcacttgctgctggaggggtagggtccattgttcgtgtgttgactgcaagaaaaactgtgtagtccagctggaactggacatcactcacagaagtgggagttgctggtacaaagaccaaaacaaccaaatggcaccgctgccctgtgggtagcagctgtttctctcagctttgccttgcttcctttttcatacttataaagaagaaaattacatatcagtttccttaatgaaaattgcgataatgtggagaaaattttgtttcaaggggggtgtttgatcctttcataaccatgtcaataatatgtataccattctgtaatttatattcaagtttgattgtacaatttttactcttttgctggtttaagggttttactttatttttaaccaatactgagagatctgatcaaatttgaggccagtttcctaattcattgctagtcaggaagtgatctttatttttaaaaatgagagactggcagctattaacattgcaaaactggaccactcttcccttatttgagcaaaatgtgtttccagagcaagtagtgggtgagccccactaccgatttccagctttatttctgcttgcttccagataatggtgtgaatgtaagtgtgctacttcctgttagcatccagttatcatggcctcaatctctttgtggtgacccagggtccagagcaaggagtcttgctctatataaatgtatttgcaaaatacaagcgcctctttggcacaaacatcacattttccttctgataataaggctgtctggggaaactaccccaagtcagagaaaggctctagcagcctctaaatgaaatactgctttcttccgaaataaggtagctgccttagacatttacgcaagtattcactgtaatatttcatatgcccaatgaagtcttcagtgttcttcgggtaatggggatctcagaaaatttggttctgatccaaacaaatacatattctgtgtttcagctcagtgttttttaagaaagaaaatgtcacacagtgaaaaaaaaaaatgtgtttactttgttggacaaaccaaattggttctcaaaaaaatgaccggtgcttgtaaaaagttattattatgaagtagttccaaaacaatcacgtgaatgaatgcacatggccaagagggaatcagcctggttagtctgtgcataagatgccagttccagagtcactgactgaggtgagaaccagtgcagaaattctgtaaactgctgtttttgatacctgctttttgttttgttctgttttgtaaaattatgataaacttcagaaaataaaatgtcagtgttgaataa

SEQ ID NO: 2881 - DNA, 1836 bp, Cricetulus griseus
attgccaagcaagtggacttctggttcgggatgcaaaccttcacaaggacaggtttcttcgagagcaaatcgaaaaatctagagatggatatgtggacatctctcttctggtgtctttcaacaaaaatgaagaaattgaccacagatgggaagctaatagccagagcattgaaaagctcatctgtagtagagttggacttagaagggaccagaatccggagaaaaaagcccttgggagagagaccaaaggatgaggaggaacgcaccgtgtatgtggagctacttcccaagaatgttactcacagctgggattgaaagagtatttgggaaatgtggcaacgtggtttatataagtattccacattacaagtctactggggatcctaagggatttgcctttgtggagtttgaaacaaaagaacaagcagcaaaagccattgagtttcttaacaacccaccagaagaggcaccaagaaaacctggcatatttcctaagacagtgaaaaacaaacccatcccttccttaagagtagctgaagagaagaaaaagaagaaaaaaaaaaaagggagaataaagaaggaagacagtatgcaggccaaagagttaaatatggaggacacaagcggcatgggtgtgtgtaaaggcaagagaccaaggactgcctctgagggctctgaagcagaaactcctgaagctccaaagcaacctgcaaagaagaagaaaaacgggagaagactgagccgtctgtcttacctgaagttagagcagggaaaagggaaagaagcagtgctgaggatgaagactgccagacccccaggccaaaagccaagaagagggcgcagaaagatggcattagccaagccgcttctgaaatctccaaggaaagcagagacttagaattctgctctacagaggaggagaaggagacaggagacagaaaaggtgactcactcctaaaagtaaaaagaaagcataagaaaaaacacaaggagagacataaaatgggagaagaggttataccgttgagagtgctgtccaagactgaatggatggatttgaaaaaagagtatttggcactacaaaaagccagtatggcttctctaaaaaaaacaatatctcaaataaaattggagtcagaaatggaaaccgactgtacagtgcccacccaggagaaggttaacaaccaaggcccacaattcgtgaatggagttattgtgaagatcatgagcacagagcctctacctggcaggaaacaagtcagggatattttggccgcactctcagaagttgtttacgttgatttgctagaaggagatactgaatgccatgcccggttcaaaactcctgaggatgctcaggcagtaatgaatgcacagactgaaatcagaaagaagcactgttggaacctcgaggtcctttcaggtgatcatgagcagaggtactggcagaagattttggtagatagacaggccaaacttaatcaacctcgggaaaagaaaagaggcacggagaagttaatcaccaaagctgagaagattagactggccaagactcaacaagccagtcagcatattcgattctctgagtatgattgagaaggacggcagctccctttgggttcccttgctggagtgttctagaatgctaggaccgtgtgatggattgttctgctgagatctacatttaaaaaaaaaagcctttgttccttgatgtgtaaatacgacttttctagagacaaatacattatgtcactaggtttttttttttaataaaagttctttgttgaaattatgcagatcaacttcaaatgatttcataaataaatgtgtcttgaa

SEQ ID NO: 2882 - DNA, 1836 bp, Cricetulus griseus
cggcggctgtggcagcagcgcataaaggggccgccgccgggtgatgcggtgaccgctgcggcaggcccagacgctgagtgggcctcggccctcagctcgtcggatccgcgcttcggagctcccggtcttctccggccgactcgcgaccgctcgggcggtctcaggccccctcgccccgtccccgtccctcccccgtccccgtccccgccccgggggccgtcgccaccgtttcccaccatggctctgaagagaatccacaaggaattgaatgacctggcccgagatcctccagcacagtgttcagcaggtcctgttggagatgatatgtttcattggcaggctacaataatggggccaaatgacagcccctatcagggtggagtgtttttcttgacaattcatttcccaacagattaccccttcaaaccacctaaggttgcatttacaacaagaatttatcatccaaatattaacagtaatggcagcatttgtcttgatattctacggtcacagtggtctccagcactaactatttcaaaagtacttttgtccatctgttctctgttgtgtgatcccaatccagatgatcctttagtgcctgagattgctcggatctacaaaacagatagagaaaagtacaacagaatagctcgggaatggactcagaagtatgcgatgtaattaaagaaattattggataacctctacaaataaagctagggaactctgaaagagaaagtccttttgatttccatttgactgctttctatgagcccacgcctcatcttcccctgtgcacatgtttacctgacacagcagtgctgcgtgttgtacatacttggaacaacaaaccagaaatactgtacttctgtaccaacattgcctcctagcagagaggtgtgtgtgtgtgagaagccagttctccaggcgtaacctaggtgtgagactaaaagctttccttattgacttaaaattggataatggcaagatgtgagaggtagtgggtacacagtgtgtgcttggatgggaggaaaaaagctccagtgacctgtaggagattgtccttaagtggaatccatctaatctgaaacagtcataaaaagcaatgtgaagaacatgaagctgtttctgtattcatttcaccctgaagaacctacaacttaggtgacagctatgaccaaacagattaaactctacctacattctgtattttaaggtctaagtttaactgaacaacatttaaatggactggagctgttagtacataaagtgtggtgggctttgttcccaacacttccacatctccctgccctttcagccttcttccttttagcccctttccataatctttggtttgtatgtggtttctcagttaatacatagctaatagctcttatttttcttatgtttttaactgctttaggcctatttcgatgtaagggtgaaaattcatttgatggaaatacttgtgtatatttaaagacccagttgctcctctggatggagcttgtacgttcaagaatgattaatctgtgtaataaactgattactacagtcattacatataattttgtgtgaataggctttttgatttaaaaacttgatctagctaagattagtggtggattttttttcctcacccctgaaatgttttcatttatatttgttgcatttcaaaatcatgaaacaattccagtttacatagtaaaaaagatgagagtaattttattaagcaagatagaggcataagcttaaaggcattttcatgaaacttatatgtgcaccattccaggaacatgactgttaaactaaataaatttgctttgttaaatgaaa

SEQ ID NO: 2883 - DNA, 1835 bp, Cricetulus griseus
tatctaatggtccttcttatctccatccctgtcggcttcctctttaagaaagctggacctggattgaagagatggggggcaggcagccgtgggcctggggctcaccctattcacctgtggtccccatgctttgcattctctgataaccatcttgggaacctgggccctcattcaggcccagccctgctcctgtcacgccctggctcttgcatggaccttctcctatctcctcttcttccgagccctcagcctgctgggcctacccacccccacgcccttcaccaatgctgtccagctgctgttgacactgaagttggtgagtctggccagtgaggtccaggacctgcatctggctcagagaaaggaaatagcctccggcttcagcaaggagcctacccctgggcctcctgcccgactgtcccctctttgatggagacactcagctacagctactgctatgtgggaatcatgacaggcccattcttccgctaccgcacctacctggactggctggagcagcccttcccgggatccgtgcccagcctgaggcccctgctgcgccgcgcctggccagccccgctctttggcctgctcttcctgctgtcctcgcatctcttcccgctggaagccgtgcgcgaggatgccttctacgcccgcccgctgcccacccgcctcttctacatggtcccggtcttcttcgccttccgcatgcgcttctacgtggcctggattgcggccgagtgcggttgcattgccgcgggcttcggggcctaccccgtggctgccaaagcccgggccgggggtggccccaccctccaatgcccaacccccagcagcccggagaaggcggcttccctggagtatgactatgaggccatccgtaacatcgactgctatggcacagacttctgcgtgcgggtgcgggatggcatgcgctactggaacatgacggtgcagtggtggctggcacagtacatctacaagagcgccccgttccgctcctacgttctgaggagcgcctggaccatgctgttgagcgcctactggcacggcctccaccctggctactacctaagcttcatgaccatcccgctgtgcctggcggctgagggctatctggagtcggccttgcggagacacctgagccccaggggccagcgagcctgggactgggtgcactggttcctcaagatgcgcgcctacgactacatgtgcatgggcttcgtcctgctctccatgggcgacacgctccggtactgggcctccatctactattggatccactttctagccctggcctgcctggggctggggctcgccttgggtggggcagccccagcaagaggaagacggcggcaccccaggccgccagcagccaagccagggaaaagctccgggaagagtgagccagccgtgctgcgctggcctgccagccacctcaggctttgcgtgggaattgcgtgagccgggctgtcctttacccagccagagtcccttgttgggctaggagcctggagaggattccgccttcccatccccgtgggtccccagcgttggggtaggagcttcagggccaggttctgggaaggagaacatccttcctgttttgtccttggcttttatcatcaaaccagtatttcagagaccacgacctttcgtaaacaccctgaaggagaaaccgaggtgtaaacagcccctggggaacatgctcccacagcagcttcctacagtctgagccacatctgggcccccacacaacctgccacccagtgtcatccttggcctgtgacaggccagaatgtataaatctcccccaataaagtgttacacatgca

SEQ ID NO: 2884 - DNA, 1835 bp, Cricetulus griseus
gcaaagagaaaactgaatatctagagaaaatggttcagagaaatgaaagatacaaacaagatgtggaaagattctatgaacgaaagcgacatttagatttaattgagatgcttgaggcaaagagaccatgggtggagtatgagaatgtacggcaggaatatgaaggtgtaaagctagttcgtgaccgagtgaaagaagaggtcagaaagcttaaagaagggcaaatccctatgactcgccgaattgaggagattgaaaggcagcgtcgtactctggaaactcgaatcaaagaaaaggcaactgagattaaggaagcctctcagaaatgcaaacaaaggcaagacattatagagcggaaggatagacatattaaggaacttcagcaggccttaacagtcaaacagaatgaagagcatgaccggcagaagagaataagcaacacccgcaggatgatagaggacttgcagaatgagctcatcaggattggtggccttgcgtgatacaaacaagcatctcgagctcaaagacaatgagctaagactgaagaaaaaggaacttcttgaaagaaaaaccaaaaaaagacaactggagcagaaaatcagctccaagctgggaagtataaggctgatggaacaggatacttgcaatctggaagaggaagaacgaaaagcaagtaccaaaatcaaagaaataaatgttcagaaagcaaaactcgttactgaattaacaggtctagtaaagatttgcacctctttgcatatacaaaaagtcaatttgattcttcagaatactacagtgatctctgagaagaacaaattagaagcagattacatggcatcatcttcacagcttcgtgtcacagagcaacagttcattgaattggatgacaatagacagagattgttacagaagtgcaaggaacttatgaggagagctaggcaagtatgtaacctgagtgcagaccaagccgttccccaggaatttcagacagctttccaagatcttccaaacacattggatgaaattgatgcattattaactgaagaaagatcaagagcttcctgcttcacaggactgaatcctacagtggttgaggaatacacaaaaaagagaaatagaaatacaacagttaactgaagaactaaaggggaagagagttgaactagatgaatacagggaaaatatttcacaagtgaaagaaaggtggctgaacccgttaaaggagctagtagaaaaaatcaatgagaagttcagcaacttttttagttccatgcagtgtgctggtgaagttgatcttcatacagaaaatgaggaagactatgataaatatggaatccgaattagagtaaaatttcgcagtagtactcaactgcatgaattaactcctcatcatcaaagtggaggtgaaagaagtgtttctaccatgctgtacttgatggcccttcaggagctcaatagatgtccattcagagtagtggatgaaatcaatcagggtatggatccaatcaatgaacgaagagtgtttgagatggttgtgaatactgcctgtaaagagaacacttcccagtacttcttcatcacaccaaagcttctacaaaatcttccttattctgaaaaaatgacagtgttatttgtctacaatggtcctcatatgttggagccaaaccgatggaatttaaaggcttttcagaggcggcggcgaaggattaccttcactcaaccttctcagtgaaagaaagggaggggacttcagaggtttttcttttaactgtttatacgtgtggctcgctcaagtgaataaaagttagcagatttaattgaaaaaaaaaaaaaaa

SEQ ID NO: 2885 - DNA, 1835 bp, Cricetulus griseus
tgagttttatctttttaaaattgagactgatttcaaagtcttccagctggtgatcgtgtgagaggtagtacttgacagtagagagtctggggtgatgggtgtgacaattctagacattagaaaagtctagaacatgtggcagtggtgggtgtgcttatggtatgctgtggagtagacagttgtcattgtcaggccactggaattggaattcactgtagagtacagctgagaaggagactcctcgatgaacgaggttcctgtgctatagtacaacttcctgtagggctgtcccatgcagggttaactgacagtctttttatttttgtgcaagtagcattatccatttgtataatgcaggagagtgagaacatactgtttgctttacattcataacttctaggaactgtgctcctatatgtaactgtcaagggagattttaaaagtgcaccttttaggatagaatgacacattatattttatattcagttggcccttctgcttccaccggcatttctctctttgaagagagagttagccatttgacagttttaagtcagtgggaacttatttttagttactcagtgaaattaatttttaatttgtatgtttaacttacagagtaggttggtaataacagctgaactgtgtaacattgttgcttcaaattgaagtctatactatgaacactcagcatctacgctcacatagcagcatattattgagctgtttggagtttgcaaggtggagaagcattgaaccacgcactgtgtattgtgtactccctctgtcacagctctgtgcctcctaacgggatcatggagctggcttcctccatgtgatgaagcgtgccaagcactgggaatctgtagaagcagcttgggagtcttgttctgaagtggtgtttgtgcaggttagaagggctcaatgtgggtggtgggcagttctggagtaacttcactcactcacatagggttagtattgttgcttttgattctgtagcccaacgaggcctgctgctctgattgctgggttgggcagaagaatggcactggaatcagtgggtagattgtgaggtacaagaggcaccacatctgccatcagcaagtcggccttgttcttttctcctacctgtgtgcatcctactctttcccattctccttttttcttctctaggtctcagcttcagacttagatttgcaagttgtattgtgtctgtgaccttactccattcactaagggggggaaggtagtctgacccccagccttcttacatctggggggataatagaccactgtgtgggtcctgcaggctggaaccctgcagcaccagggcactacattgcttctcaaaggctgttacagcagcatagctttccaaagtagccttattagtctagacagctgccggacacttggaagagtggctcactactatcatgaggctgtatttgctggtattaaaactcttcagaattgaagtttttatttgaaattctattttggttgacttaaatttgagagacagttctaaaaccgatgtagagactcattcaacagcaatgacctttaaaaacttacattaagtaaaactgccagtagactaaaccatccctgtgtgttagagcttcctctaggtactgctgtggaacttgagcattgttgagagctactcattggtcaacatgtttttaagtgtgcttttactaaatgcttgtgtaagttttgtaattcactatagaaaaggttgaccttgtaatgtatgtttttgtatgtatagtcttttaagtagccttgtctttatttaaataaactgaataaaactaaaaaaaaaaaaa

SEQ ID NO: 2886 - DNA, 1835 bp, Cricetulus griseus
  modified_base (916)..(916): a, c, t, g, unknown or other
ggctcgccgtggggctgaggcagcaggtagccgggtgggccatgtccggggccgcagcgggcggcagaggcggaggttcctgggggccggggcgcggaggggcggggggtctccggcggggatgctctccaccggcgcccgctggctccccccgggccgggctgcagccactcagggctacggtccccttccagctgcagcagccgcaccagtgccgggacgggggtggccgcgcagccagtgtcccatgttcggtggccccagaaaagtcggtgtgtaggcctcaaccacctcaggtccgacgtacattctccctggacaccgtcctcagttcctaccttctgggccagtggccacgagatgctgatggggccttcacctgctgtacaaatgacaaagccacccagactcccctatcctggcaagagccggaaggtgagcgggccagcttctgcatgcacaagcgatcagcatcatggggcagcacagaccaccgaaaagagatcaccaagttgaagcaacagttgcagaggacaaagctgagccgaagtgggaaggagaaggagcggagctcccctgtccaaggagaccatgctgtacggggagcagggagggcatcccttcccagcttccccccagggtcccctgtcctgcgactcagcccttgcctgcacagaagcctagaaggactcaaccaggagctggaagaggtgtttgtgaaggagcagggtgaagaggagctgctgaggatacttgaggtccctgatgggcaccgtgccccagctcctccacagaatagcagctgtgaccgttccctcctcctcctggagccaggcaacatgaccagctctccctctgtgccactggtgtccccctcagcctcctggccaggccaaccgtgaggagcaccggggtnccactgaggagctgacatccatccacagtgacaaagcctcctctccaggccaaccagccttcctagaagatggcagtccatctccagtccttgcctttgctgcctccctggcccaatcacagctatgtcttgtgccttggtggcaagctcttcattagcttcccaagatgggggatggaggagcccttccctcttggcctttgagcactttcatttattgtgtcaaagccccaggtcctttggtggatgtcagcccctccaaaggcgaggagactgaccttctccactagcagctaggcagctcacaacttacacttgtgtacctgcagcttccctcacttgctagaaggtcttgatgagttcaaatgacttataggagggtcttgttatggaacaaggtggctgtgaatgagagaggggagatgccacagacttctttatagctccacctccagagacagaggagagcagaccagatgcctccttcctagaggagctaccaaagtggtcctcagggccagtacacttgaccaattcagctgttggcaggggaccaggagatttcccaagtggcatttcatctcacttttaccctgactaaagattgtcttaagcagcatcccagcccaaagtggatagtgggaagagggagagctggcattcctccaggtggcatgtagtggctccataccctccacctgctccagggggcatgtagtggctccataccctccacctgctccagggttgggttggattgaaaaatgcctattttcttgtatcgatgtagaaactctattttctcccaaagacactatttttgcagctatttgaagtttgtatattttccgtactgcagagcttacacaaaattgaagaatgttaatgttcaagttttcttatcttgtgtttagaggtt

SEQ ID NO: 2887 - DNA, 1834 bp, Cricetulus griseus
ggaggaccaagagccgctgggttttgaacacatggggctggatccccgcctcctgcaggctgtcgctgacttgggatggtcacaacctacgctgatccaggaaaaggctatacctctggcgctggaggggaaggacctcctggcccgcgcccgcacaggctctggcaagacggcagcttatgctattcctatgctgcagttgcttctccacaagaaagcgacaggtcctgtaatggaacaagctgtgagaggccttgtccttgttcctactaaggagctggcacggcaggcacagtctatgatgcagcagctggctgcctactgtgctcgggatgtgcgagtggctaatgtctcagctgctgaagactcagcttctcagagagctgtattgatggagaaacctgatgtggtggtggggaccccatcccgaatattaaaccacttgcagcaggacaacttgaagctccgtgactccctggagctgctggtgatagacgaagctgaccttctcttttcctttggctttgaggatgaactcaagggtcttctttgtcacttgcctcggatttaccaggcctttctcatgtcagccactttcaacgaggacgtacaagctctgaaggagctggtactacataacccggttaccctcaagttacaggagtctcagcttccagggccagaccagctgcagcagtttcaggtggtgtgtgagactgaagaagacaaattcttgctgctgtatgccctgctcaagctgtcactgattcggggcaaagccttgctttttgtcaacactctagagaggggttaccggctccgtcttttcctagaacagttcagcattccctcctgtgtgctcaatggagaactcccactgcgctccaggtgccacatcatttcacagttcaaccaaggcttctatgattgtgtcatagcaacagatgctgagatcctgggacccccagtcaaaggcaagcggagaggccgaggctccaaaggagacaaggccgctgatccagagtcaggtgtggcccggggcatagacttccaccacgtgtctgctgtactcaactttgatcttcctcctactccagaagcctatgttcatcgagctggcaggacagctcgagccaacaacccaggcatagttctgaccttcgtgctgcccacagaacagtcttgcttggcaaagattgaggcgcttctcagtggagagggcgaggctatcctgctaccctaccagttccggatggaggagatcgaaagctttcgctatcgctgcagggatgccatgcggtcagtgactaaacaggccattcgagaggcgagattgaaggagatcaaggaggagcttctacactcagagaagctcaagacatactttgaagacaatcccagggacctccagctgctacgccatgatctgcccttgcaccctgcagtggtaaagcctcatctgggcaatgtccctgactacttggttcctgctgctcttcgtggcattgtacatcctcgaaagaaacggagaaagctgcccccctgtaagaaggttaagaaggtgagaacccagaacccactgcgtgacttcaagcacaggggaaagaaacttaaacctacagcgaagccttcctgaggtggcctggacctgaggacgctgaattgggcatcctgacctggatggagtgagtgggcttaccactctgtgggtacactctgatgctcactgtctggaaagactgtactttggagaagcagccttggacttaacagaataaagattccagctgccccaggctgtgagcctcgaaagcatctgggaagagactgcttt

SEQ ID NO: 2888 - DNA, 1834 bp, Cricetulus griseus
atggcgcctctgctgcagatgctgtggctgctggcgctgctccgggcagtggtcctggtcccggtccccgccaagccctgggccgatgacgagcaggcctgggatctgtcgtcctcagagctgctggcgcccgcccgcttcgcactggacatgtacaattacggccgtgctgcggggacgagggccgtgctgggggccgtacgcgggcgcgtccgccgggcgggtcgaggctctctcttctctctggaagccacaatggaggagccattttgcaatgatccactgttgtgcctgctacctgtgaccaataaaaccatgctctgcagcttccaaatcctggatgagctaggaaaacacatgctactgaggagggactgtggcccagtgaatatcaaggctacagagcatggaaacgagactttcagctcattccttccactgctgaacgaggagcccctaccccaggacttttctgtaaagatgactacagtcttcaaggacttcatgattacctataaccggacttatgaatcaagggaagaaacccagtggcgcttgactgtctttaccagaaacatggtaaaagcacagaagattgaggccttggaccgtggcacagctcaatatgggatcaccaaattcagtgacctcacagaggaggaattctacaccatctacctgaatcccctcttacaaaagaagcctggcagcaagatgagtctagccaagtccataaatgatcccgccccacctgaatgggactggaggaagaaaggggcggtcactaaagtgaaggaccagggcatgtgtggctcctgctgggctttctctgtcacaggcaatgtggagggccagtggttcctgaaccaggggactctgctctccctgtcagagcaggagctcttggattgcgacaagatggacaaggcctgcttgggtggaatgccctccaatgcctacacagccataaagagtttgggagggctggagacagaggatgactacagctacaaaggctatgttcaggcctgcaacttctcagcacagaaggcaaaagtttacatcaatgattcagtggagctgagcaagaacgagagcaagatggcagcctggctggcccagaaaggaccgatctcagttgccatcaatgcctttggcatgcagttctatcgccatgggattgcccaccctctcaggcccctctgcagcccttggctcatcgaccatgctgtgctgctggtgggctatggcaaccgctccaacactccttattgggccatcaagaacagctggggcagtaactggggtgaggagggttactactacttgtatcgtgggtctggagcctgtggtgtgaatactatggccagctcggcagtggtgaactgagggacttgctggcagaggaccagatgctgaccacagtggccccttctttagcctgactcatgcccaggcccctcctcaggaggtgcagctggctgagggacaggctcttggtacctcagggtgagcagtgggccctgggccccttcttccctccctctcatgccctcctgaagtttcccagctgcgtctttgttgaattgtggaagctaggaggatcctgaggtgaaggaggctttcatggaagccaacgctggggcaggaaccccaggctcgggtaaggtgcagaatggaaatagtcttatcataacctagctttgtcttcagtgagctctgaattcctgccttggttttcctctgtctgatgctgtaaattttctggtcccctttcacatccaggaaacttgtaaccagccttctctaagagcaataaagaggtaccctgctc

SEQ ID NO: 2889 - DNA, 1833 bp, Cricetulus griseus
cctgctctcaactacaacatcgtttccgggcctccaacccacaacatcgtggtgaatgggaaagaatgtgtaaactttgcctcctttaattttctcgggttgctggccaacccccgggtgaaggctgcagctctagcatctctaaagaagtatggtgtgggtacctgtggaactcgaggattttatggcacatttgatgtccatctggatttggaagagcgcctggcaaaattcatgaggaccgaagaagccatcatttactcgtatgggttttccaccatagccagtgcgattcctgcgtactctaaaagaggggacattgtttttgtggacagtgcagcctgctttgctatccagaaaggcttacaggcatcacgcagtgacattaagttgttcaagcacaatgatgtagctgacctggagcgactgctgaaagaacaagagattgaagatcaaaagaatccgagaaaggctcgtgtgactcgacgcttcattgttgtggaaggattgtatatgaacactggaaccgtctgtcctcttccagaactggttaagttaaagtacaaatataaagcaagaatctttctggaggaaagcctttcgtttggagtccttggggagcacgggcgtggagtcacggagcactatgggatcagcatagatgacatcgacctgatcagtgccaacatggagaacgctctcgcctctgtcgggggcttctgctgcggcaggtctttcgtggttgaccatcagcgcctctctggccaagggtactgcttctcagcttccttacctcccctgctagctgctgccgccatcgaggccctcaacatcatggaggagaatccaggcatttttgcagttttaaagaaaaaatgccaacacatccataaatctctacaaggcatttctggtttaaaagtggtgggggagtccctttccccagcacttcacctccagctggaagagagcactgggtcccgggagaaggatgtgcagctgctccaggaaatggtcattcactgcatgaacgagggcatcgccttgactcaggcgcgctacttggacaaggaagagaagtgccttcctcctccaagcatcagggttgtggtcacggtggagcagacagaggaagagctggagagggctgcgtccaccatcagggaggctgcccaggctgtgctgctgtagggtgcagcccggtgtttcctgccacatcacctgcgggcagaactgctcagactcctccagctgcccacggagtggttattgatgttgtcatttctaatgtgagcttctcttaatagaaaatattcatactgcttcctaagcaataatatgaatcaaacattattttatttttgtgtaattgactttatatttttatatattctctagtcggttttgtgaagagggttattattctggtccccaaatacagatcatgccctgggtatttttgaatttgtcagatgtcctttttcatggtggttttgtttgggagcatagaactgtgggctttttctaagctgagaaaagtgagaacttttttcatcctgtaaattgctgatgcctcagaaaaacaggatgctctgaaagtgaccttcgagctgtacactggctgctgttctccttggtgagcatgctgagcagtgtaaggcttgcgatacttgccatggagcatgtacatagaaggcatacgtgccttgtgattgctgctgctgtgagggctatggtcctgttggggatgggtctgttttggtttgtgtttttaatgaaataaacctccaggagcccacattcctgaaaaaaaaaaaaaaaaaaaaaaaaaaa

SEQ ID NO: 2890 - DNA, 1833 bp, Cricetulus griseus
ctcttcttccttctcaaaagccttgattatctggtgtctcctttccagttgttgcttctcaatcaagtctgtttacttcatcagaaatgagctttacaatctcaagaaaaaatatgtcccagaaactgagtttcctgttgctggtgttcggactcatctgggggctgatgttacttcactatacttttcaacagccaagacaccagagcagcgtcaagttacgggagcaaatcctagatttaagcaagagatacgtgaaagccctggcagaggagagcaagagcatggtggatgtagacagtggggcatccatggccggctacgcggatctgaagagaacgattgcagtcctcttagatgacattttgcaacgcttggtgaaactggagaacaaggtcgactatattgttgtgaatggttcagcaaccaatacgaccaatggcaccagtgggaacttggtgccggtaaccaccaacaaaaggacgagtgcatcgggcagtgtcagatagcagtgaaggccaccttgcagggctacaccactgtggaatccatccatcgcaggacacctcttaaactgctgcctaggacagagtcatacttgaccatagaagccctccacattgccaaggagctcgctggattcataggatgctaattctgtatataaacttgcaggcgttattagtttgctttcacacaaagctcttcagtgctgttctgtatgctgaatgggagtttgtaagacattggatgtggtaagccgggaggccatctttgtagagaaacaaaaacactagaaagacattgggtcctttctataaaatatttatttaagtgtataacatggttttcaggtaagtggacaataatgttactgagtcattctgtcatctgccctcatgatatccctgtgagtagaaaacatgcttagtttcagtactatattttgttactcagaatatgagcaggaaaaggaagtgtcatgctgaaaatcatgttttgaaatagacccaaagaatgttttcatttgcactatccttcaaaataactgaaggttaattgtatatttttaaaactagcatttgtaagagtatacttttgaaatgggtagcagccactgtccatagcctgaccattggggactacttaatagaaaggagagtagtctctaatctcctgcttaaaaatttcttacatatattctgcataataatacatatttttatgatgagatgaaaaataaaatgcgtgatttttcacaatcatgattgttgatttgaaagtaaattccagtgtcataagcttgtagacatggatactcaggaggcgaccactttacaaaattaagaacattaaaatataaattatgaggatgattatctttttagggaaacagctactatatacagcacaagaaatcttaacttggttgattccagtatagatcaaaacacgtctttatttaaatatattttgtagcaaatccaattgctatatagtattctatatttcgtagtatttattctatataatggctgctgatgtggagctagcctctagatttagactaaattgaacttagttttcgatattgttcattattataacatgccaccacaaacagtaacagtgattaaatattttgttaaaataagtataagaatatattgtttcatgaaagatagctttctgaaatgtcttccctgtactttatgtgaagaaattttgtttcattgctaggtgaagtctgaagcacttgttaagtctcagaggagttgtgaacatttctggttttgtcattgttttcagggatgaaataaaatatattgttta

SEQ ID NO: 2891 - DNA, 1833 bp, Cricetulus griseus
ctggctgtttctgcagtcatattgcctttcagacagtaactgaagataacccagagctcctgaagtattttgatggcacagcactgcgtgtgctggagtctgctttgctttgtcctgtcacctctatggaatacattctgctaaagacactggtagcaggcacaatatggaacctaaaggatattattccatctaagagtcaggcagaaatcataaatgccatactaaagatcttgtctgaagttctggagatgaatgctgctgacacagtcattcagatgaaagaggctgaaacccagaggttgaaaacagcttcagagactgaggacgtaatagcaaatgctaatggtgatgatttagttgaagatgatgaaatggaagaaattcctcgtaaaaaaaactcagaaggaaaacatttatttccgatctacttccatctactgacaaggagctgagagagaccatggcattgctgacagctcagcagactgctctggaagttattgtcaacatgtgctgcagtgaagatccttctgatgatgaatgggaagagctttctagtagtgatgaaagtgaagcctttatggaaaactccttcaatgagtgcagtgggcagctgctgtccccattgtgcctgtcccatgagattcacactgcccttaccaacttcctcatcccaaagaaggtttttgagaaaacctcttcaccaaacagtatggccattgacatatgttctaggaaccctacttggaaacctttgattaagaaattgaacactattcagtgtagagcccttatgtgcctccagagtcttgtgtctcttctggacatggaccatcttggaggagccccagctcttcagacacttgcacagcacctgtcacaacttcttttttctcagccagattttgctaagcatgctgattttctagaagccataagtagtgctttgagggcccttttgcaagcaatggctgccaagaacattccacagtgtatgacacctgagcagctgatgacactatgcaaagcaggcattcatagtagcagcatcggggttcgagtgaatgtggtcagtattttggggatcactggcagtgtcctagccaaagaagatggcacacttgaaactcttaagaccattgggtgctttctgctggaagttgccaccaaagacccttccctcgtggtaacaggagaggctttggatgccctctttgatgtttttgcagatggtgaagaagctgaaaaggcctcagttcaaattaaattgttatcaactttgaaagaattccagccagtcttcaagatgaagatacggaaagaggggaggggcaaatacagtccagatcagctgtgtgttcttgacaacgtgaagatgaatttaagacggtttgttgcttaccaggaagctgttgagaaaagactgacttcttaacccatcaataggaccagagctaaagaaattaagtcattgcttggatgctctttaaagccagtatcattttatattagctaacttttaactgaaatataaatataagctttataaaatattttggtatggagtactgtatacctattattactcttttgtgaagtaaatgacttgaatttgttactctcagtagataatgagctgaggggattgcattctgtacaggggtctgagctattattccatgtaacctcactccctgtcttatgtgttttagaatcagaattagtagaaatagctgggcctggtggtacatgcctttaatcagacagaccctgtctcaaaaaaaaaaaaaaaaaaaaaaaaaaaaaaaaaaaaaaaaaaaaaaaaaaaaa

SEQ ID NO: 2892 - DNA, 1833 bp, Cricetulus griseus
gagcgcggctcggcagcggggacagagcagcgcagctccccgagggaggcggcaggcggcatgggcgcgggcccggcgctggccgcgctgttgctggcagggtcggtgctgagcgccacgctgttggcccccagccgccgggcggagccagatgtagatgaaaagaagaatgtggagctgaagatggatcaggctttgcttctcatccacaatgaactgttgggaacaagccttactgtatactggaagcagcttgtaggctggaatacaaatttggagaatttggaaactattcccttttggtacagcatgcctccactggaaccagtgaaattgcctgtgacctagttgtcaatgagaatccagttgacagcaaccttcctgtaagtattgcattccttgttggtctagcaatcatcatcgcaatatctttcctgaggctcttactgagtttggatgacttcagtaattggatttctaagacaataacctctcgagaaactgaccgcctcatcaattctgagctaggatccccaagcagagcagaccccctcagtggtgactgtcaaccagaaacacgacacacatctgccttgccataccgtctccgatgcgtggacacattcaggggatagctctcatcctcattggttttcgttaactatggaggaggaaatacgtggtacttacaaacattcaagttggaatggactgactgtggctgacctcgtcttcccatggtttgtatttattatgggatcttcagttttcttatcaatgacttctgccctacatcgaggatgttcaaagttcagactgctggggaaaattacatggagaagtttcctgttaatctgcataggaattatcgttgtcaaccccaattactgccttggtccattgtcttgggataaggtgcggatccctggtgtcctgcagcggttgggagtgacatactttgtggtcgctgtgttggaactcatcttctcgaagcctgtccctgacagatgtgccttggaaagaagctacctttctcttcgagacatcacttgcagctggccccaatggctcgtcgttctgatactggaaagcatttggctggctttgacattctttttacctgtccctgggtgccctactggctaccttggccctggtggtattggcgacatggggaagtaccctcattgtactggaggagcctctggctacattgaccacctacttctgggagacaatcatctgtaccagcacccatcctccaccgtcctttatcacacccaggtggcctacgacccagaagggatcttagggactatcaactccattgtgatggcatttttaggagttcaggcaggaaaaatactactgtattataaggatcagacaaaagccatcctgatgagattcactgcctggtgctgcatccttgggcttatttctattgctttgacaaagatgtctgcagatgaaggctttattccaataaacaaaaacctctggtccatttcgtatgtcagcacactgagctgctttgccttcttcatcctgctcatcctgtacccggttgtggacgtaaaagggctgtggacaggaacccccttcttttacccagggatgaattccattctggtgtatgttggtcacgaggtgtttgaggactacttccccttccggtggaagctggaggatgaccagtcacacaaagagcacctaattcagaacatagttgccactggtctctgggtactcatcgcctacattctttataagaagaagattttttggaaaatctgaccacattcactgacatgtattgctggaggagtccag

SEQ ID NO: 2893 - DNA, 1833 bp, Cricetulus griseus
gtcgggcggcctgcacgcccaagcatactgagagccggcatggccgacaatcctgtgttggagctgttgttgcggcgactggaggcagcggatggcggcctggacagcgcggagttggctacgcagctgggcgtggagcaccaggtggtggtgggcgcagtgaagagcctgcaggctctgggtgaggtcattgaggctgagcttcgttccaccaagtgctgggagctgactactgagggtgaggagattgcccgggagggcagccatgaggcccgtgtgtttagaagcatccctctcgagggcctggtgcagagtgagctcatgcgactgcccagtggcaaggtgggcttcagcaaagccatgtccaacaagtggatccgagtggacaagaatacagctgatgggccccgggtgttccaagtggtggacagtatagaggatgaagtacagaggcggttgcagctggtccaggcaggccaggctgagaagctggctgaaaaggaaaggaatgagctccggaagaggaagctgctaactgaagtgaccctgaaaacctactgggtgagcaagggcaaggccttcagcacaagcatatctaagcaggaggcagagttgagcccagagatgatctccagtggctcctggagggacaggcccttcaagccctataacttctctgcccgaggtgtgctcccagacagtggccacctgcaccccttgctcaaggtccgctcccagttccgacagatcttcctggagatggggttcactgagatgcctaccgacaacttcattgagagctccttctggaactttgacgcactcttccagcctcagcagcacccagcacgtgaccaacatgatacattcttcctgaaagatcccgctgaagccctgcagctcccaatggactatgtccagcgggtgaaacggacccactcccagggcggctatggctcacagggctacaagtatacctggaagctagaagaggcccggaaaaacgtgcttcgcacacataccacagcagccagcgcccgaactctctactgcttagctcagaagaagcccttcacacctgccaagtacttctccattgatcgtgtgttccggaatgagacgctggacgccacacacctggccgagttccaccagattgagggtgtcatagctgaccgtgggctgaccctgggctacctcctgggtgtgctgagggagttcttcaccaagctgggaatcacccagctgcgcttcaaaccagcctacaacccctacacagagcccagcatggaagtgttcagctaccaccaaggcctaaagaagtgggtagaagttggcaactctggggtcttccgccctgagatgctcctgcctatggggctccccgagaatgtgtctgttattgcttggggtctctctctggagcgcccgacaatgatcaagtatggcatcaataacatccgagagctggtgggccacaaggtgaacctgcagatggtctatgacagccctgtgtgccgcctggatactgagcccaggtccccacaaacacaggaggctgcctgatacaggctgctctggagagccttgtccagtacctgtgtatcccccagaagtgacctctgatatttaagaggcctctgtgaggccagctcactcctctgcgtcacacacacaggagcagggtccaaaggacaggaagcaggtttcttgtgctggcctttagtggtgcctatagtatgcttgaaaggtgggtttggccctgcaggtcatctgctgtaataaagtgggcattttgcctcacgtggttcctttccttaaggaaaaaaaaaa

SEQ ID NO: 2894 - DNA, 1832 bp, Cricetulus griseus
gcaacccaagatggcggatgagagtgagacagcagtgaagctgccggcaccttcgctgccgcagatgatggaagggaacggaaacggccatgagcactgcagcgattgcgagaacgaggaggacaacagctacaaccggggtggcatgagtccagccaatgacactggagccaagaagaagaaaaagaaacaaaagaagaagaaagagaaaagcaatgacacagatgcccaggatcagcctgtgaagatgaactctttgccagcagagaggatccaggaaatacagaaggccattgagctgttctcagtgggtcagggacctgccaaaaccatggaggaggccagcaagcgaagctaccagttctgggatacacagccagtccccaaactgggtgaagtggtaaatacccatgggccagtggaacctgacaaggacaacattcgccaggagccctataccctaccccagggcttcacttgggatgccttggacctgggagaccgtggtgtgctaaaagaactgtacaccctcctgaatgagaactacgtggaagacgatgacaacatgttccgatttgattattccccagagtttcttttgtgggctctccggccacctggctggctcccacagtggcactgcggggttcgagtggtctcaagtcggaaactggttgggttcatcagtgccatcccagcaaacatccacatctatgacacagagaagaagatggtggagattaacttcctgtgtgtccacaagaagctgcgctccaagagggtggctccagttttgatccgagagataacccggagggttcacctggagggcattttccaagctgtttacactgctggcgtggtattgccaaagcctgttggcacctgcaggtactggcatcggtccctaaaccctcggaagctgattgaagtgaagttctctcacctgagcagaaatatgaccatgcagcgcaccatgaagctctaccgactgccagagactcccaagacagctgggctccgaccaatggaaaaaaggacattccagtagtacaccagctgctcaccaggtacttgaagcagtttctcctcacgccagtcatgagccaggaagaggtagagcactggttctacccccaagagaacatcattgacacttttgtggtagagaatgccaacggtgaggtgactgatttcctgagcttttatacacttccctccaccatcatgaaccatccaacccacaagagtctgaaagctgcttactccttctacaacgttcacacccagacccctcttctagaccttatgagcgatgcccttgttctagccaaaatgaaagggttcgatgtattcaatgcactggatctcatggagaataaaacattcctggagaagctcaaattcggcataggggacggcaacctgcagtattacctgtacaattggaagtgccctagcatgggggccgagaaggttgggttggtgttacagtaaccagttgcctgtgagattctggataaagccactgagaatttaaaccaggaaacggaatcccaccacttgttggtccaactttcacaaatgtgagatctctggcaaatagaacagaactgaaccggctttaccaaaccgccagcgaacttgacaattacattgcaatggtgtaggctgcgtgatgtcacctttggccatgtttctggtctccctgttttcaatgaataacaccctcatgcagccgtgatcaagggaatgtaactgctgaacctagctcgtgattcgcatattatggagttgacgggtgaataataaaagtatatatattatatata

SEQ ID NO: 2895 - DNA, 1832 bp, Cricetulus griseus
gcggagcgaggagcgcgcggcggcgcgaggtttcttctcagcggcggcctcctcgtgcgcacccgcggcacccagcatgtcggcggcggcccccgctgcggagggagaggacgccccagcgcagcccgcgtccgagaaggagcccgagatgccgggccccagggacgagagtgaggaggagaggaggaagacgacgacgacgaggatgaggacgaggaggaagagaaagaaaagagtctcattgtggaaggcaagagagaaaagaagaaagtagaaagattgacaatgcaagtgtcttccttacaaagagagccatttacaattgcacaagggaagggccagaaactttgtgaaattgaaaggatacatttctttctgagtaagaaaaaacagatgaacttagaaatctacacaaactgctttacaacagaccaggcacagtgtcctcattaaagaagaatgtgggtcagttcagtggctttccatttgaaaaaggcagtacccagtacaaaaagaaggaagaaatgctgaaaaagtttagaaatgccatgctaaagagcatctgtgaggttcttgatttagagagatcaggtgtgaacagtgaactagtgaagaggatcttgaatttcttaatgcatccaaagccttctggcaaaccattgccaaaatccaaaaaatcttcaagcaaaggtagtaaaaaggaacggaacagttctggaacaacaaggaagtcaaagcaaaccaaatgtcctgaaattttgtcagatgaatctagtagtgatgaagatgagaagaaaaataaggaagagtcttcagaagatgaagagaaagaaagtgaagaggagcaaccaccaaaaaagacatctaaaaaagaaaaagcaaaacagaaagctgctgctaaaagtaaaaagtctgtaaaaagtgctaatgtgaagaaggcggatagcagcaccaccaagaagaatcaaaacagttccaaaaaagagtctgaatctgaagatagttctgatgatgaaccattaattaaaaattgaaaaaccacctacagatgaagagttaaaggaaacagtgaagaaattactggctaatgctaacttggaagaagtcacaatgaagcagatttgcaaagaggtatatgaaaattatcctgcttatgatttaactgagcggaaagatttcattaaaacaactgtaaaagagctaatctcttaaactagaggacagatggcttgttctcagatttgaagatctgatttataccagcaaagagaatgtattcttttttaagtctattgttggtagaactcgctgctgacccttttgagtgttacatatatttgagcttgctgttttaaattgcatttccttgcagttttcagtcttgcatggcagtaattgttctttgctttctatagttgtacattttggatttctttattgtaaggtcagatttctgaactattgttaattttagtgcacttaatgttagcttgcttaagatacttttaatcaaagcaaaaactataaccagcatttatacatgcagagactattgcagtatttagtatatgaaatattttgaatacatcttctgtcagtgtgaaaacttagtggcagttcatcattttagagcacagctgttcagataaccgagttggaactttttctgcatgtgtatatatgtcaagttgtcagcatgacagaagtgacagatgttatttttgtatttttaaaaaccaatttgttgtatataatttttttatttcttttgtgcagatcaatttttaaactcatgtgtctttacacttgtaactaaagaatgtcagtgttca

SEQ ID NO: 2896 - DNA, 1832 bp, Cricetulus griseus
ttgaagaaatgggatctgtagcaaagaaagagatgagcttaggagtttggaggagcgcctcacagtagagagagaccagctgaaggagagccttaaagagacagcaactagaggtctggaaaaagaggaggagctgagagtggctcgtgtgcatctgcaagagcaccaggagactatcgtcagtctcagagagagcgtgtctgctaaggcagatgagatgtcacgtattcaaggggacttagcacacacacatactgcccctagaagtgcagagccaagaactccaagaaaaagcacatcaactttctcaagtgaaaagctgagctcaaggaaactgtggatgaaatggagcaattgaagaagcagctagaaaaggaccatcaaaaccatgaagaaatagtaaaacatgcaaagaggttactatatgatggagaacaacacagtacagaaagccttcgagaaaagtgcctcaggataaaagaaactacctgaaaagatactcagaaaatgggtaatgagtatgagtgcttgaattcattctctattgactgggagaaggaaactaaaacccaaaaaagaagctggcacttgctataaaagcaaagctctcacttccacacccacaaaccaaagagattgaaaagcttcttactacaaaccacagatgttccatggaattccacagaattctgaagaagcttaagtatgtgttgagccacattacaaggctaaaggaagagcaacatgagttcatcaataagtttgaaatggcttttgtccaggaagtggaaaagcagaatgaactgaggattaagatacagagctttcaacaagtttatgatattccatccaaagacttagagaacctcaaacttagccaggatatggatctccatattgaggaaattgccaaagattttgcagaaaatggattccccaccataaaaactgaattccaacaagtactaagtaataggaaagaaattactcagtttttggggagatggatgaatactccttttgatacagaaaagcttaaaagtggcatccaaagagaaaataatagcatttgccaagtgaataacttctataatagcaaaataattgccatgataaatgaatcaacagagtttgaggaaggaatgccaaatgtaaagagttggaacattatctgaaatcactgaaggaaaaactaacaactatctaaagactacgagactttgactgtctccgatctgactgcccatgttcataccaccacacagccttctacacagggcagtacaaagtggcgttaggagctgtgccctataaagaagaaattgaggatctcaaaatgcagctggtgaaaattgacctagaaaagaaggaaaatgccaaggaattcgaaaaggaaattctttctacaaaagccactgttacacatcaaaaagaagtgataaggatgctgagagaaaatcttagaagaaatcaacaggcccaggatacctcaatggtgtcagagcccgactctcagactttgaggaaacctttaacctgtggaggtggcagtggcattgtacaaagcacaaaagcccttattctgaaaagtgaatatataaggatggaaaatgaaatttctaaattaaagcagcaaaatgaacagcttgtaaagcaaaataatcgactattaagtgataaatctcagctctccaagaagcttgaaacaatgaaggaaagaacccttaaaagagacacttacagagaatcagcttgtgagaactctccaaagtctcccaaagtgactggggcagattctaaaaggagacagaacacaccttctcagtgcaggg

SEQ ID NO: 2897 - DNA, 1832 bp, Cricetulus griseus
acagaaaagaagatcgagaggcagaagattcgccagctcacccaggacctgtcggtttctcaagctcagaaggaactacctagacagtcacatccaagcacagtcatcagccctggatagcttcaatgccatgaactcagcattggcgtctgactctgttggcctgcagaaaacccttgtggatgtgactttggaaaatagcaacatcaaggatcaaatcagacatttgcagcagacctatgaagcatccatggataagcttcgggagaagcagaggcagttagaggctgctcaaatggaaaaccagctgctgaaaatgaaggtggagtcatctcaagaagccaatgctgaggtgatgcgggagatgacgaggaagctgtacagccagtatgaggagaaactgcaggaggcccagcgcaagcacagcgcggagaaggaggtgctcctggaagagaccaatagctttctgaaagccatcgaagaggccaataagaagatggaggcagctgagctcagcctggaggagaaagaccagaggatcggggaactggacaggttgattgagcgaatggaaaaggaacgccatcaactccaactccagctccttgagcatgaaacagaaatgtcaggggagattgcagattctgacaaggacaggtaccagcaactggaggaggcatcagccagccttcgagagcggatcagacacctggatgacatggtacattgccagcagaagaaagtcaagcagatggttgaggagattgaatcattaaagaaaaaagtgcaacagaagcagctcctaatattgcagcttttagaaaaaatctctttcctggaaggagagaataacgaactacaaagcaggttggactacttgacagaaacccagcccaagactgaagtggagaccagagaagttggagtgggctgcgatcttctacccagcccaacaggcaggacccgtgaaatcatgatgccttccaggagttacaccccgtacacgcgagtcctggagttgacctcaaagaaaacgctgacttaggcactcagaggcacgtgcttcttgcagatgctgaaaggtcctggaacccagtgacttaagagtcttgagagggtgatgattgcttcctcgtagacatggtgtaaagccatgggaatctcaggcaagtggaggctaagagaacaagcaaggacttggacacgaggtagtatttcagacacccatccaaccctaccatatagagtcatcatttgttttccacgtggatgttgaagttcaggtttcacagtctattttatgaaattttggtttggagggaaaggggcattcattagaaatttcatgtttgttacagcataaaggttttgtttacccacaaagtattcacagcagtatttctccggcatggagaagcctgtgcacatgcagcatgggcacctggaacaacttgaacctggagggaaagattcctagcatgcagtgctctctcctctggtcaggagggtgtgtgcctggttgtggaagctatgtttagagacttgtgtgtgccagagtagttgcattctgattcactgattccttgttttcatgtgtgccttatgccttgattggaccacttgagatcactatatttattcaagctgtgattcttctctttctcactataacttaaaaaagaattttgtatgttgtgatatttagccatttcatgtttaagtaacaatttatatttttgttaaacggatgaggagtctagtcacgcacgctctactttgataattaaaacccacatcacatatatttaataaatgccttcttattttagttc

SEQ ID NO: 2898 - DNA, 1832 bp, Cricetulus griseus
gctacctttgcttactggtataatattctcggtcctagagtaaggcacatttgggctccaaagacagaacaggtacttctcagtgatggagaaataacttttcttgccaaccacactctaaatggagaaaattcttcgaaatgcagagagtggagcttattgatgtaaagttctttgtcttaatctgaaaaaggagtaattattgtttcattaaatcttcgatggaaactggaaatggagaccgaagcacttacggactatcaattatacttccacagacagaacttagtttctacctcccacttcacagagtgtgtgttgacagattaacacacattattcggaaaaggaaggatatggatgcataaggaaagacaagaaaatgtccagaaaattgttttggaaggcacagagagaatggaagatcagggtcagagtgtcatgaacatatttataatcaacgcagatacatgagatcagagctgacagccttctggagggcaacatcagaagaggacatggctcaggacaccatcatctacacagatgaaagcttcactcctgatttgaatattttccaagatgtcttacacagagatactctagtgaaagccttcctggatcaggtcttccatttgaaacctggcctgtctctcaggagtactttccttgcacagttcctactcgttcttcacagaaaagccttgacactaatcaaatacatagaggacgatacgcagaaggggaaaagccctttaagtctcttcggaacctgaagatagatcttgacttaacagcagagggcgatcttaacataataatggctctagctgagaaattaagccaggcctacactctttcatctttgggagacctttctacactagtgtacaagaacgtgatgttctaatgacttttttgaacatgtggtttgctgtgtacatctcatcacagtcaggcttgctgttacagtagctccgtggtgtggacacattcttcctccagcatcctgctctaggagttagttacactacacttgtcacaggaggtctgtacaggagtgtcaggtgcagcgttacagtgaatgtccattttcctagaatagatgtactcttagggacttatgtttacagtcatcctaaatgctattgctgtcttttaaagatatgaatgataggaaataaacttgacataactgctaagatcaggaaggcttcttgctgctttccttcccatttttgtcctgtaatctgtgtgttttcctatgttgcctgcatcataagaacagcgggagaaatttgaccccagtgctatttttcttaggtgctattatggcaaattcagtggtctgtttttgttcctgtaataatttgacatcttgctggctgtgaaatactgattagtagagttctgtgatagagcagtgttgacataggagtatgcataaacacaaataagtattttatttaaaactgtggacttaacataaaagggagaatatatttattttttacaaaaggaataagaatggagccttttccccaccccatcaaatttagcaaaaaaaaaaacacacactgaccaggatagcttatgaactccaagccggtcgttgtggtaaagtgtgtagattccaccttttagtgtcccacacttaaagctttacacagaagagtcttacttaagcgctaattgttttcctttgctggtttactgtggtgttatagagaatgtaagttgtacagtgaaataagttattgaagcatgtgtaaacactgttatatgtcctttctcctaggtggggaattttgaataaaatacttttgaaattc

SEQ ID NO: 2899 - DNA, 1831 bp, Cricetulus griseus
cctctggacccttcctctgtccccgacgctgagccgacaccatgcatgggcgcctgaaggtgaagacgtctgaagagcaggcagaagccaaaaggctagaacgggagcagaagctgaagctctaccagtcagccactcaagctgtcttccagaagcggcaggctggcgagctggacgagtcagtgttagaactgacaagccagattctgggagccaaccctgattttgccaccctatggaactgtcgccgagaagtgctccagcagctagaaacccagaagtcccccgaggagttggatgctcttgtgaaggcagagctaggcttcctagagagctgtctacgtgtgaaccctaagtcctatggcacctggcaccaccgctgctggctgctaggccgcctgcctgaacccaactgggctcgggagctggaactgtgtgcccgcttcctcgaagtggatgagcggaactttcactgctgggactaccggcgatttgtagctgcacaggctgctgtagctcctgcagaggaactagccttcactgatagcctcatcacccggaacttctccaactattcctcctggcattaccgctcctgcctcttgccccagctgcacccccagccagactctggcccacagggacgcctccctgaaaacgtactgctgaaagagctggagttggtgcagaacgccttctttactgaccccaatgatcagagtgcctggttctatcaccgctggctcctgggtcgggcggagccccaggatgttctgcgttgcctacatgtgagccgcgatgaggcctgtctgtcagtctgcttttctcgtcccctgacagtgagctccaggatggggactttgctgcttatggttgatgaggcacctctgagtgtggagtggaggactccagatggcaggaaccggcccagccatgtctggctatgtgacctgcctgccgcctctctcaacgaccagttgccccagcacacctttcgtgtcatctggacagcaagtgatgcccagaaggagtgtgtgcttttcaaaggccgccaggagtgctggtgccgagactcagccactgatgagcagctgttcaggtgtgagctgtcggtggaaaagtccacagtgctacagtccgagcttgaatcttgtaaggagctacaggagctggagcctgagaataaatggtgcctgctgaccatcatcctgctgatgcgggcactggaccccctcctctatgagaaagagacgctgcagtacttccacaccctcaaagctgtggacccaatgcgagcagcctacttggatgacctgcgcagcaagttcctgctggaaaacagtgtcctcaagatggagtatgccgaggtgcgcgtgctgcacctggctcacaaggatctgacagtgctctgccatctggaacaactgctcttggtcactcatctagacctgtcacataatcgtctccgagccctgcccccagccctgggtgctttacgttgtcttgaggtgctgcaggccaatgataatgccctagagtccttggatggcgtggctaaccttccccggctgcaggagctgttactatgcaataaccgtctccagcagtctgcagcactacagcctcttgcctcttgccccaagctagtcctcctcgacctgcagggcaactcactgtgccaagaagggggcatcttggagcgtttgactgaaatgttgccctctgttagcagtatcctcacctaggaggccctgccctcgcccttgccctttaacttattgggactgaataaagaatggagaggctcctctaggctgccaggctaccatta

SEQ ID NO: 2900 - DNA, 1830 bp, Cricetulus griseus
cagccatgatggaaggcctggatgacggccccgacttcctctcggaggaagaccgcggacttaaagcaataaatgtagatctccaaagtgatgctgttcttcaagtggacatttcggatgctcttagcgaaagggataaagtcaaattcactgttcacacgaagagttcattgccaaattttaaacaaaatgaattttcagtcgttcgacaacatgaggaatttatctggctccatgattccttcgttgaaaatgaagactatgcaggttacattatcccaccagcaccaccaagacctgattttgatgcttcacgggaaaaactgcagaagcttggagaaggggaagggtcaatgacaaaggaagaattcacaaagatgaagcaggaactggaagctgaatatctggcaatttttaagaagacagttgcaatgcatgaggtgttcctgtgtcgtgtggcagcacatcctattttgagaaaagatttaaatttccacgtcttcttggagtataatcaagatttgagtgttcgaggaaaaaataaaaaagaaaagctggaggatttctttaaaaacatggttaagtcagcagatggagtcatcgtttcaggagtgaaggacgtagatgacttctttgagcatgaacgaacattccttttagaatatcataaccgagttaaagatgcatctgctaaatctgacaggatgacaagatctcacaaaagtgctgctgatgattacaatagaattgggtcttcattatatgctttaggaactcaggactctacagatatatgcaaaatttttcctcaaagtttcggaactgtttgataaaacaagaaaatagaggcccgggtgtctgctgatgaggacctcaagctttctgacctgctcaagtactacttaagggagtcgcaagcagctaaggacctcctctatagaaggtcaaggtcactggtggactacgagaatgccaataaagcactggacaaggcaagagcaaaaaacaaagatgttctacaggctgaaacttcccaacagttgtgctgtcaaaagtttgaaaaaatatctgaatctgcaaaacaagaactgatagattttaagacgagaagagtggccgcattcagaaaaaatttggtggaacttgcagaactagaactaaagcatgcaaagggcaacctccaactgctgcagaactgccttgcggttttaaacggagacacataggccacactcggccttccgttgaaaagggctgccttcaactctcgtttgttttctttgatgacctctggcatctaagctcactggggacaacagaaacagctggcacggtgcggctcactggccacggggcagcggtctgccacccacacttgaccttccaagaagcccaaagttcaactctcttttaagtagcctgtcttaactgcgtttgtttcctgcgtagcgatctcatggctgccagccttatttacctatgaatcacttgtccagttttaacactctcagagtccattgttcacacatgataaaggttgcctttctagatttttttctttttttaagtatcctgtgtcctgcgttttttcatgtatccgtgtaaaccttcttaattgagactttactttgaattaatgaacgtagagttttgggtcagtttctgtgagctttatatgatctctgaaagaaaaagcagatgcgttacatgtttgccttaaactcgtggactaaaccaatattgtaaaacgcccggcgataccagcggcgttttaactccatgctccttgtatcgctctggaatttggggtagcgataataaatctactcc

SEQ ID NO: 2901 - DNA, 1830 bp, Cricetulus griseus
atcagagaactagagaagcaaatggaggatgcttaccaggggaccagaaggaacacggtacccagcagctcaagtcggatgagaagtgatggttttgatgaagaaagtcacagagactactggaggacaaagaatgaaatttctggggccctagatgatgattttcttaaggctaaatcctggaacaagaagttatatgattatgaatccaacatgccagacagatggggtcacagtggatataaagagttgtatcctgaagagtttgaaacagacagtagtgaccagcaagatattaccaatggggaaaaaacatacttcccaggtgaaagcatctgcccaggaatcccgaaaacataagaagtacaaagaaatacccaataaaaagaaagacaagaaaaaaacggtacccaacaaaaaacaagaaaaaaaacaaaaaggaaagctgtggacataacagcagattcctcaagtgagttctcagaagaaactggaacttctagtaccaggaaaaggaaacaaccacacaagagcaagaaaaatccaggaaaaagtctaaaaaatctttatctttggggagagaaagggctacttcccagtcagatgattcagcagctagcagttctgaggaaatcgaggaaagagacactaagaaaaccaaacggaaaaagaaagagaaaagtattcatgttcctgtggctaaccctgaagtacaggagaggacgagcaagcgcaggaactggaaagtggctacggatgcaaggtctgctgaaagctcagaggatgactaagtgggaaagtagcagtcctgcttcccagtcggaggtcagagttgtcctgccacagataccttttttcctatttggactgttaatctcacccccttttgttgttagtagggaatctggtattttgttaaggtttcttgaagagattattttttgcaattaatcacttagggtagaatacctatatagcaaattaaagtacccagaaagctgaaatcagtaatgatctgggtacaccaattggaatgttggatttgggggaatcaagggtctgggatgaaggaggattgaaatagtgctagatagaatagtttgacaaggaaacaattgctatttatacaggaggtttcctggcttccgctttgggccataccccagccctgttgttttccctgttcatttctaattctattaacgaattttagattttccctgaaaccagttgaatcaattccaaaatgaaacacgcttctcagggatataacccccttcttcccagtcttactttgtgttatgattatcaagaacatattatttctccctgctatactgtgatcctgatattaaaagaaaccaaaataccactgcaaagtggctggtagaacagttagttgacttttcaattcagaggaaaggtaaagtgacattgtcagggtttttgttttgaggtcgtcacttttggtactgagtagaaagcacaaaaactcatgtgggtcatggttctgccactaattgattgagttctagagcaggttaatttaacctccctggcctactttttgcatgtgtaatacaaaaatacttcatggttagcatgacagacaccagcaatagaatattactatgctgacatcccatgaagtggcattttatagttttaactaaaattcgtgctctttatggaacatacttctaataaagtacttgtttttaaaatacatagttggccagatgtgccctagcccttgattatgagcaggtgctaccttttgggatattgaaacactacttaactttggtactcaaatgtcaatgttccatg

SEQ ID NO: 2902 - DNA, 1830 bp, Cricetulus griseus
  modified_base (309)..(309): a, c, t, g, unknown or other
ctggtcgccaaggctttgggagtatctttgtggttgccagtggtaacggggccagcacaatgacaactgcaactatgatggctatgccaactccatctacactgtcacaataggtgctgtggatgaggagggacggatgcctttttatgcagaggagtgtgcctccatgctggcagttacattcagtggtggagacaagatgcttcggagcattgtgaccactgactgggacctaagggcactggctgcacggaaggccacacagggacctcagctgcagctccgctggcagctggcatgatagccctnatgctgcaggtgcggccctgcctcacatggcgggacatccagcacatcattgtcttcacagctacccagtatgaggatcatcatgcagactggctcaccaatgaggctggcttcatgtctttgattggcgcgccccgcagcatggactcggatcctaatggcttcaatgactggaccttttccactgtgcgatgctggggggagagagcaagaggcacctacagactggctatcagggatgtaggagatgagccgctccaggtgggcatcctccggcagtggcagctgaccctgtatggctccatgtggagtccagtagacatcaaggacagacaaagtctgttagaaagtgctatgagtggaaaatatctgcatgatggcttcactctgccttgcccacctgggctgaaaattcctgaggaggatggttacaccattacccctaatacactcaagaccctggtgctggtgggctgcttcactgtcttctggaccatttattacatgctagaaatatacttgagccagaggaacatggcttccactcaaggttgcaggagtggacactgcccctggccccagcggagccagaactccagggaggtggggacagagctagaatcagtgcctctatgcaacagcaaggaccaggatggagtggattcggagaatggaagctgtactgccacctctaccttccttaccccagagctgctggaacccaaggcctctgaggcattcttggtaccctcaggggtgagggccatcttgagagcagtggttgaggattggtgaatatgggctcctctagctgagctttgctgttaagcctcggacagggttcagcacccacacaggcagcccttgatctcacccctctgaggttgctcagtgacctaggccaccaggacctccacccattcgtgagttatacaggtgcctgtgtgcccaggaatgcactccacacaagtgtcactgtgcagagggcccagaggagaggctggcaagaacctggacatgcctaccctgaaagcagctgccttcattaccctttgctgtgcacctgctccaaagccaacctcaagcctgcctgtctccttcaccaccactctctcttcctgctgaaggaatggtggtgctcctgggagaactgggaggcacatggtccccagcacccttgatgcctcactggggacattggttggcaggactgcagagagctgagacactgatgttgtcaaagacaacttgggagccactgctgtggccaccctgtcttcttctgcaaagtgctcagggaaatggccttcattcccgaggccagccatctgcctgactttttctccattcttggccttctccccttcccatcttctgagctgattgttgatcagaattttttaatgcttaagatttgatttttacttttcacagcaacattttgttgaatttttttctgcacagcttttccaaaataaaaaccagaagtataaaaaaccaaaaaaaaaaaaaaaaaaaaaa

SEQ ID NO: 2903 - DNA, 1830 bp, Cricetulus griseus
atggaggaggaggatgaggaggcgcgggggctgcttggggaccgccccgagggggacaacgcagtcccgggcgccccgcgtgctctgcccgctctgtgcgatcccagccacctggcgcaccggctcgtggtgctgttcctgatgtgccttcttggcttcggtagcaatttttgctatgacagtcctgctgcccttcagactcaggttaaacaggacatgcaagtgaatactacgaaatttatgctgctgtatgcctggtattcttggcccaatgtagttttgtgtttcctgggtggctttttgatagaccgaatatttggaatacgatggggcacagttatttttagctgctttgtttgcattggacaggctatttttgctctgggtggaatatttaatgctttttggctgatggagcttgggaggtttgtgtttgggattggtggagagtccttagcagttgcccagaacacatatgccgtgagttggtttaaaggcaaagaattaaacctggtgtttggactccaactcagcatggccagaattggcagcacagtgaatatgaacctcatgggatggctgtatactaagattgaagcttctctgcgttcacctggccacatgatcctgggagtaacactcatgattgggtgcgtaacgtgcattctttcactattctgtgccttggtccttgcttatttggatcggagagcagagaaaatccttcataaagaacaaggaaaaacaggtgatgtcattaagttgactgacgtaaaggacttctccttgcccctgtggctggtcttcatcatctgtgtctgctactacgtggcaatattccctttcattgggctgggcaaagttttcttcatggagaaattcggatttgcttcccagtcagcaagtgcaattaacagtgttgtgtatgtcatatcagctcccatgtcgccagtgtttggactcctggtggataaaactggaaagaacatcatctgggtcctgtgtgctgtcgctaccaccctcgtgtcccacatgatgctggccttcaccttttggaacccatggattgctatgtgtctcctgggtctctcctactcattgcttgcctgtgcgttgtggccaatggtggcatttgtagttccagaacaccagctgggaactgcatatggattcatgcagtccattcagaacctcgggctggccgtcatttccatcctggctggcatgatactggatactcggggatacttgtttttggaggttttcttcattgcctgtgtttctttgtcacttttagctgtggtctgtctgtatgtggtgaatcgtgcccgaggtgggaatctaaattactctgcaaaacaaagggaagaattaaaactttctcattccgagtaatttttttttctcttaaagacaataaaagtgtctttcaatttataatgttataaatgggttatgtgcctgcccctctcacaggctttgtccaatgctatttccttctcctacagtgtgttctccagtgtacattctaacctggttttacctgatttaaacaaaaactgtagttccagcccagaaccattcttccatgcagaaactcctccagaccactcaggtcagatacaatccatgatgtctatgaactttaaaacctcatacttggccttcttagctcacctcactttgtgaggaatttgtggcagtgtgggtttggggtggtgtgtttcctcctccttagattgtcagctccatgagagcagggacattggtttgttagtgaatgtatccacagtgcctagcacaatgtatgtacaaaactttccttctttc

SEQ ID NO: 2904 - DNA, 1829 bp, Cricetulus griseus
  modified_base (365)..(365): a, c, t, g, unknown or other
atgaaggataacctgataaagctccagcaggagatggcccacctggaggctgtgctagaacagcaaggggaccagccttctgtccactcctcgtctcttcacagctgaaccttgtgcccctgaagacctaccaaacgcagaacaaaacttatcaggaacagcaattttaacttcaaagaatattaatgaaaatcctgtaagccggaatccagcatgcgtttctgctgacaagttccaaccacaacctccagacagttccagcagtgaaaataaagagtcaagggaaggaaggccttccctttttaaatctccgttggcaggcagtaggtgctctgcacacagccgctctgggagtcttcaaaacngaaactgcccatctcaagaaggaacgccatacctggaatctggaatcagccttttctctaatagagaccctgaatctgagtcccctaaagagccagcttatgtttgcaccacaccagcttcaacctctgcacggacaatatcccagtatcaggtttctgactctttcgagagtccggctgctactcatgctcatactgcagtgatagaaactgtgagcaagaaaaagccagaattgacatcttcaaaaggaagagccaataaaggaatatccatggtggtgtcaggcttgacccccaaagaagtaatgattgtgcaaaagtttgctgaaaaataccgcctcactttaactgatgcaattactgaggagactacccatgtcattatgaaaacagatgctgagcttgtgtgtgaacggacactgaaatattttctgggaattgcaggaggaaaatggatagttagctattcatgggtgattcagtctattcaagaaagaaaacttctgagtgtgcatgaatttgaagtcagaggagatgttgtgactggaagaaaccaccaaggtccaaagcgatccagagaatcccaggaaaagctcttcaaaggcctaacaatctgttgttgtgagcccttcaccaacatgcccaaagatgagctggagaagatgctgcagctgtgtggggcttccgtggtgaaggagctttcgtcactcacccctgacaccggtgttcatccaattgtgattgtacagccaagtgcctggacagaagagaatggctgccctgagattgaccagctgtgtggggcgcacctggtgatgtgggactgggtgttggacagtatatccgtctaccggtgtcgggatctggacgcctacctggtacagaatatcacccatggccacgacagcagcgagccacaggaccccaatgattagtttaagaagtgatcttccatgcccggggagcgtctctcactcttaggcgcttccacgtcctactggacactgaggaagtttagaggcagataatatattcaatatgaatatgaaggttttcaagtaccagagtccaggatagccttctaataccccttaactgatgaacaaagtgtttgctataactctgctaagtaacccattcctcttaaaatataagacctctgatatgaatatttcatgtctgtaaatgatgggtcccaccaggaaaggagctgttgctttctttgaagtaatttcttcccttttgcttcctattgctgaaccatactgcttcataaataattttgtttgctgaagaaagagaacgtatttttcataaactcattatcttggactgtttatagctattggaaggactaggtcttccctcgccccccagtgtgcaagggccagggagacctgactgtacaaagtatgttttataaatgttgtgctgttaaccctgcaaataaactgaatagcaaac

SEQ ID NO: 2905 - DNA, 1829 bp, Cricetulus griseus
gccgcgggctgccccttcaacggccccgatttctttcggtttcactcgcacgtctgcccggaggcgactgacagaccccagagatggcacaggacgggcctctgaggagaaagatttcttaacgaccgtggaaggaagggagctacagagtgtgaaccctccagaagcccccaaggaactagtcatcccattgatccagaatggctctcggaggcaaccactggccaagagccctaagacatcctcagaaactaagactgtgttaatgtcagatggtgtgctgtcccaggctgtgaaggagctcattgaggaatccaagaagtccctggaggagagggagaatgcaggtgttgaccccacgctcactattcccatgatccagaaaggatgcaatcccagtggggaaggaacagacagcgaacctcaggctgagacagtgccagaggaagccaactatgaggcagtccctgtggaggcctatgggctggccatgttgcggggcatgggatggaaacctggcaagggcatcggcaatactttcagtcaagtcgtgaagccccgggtcaactctctaaggccaaaaggcttaggactgggtgccaacctgatggaggccaaggccttggcctccactagctctcatcacccaccaagaccagatggggatcgagagaaggataaggaagggttgatgcctggaggagctgtggtgatcctttctggccctttccggggcctctatgggaaggtagaaggccttgatcctgacaatgtacgggccatggttcggctggcagtaggtaaccgcattgtgactgttagtgagtattgcctacaacctgtttcccagcaggagtttgatagccacgcctcacagccaggccacgtgagcaaaccttccacagagcagcagagcagaacaactggaacagcctggtcttcgaaggccctccagaatcaggaagactcaaagaggaggcagaaggattcagagaggaagcggaaacactccgcagaccggcaggatgaacctgtggcaaagagtgagaaagcaacctctaagaacaagcattggctacacagggacttacgtgtacgcttcattgacaaactgtacaagggtggccggtattacaacaccaagatgacaattgaagatgtcctgagcccaggtacttgtgtgtgtcggacagatgaaggccgagttctagaaagcgtgagagaagacatgctggaaaccctgattcccaagggagagggccgtcgtgtgatggtggtgctgggaaaacacactggaaaggtgggacgacttctgagtcgggacagtgtcaagagtcagggtttggtacaacttgggagagacaatcaggtggtggagctccactatgacgctatctgccagtacgtgggccccagtgactcagatgaaaactgacatgtggaccactgctttagagtgtataataaaaaccattttaaaagtggaaaggtgaaatcaaaaccaatatgtgagctttgaatttagttgggaactgagatgactgaggtagaaacgccttcatttcttagtctcatttccctgctcagagttcaagacaagttaaattgcctatccaatacagagctcactcgtggagcatagaaactgtgaaatctgcccccaaacaaacactatagaatctccagtgctacatctcagaacagcttctgtttggatcttgaatggctttcaaaggcccatatctttctttttaaatgtattatttttagttatatatatgtgtgtaaaataaataaaaattaaaaaataaaaaaaaaaaaaaaaaaaa

SEQ ID NO: 2906 - DNA, 1829 bp, Cricetulus griseus
  modified_base (44)..(44): a, c, t, g, unknown or other
  modified_base (64)..(64): a, c, t, g, unknown or other
  modified_base (288)..(288): a, c, t, g, unknown or other
  modified_base (309)..(309): a, c, t, g, unknown or other
tggcaagtcatcaagattgggtgtttgctgacattgaatcagcngaaatgaagctctgattgcnctttttgagagaaggagagagcctggaggacttgatgaagctgtctcctgaagaactgctgctgcggtgggctaactaccacttggaaaatgcaggttgcaacaaaatcaccaacttcagcactgacatcaaggattcaaaagcttattaccacctgcttgagcaggtggctccaaaaggcgatgaagaaggaatcccgctgtctgattgacatgtcaggactnagggagaaggatgacatccanagggcagaatgcatgctgcagcaggcggagaggctaggctgccggcagtttgtcacagccaccgatgttgtccgagggaaccccaagttgaacctggctttcattgccaacctctttaacaaataccctgccttgcacaagccagagaaccaggacatcgactggggggctctggaaggtgagacaagggaagagcggacattcaggaactggatgaactccttgggagttaaccctcgagtcaatcatttgtacagtgacttagcggatgccctgatcatcttccagctctatgaaaagatcaaagtccctgttgactggaacagagtaaacaaacctccataccctaagctggggggcaacatgaaaaagcttgagaactgtaactatgcagtggatctggggaagaatcaagctaaattttccctggttggcatcgctggacaagatctcaatgaaggaaatcgcactctcacattggcactactttggcagcttatgagaaggtacacactgattatgatggaagacattggtgatgggcagaaggtcaatgatgacattattgtcaactgggtgaatgaaacattgaaggacctggatgaggaagagaaactcaacaatgctaagtatgccatctccatggcccgaaaaattggtgcaagagtgtatgcccttcctgaagacctggttgaagtgaatcccaaaatggtcatgacggtgtttgcctgccttatggggagaggaatgaagagggtgtaaggcccaggacagcaagccagaaggtgacacagtcaaccctgagaatcagcacagggtgctcccacgataaaaaggacatacaagccattccaaagccccggaaccatggagacgttatatgtgattccggaaagagcatatttgttcggccaagtagcttctactatccttagcaatatgtgcatcactcttttattttttcttcagaagatccactcttctacagatgttttcattctttgaaattctgccaagaaaaaaaagatatgtgccaataatatatgtcccttcctcacccaaatgctttcacaggcacacatacatctgtagctggatgtcaagagtagaatgattactaggaactgcctgggtttcaaaataaaacaaaaagaacaatatgaatttgaatagatccactagataagcaatttccatgaaaacttaccaaaagctaaaaaaccacagagcattgtgaactaatgctaaactccctatgcattagtgaaagacttattcccaaggtgtctatcttccttggggatagcagggagtgatggaacccatcatcttccaaagcagtgcagatgcaggctcttgacttcattccttggcagtggtctcaggaagccaataaatgactctttccagctcccaaccagtatctctgctgaatctgaatgcaaagtgtttggttgtgaccttagtctgaactctatgtctcctcaaatggtgtttccccatcctgcctccataaagga

SEQ ID NO: 2907 - DNA, 1828 bp, Cricetulus griseus
ccgggacccccggggaacggagacgcgcgtcccctctccaagcccacgtcgcctcgtagcgtccccgcggggaggagccgaccagtcggagtcactcggcgtcgccaaagtttgattctcctccccgggtaggagtctcggggccgcggtcccttcgggcaccgggcgccacttgccacccaggccggacccgcgtctccatcgctgcttgtcggagctgcaagtcgggaggcgccgcgggcctgcgcaggcgccgccgccctcgccatcctccccgcggtgctccagcccccccccctcgcccgccccccaagttccacgagttaccccgagtggacggacggcgccgggcccgcgcgggggccatggaggagccgctagggtcgcctcccgccgccctgtcggcgctggagaagaacgtggcggagctgaccgtcatggacgtgtacgacatcgcgtcgctcgtgggccacgagttcgagagggtcatcgaccaacacggctgcgaggccatcgcgcgcctcatgcccaaggtcgtgagggtcctggagattctcgaggttctggtgagccgccaccacgtcgctcccgagctggacgagctgcgcctggagctggaccggctgcgcgtggagaggatggaccgcattgagaaggagcgcaagcatcagaaggagctggagctggtggaggatgtgtggcggggtgaggcacaggacctcctgtcccagattgcccagctgcaagaggagaataagcaactgatgaccaacctcaaccacaaggacgtgggcttctctgaggaggagttccagaagcaggaaggcatgtcagagcgtgagcggcaggtgatgaagaggctgaaggaagttgtggacaagcagagggatgagatacgagccaaagacagggagctcggcctgaagaatgaggacgttgaggctctgcaacagcagcagacgaggctaatgaagatcaaccatgaccttcggcaccgggtcacagtggtggaagcccaggggaaggccctgattgagcagaaggtggagcttgaggcagatctgcagaccaaggagcaggagatgggcagcctgcgggcagaactcgggaagcttcgagagaggctgcagggcgagcacagccagaatggggaggaggaggctgagatacagctgcaggcagatggagaggagtgcctctcagactcagagaaggctgccctggatctcaaggaccccaaccgccctcggttcacgctgcaggagctgcgggatgtgctgcacgagaggaatgagctgaagtccaaggtattcctgctgcaagaggagctggcctactataagagtgaagaaatagaagaggagaatcgaataccccaacctccgcccatcatacacccaagaacgtccccccagccggagtctggaatcaagcgactgtttagctttttttcccgggacaagaagcgcctgaccaacacacagagacccacgcacatccatgagtcctttggccagtgggcaaatactcaccgagatgatgggtacacagaacaaggacaggaagccctacagcacctgtgactgtgccccccccctggaccgcctaccacctactctgggtggctgcctcaacattgacccctcaaacgaactgtctgctttgagggtgatgaaaacctgatgccaaaaccaaaagaagtgtctatttatctgcagggctatccagtttatattcaaggcctctgaccccttaggacctatatttaataagacaaggatctgaagccagaccttgttgattttaataacaagcctcctaagctgaa

SEQ ID NO: 2908 - DNA, 1828 bp, Cricetulus griseus
ccggcaggaaaaggaagcaggcagaccttaaaggggcctcagctactatttatttaatttatttatttatatttaaaacaccgctctctccttcctccgatgctgttaacgtccccgacagaagagtaagcctaggggagccgggcgcagccagcagcggagccagctgctggagacgacagctcctgcccatcggaaggccaggggtgcgtgagctgcgcccaggggcgtcctgcgccctggcgccctgcgggctctaataactggggttgcgcgggggaactgggccccgggctcaggtggagcggctgatgttccgcgctgaaaggtgaggccgcgctggtgagactgggacaagtccttgcacctccagagctgggccagggcgacaaggggaaccgccaggatgccagaggaaaatatcttcctcttcgtgcctaaccttatcggttatgcccggattgtcttcgccatcatttccttctacttcatgccctgctgccccttcacggcctcctccttctatctactcagtggacttctagacgccttcgatggacacgcagctcgagcccttaatcaaggaacccggtttggggccatgcttgacatgctgacggaccgttgttccaccatgtgtctcttggtcaacctggcccttctgtaccctcgagccacccttctcttccagctcagcatgagcttggacgtggccagtcactggctgcatctgcacagttctgtggtgagaggcagtgagagccacaagatgatcgacctatctgggaaccctgtgcttcggatctactacacttctaggcccgctctgttcaccctgtgtgctggaaacgaactcttctactgcctgctttacctgttcaatttctccgagggaccactagttggctctgtggggctcttccgaatgggcctctgggtcacagctcccatcgccctgctcaagtccatcattagtgtcatccacctcgtcacagctgcacgaaacatggctgctctggatgcggcagaccgtgccaggaagaaatgaccctcgcctgcccccagctgcccgcctgccctgggcatctactgtgccacgtggctcctctcctcctcctaagaggtcctagtgtcatgtccttctcttgtgttctctaacctgctgggatggggggtcgacctctgtttggtgttatcactgtctttttaatcctgaggaccagacccattcctgtgaccccaaggacctggccctgcaaagcagggagagtgctcaggaggccccacccgtccagctggtgctctaggaggcctgtctgaggattgggtgttgccacacatcctgctggctcagccctggggtctggcctgagattttggggacatgtgagggaggggccaactagatccttccctgaggcaaactcctctgtcctgccctcttgctttggaagcctccataataaagaggggacctttgctctttttggacttgtttgctttgagatattcttagatgaagcctagggttggaaggaactgggtataaaagatccagctggatgcttttcccaaagaaagtggctggctcctccctgtcattctagtgaccttagagaggccctgctggctcttgaggttcacaagcactgtctctgcccacctgctttatgtccctggctggccactttcactgtaaccttgatgttttcttccctcacaagaatgtaaacttcatgagagcagacgtatgcctttcttgtctatgcctagagtgagaactagcctggaatgtggtagctgcttaataaatactcatggaaagatg

SEQ ID NO: 2909 - DNA, 1828 bp, Cricetulus griseus
agttacattttgaggaaaagaacagaaaagaagattattacaaaactgatgatgaacatgacacaatcagaagtactttaaaaagcatgtgcattacagagatcagaaagaaatgaattctcttcttactgattatgccattgactcaaaatccaaggatgtcaagacaaacgtgggtctcaccgaaataaaaatgccttaaagaaacagatatacagagacgtatatagagctcaggctgtacgatacaactgcattagaatagataaacagcctgtatacaatgtagaggttaagaatgcagagctccccagaggaatattaaaacttaattgaaagcctcatagagggacgaattactttaaagtaagaccattgagcaagtctaatgatgtcttcaaacatgaactcgcttacttactgactgggattcttggagcagcaatagattattggatcttccttggtattcagatgggtagaaatgtgattccgacacatgtctgatgacttaggaagttatatctccctttcctgtgatgacttttcttcacaagaacttagagatcttcaatttgttccttttcatcctcctggcttcaaatgtttgttagcagaagcaatccttaaaaagttgtggttacaaggccctaccaatgccttgcaccgagccaactctctcttcagaaaataatatactcctatttgccaagtttgggagaaatggacatacatagggctagaaagatgcagatgccaaaaagatcggccagcgacctttccagagtctcatgcaaagcaaaagcaagttgaaggtttggccagaatttccagagctgaaccgtagctaaatgttcctcatcattgaaaaattgaaaaagaaatcagaaggagaattgttgtgttccaaggagaactgcccctctttggttacaaagatgaattttcacaaaactaatctaaaaggggaaacagctctgcatagagcttgcataaaaaaccaagtggagaaattgatcattcttctctctttgccaggaatagacatcaatgttaaagacaatgctggctggacgccgttgcatgaagcctgtaactatggcaacacagtgtgtgtccaggaaattttgcaacgttgtccagaggtagatctgctcactcaagtggacggggtgactcctttgcatgatgcactgtcaaacggacatgtagaaattggcaagctgctactacagcatgggggcccagtgcttttacaacagaggaactctaaaggggagttgcccttggattatattctgtcacctaaagacaaggaagaactctttgccattaccaatatagatgacacagtggacaactttcatgctcagacacagaaacaattttatcaccaacagcttgaatttggttcatttttacttagtaggatgttgcttagcttttgttcaatatttgatttatcttcagaattcatcctagctttcaaagggttggcccatctaagtgagttgcttatggcatgtactagtgaccacacagaacccaccactatacatactgactggttactggatctttatgctaggaacataaagacattaaagaagctcccaaatgttcttaaggaacttcctgagaatctaaacgtgtgtcctggagtgcatactgaggccttattggtaacactggaaatgatgtgtcggtcagtcacagaggtgtcatgatgctggaaagtgagagtcagagtctaaacatgcaacttattttgtcacttagtacatccatagcttatagacaaataataatttgatgtattcactaacag

SEQ ID NO: 2910 - DNA, 1827 bp, Cricetulus griseus
  modified_base (1817)..(1817): a, c, t, g, unknown or other
tacagtcgggaccggagtggtcgccgactagccatggaggctgctgtgctgcgaggtggacccggtcccgcagggctgtgccggaccgcaacctgctggaagaccgcgtcctgcagaacctgttgaccatcgaggagcgctacctcccgcagtgctcctatttcaagtgcgtgcagaaggacattcagccatacatgcgcaggatggtggccacctggatgctagaggtctgcgaggaacagaagtgtgaagaggaagtctttcctttggccatgaattatctggaccgttttttggctggagtcccgactcctaagacccaccttcagctcctgggcgcagtgtgcatgttcctagcctctaagctcaaagagaccatccccctgacggctgagaagctgtgtatttacaccgacaactccgtgaagccccaggagctgctggtttgacgatgcaaaagtcatggtgagatacgggagaactctcagactagctcgagattatgtgtacctgcaatatgggaacaaattagaggacactgtcttttgtgcttgtgaactagtccatatgccccttttagtagaattgcaaggagccatggatgccaggaaggcatgattaggttgcaaagcggtgaacccaagaaggaatcagaagcaagaagggacaggctggggcggttgcacagaaccacctgtccacgtgactgaaccattttggatcgtaagaagcgccttgatgccacaccacgtgttacccagacctagcatggggtttctacgttgcatactcttgctgtctacagtagctgctatctaagggatgtatatgtctcttgccagttggacacaggtgattggcttctaagtctcatatttggtgagtttgtgcttcttcctccaaacctggttcattgtaggcgtaccctactgttatctaatggagggaattggctatgagccctgaccaaactcatctgaatgggggcagatggagaccacaagcagaatccgaaacaaagcttttcttatgtaacagaagagggggaggtgatctttaatcccttattaggaaatttctattttgtcttgttttcttttgtcatcattgttgtttgttctttctccatctgtgggggctaagttgttccccaagcctgccaaattttggtccttccctgttttgaccaaatcctaagggggagaaaaccctagtatgccaaaaaataacatgctaagcattaggagattcctaacagtcccttaattaccagacagcctgtgaggtggtgcggaaactggaggtagcaataagaagtcttaagtaagcagctgacttctaagcccaaagggttcctctttgcttatcttagacagtcaaaccttgggaatagctttaaaagggaaatgaataccaagtcagtgaagtccccgtaagtcaacaaggcccgccataggttcacattgcacacaagcttttatcggtgcagactctgggtggttgtgaacaactgcagctcacacatccatttgtacaaaatcaggtaggaagatccaggaggtgttgggacttccttaccacatgtggcctttgatgattctagagtctaaacagaagaggcgcttgagccagaacctgtgccattctgctttgaaacttgcctgggccatcagacccatgattggctccagctttaagaagccatcaacaaatacacttacagtagccactccatttcaacaggtgcctatctttgacaaaaaaaaaacacaaaaaacaaaaaaaaaaaaaaaaaaaaaaaaaacaaaaaaaaaaanaaaaagttaa

SEQ ID NO: 2911 - DNA, 1826 bp, Cricetulus griseus
tcgcacatctcatcccgtagtgaagttttcgtgtacagactgtgagccaatggttattgacaaactgccttttgacaagtatgagttggaaccttcaccgctgactcagtttattctagaaaggaaatctcctcaaacatgttggcaggtatatgtgagcaatagtgcaaagtataatgaacttggtcatccctttggttacttgaaagctagtacagcactgaactgtgtcaacttatttgtgatgccttacaattacccagtcctccttcctctcttagatgacttgttcaaagtgcacaaagcaaagccaacgctcaagtggagacagtcatttgaaagttatttgaagacaatgcctccctactatcttgggcccttgaagaaagctgttaggatgatgggtgcacctaatcttatagcagacagtatggagtatggactcagttacagtgtcatttcatacctcaaaaaattgagtcagcaggccaaaattgaatctgatagagtcatcggatccgtaggcaaaaaagtagtgcaggaaactggaattaaagtaccgaagtcggtcacatggtttgtcaatggcacataggaaaggttttcaacaagttctgcagggaattaggatgtcccccacaggctgctagaccttaatatgaaggagtacactgggttccaggttgctttactaaataaggatttgaagcctcagacctttagaaatgcttatgatataccaagacggaatcttctggatcatttaacaagaatgagatctaatcttttaaagagcacccgcaaatttcttaaaggccaggatgaagatcaagtgcacagtgtacctatagcacaaatggggaattaccaggaatacctcaagcaagtaccttctccactaagagaacttgatcctgatcagcctcgaaggttgcatacatttggcaatccctttaaactggataaaaagggtatgatgatagatgaagcagatgaatttgtggctggacctcaaaataaacacaaacggcctggagagccaaacatgcaaggaatcccgaagaggcgccggtgtgcctctccactcttgagaggtcggcggcagagccctgctgtgaacagtcacatcggagggaaaggaccgcctgcacccatgactcaagcacagccaggtcttattaaaccccttcctctgcataaagaagccactaatgattcagcagtagatgatgtggttgaaaatcatgttgcagaccagctttcatcagacatgacaccaaatgctatggatactgaatttttaacatctccaaccaatcttctggaaccatcaaccaatcataccgaggcccttggtcatgaacatttaggaaataatgacctcactgttggtggatttttagaaaatcatgatgagccaagaaataaagaacagagtgctgaagagaatataccagcatcttcactcagcaaagtaaagaagccggtgcattgcagaagccatgaagaggtcaacactgaactaaaagcacaaataatgaaagagattcgaaagccaggaagaaaatatgaaagaatcttcactttactgaagcatgtgcaaggcagtttacaaacaaggctaatatttttgcagaatgtcattaaggaagcatccaggtttaaaaagcgaatgctaatagaacaactggagaacttcttggatgaaattcatcgaagagccaatcaaatcaaccatattaatagcaattaaaagaaaatagaatgtggccacttatttcactgtcttctccaaatacaaatcagttttgtcctttctctagcca

SEQ ID NO: 2912 - DNA, 1826 bp, Cricetulus griseus
ggaggacgcggagtgttccggagcgctgcctagccgggcccaacctttgctcctgagatcatggctgccgaagatgtggtggcgacgggcgccgacccgagcgagctggagggcggcggcctcctgcacgagatcttcacgtcgcccctcaacctgctgctgctcggcctctgcatcttcctgctctacaagattgtacgcggggaccagcccggagccggcaacgacaacgacgacgacgagccaccccagctgccccgcctcaagcggcgcgacttcacccttgccgagctgaaggttttcgatggcgtccaggacccgcgcattcttatggccatcaatggcaaggtgttcgacgtgaccaaaggccgcaagttctacgggccggaggggccatacggggtctttgccggaagagatgcatccaggggccttgccacattttgcctggataaagaagcactgaaggatgagtatgacgacctttctgacctcactgctgcccagcaggagaccctgagtgactgggaatctcagttcactttcaagtatcatcatgtgggtaagctgctgaaggaaggggaggagccgactgtgtactcagatgatgaagacccaaaagatgagaatgctcggaaaaatgattaaagcattcagtggacgcatatctatttttgtattttgcaaaatcatttgtaacattcgagtctgtctgtctttaaaacatagtgatttcaatatttagaaaagttttgaacttgctgtaatttttgttaattaatatcactagtgacactggtaaaattgtcttagaatgcatgatacgtttgtgtcacaaatccaggaagtgaactgcagtgctgccatgcaactgttaatgctgtttttcttctatctgtagttagaacaagccgaattgcaatttgattttcccgagaaagagaaaagacttgggtatttccacaaactattcaaaatggtaacacaaactattcaaaatggtaaatgtactaagagtgaagaaggatcaacttctagttttgctgttctctaaaaacaagcccattttcctcatttgacctaactgcatgatttctgttttatctacctctaaagcaaatctgcagtgttccaaaagctatggtattgattcaagagagtagtccagtaacaaaatgaaaatgttatgtctggcttaattgggacaaacacatttcccgtgtttctgggccgatttaactgtccttgtccttgttgtggacactctcaacacatacagtaactctctcacacatagtaattgacagttgggactaaaacagcatctgaacattcaaagtgtagagctttgcaaaaaaaaattgcttatatcagggcaatggttatgtggttatttgaccagatgtgaaatttgagaggaacatacagggcaggaataggtgtgtgcttttcagaaagtctcctccgtcatctctgaagaatgcgaaaacactacatggcattagctgagtgatttttaaaggaaaatacattcctaaggtaacaggtagatctttctggtgttacaaaattgtagtcacttcaaaagtagtagtcaagtgtctaggtcttggataatactcttttggctaatactaaacctagcttaagtagactctacagttgtataaatttgtaaaagtattatatgaacaactagtgaggtttcaaactcttgtaattgtagttaaatagtcattgtattttcttgtgagccgtgtttaatggttttacctcaaatcagaaaacaaaatgaagtgtttgggtcagttaataaaaaggtttta

SEQ ID NO: 2913 - DNA, 1826 bp, Cricetulus griseus
tggatggcaaaatccgcctttggaggaattttcatgatgataagaaatacacatatacatgtttacattggcaccatgatatggtgatggatctggcttttacagtgacaggcaccagtctgctgagtggtgggcgagagtgtgtgcttgtagagtggcgagagggatcagagaagaacaaggagtttctccctcgcttgggatctactattgagcacatctccgtctcacctgcaggagatttgttctgtacttctcactctgataacaagataacagttattcaccgaaatctcaacgcatctgcggttattcaaggcctagtgaaagataggagtatatctactggcttgatggtcgacccaagaaccaaagctctagttttgaatggaaagcctggtcacctgcaaatttattctctccagggtgataagcagttatataatttagatatcatacagcaagagtacatcaatgatgacggtctaattcagattgaactagtaaaggctgcctttggatgctctggcacttggctggcaacagttgaacaacggcaagaaaatgaaactgagctcgaactgcaaatgaagctgtggacctatagcaagaaaacccaggggtttgctcttaacacaaagatcgccatgccacatgatgaccacattacagctctctgtttcaataatgcagaaaactatgaaaaacccatactggtcacagctagcagagatggccacttcaaagtgtgggtgttagcagatgattctgatatatacaaaaaagccattggctggacctgtgactttgtgggtagttaccacaagtatcaagcaaccaactgctgtttctctgaagatggctccctactagcagttagtttcgaagaaatagttacaatatgggattcagaaacatgggaactaaaatgtacattttgccaacgagctgggaaaataaggcacctgtgctttggaagattaacatgttccaagtaccttctcggcacgaccgacaatggcattctctgctgttggaacctgctcagctgttcaatgcagtggagtgcaaaactgaatgttagcgttttggaacccgacccctactcagaccatgttgctgcagtttctcagtctgcggaaggctcggatctgtttgtatttaaacctagtgagccaaggccattgtatattcaaaagaatgtctccagagaggaagtccagtggggagtgtttgtccctcgagatgtccctgggtcattcacctcagaagcttaccagtggctgaacaggtcccagttttacttcctaacaaaatcacagagtttattaacatttagtacgaagtctccagaagagaaactcacaccaacaagcaaacagctgctggcagaggaaagtctgccgacaaccccattttctttgatattgggaaaacacaggcaacagcaggattcaaggttaaatgaaacgtcagagaatgaactgatacaactccccttaacagagaacatacctgcaattaacgagctgcttcacaccccagcccacgtactgccatcagcttctttcctgtgctccctatttataaactcactgctgctgtctaaagagactaaaagtactgaagaaattcctgatgatgtagatatggaggaaaaagaagaaagtgacagttcagatgaagaaaaggattttactgaaaaagcccaggaaacaaataccacggatttgggggaagatgttatacatcagctgtcaaaatctgaagagaaagagctgaggaagttccgaaaagtagactacagctggctagctgctctgtag

SEQ ID NO: 2914 - DNA, 1825 bp, Cricetulus griseus
  modified_base (1720)..(1720): a, c, t, g, unknown or other
  modified_base (1747)..(1747): a, c, t, g, unknown or other
  modified_base (1751)..(1751): a, c, t, g, unknown or other
  modified_base (1818)..(1818): a, c, t, g, unknown or other
atgtatcgggaggggcccccttatcagcgtcgaggctctcttcagctgtggcagttccttgtcacccttcttgatgacccagccaatgcccacttcattgcctggactggccaaggcatggaatttaagctgatagaaccggaggaggtggctcggcgttggggcatccagaagaatcggccagccatgaactatgacaaactgagccgctccctgcgctattactatgaaaagggcattatgcagaaggtggctggggaacggtacgtctacaaatttgtctgtgacccggatgcgcttttctccatggccttcccagacaatcagcgcccattcctgaaggcagagtctgaatgccccctcaatgaggaggacaccctgccactgactcactttgaagataaccctgcttacctcctggacatggatcgctgcagcagcctcccctatgctgaaggcttcgcttactaaatttctgaatggctgagtggccacaccctagagctagcagtccccattcaggcaaatgagggcagtggttttgtttgtgttcttggctgttcctaaagcttgccctctgagtattatctggagaacccaagccatctttggattgacacccttaaagacaaataccttggctagggagtgggaacagggagagacagaagaaccaccacctccttgccagcatggacaacatgtgcagagcaataccttgttcaggttagcgcccacgaaaggggacccagtgtatgacaatctgcgttgatcatggactactaaatgcctttacatagaagggctttgacttgcacaattctttagaaagaaacacatacccataggaaaatagaaaggctaggttggggaggctcagatcacgaaggcttgaaatttgcaaaactcctgtagctcagtttgaagtgtttcccctaagtccagaactggggaggtcaggacagctgttacccattgcgtagttctctgaccactgcttctctggagccttccagccagagtggtcaccaagtagatcaagcccctcccctcccagtcacatggctgagtgcggatggctttcattttagaagaaaagcaattaacacttgacagtattttgttttgctttgatttgggggggatcattttgttttggtggttgttttggaaaaaaaacagtttatataaactgattttgtagttttggtatttaaagtacacgtcatgtccatttaacaactggtcacctggtgggaaccctataggcatcagtctctgtttttctttttctttctattttggaccttcaaccctgcataatggttccctggggtttgaaacttacctgtcactgatgggtaaaaacagtgctagctagcattctggcttcctgctacttttttgtttttattttattctgattgctgtattatattgggaatgttttaaacaaccaaactaaaggtgtttgaaacttgggtttggagtggaggaaaagtcaccaggaagcgccagtaccttgttgcctgctagtcagcccacagaggtgtcaagcctgaagcttgggccttaattagcattgtactctactgaaagaactctttctgaagcatatttatagctttctaatctacacatagtctatacatagatgcgaattttacccagctggctagagattttatttgttgtaaatgctgtatagattgggtttttntgttggtttgttgtgtcctcccctctntctntatactggtgtggtggctttgttgttgttttgttttacattaaagacagtcgctttccttaaaaaanaaaaaaa

SEQ ID NO: 2915 - DNA, 1825 bp, Cricetulus griseus
ggatgcaggcgctcgctgaggcaagaggagggctctcggcccgcggcctgacagggacttagcccgcagagaccggcccgcgcgcgcgaccccacacccacccaatcgtccacctacccactccccgcgccgcctcctcccaccctgagcagagccaccgaggatgataaacacccaggacagtagtattttgcctttgagtaactgtccccagctccagtgctgcaggcacattgttccagggcctctgtggtgctcctgatgcccctcacccactgtcgaagatccccggtgggcgagggggcggcagggatccttctctctcagctctaatatataaggacgagaagctcactgtaacccaggacctccctgtgaacgatgggaaacctcacatcgtccatttccagtatgaggtcaccgaggtgaaggtctcttcctgggatgcagtcctgtccagccagagcctgtttatagaaatcccagatggattattagctgatgggagcaaagaaggattgttagcactgctagagtttgctgaggagaagatgaaagtgaactacgtcttcatctgcttcaggaagggccgggaagacagagctccactcctgaagacattcagcttcttgggctttgagattgtacgtccaggtcatccctgtgtcccctctcggccagatgtgatgttcatggtttaccccctggaccagaacttgtctgatgaggactaatggtcatagaggatgctttgcccaagagccacagtgggggaagaggggaagttaggcagccctgggacagatgagagtgtttctggctgtctagggaaggacattgaggggctcaggttgagggttgcccattgtgttcttggagttgactcgttgaaattgttttccataaagaacagtataagcatattattcacatgtaatcaccaatagtaaatgaagatgtttatgaactggcattagaagctttttaaactgcgctgtgatgtgctccatctagcctggggaggaaattgcctggaggggtagagactgcctggtctgggggcaggggctggtgggcagcactgtcaggcttgggtttccttgcagttgggctttctttttttggtttttaagacttaggtattttctttctttgcttcctgtcacccaggggctcctgagtataggctttttagcttctgggcaatgtccttgggttgtttttgacactccaccttgggcttcttggcattttgtgtctggcctggtgtaagcaggtctgacctcgctttctttacagcttagtgttattctggcatttggttaagctggcttaatctgtttaatgttaccagtgcattttaaataggggcattgaaattcaccccccaccaccagggcttttttgggggtgcctgggccttaagaaactagccaaactacatctcaagttaccaccagagttcttgcctctgtggcccaggccccaagatctctttcctagcaagagcagagaggaagcctagcaaactcagggcttgggatttgtgggggaatctgttcttagggactggatgcctctggctggccaagcacagtactgactgcctccctaacaggttccgagtagtgtctgctctacagggcctaggagtaggctggacagtagatgtggcctgctctttactgctttcaccaaacagcttgttctaaagggaaaagaagggagagagatctacattgggtgtgggggtgtcagggaggcaagtgtgttgtgttactgtgtcaataaactgatttaaagttaaaaaaaaaaaaaaaaaaaa

SEQ ID NO: 2916 - DNA, 1825 bp, Cricetulus griseus
cgggaactgcgctggtttacccctggtccagaagccggcaaactgaggaatatgtcctccctcggatgttacaggacctgacaaagcagaaaactgtgccctttggagatgtggtactggccaccagggacacctgcatcgggagcgaggtctgtgaggagctctggacaccgcggagcccccacatcgacatgggcctggatggtgtggagatcatcaccaatgcctccggcagccaccacgtgttacgcaaagcccacaccagggtggatctggtgaccatggccacttccaagaatggtggcatctacctgctagccaaccagaagggctgcgacggtgaccgcctctactatgatggctgtgccatgattgccatgaatgggagcatctttgcccagggcacccagttctcattggatgatgtggaggtcctcactgccaccctggacctggaggacgtccggagctacagggcagagatctcatctcggaatctggaggcaagcagggtgagcccgtacccccgggtgaatgtggattttgccctctctgtaagtgaagacttactggaagaggtgtcagaacctatggagtggacataccacagtcctgaggaggagataagcctcggacctgcctgctggctctgggacttccttcgtcggagcaaacaggctgggtttttcctgcccctgagtggcggtgtggatagtgcagccagcgcctgcatcgtctattccatgtgctgtctggtctgcgaggctgtagaaaagtggaaatgagcaagtgctggcggatatccaaagcctagtggacgagaagagctacactccacaagatccccaggagctctgtggacgcctgctcaccacttgctacatggccagtgagaattcctcccaggagacccacagcagggccacagagctggctcagcagattggaagctaccacatccatctgagcattgaccctgctgtgaaggctgtcctgggcatcttcagcctggtgactgggaagttccctcggttttcggcacatggagggagcggcagggagaacctggccttgcagaatgtgcaggctcggataaggatggtcctctcctacctgtttgctcaactgagtctctggtcccggggtgttcaagggggccttcttgtgcttggatccgccaatgtggatgagagtctcctcggctacctgaccaagtatgactgctccagtgcagacatcaaccccataggcggcatcagcaagacagacctgagagccttcgtccagttgtgcgtcgagcgcttccagcttcccgctctgcagaccatcctgtcagcacccgccactgcagagctggagcccttagccaacgggcaggtgtctcagacggatgaggaagacatggggatgacatactcagaactttccatcttcggcagacttcggaaggtggccaaggcagggccctacagcatgttctgcaaactgctcaacatgtggaaagacagctgtacaccaagacaggtggctgagaaggtgaagcgatttttctcgaagtactccatgaacaggcacaagatgacaaccctcacgccagcatatcatgctgaaagctacagtcctgatgacaacaggtttgacctgaggccctttctgtacaatgcaatgtggccctggcagttccactatattgataaccaggttctaaagctcgagcagaaagaacagcagggcccagaaggcgggatctaggagcagttggacgaccccttacatatatggaagcacctcctccctggggatccctagtgtgatttcaaatcag

SEQ ID NO: 2917 - DNA, 1825 bp, Cricetulus griseus
atgcggcagaagaagcgaaatggctctcttcttgactgccctccacctgaggaccctgccatagcacagcttctgaagaaactgctctcacagggaatgaccgaagaagaggaagataaacttttggcactgaaggacttcatgatgaaatcaaacagagcgaaagccaatgcagtagaccagagccatctccatgacagcagccagaaaggtgtcatcgacttggcagccttaggcatcactgggagacaagttgatcttgttaaaaccaaacaagaaccagatgaaaagcgggccagaaaacatgtaaaacaagactccaatgtgaatgaagaatggaaaaagcaatgtttgggcactggaaccaccgaatattcagactggggaagccacctcgctctgagtcctctgctgctatttgtgtccctttgtcaacttctccacagatttcggaagtagcacacatccccagtaggaagccagcgattcaggttttaagcagcacagtcctgccgtccacttaccagatccggatcaccacgtgcaagactgaacttcagcagctcatacagcagaagcgtgagcagtgcaatgcagagcgcatagccaagcagatgatggagaacgctgagtgggagagcaagccacctcctccagggtggcgtcctaaaggtctgctagttgcacatcttcatgagcacaaatctgctgtcaaccgaattagggtctctgatgagcacttactttttgcaacatgttcaaatgatggcactgtgaaaatctggaacagtcagaagatggaggggaagaccaccacgacaaggtctattctcacatacagccgaattggagggcgagtcaagacactgacattttgccagggctcccactacttggccatagcctctgataatggtgctgtccagcttcttggaattgagacttctaagttacccaagtctcctaaaatccatcctctacaaagcaggattctggatccaaaggaagatggatgtgtggtagacatgcatcacttcaactctggggcacagtctattcttgcctatgctacggtgaatggctctctggttggctgggacctcaggtcttcaagcaatgcatggacactaaagcatgacctgaagtcaggtctcatcacttcctttgctgtggacatccaccagtgctggctctgcataggcacgagcagcggtaccatggcgtgttgggacatgaggttccagttgccgatctccagtcactgtcacccctccagagctcgcatccggcgcctctccatgcaccccttgtaccagtcctgggtaattgcagctgttcagggcaataatgaagtctccatgtgggacatggagacaggtgacagaagattgactctctgggccagcagtgcaccaccactttccgaattacagccttcgcctcacagtgtccatggcatctactgcagtcctgcagatggaaatcctatcctgttaacagctggctcagacatgaaaataaggttctgggacttggtttccccagagcggtcctatgttgtagcgggtagcactaattctccatctgtgtcctactacaagaagataatagaaggcactgaagtcgtccaggaaattcagaataagcagaaggtaggaccaagtgatgacactcctcgaaggggcccagagtctcttcctgtgggacatcatgacatcatcacagatattgccaccttccagacaactcagggcttcatcgtgactgcttctagagacgggattgtgaaggtgtggaaataaatcgtgttaacttgtataaaatg

SEQ ID NO: 2918 - DNA, 1824 bp, Cricetulus griseus
gatggctgggggtgaggttggagtgactctcgggcagccacatctttcccgacaggatctcgccacattggacgtcaccaagttgacaccactttcccatgaagttatcagcagacaagctacaattaatattggtacaattggtcatgtagctcatgggaagtccactgtggtaaaggctatttctggagttcacaccgtcagattcaaaaatgaactggaaagaaacattaccatcaagcttggatatgctaatgctaagatttataaacttgatgacccaagttgtcctagaccagaatgttacaggtcctgtggaagtagtacaccagatgagtttcctacagacattccagggaccaaagggaacttcaaattagtcaggcatgtttcctttgttgactgtcctggacatgacattttgatggctacgatgctgaacggtgcagcagtgatggatgcagctcttctgttgatagctggcaatgaatcatgccctcaacctcagacttctgaacacctggctgccatagaaatcatgaaactcaagcatattttgatcttacagaataaaattgatctggtaaaagaaagtcaggctaaggaacaatatgagcagattctcgcatttgtacaaggaacagtagcagaaggagcaccaattattccaatttctgctcagctgaaatataatattgaagtcgtctgtgagtacatagtgaagaaaataccagtgccccccagagactttacttctgaaccccgtctcattgttatcaggtcatttgatgtcaacaaacctggctgtgaagttgatgaccttaagggaggtgtagctggtggtagtattctaaaaggagtgttaaaggtaggccaggagatagaagtgagacctggtattgtttccaaagatagtgaaggaaaactcatgtgtaaaccgatcttttccaaaattgtatcactttttgcggaacataatgatcttcagtatgcagccccaggtggtctcattggagttggaacaaagatcgaccccactttgtgcagagctgacagaatggtgggacaagtgcttggtgcagttggagctttacctgaaatattcacggaactggaaatttcctatttcctacttagacgtcttctgggcgtccgaactgaaggagacaagaaagcagcaaaggtccaaaagctgtctaagaatgaagtgcttatggtcaacataggatccctgtcaacaggaggaagagttagtgctgtcaaggctgatttgggcaagattgttttgactaatcccgtgtgcacagaagtaggagaaaaaattgcccttagccgaagagttgagaaacactggcgtttaattggttggggtcagataagaagaggagtaaccattaagccgactgtagatgatgactgaagaatccaagttaaacaatgccttgggatggagttggaatttcttttaatagtctaggggtatattttcaaagcaatactaagaaattatttcgtagttcattgctttagtagtagctataagaatattctcatatcttgatgatgaaaatttaaccttaacctacttctaatatagggcctacaagtaaatgtgaaaagtggtatactatatactatattggattaaatctacattttagcagaagttaagcattccacaataatggctaatttaccaatcattgcaagtttgaagtgaaacttcgctacaaccagcctttgctataacatatcatgaacctttctaaaatgaaaatggtctcttttctcatgatccatctgtgagtagctccatggtgaagg

SEQ ID NO: 2919 - DNA, 1824 bp, Cricetulus griseus
taagggattcaccccacctgtaccatgggccgcactcgcgaagctggatgtgtggctgcaggcatggtcatcggggctggtgcctgctactgtgtatacagactgacctggggaaaagatgagaatgagaaactgtgggatgacaaaactgagaaaggagttaagactaatgttggtgtgggggctggacctcaggatgactcaaagcccaaggctgatgtaaaggtggggcaggaaaatgatccaggtgtaaagatcgaagcacacccagaatcccagggtgaaggtggcctagaagctaaggctaaagcccttttcaagatcctaaaggaacaggcaagtgcaaaggcaggcagagggatcaggtttgctaatatctctgggaccaggaccctatcatcgggtttgccctgcccaggaggcaggggtggaggctgccacccaggcaggagtggcgctagggctaggagcagggcaagtggaaaagccaagagaaagaatcgcagtaagagcaccaaggctccagccacagcatggcctgtacgcaggggcaagttcaactttccctataaaattgatgatattctgagtgcccctgaccttcaaaaggttcttaacatcttggagagaacaaatgacccttttactcaggaagtagccttggtcacactgggtaacaatgcagcatattcatttaatcaaaatgccatacgtgaattgggtggtgtcccaattattgcaaaactgataaaaacgagagaccctattattagggaaaagacttacaatgcccttaataacttgagtgttaattctgaaaatcagggcaagattaaaacttacatcagtcaagtgtgtgacgataccatgatttgtcgcttggactcagccgtgcagatggctggattaagactgttaactaacatgactgtgactaatcattaccaacacttgctttcctattcttttccagacttttttgctttgctattcctgggaaatcactttaccaagatacaaactatgaaactaattataaacttcactgaaaatccagccatgacaagagagctggtcagttgtaaagtcccgtcagaattgatttccctctttaataaagaatgggatagagagattcttctgaacattcttaccctgtttgaaaatataaatgacaacatcaaaagtgaagggcttgcatcatccaggaaagaattcagcaggagctcactgttttttttattcaaagaatctggagtatgtgttaaaaaaatcagagcgttagcaaatcataaggatctggtggtcaaagtgaaagttctaaaagtattaaccaaactgtaatttgcaatctgttccaaacaatactgaattaattaagtttgcacgtgggaacaatttgcttcataaattctttggtttccattatgcttgtgtggcaaagagatcccttgagctgctatttaggaataatgaatatcacacattatcaatagccgttgatgttggctttagactgagccattttaaatatgccaaatacatattagagcttgcacaaagacagcatttctcaattcatcttgctacctacggtgagaaatttttattgtttacctaaaccgacagtgaagtaactatatgtcataaataagctatacttttgtattgatttgaatttttccatctaagagctgtgctttatcaataaagttatgtttaagcagaaggaaaaaaaaaaaaaaaaaaaaaaaaaaaaaaaaaaaaaaaaaaaaaaaaaaaaaaaaaaaaaaaaaaaaaaaaaaaaaaaaaaaaaaaaaaaaa

SEQ ID NO: 2920 - DNA, 1824 bp, Cricetulus griseus
tggtgaccactggttctcggctttggctctcggggtgactctcctcaaatgcctcctcatccccacctaccattccacggattttgaagtacaccgaaattggcttgctattactcacagtttgccaatatctcagtggtattatgaggcaacttcagagtggaccttggattatccccccttttttgcatggtttgaatacgccctatcacatattgccaaatactttgatcaagagatgcttaatatccataacctgaactacttcagctcaagaacattgcttttccagaggttttctgtcatcttgaccgatgcactcttcttttacgctgttcatgagtgctgtaaatgcattgatggaaaaaaaacaagcaaagaacttacagagaagccaaagtttattctgtctgtgctactgttgtggaactttgggttgttaattgtagaccatattcatttccagtacaatggctttttatctggattaatgctgctctccattgcacggttatttcagaaaaggcatatggaaggggcatttctctttgctgtcctcctgcatttcaagcacatctacctctatgtagcaccagcctatggtatctatctgctgcgatcttactgtttcactgcaagcaaaccagatggcactgtccgatgggacagcttcagctttgtccgtgttagggccctttcatagccttgaaccagatgccacaagtcttttcccgactctttcctttcaagaggggtctttgccatgcctactgggctccaaacttctgggctttgtacaatgctttggacaaagcactgtctgtcattggtttggaattgaaatttcttgatcccaaccagattcccagggcctccatgacaagtggtttggttcagcagttccagcatacggtccttccctcagtttcccctttggcaaccctcatctgtacactgatagccatactgccctctgttttctgtctttggtttaaaccccaagggcccagaggctttctccgatgcctggttctttgtgccttgagttccttcatgtttgggtggcatgtccatgaaaaagccatactccttgcaattctcccaatgagcattttgtctgtggaaaaagcaggagatgcaacaatttttctgattctgaccacgacaggacattactccctcttccctctgctcttcactgccccagaacttcccattaaaatcttactcatgttactgttcactgtttatagtatctcttctctgaagacactattcagaaaagaaaaacctctttttaactggatggaaacggtctacctcctcggcctggggcctctggaagtctgctgtgaattcatatttccccttacctcctggaagctgaagtaccccttcattcctttgttgctgacctccgtgtattgtgcagtgggcatcacatatgcctgggccaggctgtatgtttcagtgttgactggctgttttgtcagcaagacaaagaagcaatgaataaagaagcgtttggatgaaagccaagcaattacttcatgggctattaatcagaacttgaagaaagttgccagtagcaggatctatttatttagtagatctgtttacggaccattcttctacacttggccttgccctgcctagcaacctgattgtttccatggtgagaagccacttgccctctctaagcagcaaaacacatttgagaaagctcttgctttcctgttaaaacagtctgccataatttctgtagctggtacttaccattgttaggatgtaatgtataattagattctatacctaaagaattat

SEQ ID NO: 2921 - DNA, 1823 bp, Cricetulus griseus
ccagatctgctgcaggacttattgccagtggaagccaagaaaggaggagaaaattacttcacatcagtgcaggtccaacttcagtgacagatctggtggccttggagtggctgaagaccaccaccctccacaggcctgcgcccaagcacaactatccttctttttcttgagtgagcctcctcagcatgctgtctatatcattggcagaaactgtagttgcaaagggggctgaatgactactggactttatatgaaaacaccaactttgtcagatctggggctggggacaaggctagtattgtcatcaacaccactgatgaggatgaagaatatgtgtgctcctggttttggactggagaagagcctagtgtagggtcctggttctggcctaaagaagaaacccctcttcaagtttatcagcccccacctaaggttgaggaagaacctgaacccacagacaattttgactttactttaaaaagaaagcagcagcatgggcaaggggcaggtttattgtcctagtcccagttgaggaattcgagcaatctttaccttccagaagggaactggactctggttgcaaccttaaattgaaactcctctgggtattcgaccattgaccaaaatcccaccttttgaaggaccttacttccagactttagctgaaataaaaaaccaaaatccgggaaagagaaaagtaatggaccaaatccaaaaacctgccgttgtaaatcgcgtacctttagtttagagcctatagagtttgataagcttgttgccctacttaagttaactagggatccttttattcatgagatagctacaatgataatgggcatcagtcctgcttatccatttactcaagatatcgttcatgatgttggtattactgttatgattgaaaattttgtcaataatccaaatgctaaaaatcactctagaactgtaaatgtgagtgccagtgctgacacttctgaagaagcaaaagagaatgaagcacatgtggataaagtttgtagggacatactctcttgtcctttgaattgctctgtacaagtggaggaactgaaactgttagcgagcctgagtatgaaatttgagaatcaccatgtgattatcaattatgttcgacatttcatcacattgttaagcaaaggaagtgtcaaactcaagtttcagattttaagagttaatttatatttgtacaaaaaaccaagccaatacaagagagctgatcagtgctgaagtattgtcgtcactggttgctctgtttcacaagaatgagtcaaaggctaatgttctgcatatcatcaacatatttgagaatataaacttccaattcaaaaaaagggcaaagctgtttaccaaagaaatgttcactaagtctgaacttatttccatattccaagaggcaaaacagtttgacctgaaactccaagacttaatagatcacagtgaccctgaagtgagagataaaattatccggttaatactcaaactctgaatagctgtatattctcacaaagccttgaacattcctgtctttccagtataaatttaatgtatattataaatttgatacgtttgctttctgtgttgagggagacaatcttaggaatgctagtcatcttgaaagattgaacacttggctggtttttattgcgctatataatataaaaggggaatatttttggtatttctgtaatgtaatcccatactgagcctattcatcctaaatacgctatatttctgtgcattatattgatatgagtgtattttcgtattccatttgtcgttgtttttaataaagtttgcatgctaaa

SEQ ID NO: 2922 - DNA, 1823 bp, Cricetulus griseus
gacctttatgagtataagtactgtactgatgtggacttaatatttcaagaaacgtgttttcctgttcatcgtgccattttggcagcaaggtgtccattttttaaaacactgctttcttcctcacctgaatatggggcagagataataatggacatcagtacagctggtattgatatgcccatgttttctgccttgttacactacctttagtcagctacgaaatccagatccgagtgctcagagagtttggccttgcagatgctgctgcagagctcttgcagaatcctcacaagttctttcctgatgaacgtttcggggatgaaagtccgctcttgacaatgagacaacctgggagatgtcgtgttaacagcactcctacagcagaatgccaggtgttaaagtagcacctcccgattgcaccaacaccacaggcctgggaagacagacagttgctgctgctgcagctgctgccgcctcagcagcaataatatctgaaaagcaagtgtgtacacagcctatgctgaatgattttaatgccagatatcgccatgggggtaatctacactgtcactcaaggacaggaggctcccagagcttgctgctgacacagaattatgccagccagtttctgaagcaggaccagggcctccccagcatctctcatgtattccacagagacatacacacacgtctcggaaaaaacacgcactagagcagaaagcagatggtagagagaatcagcaggaatacccagatctctatgacttctcaaatgctgcttgcagaccttccactcctgcccctggcagacgcactccttcccctccacatggtagatattttggcccagacttgtacagccacaataaggcatcaccaaatggcttaaagtcggccttacctgcctggtcagacctctcctaaaaagcaggaagatgctaggagagaatatccactttctcctgatggccatctacacaagcagaagagtgagccgatacgcttggatgttgttgagcagcctccccagaggtcagactttccttcggcagcctcagaaaatgctggcaacggtccagctcatgtaagggcacgaactgcagtagaaacggacttgacttttgggctgacacctaacagtacctccttcccattctgcatgcagctctgaagctctagaagagcgatccagtagaagactgacagacagtgagtccctgagccacggagctcagagaaacacggatctggaaagggatgattccataagcagaggaaggaggtcaccgagcaagccagacttcctcaacaaaaagtctgccctctgaaaagcagcttcgagtctgtgcctgagatgtgaagcatccctgttgtatgatgtaaacccaacaacttactgaccggtttatcaatgccagctcagtctcactttttattctagtttctctgtgtatatatgttttatttatacatggcatgccgagaggggttaattttgaatgctgcatccgtctcttttgtgtgtaccagttgtgtgggaagcgtcttaaagagaaagcaagctggcggctttcttcttctttacagatgactaattttttgcacttgtacatttagtttatttgtattgattttataacagtgtgttaaactttattgccacatttaaaggactgtattttcatacttttttgcattttacctatcatctaccagtttccacgtgcattgggttgcacactaagatgtattttcttacaaaatagttgtgtttatttttaattatagaaattccaaaagaacaaaaaaaaaaaaaaaaaaaa

SEQ ID NO: 2923 - DNA, 1823 bp, Cricetulus griseus
gatcgacaagtaacagacctaggagactcaggtggtctggggattgaaaaaaaactttgctttactggagctgctagagcgtttgcagaatggacatattggtcagtatggagctgccgaggaagccattgggatatctggagagagcatcatccgctgtgatgaagatgaagctcacgttgcatcggtatattgcactgtgtgtgcaactcacttgtgctcagagtgttctcaagttactcattctacaaagacattagcaaagcataggcgagtgcctctagctgataaacctcatgagaaaaccatgtgctcccagcaccaggtgcatgccattgagtttgtttgctttggaagaaggttgtcaaactagcccactcatgtgctgtgtctgcaaagaatatggaaagcaccaaggtcacaagcattcagtactggaaccagaagctaaccagatccgagcatcaattttagatatggctcactgcatacggaccttcactgaagaaatctcagattattccagaaaattagttggaattgttcagcacattgaaggaggagaacaaatagtggaagatggacttggaatggctcacacagaacatgtcccaggtactgcagagaatgcccgatcatgtgtccgagcttatttttctgatttacatgaaactctttgtcgtcaagaagaaatggctctaagtgttgttgatgctcatgttcgagaaaaactgatttggctcaggcagcaacaagaggatatgaccattctcttgtcccaggtttcaacagcctgtctccattgtgaaaagactttgcagcaggatgattgcagagttgtcttggcaaaacaagaaattacaagattattagaaacactgcagaaacagcagcagcagtttacagaggttgcagatcacattcagttggatgccagtatcccagtcacttttacaaaggacaacagagttcatattggacccaaaatggaaatccgagtagttacattaggattagatggtgctgggaaaactactattttattcaagttaaaacaagatgagtttatgcagcctattcctacaattggttttaatgtggaaactgtggaatacaaaaatctaaaatttaccatttgggatgtgggtggaaagcacaaattaagaccattgtggaaacattattacctcaatacacaagctgttgtatttgttgttgatagcagtcatagagacagaatcagtgaagcacacagcgaacttgcaaagttgttaacggaaaaagaactccgagatgccttgcttctgatttttgctaacaaacaggatgttgctggagccctatcagtagaagaaatcactgaacttctcagtctccataaactatgctgtggtaggagctggtatattcagggttgtgatgctcgaagtggtatggggctctacgaagggttggactggctgtcccggcaacttgtggctgctggagtgttggatgttgcttgattctaatgcagcagttgtttcaagcttatggttaaaagtttgcatgtaatgtatcctaagaaatcttacatctcaaatatgatagttaatataggatgtgtatatataagaattctggactgagaactaagtatgccattgctttttaaaattattctgtggcagttttaaatgagcatattacgttggttaaatagaaatttcttggatatagacttttaaaaggtacattaggtactggagactttcagtttatagatgacctgtatattagggaggagtagtcatagagaacaggtaagagaaggttctttattt

SEQ ID NO: 2924 - DNA, 1823 bp, Cricetulus griseus
gactgactgaaaggcggttcccaggctacttccaaacctcatgtcattgtatttgcttccgccagtgtcctggcctgtacaaacctaggagcagagagcaaacagacagacgtaaggacagacagtaaacggaggacgcgctggccgctggacaccgctgcctcccctttctccctgctgcctgtgtccggaggatgagccctgccttcaggaccatggatgtggagccccgcaccaagggcgtcctcctggagccctttgtccatcaggttgggggcattcatgcgttctccgattcaacgagacaaccctgtgcaagcccctggtaccgagggagcatcagttctacgagaccctcccagctgagatgcgcaaattcactccccaatacaaaggtgtaggtttgcagatgagtttggggcctctggcaacatagagactaaggaacagggtgtggtgtcggtgcgctttgaagaagatgaagacaggaacttgtgtttaatagcatatccattaaagggggaccatggaactgtggacattgtagacaattcagactgtgaaccaaaaagtaagctgctaagatggacaaacaaaaaacatcttgtcctagaaacagaaaagagtcctaaggattgggttcgtcagcaccggaaagaggagaagatgaagagtcataaattagaagaagaatttgagtggctaaagaaatctgaagtcttatactacagtgtagaaaaaagggaaatataagttcccagcttaaacactataacccttggagcatgaaatgtcatcaacaacagttacagagaatgaaggagaacgcaaagcatcgaaaccagtacaaatttatcttgctggagaacctgacttcccgctatgaggtgccttgtgtcctggacctcaagatgggcacacgtcagcatggtgatgatgcttcggaggagaaagcagccaaccagatccgaaaatgtcagcagagcacatctgcagtcattggtgtgcgtgtgtgtggcatgcaggtgtaccaggcaggtactgggcagctcatgttcatgaacaagtaccatgggcggaagctttcggtgcagggcttcaaggaggctcttttccagttttttcacaatgggcggtacctgcgccgtgagctcctgggccctgtgctcaagaagttaactgagctcaaggcagtgttggagcgacaggaatcctaccgcttctattcaagttccctgctggtcatttatgatggcaaggaatggccagaagtgaccctggactcagatgctgaggacttagaagacctctccgaggagtcggctgatgagtctgctggtgcctatgcctacaaacccattggtgccagctcagtggacgtgcgcatgatcgactttgcacacaccacctgcaggctgtatggcgaggacagtgtggtgcatgagggccaggatgctggctatatctttgggctccagagcctgatagacattgtaacagagataagtgaggagagtggggagtgagcttgctgactactctagtacctgagagactctctgtgtcccccccacagctgtgctgccggggaggaggccagtatggccaggtggtggcccctgcagcctggagctgatagacagtggcctctgtcgacccccccccccaccccccccccccccaccagcctgagccagccccagccgtgctcagagtcttatttattttaactatttcttcaacattccacatttgatgatgcagatacctctttcttccctgagtgtaaatgttctaatacagatcctttttgttttattgta

SEQ ID NO: 2925 - DNA, 1823 bp, Cricetulus griseus
cgcagtggctatgttcgtgtccgagttttccgcaaggagttctacgagctggtccacaatcagagggtccttctctttgtggcctcggatgtggatgccttgtgtgcttgcaagatccttcaggccctgtttcagtgcgaccacgtgcagtatacgctggttccagtttctgggtggcaagaacttgaaactgcatttcttgaacataaagaacagttctgctatttcatcctcataaactgtggagccaacgtagacctactggatatccttcaacctgatgaagacagtgtattttttgtgtgtgatacccacaggccagtcaatgttgtgaatgtgtacaatgacactcagattaagttgctcatcaaacaagacgatgatcttgaagttcctgcctatgatgacatctttagggatgaagcagaagatgaagatctttcaggaagtgacagtgaggggtcagagccttctgagaagcgtacacggttagaagaggagattgtggcacgaaccacaaagaggaggcaacgaagagagtgggaggcccggaggagagacatcctctttgattacgagcagtatgaatattacgggacatcgtcagccatggtgatgtttgacctggcgtggatgatgtccaaggacctgaatgacatgctgtggtgggccattgtgggactgacggaccagtgggtgcatgacaagatcactcaaatgaagtatgtgactgatgttggcatcctgcagcgtcatgtgacccggcataaccaccggaacgaagcagaggagaacatgctctctgtagactgcacccggatctcctttgagtatgacctccgcctggcactataccagcactggtcccttcatgaaagcctgtacaacaccagctacactgcagccaggttcaagctgtggtccgtacacgggcagaagcgactccaggaattccttgcggacatggggcttcccctgaagcaagtgaaacagaaatttcagtccatggacgtctccttgaaggagaatttgcgggaaatgattgaagaatctgcaaataaatttgggatgaaggacatgcgtgtgcagactttcagcattcattttgggttcaagcataaattcctggccagcgatgtggtctttgccaccatgtctctgatggagagtcctgagaaggacgcctcagggacagaccacttcatccaggctctcgatagcctctccaggagtaacctggacaagctgtaccttggcctggagctcgccaagaagcacctgcaagccacccagcagaccatcgccagctgcctctgcactaacctggtcacttcccagggcccttttctctattgctcactcatggagggtactccagatgttacactgttctccaagccggcatccttgagtctgctcagcagacatttgctcaagtcttttgtgtattcgacaaagaatcgacgctgcaagctgctgcccctggtgatggctgcccccctgagcatagagcagggcacggtgactgtggtgggcatccccccagagactgatggctcagacagaaagaacttttttggtcgggcatttgagaaggcagcagaaagcaccaactctcggactctgcataaccactttgacctctcagtaattgagctgaaagctgaggaccggagcaagttcctggatgctctcgtgtctctgctgtcctgagggattttgatttctccagaagtgacctccttttccttatttatatcacctggcctctattagattgcaagatacatttaaagtgtgggactatgtggtttttaataaaa

SEQ ID NO: 2926 - DNA, 1823 bp, Cricetulus griseus
tcccggccccggggctcccccggcccgggcccgcgcctgggctgcgccgcgctccgcaacgtgtctggcgctcagtacgtgggctcaggctacactaaggctgtgtaccgggtccgcctgcccggcggcgccgcggtggcgcttaaagcagtggacttcagcggccacgatctgggcagctgcgtgcgcgagttcggggcgcgaaggggctgctatcgcctgacggcccctattgctaccaggacagtgaggacatcccagacacactgaccaccatcacagagctgggtgcccctgtggaaatgatccagctgttgcagacttcctgggaggaccgattccgaatctgcctcagccttggccgcctcctccatcacctagcccactccccactgggctcagtcactctgcttgacttccgccctcggcagtttgtgctagtggatggggagctgaaggtcacggacctggatgatgcccgggtggaggaaacgccatgtgctagtgttgctgactgtatcctcgagtttccagccaggaacttcactctaccctgttcagcccagggctggtgtgagggcatgaatgagaaaaggaacctctacaacgcctacaggttcttcttcacatacctcctgccccatagtgcccctccttccctccggcctctgctggataccatcgtcaatgccacaggagagctcacctggggggtggatgagaccctggcccagctagagatggtgctgcatctgttccggagtgggcgagtacctgcagaactccacaagcagcagtgctgagtaccaacgcattccagacagtaccatcacacaagaggattatcgctgctggccatcctaccaccatggcggctgcctcctgtctgtgttcaacctggctgaggcagtagatgtctgtgagagccatgctcagtgtcgtgcctttgtggtcaccaaccagaccacctggacaggtcggaagttggtcttttttaagactggatggagccaagtggtccccaatgccggcaagaccacatatgtgaaggcccctggttgactggtcgtgggctcagctgaccagccaggcttgcctgcttcgggagtgacttgcatatcacctgggaacccctgcagacaaagctaacatcccagaccaactgatgtgaccaggacaaacgtgcaatatgcaaaactgttaaaatgtgagtttgccagcttaggtctgagactgttgagggctgaatgcatcttgagagctctgggctgccagcggggctcaggctagtcttaactgggacagttccatgggcagccccatcgctgcattcatggtttgagagtgtagccagaacactgctgctgcacaagtcacagtgggcaggagctgcttggggacaatcagttgcagaatgttctctcagctcagctcagctaaaaagggagcagctgcgatggatggtccaaaagcaagatgttgagtgaaacggtacccgggaagaaggctgctttgcctctccccagaggttgctcctaggccagcccaggggtcatgggcagtggtgcacacatccatatgagccgagactagggtggaggagcagattgcatttgagccaggacctgggggtgggggtagggtcggaagcctttctgcctcatttgctttcagtgaaagccaccaagcagccaaaaccaggcctcctccccctcctggagcccctcctggagtttgcatttccagaagcttttgtacttcttgttcattaaattgtttattttagtaaaaaaaaaaattaaatcaattaataaaatgatgtt

SEQ ID NO: 2927 - DNA, 1822 bp, Cricetulus griseus
atcgtagctgatgtcctggccaagtttgtaaagactagctgccacgtcagaagcgggggacgtcgccatggaaattctacttcaaactttattgcttcctggacacagacagcgtgccaaaagacagtgtggagtttgcgtttatgtttgaacaggcccatgaagcagtcatcccatggccaccatcctgcccctgaagagaacctccaagtactggctgccctgagactccagtacctgcagggcaattacacccgactcaaagctcgcatcagtcagtcgaccaaaaccttcaccccatatgaacgcctggagaagaggcgggccagcttcctggaggggacactgaggcgaagcttccggaccgggtcggtggttcggcagaaagtggaggaggagcagatgctggacatgtggatcaaggaggaagtctgctctgctcgagccagtatcattgacaagtggaagaaattgcaggaatgaaccaggaacaagccatggccaagtatatggccttgatcaaggagtggcctggctatggatcaacactctttgacgtggagtgcaaggaaggcggcttcccccaagaactctggctgggcgtcagtgcagatgctgtgtcagtctacaagcgtggagagggcaaaccattagaagtattccagtatgagcacatcctctcttttggtgcacccctggccaacacgtacaagattgtggttgatgagcgggaactgctctttgaaaccagtgaggtggtggatgtggctaagctcatgaaagcttacatcagcatgattgtgaagaagcgctacagcaccacacgctccgtgagcagccagggcagctccaggtgaagatgagcaagtccatgtgtctttcagatctgaattgccactctcgcctaggccagcgccagccaggtcctgaccaatccttggaacacacagctgcccaggcttttggaaccccgtttgtcagggggaggagtttccaggactcctttcaccgcatcaacttcagtgatcatgtattaagctgtcaaccttaaccgtctgcacaatttctaaagctttagtactcatagatacttgaccttaaaaaaaaaggaaaggggagaaaaccacgatgccaccaaagcagccagaagtgccttaacttgcagaatcgaccctaatcgaccttaactgtgctactgagggaaagcactttccccttctgggggaatttgcagagcttggaagcgggcatcgatccactgattatgcactaacctcccagcccgatttcctgactgtgagggaaggtgagggagtggggaggagagacagagcagaaggagacagtgtgttgtagttggagcgctgctggcagccttccttttttttttttttttttttttttgtttttttggttttttttgtctgtgcttgcccatgcatgcatgcatacgttcatacactcaacactttaatcattgttgcgtgcgcattaaacacaaagggaagatgatgtgcaatggtgtaaacagtctgtctgtatattttaatagttgagagttatagtctccaaggtggttttaataacagagcagaaccctgaatgctcctgtctctgctgtatttttggaaagagacattttgactcagtttcgttttacatgtagcaagggctgcaacctgtgactgctgtattactaacaggtccccagcccacaaagataactgtatttataaaccactcttaaactgctggccccagtgctgtttttagaacaatatgaagtcatttcggagtcatttatttctaaaagttaagttaa

SEQ ID NO: 2928 - DNA, 1822 bp, Cricetulus griseus
tgtcgccccgtgttgtgtgtttgtgtgagtgtgtgtgagtgagtgagtgagtgagtgagtgtgtgcgtggggcactcggcttgttgttgtcggtgacttcccccttccctccaccgctgacaaacgggctcatcataatgcactggaacgaaaacgcagggaccacatcaaagacagctttcacagtttgcgggactcggtcccgtcactccaaggagaaaaggcatcccgggcccaaatcctagacaaagcaacagagtatatccagtatatgcgaaggaaaaaccacacgcaccagcaagacattgatgacctcaagcggcagaatgctcttctggagcaacaagtccgtgcactggagaaggcaaggtcaagtgcccaactgcagaccaactacccctcctcagacaacagcctctacaccaacgccaagggcggcaccatctctgccttcgatgggggttcagactccagctcagagtccgagcctgaagagccccagagcaggaagaaactccggatggaggccagctaagccatgtggggcaggccagcaataaaaactgtcgtctccatcgtctcatcctcttcagttcctcgttagaacccttgaaaccattgaaagactctttattttccttttctctttattaattgttatttttgcatagaagctcttggacaacagctctcatccggtccctgtgtccactatttttaaatgtattcccttcaggggttcctgtccccaccagaaattttaaaccaaaacaccctaacttggcagctctttctgtggaggacagacagccggccagacctctgagtacatggtgtcctccccccccccccacgctcctccagccctcagagcgtgtgcctggagggtgcctgctgcaccgggcccctcccagtcccctcacctctgtttggtggactttgtgactctctgaactgctctactttgacaagatgaccagattggagtaatcagaattaaccccctcctctgtaaggattgttttttgcaaaagctatcgatcctgttgaaagaccagattcttgaagaagtttgtggtataaaaggaaagcggggacagaactgcagaatccttggcatgtttcactcttcagttgtttaagcctgcagagccagccttacagaaggccacgtgacactggtatgtataggagatggcagcagtgaaatggcctcccaggagtggtggggtggctgtttgtgggtgggacagggagggagtcgtaggtggggtagaggttttgtattaagggccagtgatgatgttttgatatttatttcctgctactgaaattcaaatctgaatgaaatgcccctatttctgatgatgtcgatattgtaaagcgacagattcataaagcaatgatcaaatcttcatttctttctgtgtgtatttctaagaaatagagccaacttttgtatgtaaataccaagagcgacttacctggtactaaacccacagcccagcacagcctccctgccctacttgcctccctctggtcctggaacttgtcgccactgtgcgatccggccctggctctggctgtggtcagcagatcccagtgaagggtttcatgtctttaggcttcatttctttgtctttttcctactctgttgccggcattttgctgatttctagtgtatactctgtagtctcagtcggtatttgattccattccatggaaataaaagtatgttgtacatactgcccaagaattgtcttgcaagttaaggcttccccctttactataagaatataaataaagacttattttatacctt

SEQ ID NO: 2929 - DNA, 1822 bp, Cricetulus griseus
ccgggaactcggaggcggggagcggctgcgaagtggccgtggctgttggccgcggtggagctggcgggcgtgcacgagagccggtcgcagacggcaggaggcagcggggatggcgcgggcatgggggctgctactggcgatcggggtggtcctgccagcttggctgtcctccacaaaggtctcttcactcattgagagaatctccgaccctaaggacttgaagaaacttcttaggacccgcaataatgtgctggtgctttactcaaaatctgaggcggcagctgaaagtcatctcaagctactgtccactgtggcccaggcagtgaaaggacaaggcaccatctgctgggtggactgtggtgacacagagagtagaaaattgtgcaagaagatgaaagttgacctcagcccaaaggacaagaagattgaattattccattaccaggatggtgcctttcacatggaatatgaccgagctgtgacgctgaagtccctagtggcctttctgaaggacccgaaaggtcccccactgtgggaagaagatcctggagccaaagatgttgtccacattgacaatgaaaaggacttcagacgcctcctgaagaaggaagagaaaccactcctcatgatgttttatgctccctggtgcagcatgtgcaagaggatcatgccacatttccagaaggctgccacccaagtgcgaggccactttgtgctggctgggatgaacatctacccctcagagtttgaaaatatcaaggaagagtacaatgtgcgtggctaccctaccatctgctatttcgagaaagggcggtttctgttccagtatgagaactatgcgtccacggccgaggacatcgtggagtggctgaagaatccacagccgccacagccccaggtccccgagactccctgggcagatgagggcggctccgtttatcacctgaccgatgaagactttgaccagtttgtgaaggagcactcctctgtcctcgtcatgttccacgccccatggtgtgggcactgtaagaaaatgaagccagagtttgagggtgctgctgaagtcctccacggagatgctgatagctctggtgtccttgcagctgtcgatgccaccatcaatgagggcctggcagaaagatttcacatctcagcgtttcctaccctgaagtattttaagaatggcgagcagcaagcagtgcctgcactcagaacaaagaagaagtttattgagtggatgcacaaccctgaggctcccccacctccagagcccacatgggaagaacaacagacaagtgtattacatctgatgggggataacttccgggataccctgaagaagaagaagcacaccttggtcatgttctatgccccgtggtgcccacactgtaagaaggccatcccacacttcactgccacagctgatgccttcaaagatgaccgcaagattgcctgtgctgccgtggactgtgtcaaggacaagaaccaggacctgtgtcagcaggaggccgtgaaggcctacccaactttccactactaccactacgggaaacttgcagagaagtatgaaagtgaccgcacggaattgggatttaccagtttcattcgaaccctccgggagggagacctcaaaagactagagaagaggagggaggagctgtaaccccgcctcctccaagagagcccttcctttacactgtgaatgatgcctacatgttctttctgaatttccttgtgttctcaagacaaagttttttatagccacttatggccttttgtacaattttgaaataaaattaaactatttaaaaaaaaaaaaaaa

SEQ ID NO: 2930 - DNA, 1821 bp, Cricetulus griseus
  modified_base (286)..(286): a, c, t, g, unknown or other
tgcggggtttctgggcgagcgtactcgtttgggtgtgagtggacgcccgcagaggcgctcaaagagaaggcggtaggtctgggagctccgaggccgccccagaaatgattcacgaattgctcttggctctgagtgggtacccaggatccattttcacttggaacaagcggagtggcctgcaggtttcccaggacttcccatttcttcaccccagtgagactagcgtcctgaatcggctctgccggcttggcacagactacatgcgattcactgagttcattgaacngtacacgggccatgtgcagcaacaggatcaccatccatcccagcagggccaaggtgggctacatggtatctacctgacatggagtcatgtataacagctctcagcctggatgctacatggactcctcttggaccagcatgaagagttgcctaattgaggaagagaacatgctggccccatctctgaagcagttttcccttcgggtagagattttaccatcctacattccagtgagggttgctgaaaaaaatcctgtttgttggagaatctgttcagatgtttgagaatcaaaatgtgaacctgacgagaaaagggtccatcttgaaaaaccaggaggacacttttgctgcagagctgcatcggctcaagcagcagccgctcttcagcctcgtggattttgagcaggtggtggatcgaaatcgtagcactgtagctgagcacctctggaagctaatggtagaggaatcagacttactgggtcagctgaagatcattaaagacttttaccttctgggacgaggagaactgttccaggccttcattgacacagctcaacacatgttaaaaacaccacccactgcagtaacagagcatgatgtgaatgtggcctttcaacagtccgcacacaaggtgctgctagatgatgacaaccttctccctctgttgcacttgacaattgagtatcatggaaaggaccacaaagcagatgccacccagccaagagaagggccttctcgggaaacgtccccccgggaagcccctgcttccgggtgggctgctctaggtctctcctacaaagtacagtggccactgcatattctcttcaccccagctgtcttggaaaagtacaatgttgttttcaagtacttactgagtgtacgccgtgtccaagctgaactgcagcactgctgggccctccagatgcagcgcaagcacctcaaatctaaccagacagatgcagtcaagtggcgcctaagaaatcacatggccttcttagtagataatcttcagtactatctccaggtagatgtgctggagtctcagttctcacagcttcttcatcagatcaattctacgagggactttgaaagcatccgattagcccacgatcacttcctaagcaatttgctggcccagtcctttattttgctgaaacctgtgtttcactgcctgaatgaaatcctagatctctgtcacagtttttgttcactggtcagtcagaacctgggtccactggatgagcgaggagctgcccagctgagcattctcgtgaagggctttagtcgccagtcttcactcctgttcaagattctttccagtgttcgaaatcaccagatcaactcagatttggctcagttactgctccggctagattataacaagtattatacccaggctggtggaactctgggcagttttgggatgtgaaaactggttcataaaatgaagtaacaggccatcctgccaccttctgatgtctgtaacacatctccccagttattaaacatcagagatgcctgcaaactggtgaaagg

SEQ ID NO: 2931 - DNA, 1821 bp, Cricetulus griseus
cagcaggcggatgtccatctagaggcagtgcatccttcgccatgaaccccagaggcctgttccaggacttcaaccccagtaagttcctcatctatgcctgcttgctgctcttctccgtgctgctgcccctgcgcctggacggcatcatccagtggagctactgggcggtcttcgcccccatctggctgtggaagctcctggtcatcgtgggcgcctcggtgggtgcgggcgtatgggcccgcaaccctcgctaccgtacggagggggaaggcctgcgtggagttcaaagccatgctgattgccgtgggcatccacctgctgctgctcatgtttgagatcctagtctgtgacagggtggagaggggcacccatttctggctgctggtcttcatgccactcttttcgtttccccggtgtccgtggctgcctgcgtctggggcttccgacatgacaggtccttggagctggagatcctgtgctctgtcaatatcctgcagttcatcttcatcgccctgaggctggacaggattatccactggccatggctggtggtgttcgtgcccctctggatcctcatgtcgttcctctgcctggtggttctctattacattgtgtggtccctcctgtttctgcggtctctggatgtggttgctgagcagcgaagaacacatgtgaccatggccatcagctggatcacgattgtcgtacccctgctcacctttgaggtcctgctagttcacagactggatgaccacaatacattctcgtacatttccatatttgttcccctttggctctcattactgacattgatggctacgacgtttagacggaaagggggcaatcattggtggtttggtattcgcagggatttttgtcagtttctacttgaagtcttcccatttttaagagaatacgggaatatctcttacgatctccatcacgaagacagtgaagaggctgaagactcatcggtttcagaagctccgaaaattgctccaatgttcggaaagaaagccagggtagttataacacagagtcctggaaaatacgttcctccgcctcccaagctaagcattgatatgccagactaaactcacaggctgggcctttacctgaaatagaaaccatgtaccagtgaattccactttgcttttttttctgtgttcatccagccctggaattgggaatgggccctcctcattttacaccctctgtgagatggaagcctcttgcagttgtcagtgtatactacaaacgaaggaggctgtattagtctttgtgtgtgtgtacataatgtgtgagagaactcgctttccaggtccgtgtcttaagagctagccaaaggcagtaaattgaattgtttctaggccttcaaaagacctgaaaaactacatagctgtttgtttttaagcgctacttatgcctaccaaaagtattgtttaaaaagtatttttatacactgctagtctaaaattgtattttagattgtgtccattgtgacatgatggcaaatgtaccaaattctctcccaccactgttccacaaacctcatagttgatatttctagtgttcctactgttcaaatagttgttttctttgggctttgctaacacaggtctgtagcattctaatagatgaattttctaatggagtgaatctgcatatgttagtatttatatgaatgttttagcagtgttctctgtgttgaattgtagttcttggcaataccaatgtattgtgttaaagtatttttttttaaaaaaaaaaaaaaaaaaaaaaaaaaaaaaaaaaaaaaaaaaaaaaaaaaaaaaaaaaaaa

SEQ ID NO: 2932 - DNA, 1820 bp, Cricetulus griseus
cagagtacagacttattgtggagaatttgtcaagtcggtgcagctggcaagacctaaaggattacatgcgtcaggcaggagaagtaacttatgcagatgctcacaagggacgaaaaaatgaaggagtgattgaatttgtatcttactctgatatgaaaagagctttggaaaaattggatggaactgaagtcaacggcagaaaaatcagattagttgaagacaagccaggttctagacggcgccggtcttattccaggagccgcagtcactcaaggtctcgctctcgaagcagacattcccggaagagcagaagtcgaagtggaagcagcaaaagcagccattcaaagagtcgatcccgatccaggtccggttcccactcccgcagtaagagccgcagccgcagccagagccgcagcagaagcaagaaggagaaaagccggagtcccagcaaagacaacaagagccgcagtcgcagccgcagcgccgacaagacccgaagcaagagtaaagaccatgctgaagacaagctccagaacaacgacagcgctggcaaagccaagagccgcagccccagccgccgtgacagtaaaagtcggagcaggagcaaggagaggagagcagaggagaagcgaaggagcgtgagcaggagtcgcagccaggagaagagacgcagccaggagaagaaccttctcaagagccggagccgcagtcggagcaaaggggggagccggagccgcagccgcagcaaaagcaaagacaagcggaagggcaggaagagaagcagggaggaaagccgcagccgcagccgcagcaagagcgagcgcagccgcaagcatagcagcaagcgtgacagcaagggcagcagcagcaagaagaagaaggacgacaccgaccactcccggtcgccatcccgctcagtctcaaaggagcgggaacacaccaaggcagagtctggccagagggaaggcaggtctgagggcgagagtgcaggcccccatccagagccccgcgccaggtcaccatccacttccaaatccaaacctagtctccccgcagagtcgcgctccaggtcaaagtcagcttcaaaaacgcgctctcggtccaagtctccatccaggtccgcttccaggtctccctcccggtctagatccaggtcccactcaaggtcctaactggctatgccacgctggaactgccgagaagtcttttgtacatgttggtagccgtagcacaagagtgaagtagagcaccctcactgctgtacattgaactcccctaatggtgtgtctccaattgttcaatctcagtgcttcctcggtaccgcctcctggcgccaggcctcctgctccactgaaaagcagctcctcaaaccttcctttactcacagtaggacatccaaacgccttggctctcaggcctggccacggctaaagggagctcggcacccggacggcttctcgggctggaatgatggcataggtaggtgtggtgagttcagccgttttgccctggaatcgatgccctttgatgtatgccacgtagtgaaagtgcaagtcttcagttcccaccactttgtttcctatttctggacttaacaacgttgtgaatagcacagtcaagagaaattgatacctgcatagcccataggaagtaaactgtagagctccatattctggtattgtgattatattgttttatattaaaagaaaagtattttttttaattttatttttccccgtcttgcaaagtatagtgacccctgtttccattaaatttgaataaagactatttttgcttgacaaaatttcatcgtgcttgaa

SEQ ID NO: 2933 - DNA, 1820 bp, Cricetulus griseus
agatcctttatcgtattaccaaactggtgacataattcgagctggaatcaaggatattgacagatatcacgaaaaacttgcagtatctctgtacagctcatctcttccaccacagatgtctagcattaaactaggtgtgattacttctgaagagctacctttgtactacaggaggagtgttgaactaaatagtaattctttggagtcctatgaaaatatcatgcagagttctctgggatttgttaatccaggagtagtggaattccttctagagaaactaggaatagatgaatctcatccaccatctttaatgagaggcctacaaagcaaaaatttctccgaagatgattttgctttggctttaagaaagaagcagtcagcatcttgggctttaaaatgtgtgaagattggtgtcgattattttaaggttgggcgacatgtggatgctatgaatgaatacaataaagctctggaaatagacaagcaaaatgtggaagctctggtagctcgtggagccttatatgcaacaaaaggaagtctgaacaaagcaatagaagattttgagctagcattagaaaactgcccaactcacaggaatgcaagaaaatacctctgccagaccctcgtagaaagaggagggcagttagaagaagaagaaaagtttttaaatgctgaaagttactataagaaagctctggctttggatgagacatttaaagatgcagaggatgctttgcagaaacttcataaacatatgcagagatttttacaatagctataaaactcaggcaggtagtagcaaaaccgaaaagccatataagtcagaaagatatttctccagtaggagaaattcctcggattccttctgtagaaattcagaggacaagatgaaagcatctagttataggagatttgaaaaggacacagaaggaagaaaagatcacactagaaggtgggagccaggttctgtgaagtactctacttcaccagcaagttcggactactcttggaagtcacttgaaaacaaaaaaaatacgcttactctggatcacgtgacagtagacatgagcaaagataccagttaaatacaaatcagggagaacgtgcatatgaaaaggaggacagctctggggaggtaacaaaaccgaggctccagaagaccttacctgactgacgacagttgaagactgtgaagaagatctggagctctggcctttaactgcaggtagttctaacccattctggaagaatgttttaattattagtcctgccatattttagaagaaaactaattagatacacagacatactatagtatactctattacctgctcaaaatacgtttgaagaattatgttgacttcagtgtcttccatgatagtaactaacatttggtcaatgtccctatgatactgtttaatctcacggagttcaatgtcttgttcttctagtgtttcgtcatttgtttctttcaaaatgcggatttctcttttgagtcttccacactgttaataataataacagtcaactattacatatgcctactttccaccaagttcaggaaaggcaggttgagtgcatttggtacatgaaagaagtgaatgctagggccagctctaagaaattgtcagcacctgcttagtcacgcgctctaatttcggcagctgctcctcagtctctttgctgagttgaagtgagtacgattgtttctctgttaatttctctttgactattatttgctaagtgttctaaaacttcaaaagtattttccatgctctatagaaaataaaatatcaacatattcatggtcagaataaaaa

SEQ ID NO: 2934 - DNA, 1820 bp, Cricetulus griseus
  modified_base (1537)..(1537): a, c, t, g, unknown or other
ggctgctgtctgccaacgtgcgccagctgcaccaggcgctcacggcgctgctgagcgagcccgagcgggagcagttcactcactgcctcaacgcgtaccacgcgcgccgcaacgtcttcgacctggtgcgcaccctccgtgtcctgctggacagcccggtcaagcggcgtctgctgcccatgttgcgactggtcatcccgcgctccgaccagctgctcttcgaccagtatacggccgagggcctctacctgcccgccaccaccccctataggcagcccgcctgggctgctcccgacggcgcggggcccggggaggtgcggctcgtgagcctgcggcgcgccaaggcccacgagggcttgggtttcagcatccgcgggggttcggaacgacggcgtgggaatctacgtgtcactagtggagccgggcgtccctggcaggaggaagggaagggttacgggtcggggaccagattctgcgcgtcaacgataaatctctagcccgggtgacccacgcggaggctgtcaaggctctcaagggctccaagaagctggtgctgtctgtgtactcagctgggcgtatccctgggggctatgtcaccaaccacatctacacctgggtggacccacagggccgcagcacatcccctccctccagcctgccccagccacatggcagcaccctgagacagcatgagaatgaccgaaggagtgccctacacctcctgcagagtggagatgagaaaaaggtgaacctggtgctgggggacggccggtccctgggtctcacgatccgaggtggagctgagtacggccttggcatctacatcactggtgtggacccaggctctgaagcagaaagcagtgggctcaaggttggggaccagattctggaggtgaatgggcggagctttctcagcatcttgcatgacgaggcggtgaagctgctcaagtcatcccggcacctcatcctgacagtgaaggacgttggaaggctgccccacgctcgtaccaccgtggaccagacgaagtggattgccagttcccggattggggaaaacgcctccagctcagcagggtttccaggggacctcacagaagaagggacaaacaagccaggatttacaaaggcccagctggctcccaggtgaccctgagcagcctggggaatcagacacgtgcacttctggatgaccaagcccggcacctgctgacggagcaggagcgtgccaccatgatgtactacctggaccagtaccgtggtggtgccatctctgtggaggtccctggtctatggtcactgtttgaattagctcaatacacacgccaagttgtcttctcagcaccacggaatcgaagcccaccactggcactgccacccaccccagggccccctcagcacaggattcaccctcctctcccatttacgcctccatctcccatgccaaccccaggtctcggaagccgctggacacccacctggcccctggttaacccagaacccccatcggccccttccctcggggtcccaatccccaccncacctgaagagccctgctgcagagaccccaggggctggggcctgccttccaccaccatcaccctctgaccaccctgaccctgtgggtgcaaaccagcactttgtcctggtggaggtacaccgtccggatagcgagcctgatgtgaatgaagttcgggctctgccccagacacgcacagcctccacactctctcagctctcagacagtgggcagactctaagtgaggacagtggtgtggatgccggagagacagaggccagcacctcaggtcgaggcagacaga

SEQ ID NO: 2935 - DNA, 1819 bp, Cricetulus griseus
ggccttggacaccatgaacttcgatgtgatgagctcggggccaaggaccaaggaattcaccaatgtttatatcaaaaactttggggaggaagtggatgatgataatctgaaagagctattcagccagtttggtaaaactttaagtgtcaaggtgatgagagatcccagtgggaaatccaaaggctttggctttgtaagttacgaaaaacacgaggatgcaaataaggctgtggaagaaatgaatggaaaagaaatgagtgggaaagcaatattcgtaggccgtgcacagaaaaaagtagagcgccaggctgaattaaaacggaaatttgagcagctgaagcaggagcgaattagtcgttaccagggagtgaatctctacattaagaacttagatgacaccattgatgatgagaaattaaggaaagagttttctccttttggatcaatcaccagtgctaaggtgatgttagaagatggaagaagcaaagggtttggctttgtctgcttctcatctcctgaagaggcaaccaaagcagtcactgagatgaacggaaggattgtaggctcgaagccgctgtacgttgccctggctcagaggaaggaagagcggaaggctcacctgactaaccagtatatgcagcgtgtggctggcatgagagcactccctgccaatgccatcttaagtcagttccagcctgcagctggcggctactttgtgccagcagttccacaggctcagggaaggcctccatattacacgcctaaccagctagcacagatgaggcctaatccacgctggcagcaaggcgggagacctcaaggcttccaaggaatgccaagtgctatacggcaatctgggcctcgtccagctcttcgccatctggctccaactggtaatgctccggcctctcgtggccttcctactaccactcagagagtcgggtctgagtgcccggaccgcttggctatggactttggtggggctggtgccgcccagcaagggctgactgacagctgccagtctggaggcgttcctgcggctgtgccaagccttgcacctcgtgccacagttgccgctgctcccagggctgtggctccatacaaatacgccgcaagtgtccgcagtcctcaccctgccattcagccactgcaggcaccacagcctgcagtccatgtccaggggcaggagccactaactgcctcgatgctggctgcagcaccaccccaggaacagaagcagatgctgggggagcgtttgttcccacttatccaaacaatgcattcaaacctggctggaaagattacaggaatgctgctggaaattgacaactctgagctgctccacatgttggagtcccctgagtctctccgttccaaggtggatgaagctgtggcagtcctgcaggctcatcatgccaagaaagaagccgcccagaaggtgggcactgctgctgctgctacctcttagacaaggaaaaagagtcaaaagccaaataacccctcatggcattcagctaaggtctgaagacttccttgtttgtctgtggacctccacaccaagaaccacaagttgcaaattcaataggtcattttgtatctaaaggtcaattatgaggcacctagaatttttcgattatataagagtatattctctgggttctgctatggcccaggttgttaacttttttttttttattatatatgtgggttctaatttttcccccttcccagaaattggttttgatgcacccaagacttgagtttctcaataaagaaaaaaaatctgtataaaactggctgccataaaaaaaaaaaaaaa

SEQ ID NO: 2936 - DNA, 1819 bp, Cricetulus griseus
aaccccccccctttatgtttgcccagccctccaccggcttctgagtagtgggggagggtttcggcctctaggttcccgccccaccggggcccgggctagcatggggggcaagcagagcacggcggcccgctctcggggccccttcccgggggtctctaccgatgacagcgccgtgcccccgccgggaggagcgccccactttgggcactaccggacaggcggcggggctatggggctgcgcagccgctcggtcagctcggtggcgggcatgggcatggaccccagcacggccggaggggtgccctttggcctctacaccaccgcctcccgcgggaccggcgactcagagagggcgccgggcggcggagagtccacgtcggactccacctatgctcacggcaatggttaccaggagacaggcggcggtcaccatagagacgggatgctgtacctgggctcccgagcctcgctggcggatgctctacctctgcacatcgcacccaggtggttcagctcgcacagtggtttcaagtgccccatttgctctaagtctgtggcttccgatgagatggaaatgcactttataatgtgtctgagcaaacctcgcctctcctacaatgatgatgtgctgactaaagatgcgggtgagtgtgtgatctgcctggaagagctgcttcagggggacacgatagccaggctgccttgcctgtgcatctatcacaaaagctgcatagactcctggtttgaagtgaacagatcttgtccagagcatcctgctgactgaccctgctgggctggcttgctgactcctctcaaaggtaggtttattttatttattccaagtaaatgcccagaccagctgacggtgtcaggcaaatcagggacatttgctcttttaccttcacctcacaatctgatgacaaggggagaagacaaagcaagggtgagagtgaggcagagggattggactctggcttcagaatgcaggtccaaattgccggcatgatgtttggcttccgggggccttcctggactgaaccagctgcccctcccgaccagcctgccctcagggggccacactgctgccacggtgagatgcagcagcagctctcggccagatggagcacgactgacttcttccgacccacacaggaacagacagccctgttctgagaggaggctcctgggacactggacagagctgagtttgggacaccagagggaacagggcaccccttctgcactgacttccagaaaatggtcctcccttgagagaagaatgaattgacctctatccttcccctcaccctcaacccaggagggaaagggcattttctttttcacctttgaaaggcgttgtgggtctgtctttaaagtgtttacaacaacaacaaaaaaattatataaaaaagtctagtgtcgactggtgttttccctcgtgatgtttacagattgctgtttgctgcccagctaacacccactcagtgacagaaccaagcatagccatgtcttcaccgctagcactgacagcgggcaagcgggcgggcacacggtcacttcctttgcccaacgccccagttggttctctgtgtcaccaacctttctactttgggagatttgggtgttttttgtgtttttcacacgtggcatcagcccatgcaggataggtttctgtatttatatattaaaatacaaaaaaaaaaaccttacaaaatgttttaaaattgttcaaagctcgggagaaaagcttttcttcatcagtcaaggtgttttgatatggtattaaaataatgtctaacaaaaaaaaaaaaaaaaaaaa

SEQ ID NO: 2937 - DNA, 1819 bp, Cricetulus griseus
agggacagctccggcctcttcagtgacgggtggccaagccgacaggagctggggcggggcggcggcggccagcgaaggagcgcgcggcggcccggccccgcccctggtcctccctccagccccggtgaccttcacgggttcgggcggcgggcgcaggctcgggcggcggcgcgatgttcgtgcaggaggagaagatcttcgcgggcaaggtgcttcggctgcacatctgcgcagctgacggcgccgagtggctggaggaggcgaccgaggacacgtcggtggagaagctcaaggagagttgcctcaagcacggtgctcatgggagcatagaagaccccaagagtgtgactcaccataagttaatacatgcagcttcggagagggtgctgagtgacaccaaaactatcttggaagaaaacatccaggaccaagatgtcttgttactgataaaaaagcgtgctccttccccacttcctaagatggctgatgtctcagcagaagaaaagaagaaacaagagcagaaggctccagacaaagatgctatcctccgggcaacagccaacctgcctgcttgtagcacagaccggactgcagttcaaaccaccatgagagacttccagaccgaactccggaagatcttggtgtctctcattgaggtggcacagaagctgttagcactgaatcctgatgcagttgaattgtttaagaaggcaaatgctatgctggatgaagatgaggatgagcgagtggatgagactgccttacggcagctcacagaaatgggctttcctgagagcagagcctcaaaggcccttcggctgaaccacatgtcagtgcctcaggccatggagtggttaattgaacactccgaagatccagctattgacacacctcttccaggccacgacccccaagcaggggcaggtgctgcagctaccacctccacctctcctgaagctgctgtgggaactagcgctggagatgaggaagtccgggatgagctcacagaaatcttcaagaagatccgaaggaaaagggaattccgagccgatgctcgggctgtcatttcactgatggagatgggctttgatgagaaggaagtgattgatgcactccgagtgaacaacaaccagcagaatgcagcttgtgaatggctgctaggggaccggaagccatcccctgaggagttggaccagggcatcgatccaaatagccctctctttcaggcaatcctggacaacccagtggtgcaattgggtttgacaaaccctaagacattgctagcatttgaagacatgctggagaacccacttaacagcacacagtggatgaacgacccagagacaggccctgtcatgctgcagatctctagaatcttccagacattgaatcgcacgtaggtggtgcctactgtgctccttggctgtgcagcctcagcagcttccgatgcagtgggcacagggcccagccgggatcttgcctggatcacagctgcagtgactcccctttcttgaccttactgcttatcaacttctgccacgtggtttgaaagccgcagtcctagcttctgccaggtgtttacaggaagtggctattgcactgggaaggtgaacgactgctgccccatcccctccagatgctctgctgggctcctgaagtgctacttgaattgaccctaaggtgtttgcttgtggagcccactgtattttaaagaaggcatgttctgatccaaggtgttatgtcaagtgtgctaatttaaccagagtgactcacagatggctttaataaataaacccttttacctaaaaaaaaaaaaaaa

SEQ ID NO: 2938 - DNA, 1819 bp, Cricetulus griseus
  modified_base (435)..(435): a, c, t, g, unknown or other
gacagggaccctcaggttcttctgaaacccgaaggggtcgaaatttgttttaggaccgacccctgttcagaagcagttgatggagaaggagagactggagcaacttggaagagaccaagttagtggaggtggtgcaaacagcatggaatgggacactggctatgacagtgatgagcggagagatgtcccctctgttaacaaactggtgtacgaaaatataaatgggctatctatccctagtgcctcaggggtcaggagaggtcgtctgacatctaccagtacctcagatactcagaacatcaacaactcagctcagaggagaactgcattgttaaactatgagaatttgccatctttgcctcctgtttgggaagcccgaaagctaagtagggatgaagacgacagtttaggaccaagaccccatctctcaatggntaccataataatctagatccaatgcataactaatgttaatacagagaatgtaactgtgccagcaagtgctcacaaaatagactattcaaggcgtcgggattgtaccccgacagtctttaactttgacatcaggcgccccagcttagaacacaggcaactcaattatatacaggtggatttggaaggtggcagtgactctgacaaccctcagactcccaaaacgcctaccactccccttccacaaacctttggtgtttgggttgtcttactttattttgtaatgtctttattaatttacaatacaatgtttcagtttatcatttttggaatgggattgtatgtttattgttagtttgcatttttgtcaagttatggtcttgaaggtctatttggaactgactgttattttctaacagggttgcccttgtccagtatttatttatctgctgtttacttttcaagttgatgaaaaaaaaaacattgtttctattttaaatttcatttgtgtccagaggtgatgtctttagtagccgagaagaaaaggaaggtgctcttaaacatgagagctccccaaaggcactgtcctccctgtgggcgcatccccagcactttagcagggattgtttctatttaatcggtcacttagaataccacttttcttcacagtagtctcatactgggcattaagctctgtcctggaagaatgtacctattactagttggtgaattttggagtgagattcttattggcacacatttgtggccatatgactcagattttctgagacaaacctaactttagataattggtttgttgattagaccatgtgaccctactttttggatttgaaagtataatcccttgctacctgctgcctgttccttattcctgcttcctcagttttcagggtgtaacggttctcttacagcatcctataggtgaaactctcttgcagttggacaagacagcatggaaacaagctggtgtcaatagtacagtagtcaccaggtgccacatttgcattagttaatgcaaagtagatgttttataaaggacaaactttgtgttatgtttctattttcattacattgtataataatgtaagatcattgtatgtcctaatttgcattataaatgtttttttcctacataaaggcataaatatagcaactttgtataaaggtagcttattagattttaatttttcttttataaaagttgtctacagtgggactacaattgccaaattgtatatgagatatgaattttagcccatggttaatttcttttctaaacattccacattcccctaatgaatgatgtgatactgtactatgcacaaattgtgttttaatgctgttccatgtcagcattttaattttg

SEQ ID NO: 2939 - DNA, 1819 bp, Cricetulus griseus
ctctcagtgtggacatgggaagcagtgatgaagacagtgcaccaggcctgggtgatttttcagaattgtcaccttatgaaaggaagagattgaagaacatcaaagagaatgcaaacttttttgcttcccttgagttatctgagtcagctgcaaggctccgtggaatgataaagaagagacagcctcctgaatcaaagagaaagaggcctaagaagaaagaaaatgagatcggatgtcgaaggtccatgcgattgttaaaagtagaccctctgggagtttcattgccagcagctccaacacaaccaatgttagaagaagaagaagaaaatcctttgctaccccctggacccttagaaatgattcctgaaaaccaggatgacagcaatgaactgttcagagcttctttgaagacatgggcagacatgagcaagacaagtaatgagagaaccaaggaagggctatctagcatcaaaagctacaaagccaatttaagtggtatggtcatcagtgaagctactgttcgtaagggtgacaagaggcgcgatctcctctgtagccctccatccatcagaagtgagaaccttggtagcagctggagccaagtctgggcaaatcggactttgggatttggtgaagatggggtatatgtttttatccccacacgccagcctgttagctgtctttacttctcacccaccaatccagcccacctactgtcactgagctatgatggcacattgcgatgtggggatttctccagtgcttgtttttgaagaggtgtacagaaacgaaggaaatagcccctcctcctttgacttcttggcaaaaagatgcttccactctgctagtgggacactgggatggacatttgtcactggtagatagacggacacctggaacttcacatgagtaaattttttaattcatctaaagggaaaaataagaactgttcatgtccatccagtatccaggcagttattttatcactgcaggattaagggatgttcacgtttatgatgtgaggtgcattccaggggaagccagcctatgatctctttggctgaacactccaagagcattgcctctgcatatttttcacctgttacgggtaacagagtggtgaccacatgtgctgactgtaaggagtctttgacagcagctctttatcttcccagattcctctccttactaccatcaggcataacactatcactgggagatggctaacgaggttccaagctgtgtgggaccctaaacaagaagattgcttcatagttggcagtatggcccacccacggcgggtggaagtcttccatgagacgggagagagtgtgcgctctctttctggggactgtcttgtgtctgtgtgttccctcagtgttatgcatcccacccgttatgtcctggctggaggtaactccagcgggaggttacatgtttttatgagtcaagaaagcttctgagctataggatagattcaacaatttgctcaaattgtttatgaaatatgattagacctagggcctgtcacatgttaggcaagtattccaatattgaccaataccccgtctttaaaacttagttgttctgctttgttgcttttgagagtgcgttttactctgtaactcaggcttcccttgagctttagttttcctgcctcacttttccaaattctaggactattggtgtgtactaccatgtctagccagatcttagttttgtaagctaagagtccttttttggggttcttgtatctcagttttccttaaaaaaaaaaaaaaaaaaaaaaaaaaaaaaaaaaaaaaaaaaaaaaaaaaaa

SEQ ID NO: 2940 - DNA, 1818 bp, Cricetulus griseus
agcaagagcaagatgagcttcctttatggactgcagtgtgccttgagaaaccgttttctctctggagtgaattccctggcccactggagacagtggaagccactggccggctgtccacaagtgcgaaggactggagtggtgaatgcaggttggggacctaacacagtcagtcagtgtcattcggtgaccttactacctggaaacttccatttctgtaggactcccagtaacaaaatatcaagatgcttctcaaattcccaaagccaggaaatgggggtgtttacctacaaacgtactgtgtggggtgattcttttccaagacatggagtgaggaaagtgtttgacagtcctgctcttataaccccatgtcctatgagctgcccttcggtgagagctgccctgagtttccacacatctccaccggttcaggcagccccaatcccaatcttgctgctcattctgaaaccagtgcagaagctccttgccatcattgtgggcaggggcataaggaaatggtggcaagcgcttcctcctaacaagaaggagctgtttaaagacagtgtgaagaagaataaatggaagttgctccttggtctgagtgcctctggactgctgttcgtagtgttttatttcactcacctggaagtgagccctgtgaccggaaggagcaaactgttgttactggggaaggaacacttcagacttctgtcagacctggaatacaaagtgtggatggaagaatttaaaaacgacatgctgcctgaaagagacccccggtacctgactgttaaagaagtggtgtatcatctaacacaatgcaatcaggatgtcccagggatctctgagatcaactgggtgattcatgtggttgattccccagatgtaaatgcctttgttcttccaaacggacaagtgtttgttttcactgggcttttgaatagtgtaaccgatactcaccagctctccttccttctgggccatgagattgcacatgcggtcctggggcacgctgcagaaaaggctagtgtggctcacttactggatttccttggtatgatttttctcacaatgatttgggctgtttgtccacgagacagcttggcacttctgggtcagtggttacaatcaaagttgcaggagtatatgtttgatagaccatacagtagaacattggaggcggaagctgacaaaattggactacagcttgctgcaaaggcatgtgtggatgtaagagccagctcagtattttggcagcagatggagttttctgagagtcttcacggttaccctaagttgccagaatggctgtcgacacacccttctcacgggaaccgagccgaacacttggacagactcataccacaggctctcaaacttcgggaggtctgtaattgcccaccgctctctggaccagaccctcggctgctgttcaagcttactgtgaagcgttttcttgaggactcagagaaagaggacctaaacaccaccgttaggaaacagaaaacggcagctctccccattcagaagcaggaacagataccactgacatacatagttgagaaaaaaactacaagttgaaataaaatgtatgagacgtgggctatgaagaatacatccgtactcatcgtttttatgcaactcctaaaaatgatgttttaaatggaaaaaaaagggataattaaggtcaagtcatgtatattacagatggctcaaaatttttttctagattcgtatctttcatgaaatattgatgtgttttaatctattttacaatacttacaatgaggaaaatgtccatagaataaatttatattgtgc

SEQ ID NO: 2941 - DNA, 1818 bp, Cricetulus griseus
ggccggcaggggagccggagtctgcgcgggttccgattcgggcacggactgtggggacaggaagctgtgctgagcaagcccgaggactggtgcttggaaatgagggagccctggggagatgcacaccaggtagaccttctgacccgtcgatgaggcgggccccctgcctgggcctgggcccctggctgggcatgcgcctgtcggtgcgcaaggtgttgctggctgctggctgcacactggccctgttgctggctctgcagcttggacagcaagtgttggagtgccgggcggtgcttggggcaagcgaagcgcacggaggatgcggccagagcaggaggaactggtgatgcttggtgccgaccaggtggagtatcgctacggcaaggccatgccgctcatctttgtgggtggcgtacctcgcagtggcaccaccctcatgcgtgccatgctggatgcgcaccctgaagtacgctgtggggaggagacacgcatcatccctcgtgtgctggccatgcggcaggcctggtcaaagtctggccgggagaagctgcgactggacgaggcaggtgtgacggatgaggtgctggacgctgccatgcaagccttcatcctggaggtgattgccaagcatggcgagccagcacgtgtgctgtgtaacaaggaccccttcacactcaagtcctccgtctacctggcacgcctgttccccaactccaaattcctgctaatggtgcgcgacggcagggcctccgtgcactccatgatcactcgaaaggtcaccattgcaggctttgacctcagtagctaccgagactgtcttactaagtggaacaaggccatcgaggtgatgtatgcacagtgcatggaggtgggcagggacaaatgcctgcctgtgtactatgaacagttggtgctgcacccccgacgctcactcaaacgcatcctggacttcctgggcatcgcctggagtgacacagtcctgcaccacgaggacctcattggcaagcctgggggcgtctccttgtccaagatcgagcggtccacagaccaggtcatcaaacccgtgaacttggaagcactctccaagtggactggccacatccctggggacgtggtgagggacatggcacagattgcccccatgctggctcggcttggctatgacccctatgcaaacccacccaactatgggaaccctgacccgattgtcatcaacaacacacaccgggttttgaaaggagactataaaacgccagccaatctgaaaggatattttcaggtgaaccagaacagtacctccccacacctgggaagttcctgattttcggtctctgcaggactcagatgtctgagttgatgtcatgtgtacacagaagtcggactaacccaagcacattgattgctcttctcagttctgccattggtctgcagaggtggagcctttgtctctgtggaaacggactcaaaacctctgtcttgggatgcttcagagtggacatggaggaggagacgactacagcttcagaaacttaggaattttctatttttttctccttgagaactttttttaaaagaattgaatttgctatcttcactgatggacaagcccttttggtggcctcatttccgggacaagacccgtgaccagttcctctccttgacccggactctgaactcaaaggatttatttaagagtttaatatatgggctgtccttcatcctgtagtcctactcagtttcacagagaaaagaaatcaattatttgaataaagtaaacaggctgctgtctgtgccttacttcaaaaaaaaaaaaaaaaa

SEQ ID NO: 2942 - DNA, 1818 bp, Cricetulus griseus
gcggcgcggcgcagccggccacctgacgggccaccatgtcggacatcggggactggttcaggagcatcccggccatcacgcgctactggtttcgccgccaccgtccgcggtccccttcgatcggcaagctcggcatcatcagcccggcctacttcttcctctggcccgaagccttcctctatcgcttccagatatggaggccattcactgccaccttttatttccccgtgggtccaggaactggatttctttatttggtcaatttatatttcttatatcagtactctgcacggcttgaaacaggagcttttgacgggaggccagcagactatttgttcatgctcctctttaactggatttgcatcgtgattacgggcttagcaatggatatgcagctgctgctgatccccctcatcatgtccgtgctctacgtctgggcccagctcaacagagacgtgattgtgtcgttttggtttggaacacgatttaaggcctgctatttaccttgggttatccttggattcaactatatcattggaggctcggtgatcaacgagctcattgggaacctcgttggacatctgtatttcttcctcatgttcagatacccaatggacttgggaggaagaaacttcctgtccacacctcagtttttgtaccgctggctacccaacaggagaggaggggtgtccgggtttggggtgccccctgctagcatgaggcgagctgctgatgagaatggaggcgggagacacaactggggccagggcgtccgacttggagaccagtgaggagcagcccctgacctgcccaccagccgtgcgaagcagatggcagtgccctcccgctgccaggcccgcttaatggccaaggttttgctgccgtgctcggacctgacccacgctgaatgtagtctttgagtacaagatgagattttttaaccctgaaggaaaatacaagtgttgctcaagtttcatgcttcccattcaagtctttactgctgtgaagaacaaatatcagctgtgcagattttaaaaccgactcatttgctggtggcttctcttcctcctttccgtctgaataatggctggccaagtgggttgttagccaagcccacccaaggcccttctcttctcacacacgtcccgtcatgcatgtatacactttgtgaatcagacccactcccctttttacgggtgggcttctggctgctgagctcagctcatcactaaataaagttttctgaaggctacagtgctttatatagttactttatgctttctttctgaatccaggctgctgggagcagtgtcatggccgctatactttgaatgcagtcaaaagctttctgacactttggttggttccttgcaggaaatgggccctaacagtatgacttgtctttgtctgcgcattaaaactgtgatgggagttggaaagagttcggtttcatgagttggtgtgcctctccatgtttaatttgtatgatacactcttgggtggagagaggctgaacctgaactctccggctctcctgctgacctgaggctgtgataacgtgtgtttgtaaaaaaaacttattttgtacagacagctttcctttttgtaactaatccttttactggtaatattgtaaattaaaatgtgcaacttgaaggctgtctatgttatgtttccgtacctctgctgtgctgcgttatacgatgtaatttatgtgactgtcttcactggatcagttttatgtgatctccagttagtttttgtattagcaggacacagcaagtcctttttgtatatgtattgttgttcatatattag

SEQ ID NO: 2943 - DNA, 1818 bp, Cricetulus griseus
gccgccgcctcccagccgctcgcccaaggaaaagggaacgcgcgcgagctcgggcgtccccgccccagtctttccccggaaccatgaaccctaactgcgcccggtgcggcaagatcgtgtatcccacggagaaggtgaactgtctggataagttctggcacaaagcatgctttcactgcgagacctgcaagatgaccctgaacatgaagaactacaagggctatgagaagaagccctactgcaatgcacactaccccaagcagtccttcaccatggtggctgacactccggaaaacctccgcctcaagcaacagagtgagctgcagagtcaggtgcgctacaaggaagagtttgagaagaacaagggtaaaggcttcagcgtggtggcagacacacccgagctgcagagaatcaagaagacccaggaccagatcagtcctatggtggctacaaggaacctgcagcccctgtctccatacagcgtagtgcccctggtggtggcgggaaacggtaccgcgcagtgtatgactacagtgctgctgacgaggacgaggtctccttccaggatggggacaccatcgtcaatgtgcagcaaatcgatgatggctggatgtatgggaccgtggagcgcactggcgacacagggatgctgccagccaactacgtggaggccatctgagccccgtgctgccccacccactgtcttcaatgcattccatggcatcacgtctgtcctggggcctgacccatccacacttcagtgtctctgtcttttaagatccgccactgcttcttcatccctgcccctccagctccttttgccaacccaagccttgttctgccactgtctcaggctccttcctctggcgggttttcccttggaccaaccgactgattgatttttctctctggatggaacaggctgggcactctggggagggcaggactgttctgagggaggtgggctcacagggctgggctgaaataataggagacccattaaagagatgagagtccaggactccaaagctggcggcaccatctctaaatcggtgctaaactcaggttcctcctttgcacctggggcctgggacagtcgtcacttcattcatctctgtagttttcttgacacctctcctgggtccctgctctagaaatgggggagacgctcacacacccacagagggaagaggatccatctattggtgctgagggccccagctggagtccatattcttttccagaagcatccacccctagaagagcacaggatccccaagcccatggtctcttcctttgtaaaggtctttcagccaatcaaaacccaggaaaaaaaggcaccttggctagactgtgaacttaacttttgtgggccaatcctgcaatgcaagaagccccgtggtgaggggtatgaattctccccgcactgcttcctgttttcccgccctcatgtccctccagggagcattttatttgttaatagctggacacaagacaaaaagtaccaccccacaaagcctgtatttaaaaggaaacagaagtgaccctgtgaaattcgcctctgtctgatattccatctgtgtgtgtggtatgtgtgtgtgtgtgtgtgtctgtgtgtgtgtgtgtctgtgtgtgaagccgcccactcatcttttatatggggttgtcatctttctttggtctgtttggtcccctccctcctggccttgcactcgggatcagttctttctggcctgttatgattctgaacattgacttgaaccacaaagtgaatctttatcctggtgacgcaaataaaagtctaatttttacctgcgg

SEQ ID NO: 2944 - DNA, 1817 bp, Cricetulus griseus
ccgccgggcaagcacagcctttcctgtccacctgccagttctgaggctcctgatggccccactaatgctgctcgcctggacttcaaggtctcaggcttcttcctctttggctccccactgggcctggtgctggctctacgcaaaaccgtgatgcccgcattggaggtggctcagatgcgtccagcctgcgagcagatctacaacctcttccatgccgctgacccctgtgcctcccgcctggagcccctgctggcccccaagttccaggccattgcccccctggctgtaccacgttatcagaagtttcccctaggagatggctcatccctgctgctggctgacactttgcagacccactcgagcctcttcctggaagagctggagatgatggtgccctccacgcccacctcggccagtggtgccttctggaagggcagtgaagcaggcagtgagctgacagcccagccagcagcccccagcaccaccagcgaggtggtgaagatcctggaacgctggtggggaaccaagcggatcgactactcactgtactgccctgaggcactcaccgcctttcccacggtcacactgccccacctcttccacgccagctactgggaatcagccgatgtggtggccttcattctgcgacaggtcattgagaaggagcagccacagctgacagagtgtgaggagccatccatctacagccctgccttccccagggagaagtggcagagaaaacgaacacaagtcaagatccggaatgtcacttccaaccatcgggcaagtgacacagtggtatgtgagggccgtccccaggtgctcaatgggcgcttcatgtatggaccattggatgtggtcacgctcactggagagaaggtggatgtctacgttatgacacagccgctgtcaggaaagtggatccactttggcactgaggtcaccaacagctcaggccgcctcacctttccagtgccctcagagcgtgcgctgggcattggcgtctaccctgtgcgcatggtggtcaggggtgaccacacctatgccgagtgctgtctgactgtggttgcccgaggcacagaagccgtggtcttcagcattgatggctctttcacagccagcgtctctatcatgggcagtgaccccaaggtgcgcgctggcgctgtggatgtggtcaggcactggcaggactcaggctacctgattgtgtatgtaactggccggcctgacatgcagaagcaccgcgtggtagcgtggctgtcacaacacaacttcccccatggtgttgtctccttctgtgatggcctcacccatgacccattaaggcagaaagctatgtttctccagagcctggtacaagaggtagaactgaacatcgtggctggatatgggtccccaaaagatgttgcagtgtatgcagccctgggactgtctccgagccagacctacattgtgggccgtgctgtgcgcaagcttcaggcacagtgccagttcctgtcagatggctatgttgcccacttgggccagttggaggcaggctcccactcccataccccctcaggacctccaagagctgccctggccaagagcagctatgctgtggctgcccctgtggacttcctccgtaagcagagccaactgcttcgctccagaggccccagccaggtggaccgtgatggtccaggaacacctcccaccaccctggctaggggcaagacccgaagtatcagcctcaagttggacagtgaagagtgagcaggctatggctgaacctgggttatttattgatactcaagggtcttcagagactgtgtgga

SEQ ID NO: 2945 - DNA, 1817 bp, Cricetulus griseus
  modified_base (354)..(354): a, c, t, g, unknown or other
gtgtcaccgaccctcagccctctgaagtgcccgctgaccgggcagccaccaaggcccctggaatggagtccagtggctcagtggccagccacggggagctggccccgggggccttcctgaacagggattcagagtgtaaggaagagctactgaaagactcaagtctggagcatggtggtgtaccccctgacagcaaagacaagacacctggcagacatcgccgcttcacaggtgactcgggcattgaggtgtgtgtgtgcaaccggggccaccacgatgatggtctcaaagagttcaatacactcatagatgatgccctggatgggcccctggacttctgtgacagttgtcatntacgggcctcctgttgacgaagaggaagggctctgcctgtcatctgaagagcaggctcgagagctgggacacccccaccctgccacggccacctgcctgcctgctgctgaacaccatcaatgaacaggacccgccaaactcacagcgcagcagctcccccagctagaacaggtcctgcctgtaaccgagagcttgacagacagccagggtaggagacacccacaagagaagcattaagtgacttcagaagtggcacaaccactttggcttttatttgtttccctcctgtcccgctcttcccacatctccaggtacaagtttggggtgtggatgcctcctcccccacaaaagcacagtgttgtagaagacggagactctggttctgggactcgcctgtgttcctgtcctcaggctctagaggcccagccgtgctttgggaaggaaaaaggagcatagaagcagccgaagtgaacattccccacccagccccgttcatactaagagattggttctcttcctgctcttgaacgatgatacatagactgggtactgccgttctagtgagaaaaggaaagaggaagaaaagaaagtccaaatgtaaacacacaaacaaatctgaggctgggaggtaatgtgtgtctgcgtttggatgccacaaaccaaaatccttgtcgaacaaaagtgaagtctacacagtgatgttggatggtgtgtgtgtgtgtgtgtgtgtgtgtgtgtgtgtgtgtgtgtgtgtgtgtgtgtgtggtgtgtgtgtgtgtgtgagtgtgtgagtgtgtgtgtccccaagccccgtgttcctgtgaagatactttgaatgaccattctgctcacacgttaaccccatgtttggagcacatgtggccctctcaaggtaatttattttacgcatttactgtttaccgaacaaatgtctgactgtgcccgggtgtagttatctgatgaggtggtgggaccctctcaagtttctttcgtctggcaggatggggtgctggcctgagtgcaggctggcttcactgatgcccccatcgagatggccgagccacactctggcccctgctgcttcaggccacactgacgctcagaaagggcacaggaaatgggagttaggggccagggagacttggctgagttgggtttccaggcaaatgggaggagggggtaggcagagggcttggtgctacagtcagctttgcagccgctaacacattcctgtgtgaggcacgtcagcgtccgtcagttattgtgaatatgtgtatcttaagcaataagagtccgctgctcagtgtccctgggcaggctgggtgacgagagtggctctaaccactgtgagatgccctaataaatcagtcccaatgttctaaaaaaaaaaaaaaaaaaaaaaaaaaaaaaaaaaaaaaaaaaaaaaaaaaaaaaaaaaaaaaaaaaaaaaaaaaaaaaaaaaa

SEQ ID NO: 2946 - DNA, 1817 bp, Cricetulus griseus
cacatcagctttggaatccagctgctccctccggaaggggccctctctgtggatggcactcatcgtcctgcagctgacctttgggattggatatgtcaccctgctcccagatccagtccatctactcacagctgattattttgaatatcttggttcctgtaatcggcttaatcacagagctgccattacacatgagagagactttagttttcacctcgtctttgattctcatattaaatacagtgcttgtcttggcagtgaaactgaagtggttttattactccacacggtatgtttacctgttagtgaggcatatgtaccggatttatggattacagttactaatggaggacacatggaagaggattcgtttcccggacatccttcgggtcttctggctaacaaggatcacagctcaggctacagtgttaatgtacattttaaggatggcaaatgaaaatgagtccttgtttatttcttgggatgatttctgggacctcatttgcaatctgatcattagtgggtgtgactccacactgactgttctaggcatgagcgctgtcatttcttcaatagcccattacttgggccttggaatattggccttcattggatcaactgaagaagacgacaggcggcttggctttgtcgcacctgtgttgtttttcattttggctcttcagactggcttaagtgggctgaggcctgaagagaggcttattcgcttaagtagaaacatgtgccttttattaactgcagtcctgcatttcatccacgggatgacagaccccgtgctaatgtctctcagtgcctcccacgtgtcctccttccatagacatttccctgtgctgtttgtctctgcttgcctgttcattcttcctgttttactcagttatgtcctctggcatcactatgcactaaatacatggttgtttgcagtgacagccttctgtgtggaactctgcttgaaggtgatagtgtctgtcactgtgtacgcgctcttcatgattgacggctactacaatgtcctctgggagaagctggatgattatgtctactttgttcgctccacagggaacattatcgaatttatctttggagtcataatgtttgggaatggggcctataccatgatgtttgagtcgggaagtaaaatccgggcttgtatgatgtgcctacatgcatattttaacatctacttacaagtaaaaaatggctggaagacattcatgaatcgtagaactgctgttaagaaaatcaattcacttcctgaaataaaagggagccacttgcaagaaataggcgacgtgtgtgcgatctgctatcatgagtttacaacatctgcccggatgacaccgtgcaaccattacttccacgcactctgccttcggaaatggctgtacattcaagacacttgtcccatgtgccatcagaaagtgtacatcgaagacgatatcaaggataattcaaatatttctaacaacaatgggtttattgcacccaatgaaaatcagaatccagaggaagctttaagagaagacgctgctggacccgaccaagaactgaacgagggtgacagcacagacggcggtgagggtgctcggagcgagagagacggaggcgctcagcacacgggcgcagcagcagcagcatttcatggtgaccccgattaaagcggcatttactaatcattgaggtatctgtttaaaattcagttcacccaaaatggagggatacgcttcacgccagtgtgtaaccaagcacaaacgcagtctggatgttgaaactgtgaatgattttccgttactgtgagtgct

SEQ ID NO: 2947 - DNA, 1817 bp, Cricetulus griseus
agacgtttgtggcggtggcagcgggatccggtcgccgcgccaccatggcggtgcgacaggcgctgggccgaggcctgcaactgggtcgggcactgctgctgcgcttcgcggccaagcccggcccgatctcgggcttgggaaaggcccggccccgcggcagcctggggccgcggagagcgcccgggccgggcggcgggccccagagcacagccgggcccgctcgggctcccccttcccgatcgctaccgcttcttccgccagtcggtggctgggctggcggcgcggatccagcgacaattcgtggtgcgggcccggggcggggcgggcccttgcggccgagcagccttcctggccttcgggctggggctggggctgatcgaggagaagcaggcggagggccggcgggccgcctcggcctgtcaggagatccaggcaatttttacacagaagaacaagctggtgtctgacccactggacacgaggcactggcaaggcttccgtctggaggattacctgataggacagtccattggcaagggctgcagcgctgctgtgtatgaagccaccatgcccactttgccccagcacctagagaaggccaagtgtgttagccttctaaaaaaaggcccggatgtcctcccaaagggagcagatagggagcaggccccgagagccccagcctttccctttgccatcaagatgatgtggaatatctcggcaggttcctccagtgaagccatcttaagcagaatgagccaggagctggtcccagcaagccgggtggccttggatggagagtatggaggcgttacttacagaagacccagaggcggtcccaagcagcttgccccacaccccaacatcatccgggttttccgcgccttcacttcatctgtgcccctgctgcccggggccctggctgactatcctgatgtgctgccacccagcttccacccagaaggcctgggccacagtcgcacactgttcctcgtcatgaagaactacccctgtaccctgcgtcagtaccttcaggagcacactcccagtccccgcctggctaccatgatgaccttgcagttactggagggcgtggaccacctggttcagcagggcattgcccatcgggacctcaaatctgacaacatactcgtggaactggactcagacagctgtccctggctggtgatctcggatttcggctgctgcctggctgacgagcacatcggcctgcagttgcctttcactagctggtatgtggacctcggtggcaacggttccctgatggcccctgaggtgtccacagcccatcctggccccaggacagtagttgacttcagcaaggctgacacctgggctgtgggagccatcgcctatgaaatctttggacttgccaatcccttctatggccaaggcagagcccaccttgagagccgaagctaccaggaagctcagctgcccgagatgcccaagtcagtgcctccagatgcaagacagctggtgaggtcactgctccagcgagaggccagcaagagaccttctgcacgtgtggctgcaaacgtgctgcacttaagcctctggggcgagcatcttctagccctgaagaatctgaaactggacaagatgattggctggctcctccagcaatccgcagccactctgctggctgacaggctgatggagaagagcagtgtggaaacaaagctgcagatgctgttcctggctaacctggagtgggaggcgctctgccaggcagccctcctcctccgctcctggagggcagtcccgtgatgggtctgtgctgctgttactaaaagact

SEQ ID NO: 2948 - DNA, 1816 bp, Cricetulus griseus
gtcgagcgagtggaaagatttcgaggagaaagtgcgcgggagcggggcgggggcgcgcaagtgcgcaggcgcggtggtgggacgggctgcgagcggaatctcagcgctcctcagtctctgccgcatcctcctgcctgtcgccatggccgcctacaagctagtgctgatccggcacggcgagagcgcctggaacctggagaaccgcttcagcggctggtacgacgccgatctgagcccggcgggccacgaggaggcgaagcgtggcggacaggcgttgcgagatgctggctatgaattcgacatctgcttcacctccgtgcagaagagagcaatccggaccctctggacagtcttggatgccattgaccagatgtggctgccagtggtcaggacctggcgcctcaatgagcgacactatgggggtctgactggtctcaataaagccgaaactgctgctaagcatggtgaggcgcaggtaaagatctggaggcgatcttacgatgtcccaccacctccaatggagcctgatcatcccttctacagcaacatcagtaaggatcgcaggtatgcagaccttactgaggaccagctaccctcctgcgagagcctcaaggacactattgccagagcactgcctttctggaatgaagaaattgttccccagatcaaggaggggaagagagtcctgattgcagcccatggcaacagccttcggggcatcgtcaagcatctggaggggctctcagaagaggccatcatggagctgaacctgccaactggcattcccattgtctatgaattggacaagaacttgaagcctgtcaaacccatgcagttcctgggagatgaagagaccgtgcggaaagccatggaagcggtggctgctcagggcaaggtcaagaagtgaaggcgagcaggcagactcgtaccccagtgccctccccctgcctgtttatgcctcctgcacccttccccaacgcctgccacactgactacatctttaggatcttaagtttaagttgtagttgcagatggggacctgtggctcccattttcatttagtatttaatcccctgcacccactcccttcatagaacctagtcagaaaacacctctggggtgcaggttcttggtccacatccagggacggctcctcttaacaggagagttgagaggtagaaattagttttccttagtgctgtgtttactaaggctctgctttaggaagaggtcagggaggaaccatgcagtggtataacccatgagaagctgcagccaagttttgtccctggcgcctgtcctacactttccacagttagctaactaggggctgtagtcatttcagtggaaggtgaaagtaacttacatggtgatgtaaacatactaccttcctctctgaccctaaaggccctaaaggccccggaaggttgggaccaatcctgtcaagtctgtgttacatttacttttacaaaaaaaggtacatgtgtatttatcagcagaaaaaagcccctctgctgtttctagtggtgattgaaatagttccatgtggtcaccagacaataagccattcctcataccagatgggatgaactccttgtcctctggctgtgttaggtcacttctgccttgctttgcagaggtgcagtgccccttgatcgggtccaggttttgtctttcactgaatcatgttccagctgcttggccctaccatgtgggttcagaactcgttttgggcataactactaaatctctttccagatcagtataataaaggagtgatgtgcaataataaaaaaaaaaaaaaaaaaaaaaaaaa

SEQ ID NO: 2949 - DNA, 1816 bp, Cricetulus griseus
tcagaagcagaccgagcagcttaaggatgctgagttgaagaacacagaactgcaggagagagtggctgagctggagactttggtggaggacacccaggcaacctgcagagagaaggaggttcagctggaaagcctgagacaaaaagaagcagaattcttctctgctagacatagcttgcaagataaacagtctgtggaggacaccaatggagaaggtctcgaagtggaaacagaatcccagcagaaggaatgcgattccctccgaaagatcgtggagcggcaacagctgaagatagagcagctgcactctcaagtccagagcctaaagcaagaactggctcaagaagaaggaataagccaggcttttgaaagaggaggctcagcggagggagaccgccctgcagcagatgcgcacagctgtgaaggagctctcagtgcaaaatcaggacctgattgagaagaatctgacgctgcaagagcacttgcgccaggcccaaccagggtccacatcttcaccagacacagcccaactggcatatgagctgcaccaggaattggccatttgccttcaagatctgcaagctgtctgcagcattgtgacccagagggcccagggccacaaccctaacctctctctgctcctaggcattcattccacccagcacccagggactcagctagatttgcagaagccagatgtggtcagaagaaaactagaagaggttcaacagctgcgtcacgatattgaagacttaaggaccagcctatcagacagatatgcccaggacatgggagaaaactgtgccacacagtgaggagggccagagaggacctggctgttactagcctcaccagaggttcctcccctgacaatcctgccttctgctgcagcacccagaggggagaccctgtatctggggccagggttgatgtgagaagcctgcctgttgtgctatacactggctttgccttattactgggttatgttttacctgttttcttactctcaaaggctgagttactaattaacctttttgtagatggaactgataaggtcctcacaaactgttcccagccctaacctgacatcagaagcaaagaggctgctcaactccccacttcatcctccatgaaggcccatgttcattcctactctataccttggtcctactgatgctctattaccaaaggcctaaaggttaagtaggagtaacaccttttaaaaaactcaggccccgtgtaccagccttcctgggaactcagctggctttctgggttttctcaggtaacctgcttcctcagggctgttcccacagaggcctcagggttatctcccccttagcaaagtccccactaggattgctggcttggggcctacagcagggctcctcagcctgcctgctgaagtgttcagtgtttcctggtggtttgtgtttcgctagggcctttggacccttggctttatgggttttcttgcctcctgatttagggatggtcttagttttatctggttgttgggccagtcctcaacctcctttggtttggagctaggggccctgtatgtatgaggagttatgggtggtttacctttcagagcagccacacctggctgcctatcccctcagcctctgggatcctgcctcctaaaaccagagagctgcctgtttggagtccaccctatgtcactgggagcccagcctccatgctcacgggttatttttttcttcataaagtttataaagttatttatatgaatctttgttatgtcgactggtttgtattgcctattttgattacagaataaaacattttaaca

SEQ ID NO: 2950 - DNA, 1816 bp, Cricetulus griseus
ggaacgggaggcggagcagagccgactgggagcgaccgagcgggccaccgctgccgccatgaaccccgaatatgactacctgttcaagctgcttttgattggtgactcgggtgtgggcaagtcgtgcctgctcctgcggtttgctgatgacacatacacagagagctacatcagcactatcggggtggacttcaagattcgaaccattgaactggatggcaaaaccatcaaacttcagatttgggacacagctggtcaggaacggttccggaccatcacttccagctactaccggggggctcatggcatcatcgtggtgtacgacgtcactgaccaggagtcctacgctaatgtgaaacagtggctacaagagatagatcgctacgccagtgagaacgtcaataaactcctggtaggcaacaagagtgatctcaccaccaagaaggtcgtggacaacaccacagccaaggaatttgcagactctctgggtgtccccttcctggagacgagtgccaagaacgccaccaacgttgagcaggcattcatgacaatggctgcagagatcaaaaagcggatggggccaggagcagcttctgggggtgaacggcccaacctgaagatcgacagcacccctgtgaagccagctagtggtggctgttgctaggaagggcacttggggaagggacaccttctccagatgatgcccctggaggggcaggaagtgcctccctctcctagggcatttgagtctgtggctttggggtgtcctgggctccccatcttcctctggcccatctgccttctgctctgagtgctgtcctgtcagggcccccttggaggacatgcagaacctgtggcaggggtggtcacaggaactgctctgctgctgcctctaggtaccttgaaaagatgcccaccatgcacctttctttggaatgagggctcagctgtctgtcactcacccccatgtatgctgcactgggcttctccttccttccttcccagtagctgagggcctccctgcctctgcttccctggctgcaggcagtggccaggggatccagggtctcagatccagggtcctgcttcggacctcaggacaggcaaggggctgcaaaaagccaacagcccactttttcctcacccctgcctccctccaccgctcccacactcagcttgagccgtccagctactgttgggtcttgagcacaactagggtaggtgggcggatggctgtgctgggcctgtgtctcaagcccagagggagcctgctcctgcctccccctgccctgccagagccaggcctatgtgctgcctgcccaccaagcccctttgtccctgagaaaggcggaggtggaaggcccaccgtgccaatggccgggcaccagccttaacccttactctgccagcaccactttcttcccctgaggcagcacatctggcttctaatccctccgttcctcagagcctgagggggccagacctacttctctggggaatgtaggggccacttggggttgtgggactctctccccttccccactcagaatcccgccccaccctctggcacagcttcctgcagaaaacctttggtgattacctgagaagccatgtcccttttgtgctgtctccccctcccagtgtgtattttaaaaatcccctgggctgcccctctgggagggagcctcttctcccaggttcccctttggtgtcatgtcaggcattttgcaaggaaaagccacatggggaaagatggaaaaggatgaaaaaaataaatttccactggcccttggataagccgagggtttttgcaagg

SEQ ID NO: 2951 - DNA, 1816 bp, Cricetulus griseus
gacttttaggccttttaaaaacatttccatcatgtctgacactcaagaagctatcagccaatcctggatatgaacctttatgagaacgaggagtctgtgcctatgatagaaggtggcctaagaagtgagtctgagcatctccaagtcactattggagccaccgtacctactggctttgagcaaacagctgcagatgaagtgagagagaaactgcagtcgtcatgcagaatcaaggcaaagaccggggcaagatatattttgatatttcagtggaaagtctggctcaggttcattgtctgagatcagttgataacttgtttgtggttgttcaggagtttaaagattaccagttcaaaaatacaaaggaagaagttctaaaggactttgaggaattggctggaaagctcccatggtctgaccctttaaaagtctggcaaattaacaccagtttcaagaagaagaaagcaaaacgcagaaaggcaaatcagagtgcaggtaaagagaaggacaactgtggacaaggagacaaagcagaagagaaaagcagtaagacgcttgtcagcaacacttcagaatcacggatcttggactattatgaaaatccagccatcaaagaagaagtatcaactttagtgggggatgtcttggcatgttgcagagatgagactggtgaaagtctgagagaagaaactgaaccacaagtacaaaagtttagagtcacctgcaacagagcaggagagaaacattgctttacctcaaatgaggctgccagggattttgggggttctgttcaagagtattttaagtggaaggctgatatgaccaactttgatgtagaggttctcttgaacatccatgataatgaagtcattgttggcattgcattgacagaggagagtctccatcgcagaaatattacacattttggacctacaactcttaggtcaactcttgcctatgggatgctcaggctctgtgaacctgaacctactgatgtaatagtggatccaatgtgtggaacaggggcaataccaatagagggggctactgagtggtctcactgttatcatattgctggggacaacaaccccctggcagtgaacagagcagcaaacaacatcctatctctattgactaagagccagattaaagatggaaaaacatcctgggggttgcctattgatgctgttcagtgggatatctgcaacctcccactgagaactgcttctgtggatattattgtaacagatatgccttttggaaaaaggatgggctccaagaagagaaactggaatctatatccagcctcccttcgggaaatgggccgtgtctgtagaccagggacgggcagagctgtactgcttactcaggacaagaaatgttttaccaaggcattatctggaatgggacatgtgtggcgaaaagtccatacagtctgggtgaacatcgggggccttcatgctgcagtttatcttctaaaacgcacgtctcaagcctttgttcatccttcagaacaagatggaggaagacaccctccttggtaaagcaaagaatgaaaagaagtatagtatttgtagatgctaacactggacatgtcagcataaagaacttgcttttgggaggaaaatagcagaaaagtaacttagtattgcagtctaccctgctaactactccagcatatgttattgttagcaaggtgacttatggtatttcctcagaagcttcattgcttggcttctaggtttgggaacactacaggccacctaaataaaatactttcccttttaaaaaaaaaaaaaaaaaaaaaaaaaaaaaa

SEQ ID NO: 2952 - DNA, 1815 bp, Cricetulus griseus
aaggctttctcttccccttggaactacagccggaccagaccggagccagagccctcagagaccagtgagtagccgggcccgggcctcccgtcggggccggactgggacgaggccccggggaggcccctaggccaccttcctcacttttctcaagacgccgacgtccgccgggaagatgcaacgcgctctgcccggggcccgccagcatctgggggccatcgtggccagcgccagcgtggtggtgaaggcgctgtgcgccgtggtactgttcctctatctcctctccttcgccgtggacacgggctgcctggcggtcaccccgggttacctttttccacccaacttctggatctggaccctggccacccatggactgatggaacagcacgtgtgggacgtggccatcagtctggccacagttgtggtggccgggcgattactggagcccctctggggagccttggagctgctcatcttcttctcggtggtcaatgtgtccgtggggcttctgggggccttcgcctacctcgtcacctacatggcttccttcaacttggtctacctgttcactattcgtatccatggcgctctggggttcctaggcggtgtcctggtagcactcaagcaaactatgggggattgcgtggttctgcgagtgccccaggtccgcgtcagcgttgttcccatgctgttgctggcattgctgctcctgctccgcttggccacgctgctccagagcccagcactggcgtcctacggctttggactgctctccagttgggtgtatcttcgcttctatcagcgccatagccggggccgaggggacatggctgaccattttgcttttgccaccttcttccctgagatcctgcagcctgtggtggggctgctagcgaacttggtacacggcctcctggtgaaagtaaaggtctgtcagaagacggtgaagcgctatgatgtaggagcaccgtccgccatcaccatcagcctcccaggcacagacccgcaagacgcagagcggagaaggcaactggccctaaaggctctcaatgaacggctgaagagagtagaggatcagtctgtctggcccagcatggatgatgatgaagaggaagctggggcaaaaaaggacagtcctctgccctcagaagaagcttccactcctccagggaaggggactaccccagaatccagtctcattacctttgaggcagctcccccaaaactgtaactccaaacctgagtgtagctcctctactcccatgccctccccgatacatctcagctactccagggcactgactgctctgaggaggggaagagggcctgctgggggtttctttggccttctgctgtttcttgacaacactacatgggacccttgctacctggttgcaactccagacaaccacagtgccaggtatggggtctctcagcatcggccagtccagacccccatccgtggtaagactgtacctcagcaggcacagttcctcaccaaggaagtggctgcagggacactggtggcactgctcctgggccagcccccacatctgaaactggttgccaacagacctcagccaaggcaaggatttatatttgccaaaaatgttctggggctcagctaggatgggcctgcacatgtctgcccaccccagactgcgtccatgcaggctttcttgtgcccttctgctgtggcggtgactgtgtctagccagagacaccacagctcccaggtattttctacaggaccagctgagtgggcagccaagcccaaactcacagtatcaataaatcggttctttaaggtgtggc

SEQ ID NO: 2953 - DNA, 1814 bp, Cricetulus griseus
  modified_base (381)..(381): a, c, t, g, unknown or other
cagcccggagggaaatcatctcagcagctgagcacttctccatgataagagcctcacgcaacaagtctggcgccgcctttggtgtggcccctgctctgccgggccaggtgaccatccgtgtacgagtgccctaccgtgtggtgggactggtggtgggcccccaagggagcgaccatcaaacgcattcagcagcagaccaacacatacatcatcactcccagccgggaccgcgacccggtttttgagatcacgggcgccccgggcaacgtggaacgtgcgcgggaagagatcgagacgcacatcgcagtgcgcaccggcaagatcctcgaatataacagcgacggcgacttcctggctggcagccccgagctgcgctggacnggcccgctacctcagatgcctggtcggtgctcttttctgcctcctcctcctcctcctcttcagccaaggcactgggggcgggagggctgcggagcccaggcagcgggcgggactgtatggtgtgctttgagagcgaagtgacagcagccctggtgccctgtggacacaacctttttctgcatggagtgtgcagtacgcatctgcgagaggacggatccagagtgtcctgtctgccacatcaccgccacgcaagccatccgaatattttcctaagctccctgtccctggtctcctgggcccactgcccagggtgccaccctggacatttagggccttttggaaaatcagtgactacagggcaaggtgcttagaaatattcactcgctggggtggggaagggaggcatgagtggctgtgggggcagccactttcagaacctctggttacccttttgggagggggccagactgtaagttttactagagttacaactctgatacctcaacacacccttaaatctggaagcagctaagagaagcttttgtttagcctgaagccaccatcaggacatcctgttctttcccttctccccattcttgtgtcatttttctccttcctctgtggagaggtaagaactccttacccacaaaggcaaaagactgttacactaggggctccacagatccaaatcccacccttgctcatttattaccgtataaatgtagcaaagaacctgggctaatatgaaaaaaagactttttattaggtaatttattatatgaaaaggatattttattttatgataaagtgatccttaaaaaaaactttagaaggtttagaatatatgtagggagagaagaaaaaatacatttgtattcagagttaaatcttaaaaagtttttaatatatgttcgggtttatgttctttttttccccccacttttttttgggagaaatgtcatttgcttttcttgggggagcatcctgggatggatggatggagagggggatggagggagttggtcccttctggggcccccaccagtagattggatttcattccctgggctccccttcaccttccctaggaaaactggaagcctggcttttgcatgtgagaaatacacatttttaagcacttgccttccatcagcccccactggcaatccaatcaggatggggagaggcctcgtggctttagtttgagcaagcattgcaccagtgattgacataccacttcgtgaccctagagcccaaacccatctctctccccagtttgctcttctcaccccatctagagactagaggtacccctgcccctttttgccctaggaccctcgatagtttgagatggtagcatctggaaaagggagaatttccccttgcctgtctgagggtgaatgcttggagggtcaaggtgggtgagtggagac

SEQ ID NO: 2954 - DNA, 1814 bp, Cricetulus griseus
  modified_base (1801)..(1801): a, c, t, g, unknown or other
agcagcgaggaccccagccccacccggtggccacctggagggctacccatgcccgcacttggcttatggcgaacctgagagctttggtgacaacctgtatgtgtgcatcccctgtggcaaaggcttccccagctcggaacagctgaatgctcacgtggaggctcacgtggaggaagaggaggctctgtatggcagggcagaggctgctgaggtagctgccggggccgccggcctcgggcccccctttggtagtggtggggacaagattgctggggccccaggtggcctaggagagctgctgcggccttaccgctgcgcgtcctgcgacaagagctacaaggacccggccacgctgaggcaacatgagaagacgcactggctgacacgtccctatccgtgcaccatctgtgggaagaagttcacgcagcgtggaaccatgacacgccatatgcgcagccacttaggcctgaagccctttgcgtgcgatgcgtgcggcatgcgcttcacccgccagtaccgcctcacggagcacatgcgcattccactcgggagagaagccctacgagtgccaggtgtgcggtggcaagtttgctcaacagcgcaacctcatcagccacatgaagatgcacgcagtaggtggcgcggccggcgcagctggggcgctggctggcctcgggggactacctggcgttgccggccccgacggcaagggcaagctcgatttcccggagggtgtctttgctgtggcccgcctcacagctgaacagttgagcctgaagcaacaggacaaggcagctgcggcggagctgctggcgcaaaccacgcacttcctgcacgaccccaaggtggcgctcgagagcctctacccgctggccaaattcactgccgagctgggactcagcccggataaggcggcagaggtgctgagccagggcgcgcacctggccgcggggccggacggccggaccatcgaccgtttctctccaacctaaagcgccccctcgcaggtgcgcccggctacccggcggcccggggacaactggtagcagcggcaacgccgcagtggtggccccacctttctatgcctcacctggcctcactcgctttgtgccttaatccgggggagccggtggggaaaaccccggacggggtgggataggggaagggagatttatattttttgatatcagctttgaccaaaggagaaccccgcctctccctgtggttagtcggccccctcctccggctccgtgctgctcttggggggaggggtgtcactattcagacgctcccagccctacctccggcccttgcgaccacacccattctcactgtgaatctccccgctggggtcggagcattgggcacagttggggagaggggaggggactgagccggccggagggcctccccgcccccgctccttcccagcccgggactgataatgtgaagttcctcattttgcacaagtggcactagccccagggccaacccttcccttcctgatccaccagggtgggcagatctggagccagggataacggccctggcccacctgactccccttctgagatccctctcctttccctggggccccatcgtatttattgcatgcgccccgggtggcccctatcctgagcctagctaagctgggctggaacgaggtctccttccttggttcccgttctgtccctttgtatattccctactctgtacacaggctcttccagagccgcttccattttcttatactcaaaccaaaacaagcaaataaaagacaagtaaccaacgaaaaaaaaanaaaaaaaaaaaaa

SEQ ID NO: 2955 - DNA, 1814 bp, Cricetulus griseus
ccgggacccagacttagccgccatgcagagacgtcaggggggcctggccctggggactcggggccctctgaccctcggctggcccgtgccctacccacctccaaaactgaaggcagccttcattccagccctgcaggccccagcagttcgaaaggacagacccctgcagaagaagaggaaggggagcgagccttgcgtgagaaggcagtgaacattcccctggagcccctgcctgggcacccactgcgggaccctcgctctcagctgcaacagttcagccacatcaagaaggatgtgacgctgagcaagccaagttttgcccgcactgttctctggaaccctgaggacctgatccccctgcccatccccaagcaggacgtcgcccccagtcgcctgctgctctgcacgtccctacctgctggcggcctgggccagggcagcagcagtgggcagagcagtgtgctgagtggcatcagcttgtatgacccaaggactcccaatgcaggcggcaaaagctgcaggagccagcctctgacaccacgagtgctcagcccaagggtcccgagggcaatggcaagagctcagcctctttgagtcataaattgtatctaaccatcttgggttctggtcagtgctgcaggctcctgggctcccacgagttgcccagtgagcaacttgtaccctgagttgggcagtggcaagtacccccagcctggggcgacccttgaactaagggaagttgtgagtgtctggaatggcactaaaagccactcaccctgtgctgctgggagatgacggagccatgtcatgtggaaggaagctggtgcaggagttggtagagctgtcctgaaagtgacgccctctagccagccctccaggagactctggttgagacacctgcaggcagtaggcccaggaggggtggggcagcccctcaaaaacattctccctcagtattacctgtccagtgccactggcctgaccctcgagacagctcaaggatccgtggtgtggccacctgccagactcccgaagagggaggccaagggtggccctggcaaagtgtgtctgctcgctgctttcatgcgccttagctgtgttatatgtagagtaccagatagtgtttgcttgtccctcccaagctgacagaagcagggcggcagcggcctggtgcggtgttggattactgggtgcttcgcaaaagggggcccgaggaaactgcaggagtcgagctgcacccctttgaaaattctcttgtgaaagccaggcttggcagtgtggacctgtcatcccagcactcaggagacagaggcaggaggatcacgagttcaaagccagcctggtctacattagaaaaagaactttttcttttgttaaagaaaaattaaatgaatttttaaatctgaaatccgtgggtgagatggaatctggagccctcctcttgaaatagttagctgaagaccctcatgggataaggaactccgtgtgaatccccactcgccatcaggccacagttttaaagaaaaattgttctctaaccaggattgtaacaaaagtgtaaatagtgtttctgagttgaaagtcgatggtgcaaatatgtatataacgtactgtatttttacatgatcgtcgcatggctctcccacccccttttgtactcagtatctgtcttccaaaaacctcacctgccttctctcatgtggtctcttaatccagtaattgtattactgccattaaaggatgcagttattttaaacagaaaaaaaaaaaaaaaaaaaaaaaaaaaaaaaaaaaaaaaaaaaaaaaaaaaaaaa

SEQ ID NO: 2956 - DNA, 1814 bp, Cricetulus griseus
tgacaaggtagcagaagctgcaatacaaatttttagaaatacaggccacaaaatagaaacagaccttccccagataagatcaaccttaattcccattttacatcagaaagcaaagaggggtactccacaccaagcaaaacaggctgtgcactgtatccatgccattttctcaaataaggaagtccagcttgcacagatttttgagccactcagtaaggagtctgaatgctgatgtaccagagcaacttataactccgttagtttcacttggccacatttccatgttagcaccagatcagtttgcttctccaatcgaaatctgtggtggcaaacttttattgttaaagatcttctgatgaatgacaggtcaactctgccaactcaactcttcggttattatcagcgatgttggttagtgagggtgacctgacagagcagaagaggatcagtaaatctgatatgtctcgcttgcgattagctgctggtagtgccataatgaagcttgctcaggaaccttgctaccacgaaattattaccccagaacagtttcagctctgtgcacttgttattaatgatgagtgctaccaagtaaggcaaatatttgcccagaagcttcataaggcacttgtgaagttactgctcccattggagtatatggcaatctttgccttgtgtgccaaagatcctgtgaaggaaagaagagcacacgcacgccagtgtttgctgaagaacatcagcatacgcagggagtacattaaacagaaccctatggctactgagaaattattgtcactgctgcctgagtatgtggtcccatacatgattcacctgctagcccatgatcctgatttcacaaggtcacaagatgttgatcaacttcgtgatataaaagagtgcctgtggtttatgcttgaagtcttaatgacaaagaatgaaaacaacagccatgcctttatgaagaaaatggcagagaacatcaaactgaccagagatgcccagtctccagatgaatctaagacgaatgagaaactgtatacagtctgtgatgtggctctgtgtgttataaatagtaaaagtgctatgtgcaatgcagactcccctaaggacccggtcctcccaacaaagttcttcacacaacctgaaaaggacttctgtaatgacaaaagctacatttcagaagagacaagagtgcttctcttaacaggaaagccaaagcctactggagtgctaggtacagttaacaagcctttatcggcaacaggaaggaagccttatgttagaagcgctggcgcagagaccggaagtaatgttaacaccaattcagagttgagtccttcagccggaagtcgttcaagggaacagagttcagaggcatcagaaactggagttagtgaaaatgaggagaatcctgtgagaataatttctgtcacacctgtaaagaatattgatactgtaaagaataaggaaattaattctgatcagcccacccaaggcaacatcagcactgaccgaggaaagaaaaggattgcaacagcagctggtactgagaatatccaacagaaagcagatgagaaagttgatgagtcgggacctcctgccccttccaaacctaggagaggacgacgccccaaatctgaatctcagggcaatgtaaccaaaaatgatgatctaaataaacccactagcaaaggaaggaagagagctgcaggcagccaggagagccctggaagtcaaggaatgccaaagcgcccaagcaacaagacggagccaaaaaggcagcaccagcagagagacaaattgacttacaaaggtaa

SEQ ID NO: 2957 - DNA, 1814 bp, Cricetulus griseus
tctcattttctactcggtttacagatccagactccttgaatttccctcggatgaccttcccactgagtttcaacgagtcaatgttaactccaccaaaatttatccttgaagccaagactaaagcggagtaaacggcagcttcttcgacttccccgtaatgtagaggaggaaactaaatacatcgaactgatgattgtgaatgatcatatcatgtttaaaaagcatcggctttccgttgtacatacaaatacctatgcaaagtctgtggtgaacatggcagatatgatctataaagaccaacttaagactaggatagtgttggttgccatggaaacctgggctgctgacaacaaattcgccatttctgagaacccactgatcaccctgcgtgagttcatgaaatacaggagggattttatcaaagagaagagtgacgcggtccatcttttctcgggaagtcaatttgagagtagccggagcggcgcagcttacattggtgggatttgctcgctgctgagaggaggaggcgtgaatgaatttggaaaaaccgatttgatggcagttacacttgctcagtcgttagcccacaacattggtataatctctgacaagaggaaattagcaagtggcgagtgcaaatgtgaggatacgtggtcgggatgtgtgatgggagacaccggctattatctccccaaaaagttcactcagtgcaatattgaggagtatcatgacttcctgaatagtggtggtggtgcctgcctgttcaacaagccttctaagcttctcgatcctcccgagtgtggcaatggcttcattgaaactggagaagagtgtgattgtggcactactgcagaatgcgcccttgaaggagccgagtgttgtaagaagtgcaccttgactcaggactctcagtgcagtgatggcctctgttgtaagaagtgcaagtttcagcctctggggactgtgtgccgagaggcagtcaacgattgtgatattcgtgaaatctgttcaggaaattcaagccagtgtgcccctaatgtgcataaaatggatggatattcctgtgatggtactcagggaatttgctttggaggaaggtgtaaaaccagagacagacaatgcaaatacatctggggacaaaaggtaacagcatctgacaaatactgctacgagaagctgaacatcgaggggactgagaagggtaactgtggaaaagataaagacacgtggatacagtgcaacaaacgggatgtgctttgtggttaccttttatgcaccaacattggcaatatcccaaggcttggagaacttgacggtgaaatcacatctacattagttgtacagcagggaagaacattgaactgcagtggtgggcatgtcaagcttgaagaagatgttgaccttggctatgtggaagatggaacaccctgtggccctcaaatgatgtgtttggaacataggtgtctttctgtggcttccttcaatttcagcacttgcttgaacagtaaagcaggcactgtttgttcaggaaacggagtttgcagtaatgagctcaaatgtgtgtgcaacaggcactggacaggtgccgactgcagtatacactctcctcacaatgatgatgcaaaggctggcatcaccctatctggcaacggtgttgctggcactaatatcataataggaataattgctggcaccattttagtgctggccctcatattaggaataactgcctggggttataagaactatcgagaacagagagaggtcaaatgggctctctcattcctggagtgaaaggattccagacacaaaac

SEQ ID NO: 2958 - DNA, 1813 bp, Cricetulus griseus
ggatgaggcttttcggcttgagagtgggccgcgggctttggtgaccgggtggctggtgtttttcgttggcgggtgctagggctggtgggagcagccgcccagaggaagcaccatgatttcggccgcgcaattgttggatgagttaatgggccgggaccgaaacctcgccccggacgagaagcgcagcaacgtgcggtgggaccacgagagcgtttgtaaatattatctctgtggtttttgtcctgcggaattgtttacaaatactcgatctgatcttggtccatgtgaaaaaattcacgatgaaaatctaaggaaacagtatgagaagagttctcgtttcatgaaagttggctacgagagagattttttgcgatacttacagagtttacttgctgaggtagagcgtagaattagacgaggtcatgctcgtttggcattatctcaaaatcagcagtcctccggggctgctggtccaacaggcaaaaatgaagaaaaaattcaggttctgacagacaaaattgatgtgcttctacagcagattgaagagttaggatctgaaggaaaggtagaagaagctcagggaatgatgaaattggttgaacagttaaaagaagagagagaattgctaagatctacaacctcgactattgaaagttttgctgcccaagaaaacagatggaagtttgtgaagtgtgtggagcctttttgatagtaggcgatgcccagtcccgggtagatgaccatttgatgggaaaacaacacatgggctatgccaaaattaaagccaccgtggaagaattaaaagaaaagctaagaaaaagaacagaagaacctgatagggatgaacgtctcaaaaaaagagaagcaagaaagagaggaaagagaaaaagagcgcgagagagaaagggaagagcgggaaagaaaagacgaagagaagaagaagaaagagagaaagaaagagctcgtgatagagaaaggagaaagagaagtcgatcacgaagtagacactcaagccgaaacttctggaccggagcaggtcccgggaccataaaagatcacggagtagagacaggaggcgaagcagaagtagagatcgacgaagaagtagaagccatgacagatcagaaagaaaacatagatctcgcagtcgggatcgaagaaggtcaaaaagccgagatcgaaagtcatataaacacaggagcaaaagtcgggacagagaacaagatagaaagtccaaggagaaagaaaagaggggatctgatgataaaaaaagtagtgtgaagtccagtagtcgagaaaaacaaagtgaagacacaaaccctgaatcgaaggaaagtgatactaagaatgaggtcaatgggaccagtgaagacattaaatctgaagaggactactgttgaagattttttgaagaatactgaaaacggcatacagtgaagatcaacattaaaatgaggtgaaagaaagctatagtggcatagagaaagtataaagctcagttagttatttgttttttattattattattattaaaaattaattcaggactgttgtgacctaccagatttcagaacatgtgttattagcacatatgccactttgaaaacttaggtcctgtatcatattttttttctcttaagactttttaagaaataattacctaaacatgtggcttgctgagtgtttaattgcaagttttcagtctcggactttgaaaacaggattaaaagttagtattcatgtgaagcagactgttagagactgaaaataaaatagtagacttccagttgtcaaaaaaaaaaaaaaaaaaaaa

SEQ ID NO: 2959 - DNA, 1813 bp, Cricetulus griseus
tctcctcccacccctcgtcggtaggccctgtcagagctgagtactctatgtgccaactccctggcccaagcgaaaggaccttctacctggtgctgctgcagctgcagaaagagaagagagttaccgtcctggaacagaatggagagaagattgtgaagtttgccagggggccacatgccaaagtatctcctgtcaacgatgtggatgttggggtctaccagctgatgcagagtgaacagcttctctctcggaaggttgagtctttatcccaagaatctgagaggtgcaaagaggaagcccgccgggcatgccgagctggaaagaagcagttggcactgaggtctctcaaggccaaaacagaggacagagaaacgcattgaggcactgcatgccaagctggacactgttcaaggcatcctggatcgcatctatgcctcccagacagaccagatggtttttaatgcctaccaagctggtgtgggagccttgaaactttccatgaaggatgtcacagtggagaaagcggagagccttgtggaccagatccaagagctgtgtgacacgcaggatgaagtttctcagactctggctggcggggtaaccaatggtttagattttgacagtgaggaactggagaaggagttggacatcctccttcaggataccaccaaagaaccgttggacctccccgacaacccccaagagacgctttataccaacagtgtgcctgagcctaggatcctggatgctgaacttgaagctgaactcgagaaactgtccatatcagaaggaggtttggtctcaagtaaatctccaaaaaggcaattggagccgactctctaaagccattgcaggaactcaagtgaaggaccctcatgtaacagagggacagccttgtgtgtgtacatagttatttaatgagaaacactgagaagttgttgaatgaggaggaaagaaccacttggatgtatctggatgctgccactcatgacaggacaggtacagctcctggaagccatgctatggaggtgtgctcccagctgatgtcacggacctaccttctcatctttatagtgccacaatttatacagttctgtgtttgaccgtcgtctctcatagcctgcagttcttgcctttggctccgttaggtttgtcttcacccaccagcttcgttccagccagtgaaggtgaaaggtttttcagctttgcccatcaaagccagccctgtcttccactcctgagattttaagaatgaaagtcaaacaagtcttattcagagagacccaacagctgagcgtctggagaaacattgtctgcaagatgtttctctgcatgctttttggccccatcataaattatgtgtgttttctggagcaagccacatggctccctgttcggatctggagagcatctcatcatgtatccaccactcagggcagaggcctgagccaggatgtgcaataggaggaggtggccctgtcctgctgcatctgctgtgtgctgtccatgaactgcagggcaggcaggagaggggaggtctgaatgctcagatggcagcgtggagaggaagaatgacagccacactgccagtctgttgtccaggacgatgactcctggatctctttgcactgcccctcctgctggaggtggcacagagcagaggggaggactttgcttccagcctggagcacgaatcacgttcaatgagtctctcccactcagctttggcaaacagaaatattgggggtgaagaaaaacaatcactatttttttcttttttaatctggtaaataattaaaagagaaaaacacca

SEQ ID NO: 2960 - DNA, 1813 bp, Cricetulus griseus
cctcagtgccttggagcgcagggtgctggacagcgaaggccagctccggctggtgggctcaggcttgcacaaagttggagcggcaggggaggcccagcaggccatgttggagggactccaagggatggtgggccagctgcaggagcgcatggatgcccaggaggagacagcagcagagctctcgctgcgcctcaatcttacagcagcccagctaagccaactgcagggtctgctgcaagcccgtggagatgagggctgtggggcctgtggtggtgtccaggaggagctgggccgtctgcgggatggtgtggaacgttgctcctgcccactattacctccacggggccctggagctggtccaggtgttggaggaccaagccgagggcctctggacggcttcagtgtgtttggtggcagctcaggctcggccctccaggcccttcaaggagaactctctgaggtcattctcaccttcagctccctcaatgactcactgcacgagctccagactactgtggagggccagggtgctgatctggccgacctgggggccaccaaggatagcatcatctctgagatcaacaggctacaacaggaggccacggagcacattacagagagtgaggagcgcttccgaggcctggaagagggcctagcacaggcaggccagtgccctagcttagaggggcgattaggccgtcttgagggagtctgtgagcgactggatgctgtggctgggggactacaaggcttgcgtgaaggcctttctagacatgtggctgggctctgggcggcactacgggaaagcaacagcaccagcctcacacaggctgccctgctggagaagctgcttgggggccaggcaggcctgggcagacggcttggtgccctcaacagttccctgctgctcttggaagaccgtctgcagcagtttagccagaaggacttcactgggccttcaggcaaagctgggccacctgggccacctgggctacatgggcctccaggccctgcaggccctccaggacctcctggcaaggatggacagaaggggcccattggaccaccagggcctcaaggtgaacagggagtggagggagctccagcagcccccgtgcctagagtggcattttcagctgccctgagtttgcctcggtcggaacctggcacagtccccttcgacagggtcctgctcaatgatggaggctactatgacccagagacaggtgtattcaccgcaccgctggcgggccgctacttgctgagcgctgtattaactgggcaccggcatgagaaggtggaggcggtgctgtcgcgctccaacctgggcgtggcccgcatagactcgggaggctatgagccggagggactggaaaacaagcctgtggccgaaagtcagcccagccccggcgctctgggagtcttcagcctcatcctgccgctgcaggtcggagacactgtctgcatcgacctggtcatggggcagctggcacactcggaggagccgctcaccatcttcagcggagccttgctctacgaggacacagatcttgaacaggcgtagacagggtcggcccgaccacccaacttatctacagaggccgcagagccacctggatcaaggctcccgaccacggcgagggaggcggggcaaggccggggaccacaccccactgcggctcaggcgtccagagggccactcctcacttcgtggtctctgggacctaagcgtctcctcttgactcgtggcctcactgccgtccccaccagagccctctccggaacccgggctgcggaagaggaaccttccctc

SEQ ID NO: 2961 - DNA, 1812 bp, Cricetulus griseus
cgggatccttcgcagtcgtctggaaccctgttgcttggcggcctgtgcgcgcgtgcgcggacatggcttcaaacgactatacccaacaagcaactcaaagctatggggcctatcctacccagcctgggcagggctactcccaacagagcaatcagccctatggccagcagagttacagtggctatggccagtcagctgacacttcgggatatggccagagcagctatggttcttcttatggacagacccaaaacacaggctatggcactcagtcagctccccagggatatggttccactggaggctatggcagcagccaaagttcccaatcttcttatgggcaacagtcctcctaccctggctatggccaacagccagctcctagcagcacctcaggaagttatggtggcagttctcagagcagcagctatggacagccccagagtggaggctatggccaacagtctggctatggtggacagcagcaaagctatggacaacaacaaagctcctacaacccacctcagggttatggacaacagaaccaatacaacagcagcagtggaggtggtggagggggtggtggaggcaactatggccaagatcagtcctccatgagtggtggcggcggtggtggctatggcaatcaggaccagagtggtggcggcggtggtggctacgggggaggccagcaggaccgtgggggccgtggcaggggcggtggaggtggttacaaccgaagcagtggtggctatgaacccagaggccgtggaggtggcagaggaggcagaggcggcatgggcggaagtgaccgtggtggcttcaataaatttggtggccctcgggatcaaggatcacgtcatgattctgaacaggataattcagacaacaacaccatctttgtgcaaggcctgggagagaatgttacaattgaatctgtggctgattacttcaagcagattggaattattaagacaaataagaaaactggacagcctatgattaacttgtatacagacagggaaactggcaagctgaagggtgaggcaacagtctcatttgatgacccaccttctgctaaagcagctattgactggtttgatggtaaagaattctctgggaatcctattaaggtttcatttgctacccgccgagccgattttaataggggtggtggaaatggtcgtggaggccgaggtcgaggaggacccatgggccgtggaggctacggaggaggtggcagtggtggcggtggccggggaggattccccagtggaggtggtggaggtggtggacagcaacgagctggggactggaagtgtcctaatcctacatgtgagaatatgaacttctcttggagaaatgaatgcaaccagtgtaaggcccctaagccagatggcccaggagggggaccaggaggttctcatatggggggtaactatggagatgatcgccgtggcagaggaggctatgatcggggcggctaccggggccgaggcggggaccgagggggcttcagagggggccggggtggtggggacagaggcggttttggccctggcaagatggactcaaggggtgagcacagacaggatcgcagggagaggccatattagcccagcttctgaagttctgaagaacagctcttcttcctgtacccagtgttacccttgttattttgtaaactttcaattcaggattgcccatggatatttttttgttgttgtgtgtgtatgtgtgtgtgtgtgtgtcagactaccgtaattgtaaccgtatctctggttcccattaaaaccatcattttaagttaaa

SEQ ID NO: 2962 - DNA, 1812 bp, Cricetulus griseus
ttatgagacttccattcatgaaaaaatttacaaggttgaacgctgttatttcttcttgaatgcttttgtggacacagcccagaaaaaagagcctgaagatgggaggctggtgcagtatttgcttatgaaccctacaaatgatggtggacaatgggatatgcttgtcaatattgttgaaaaatatggtgttgtccctaagaaatgcttccctgaatctcatacgacagaggcaagcagaagaatgaatgatattctgaatcacaagatgagagaattctgtatacggctacggaacctggtacacagtggagcaaccaaaggggagatctcagctacacaagatgccatgatggaggagatattccgagtggtgtgcatctgtttgggtaacccaccagagaccttcacctgggagtatcgagacaaagataaaaattaccacaagattggtcccataacacccttgcagttttaccaggaacatgtgaagcctctcttcaatatggaagataagatttgttttgtgaatgacccacggccccagcacaagtacaataaattgtacacagtagactacttgagcaatatggttggagggagaaaaacgctgtataacaaccagcccattgacttcttgaaaaagatggttgctgcctccatcaaagatggagaggctgtgtggtttggctgtgatgttggaaaacacttcaatggcaagctgggcctcagtgacatgaatgtctatgaccatgagttagtgtttggtgtctccttgaagaacatgaataaagctgagaggttggcttttggtgagtcactcatgacccacgccatgaccttcactgctgtctcagagaaggatgatcaggatggtgcatttgtgaaatggagagtagagaattcctggggtgaagaccatggccacaaaggttacctgtgcatgactgatgagtggttctctgagtatgtctacgaggtggtagtggacaggaagcatgtcccggaagaggtgctggctgtgttggagcaggagcccattgtcctgccggcatgggatcccatgggggctttggctgagtgagtggcactgctccagctctttcctcctcccatcggatgtagctgccaaggacagatccagggactgaaaccaaagttacatgggtggctgttcccacaggacacaggcagactcttgggttcccagtctcctccaagaacctctttgggaaagatgctttatgctgaaacaaaatattcataaaggaaaaaatggggggggaagatggggccacactgtctgctctcctcatctctaacagctcaggatctcttagcatcttcatcagatgtaactgtcctaactgtcatggtctttgtatttgtagtaagagaataagatgagcagctgaggtgtacggagaacaaacagatctgtgctcctgttcctagagtagattgggggagggttagctaggatttgaactctcagtgctgcatgctgcctcacaggtcactgtccttcctacatggcagtcactaattcaacttttgcagggttgcttcatgtgagtctaatagccttagaggggaaggttgatcgggtctgacatgattccttcctgtggggcacagctccacttgagtcagcttaaaacagaggcttagagcaaaatcttgtcaggagctcagctgtggtcacgtggggtgccccactgacaggttagcttgagtctctgtcttggggattggggtggggagagaaagtgacgctcattctttctgataactcgatggtgctgagaagtcttt

SEQ ID NO: 2963 - DNA, 1811 bp, Cricetulus griseus
gacgatgatgaagctgatctgtttgcaattgcgaaggacagccaaagaagactcagagaacgtccctcctctttgaagaaggaaggacttttgactgcatctgatcaggaagcagctggaccttctgatatattattttcttcatctccattggacaaaggaaccaagggtagaaccaaaaccgtccttagtttgtttgatgaggaagaggataaagtggaagatcaaagcaacacccatgtgtcgaagaatgatgcagaaaaaggtctcaaaactgatggaagccccaagagcacaggcgtcttccaggatgaagagctgcttttcagccacaagctacaaaaggacaatgacccggatgttgatctttttgctggcaccaaaaaaaccagggtgtcagtgccacttgatgggagcctgtttggagatgatgaagattatgaccttttcagctctgccaagactcagcctgtggtaccagaaaaaaagggagcactgaaaaaagatcggcctgtttctctaaagaacgaggaagctcccgagtctactgaaggtagcaaagagaaaagcttatggaaagcagaaacaccacaggattcttcaggtctcactccatttaaaagcagagagccatccagtcggatcgggaaaatacaagcaaatttagcaattaatccagcagccttgctgcccacggcagctctgcagatcccaggaacaaagcctgcttcatgtgaattagcttttccttcatctgaacctggaaggagccatggcccggaaagcgtgccgactcttgctgggagtgaggaggctggtgtgagcttcgatcttccagcccaggcagataccttacacagtgcaaacaagagtcgtgttaaagtgagaggaaagcgtaggccacagacccgcgctgctaggcggctggctgcccaggagtccagtgagagtgaggatatgagtgtctccagaggacctgttgcacagttggccagtagtcccatcttaccaaatggccatcaacctcatctgcagcccaggatggccagtggagagatcagctctgagaaagccatggccccaccttgggaaagtggtcctgcattgtctgcagtggacagaagcttttttgtggcgtctctgcctcagactggaaatgaggctgacctttttgattctggggacatctttccaaagagcataggatcacagtccatggagggaacaaaagtcaaggcagcagagaccccagcccacttgtcaggaggaagtaaagagaagagcctcgtgttccctgctctcagtgaggccagcagtactgacgatctcttccagactgtcaaaccaagaccagcaaagaaaaggaacccttttcccctccttgaagatgaggatgatctctttgcagatcggaaaggaaaaaagaatgagttgaaatctgacagccatcaggacattatatcaaaaacacaagacatttttgaggatgatatatttgctacggaagctgtgaaaccttttcaaaaaaagagagagaaggagagaactttggaacccaacttatttgatgataatatcgatatctttgctgacttaaatgtaaaacccaaagaaaagtccaaaaagaaagtaggaggccaagtctgtgtttgtatgatgacacagatgatattttctcctctggtctccaggctaagaagtccaaacccaaaagaccaatctgcagaggccacatctgaactaagatctgatcacaaagtgtccaacatttttgatgaccccctgaatgcctttggaagccagtagagcat

SEQ ID NO: 2964 - DNA, 1811 bp, Cricetulus griseus
  modified_base (1790)..(1790): a, c, t, g, unknown or other
cacatcattgaggaacctgcaggtcttccctcaaggacagcctgtgcagaacctgctcttggacagccatgcgggactgttgtatgcctcctcccattctggagtagtgcaagtgccagtagccaactgcagcctgtacccaacctgtggagactgcctccttgctcgagacccctactgtgcctggagtggctccagctgcaggctcatcagcctctaccaacccgatctggcctccaggccttggatccaagacattgagggagccaatgccaaggacctctgcaatgtttcctcagccaggccccggattatggtgccagcaggcaagccatgcaaacaaatccagatccaaccaaacacagtgaataccctggcctgcccactcctctcgaacctggctactcggctctggttgtacaacggggaccctgtcaatgcctcagcctcttgccgtgtgttacccactggtgacctgctcttagtgggaagccagcgaccgggtggggaatattccagtgctggtcaatagaagaaggattccagcagctagtggccagctactgcccaacggtgatggaggatggggtgatggaccaaaacgaccagcgtgatggaatcccagtcatcatcaacacatctcgagtgagcgcgcccgctggtggcagggccagctggggtgcagacaagtcatactggaatgaattcctggtgatgtgtgctctgtttgggcttgctgtggtgcttctggttttgttctttctctaccgacatcgggatggcatgaaacttttcctaaagcagggcgaatgtgccacggtgcaccccaagactcgccctgtagtgctcccacctgagactcgaccactcaatggtgtctgccctcctagcaccccacttgaccaccgaggctaccaggccctgtcggatagctccccagggcctcgagtctttactgagtcagagaagaggccactgagtatccaggacagctttgtggaggtgtctcctgtgtgtccccggccccgagttcgactaggctctgagatccgagactctgtggtatgagagctgactttagatgtggctaccctggcctcgggctgtgaatgttcagcagaggtcagctagacctttgcttctcgaagaacacaaccctggtaccctgcctgggaggcagctggtatcacagtcctaacatcccagccagctggttccagtgcctggccgaagatggggctgcctccaggggccagggagtccttgttgggtggcagaattctgcttcttaaactgagccctttgtttaagagacaactgcaaatgtgaagccagagcgagagggaagagagacagagacaaggaagaacatgacacagccactccaattcagcctgcctgggctccaggggacttatccaaagtggctttgtgagactgagttgggaatccctcccccactggcctagtctaccttctgccttactctgctgccgggggctacccttttctcaatgcagagtcggggccctgctccagctccagccaacccaggacgtatctgtggccgctgacaccccaccacctcagggacagagggcaaggctggctctgcagccctcctcaccagacctgggcctgggcccaattcctggacttaccaggcctgtatcaggctgtgggctcaagagatcaagggagtgaccccaggggagtttgcaacagaagactgttgtctgctgccttttcctggtcagagaaccatgtccccacccatttttttttttttnttttttttttttggtttttcg

SEQ ID NO: 2965 - DNA, 1810 bp, Cricetulus griseus
tttaaaagaaacagtatgtgcagaaaggatgcatactgtccttgggtgaccttgaggccccatggctggggccatttagaaagaggttcatacaggccttcgggaaagaatttgacaaaagctttgggaataatggttctaagctgcctacaatgaagttcggtgacttctgtaatatcactgactcactacttagaaggatgagaaaagactcaaagccacctgggaacctgaaagagtactcccccaagatgagtgaattcaaagaaatgaactggagattcctggccagtatgatggcaggggcaaaccattgcctgaatatcatgtgcggatctctggatttgatgagcgggtaaaagtaatggtctctttgaggaaaccaaagcgcatcgttattcgaggccatgatgaaaaggagtaccccttcctggtaaaaggtggtgaggacctccgccaggaccagcgcattgagcagctttttgaggtcatgaatgccatcctcgctcaggatgctgcctgtagtcagagaaacatgcagttaaggacttaccgtgtcatgcccatgacctgcagattaggattaattgaatggattgaaaatactacgaccttgaaggaccttcttttgagtagtatgtcgaaagaggagaaagaggcttataatagtgatcccaaggcaccaattcgtgaatataaagactggctaaaacaaataacgaagaaaagtgatgctggagcctatttgctaatgtataaaggagctaatcgtacagaaacagtcacggcttttagaaaaagggaaaataaagtgcctgctgacctcttaaagagggcctttgtaaagatgagcaccaaccctgaggccttcctggcactgcgttcccactttgctagctctcatgcactgttgtgtatcagccactggctcctcggtattggagacagacatctgaacaatttcatggtagccatggagacaggcagcgtgattggaattgactttggacatgcatttggatcagctactcagtgtcttccagtccctgagttgatgccttttcgtctaacccgacaatttgtcagtctcatgttgccaatgaaagaaacaggtcttgtgtgtgctgtcatggtgtatgcactgagagctttccgctcatgtgcagatctgctcactgacaccatggacgtttttgtgaaggagcccttcttttattggaagagtgatgaacagaaaatgctcaaaaaaggaggatcgtggattcaagaaataaatgtaacagaagagaattggtacccgcagcagaaaatccgctatgctaagaggaagttagcaggggccaacccagcagttataacttgtgacgagttacgtctaggccatgaatcgtcacctgcctttgggagttacacagctgtagcccgaggacacaaaaaccacaacattcgtgcacaagagccagagagtggactttcagaagagactcaagtgaagtgcttggtggaccaggccacagaccccaatatccttggcaggacttgggaaggatgggagccttggatgtaaagtctgtgggagtcaccagctgtgaagcattccatcactgaggggatctcctagaccttcactgacagcagggtattactgaagcaccaaagaaatctactcggtagtgctggcagattggctcactgggtaaaggcattttctgctaacactaatgacctaactaacttcaatccttggaacccacaaggtggaaggagagaagcaacttctgcaagttgtcctttgaccttcacacatgta

SEQ ID NO: 2966 - DNA, 1810 bp, Cricetulus griseus
  modified_base (1052)..(1052): a, c, t, g, unknown or other
  modified_base (1127)..(1127): a, c, t, g, unknown or other
ccacaataacagaacgatacaaagttggagaacaataggagacggaaatttcgctgttgtcaaggaatgtatagagaggtcaactgctcgggagtatgccctgaaaatcatcaagaaaagtaaatgtcgaggcaaagagcacatgatccagaatgaggtgtctatcttaaggagggtgaagcaccccaacattgttctcttgatcgaagagatggatgtgcccactgaactgtacctcgtcatggaattagtgaagggtggagacctttttagatgccatcacttccactagcaaatatacagagcgagatgccagtgggatgctgtacaacctggcaagtgccatcaaatacctgcacagcctgaacatcgtccaccgtgacatcaagccagaaaacctgctggtgtatgagcaccaggatggcagtaagtcactcaagttgggtgactttggtctggccaccattgtcgatggccccctgtacacagtctgcggcaccccaacatatgtggctccagaaatcattgcagagactggatatggcattctgctaaggagctcatcaacatgatgctgctagttaacgtggaccagagattttcagccctgcaggtccttgagcatccctgggttaatgatgacggtctcccagaaaatgagcatcagctgtcagtagctggcaagatcaagaagcatttcaacacaggtcccaagccgaacagcacagcagctggagtttctgtcatagcaatgtgccattaaggctgtgtatctctgtaattatccacttctccatcatgagtgtttccatatttttgagcattgaatataactctatggtggtagtttggtgatgggaattgccctttcctttactaagaggatagccctgtcgtatttaaaggaagcttttcagtttgagagtagagtagttgagcaaacctttattacttgcttcctgacagtcaattctatagatgagacccgttcatattaatgaatacatttacccctcagcgttgtagcagaaaccactttatttccccccccncccacacacacacacacatttgatgactgcaaaagtgctttacaattgggctctacggtgcttacacatggaacngttaagaactgggaccccgggatgtcagatggaatctttagttcgtatgtaattacatacagatgggggaggtgctctgagctgctctttgttttttaatcatctcaaatatgcagccagccagccagtagcattaagggtcataaactggtgggaaacaggaaatctaaggtagacggttagaatgcctctgctggggcatttttgtttgtttgttattgtgcacaggctctaacagggaggcctctgtggtcatttttcagtaagtgagcatttaacgggcaggtgtggtgatcatgcaatagtattttgcttttgcatactaaagaaagtgggctggggacttgacacatttaacaagtttcccaaaaggttttagatttggagggagaaagaaaaaagaatccaacgtttcctttccattctgactttgtcacttgctgcatggatcagatggtgtaggttagtgtctggttttggaatcccagtgaaataactttcaaacgatttgtacccatgattaaaggtggaatgagatccaccccccccccaccaccccgtccttcagtttaagctcataaattgtaggtgactgtggaatgaaatcatctgtgatatattatgttcatttaccaaatgagctcttttgatgttgcctgttttttatgtaaaacatgttctta

SEQ ID NO: 2967 - DNA, 1810 bp, Cricetulus griseus
tgaatggcatggatgacagtcccgagtctgccgtgccatcccaggccatgggcacccctggaactgccccagagggtgcaacagcacccccagcactgcccttctgggacttgccatcccagttccatccccgctcctcttccctgggggacctactcagagatgggcctcagcatccaaagctgcccaaggaaaagttgtatcgggcccagctggaagtgaaggtggcctcgaaacagacagagcaactgttgaaccaggtgctgagcagcggaaccacaacctgtgtgtgccgagtcgttgctcagccaggctggtggagcagctgaggcaggccacccaggttctgcaggaaatgagggatttgggagagctgaaccaagaaacgcctgggctagtgcagaaacggaaggagctggtgaccctctacaggagaagtgcaccctaggcctgccaagcccaaggcaccctgttctggcctcttttctaggctctgggcttggggtggatcacacactcctgtggtctatgtggttattgcaaactgcctcagggctttggcactgtgcttggagtttctgggatgtcatcatctctgtcctcacccccaatagtttacattcctgacttctgtggagagcacagctgagctgcctgaggctcccatctcctggtcatcaggcagcttccaaccagccacacccacttatgagcagctctaggggccttaggtccaggctatagtggcccttagctggagcctaaagatgggcaggcgcctgggtgaagaagccatttgctctgtgcattgtgcgttctggaaaccacggatcttttccgcagtgtcccttcccctttggagagctgtgattagatggtcagatctcaaggctttcaggacagaagaggaaccctggcttcctggtgcagtctctgctcctgggctagcttctgtccagccttgcacattcctgaagatgcaaaccctcacatagagtggcctgtgttaccatctggaaaacctgtgtgtaattatcattaatcaacctttagaggcctctgctcccacccccaccttctgtgcctcccagatgggatttatctgggtctctatggttcttcctcagctgagacagctctgatatccacccctcccctttcacatgctggagtctgtggctacaacccacctatcaggcccctggtgggctgcccctccttagtatcctaatgagaagagcagtttcttccttccccttccctcctccctaccccattgcctctggctctgggggctcccctagagtctccaaccctcttcagcagccagcaggactgaggctggagcctgggctggggcactgggggaggagccctcacataggatttgcatgtgcacttttgtttactggaagagaagggagggccacagcagccaatggcctttccactcaccctgcttcttgccgccagttgtgcccaccaaggcctgccagccagggcaggtggatgccttcattactgtactgtcactttcttgctgtgggtagtaggcagtggcagagtaaacagcaatgtctggctggtgagcctcccactgtcagcctcaaaccacacactccttgggctcttatgccagcctgccttcccctccacctcaagagcaagaatgtcttcaggtgtcctgttctgatcctctgccatcttcccttgggaacaatcgtcctcttcagcagcaagggctgctgggtttctgccaagtcacctgcttccaggaattagagccccagcctgtgctgtcaagtgacta

SEQ ID NO: 2968 - DNA, 1810 bp, Cricetulus griseus
gcgcggggcagcatgagtcagcagcggccggcgcggagactgcccagcctgctggtggacccggcgcaggagacggttcgccgccgctgccgggaccccatcaacgtggaaagcctactgccaatcaaaaataaaggaatcaatctagaagaaaatgtgcagtatgtgtccatgagaaaagctttgaaagtgaagaggccccgttttgatgtgtcgctggtgtacttaactcgaaagtttatggatcttgtcagatctgcccctgggggcattctcgatctaaacaaggttgccacaaaactgggagttcggaaacggcgcgtgtatgacatcaccaacgttttggatggcatcgagctggtggaaaagaagtccaagaaccacattcgatggataggatccgacctgaacaacttcggagcggcaccacaacagaagaagctgcaggccgagctctcggacctgtcggcgatggaagacgccttggacgagttgattaaagattgtgcccagcagctattggagttaacggacgacaaagagaatgaaagactagcatacgtaacctatcaggatatccacagcatccaagccttccatgagcagattgttattgctgtgaaagctccagaggaaaccagactggacgtcccagctcccagagaagattctatcacagttcatatccgaagtaccaaaggacccattgacgtgtatctgtgtgaagttgaacagacccactcaagtggtaaaacagccgatggggtaggggcctctccatctaaaaacagacacccagaatgcccctcgaaagaagacaagtccctcagtcagagccactcaaagtgagcgactgacagcaatgccaagtgtgaaggtttttggagcctctgcgtggatgaattatgtgtggatgaattatgtaccagtttgatcctcagcaataagtcttcgtggcgtggtctcgttctcttactctagattcgtagcagcgtgaaggccagtagtgtccctgagtagcttcctgcttaggtccctggatggtttccacgttcaaaattagctattgctaattcttcgctgccttttgtcagtgagacggacctcttccctcctgagatgattttatcacagaggatatcaggagaacagacagttggccatggtcgtggactctgcccttccctgatggatggtgtttttgcttctcagaagaattgccttacactggctcacattcacggttaggtgtagtgcactggtgaggtgtacacacaggaccaaatgtggcgcctttgtacatatctgtatcatgtttagattgcttatgaaatatgtctgagtgacacttctgccctagatcagccaaaataatgtatatagagaaaatgacagctctctacttcttcagcatcaataacttattagaaccctctggatgggggtgaggggagttttctaaagttttacatgtagacatttcacagacaatgctgtatatttaggttcacatacttaaagtattttaatacagttcccaatgctacaataggagttggatacttcttgattttaagctgcctacagagtcactacttcccagtagattggtggtgtgcctcaaggtgttggggacaagtatagaaatgccctctggcaacggatcagttcgccacaccgtgagtttggtcctggtgaaagtaaaagcattgtcaacgctttgtgcaagcagattttataatgtgtttctgtgtgcagccaaagtagaattaaaattaaaatattaaaaaaataaaaaaaaaaaaaaaaa

SEQ ID NO: 2969 - DNA, 1809 bp, Cricetulus griseus
caaagggacaacggcttctgttcctggctgacagccatcttcaggataaaaggacgatgagatccgggacaagtgtggcggcgacgcggtgcactacctgtccttccagaggcacatcatcgggctgctggttgtcgtgagcgtcctctctgtaggcatcgtgttgcctgtcaacttctcaggggacctgctagagaacaatgcctacagcttcgggagaaccaccattgccaacttgaaatcagggaataatctcctctggctgcacacctcctttgctttcctgtacctgctgctcacagtctacagcatgcggagacacacctctaagatgcgctacaaggaagatgacctggtcaagcggactctcttcatcaatggaatctccaaatatgcagagtttctcggctctgctccccaccatcgtctactattctgccttcttcgaagcacactggacacgctctggggagaacaggaccacaaggcacagaaattcctggccgaggcagctattcggtttgagtgtgtgttcctgccggacaacggcgctttcttcgtgaactacgtcattgcctcagcatttatcggtaacgccatggacctgctgcgccatcccaggcctactcatgtacatgatccggctctgcctggcgcgctccgccgcagaaagacgcaacgtgaagcggcatcaggcctacgagttccagtttggcgcagcctacgcttggatgatgtgcgtcttcacggtggtcatgacctacagtatcacctgccccatcatcgtgcccttcgggctcatgtacatgctgctgaagcacctggtggacaggtacaatctctactacgcctacctgccggccaagctggacaagaagatccactcgggggctgtgaaccaggtggtggccgcacccatcctctgcctcttctggctactcttcttctctaccatgcgcgcgggattcctagctcccacgtctatgttcaccttcgtcgttctggtcatcaccatcgtcatctgtctctgccacgtctgcttcggacacttcaaatacctcagtgcccacaactacaagattgaacacacagagacagatgccgtgagctccagaagtagcggacggcccccctctgctgccgctgtccccaaatctgcaaaatacatcgctcaggtgctgcaggactcagagggtgacggggacggggatggggctcctgggagctcaggagacgagcccccgtcatcctcctcccaagatgaggagttgctgatgccgcccgatggcctcacggacacagattttcagtcatgcgaggacagcctcatagagaatgagattcaccagtaaggggagggagggccctggaggccataccctgcccctccaccaccccacccccacgcacactcaaaaaacaaaacgctaataatttattagaactaaagccccttcctcctccccgtcccctgctttcattaaggtatttaaacctggggatgtcaccgctctcccctaccatggagggagggagccccccaacctcagtgaggacagccccgagcaggccccggggcaaagaggggtgtggtgggagtccccccagatcagcctcaccacccagtagtgtggccaggaaagggttaatgagagccaaggtgggtacctggtgccatggctggaggcctgggaagagtaagcacagctgtgcctgcccccagttctttcctccccttcactgtccctgaatctgggcctctagggacatggaacctgcagccctctgggatgcaggagaagggagggg

SEQ ID NO: 2970 - DNA, 1808 bp, Cricetulus griseus
aaagtatgacaaagcgtggctcctgagcatgattcagagcaagtgcagtgtccccttcaaccccattgagtttcactatgaaaacacacgggcccagttttttgtggaagatgccactacagcttctgcattaaaggctgtgaactataagattcacgatcgagaaaacagaaggatatctatcatcatcatcaccaacccctctgctccaccccgcagtgtacagaaagaactgaagcctgaacaagtagagcagctcaagctgatcatgagcaaacgatatgatggctcccaacaagcacttgacctcaagggcctccgctcagacccagatttggtggcccagaacattgatgctgttcttaaccggagaagctgtatggctgccaccctgcagatcattgaagagaatattcctgagctattgtctttgaacttgagcaacaacagactattcaagctggatgatatgtccagcattgtacagaaagcgccgaacctaaagaccctaaatctctctggaaacgaattgaagtctgagcgggaattagacaagataaaagggctaaagttggaagagctgtggcttgacagaaaccccatgtgtgataacttccgagaccagtccacctatatcagcgccgttcgagaacgatttcccaagttgttacgcctggatggccatgagctaccccctccaattgcctttgatgttgaagcccccaccatgctaccaccctgcaagggaagctattttggaacagagaacctaaagagtttggtcctgcatttcttgcagcagtactatgcaatttatgactcaggagaccgtcagggtctcctggatgcctaccatgatggcgcctgttgctcactaagcattccttccatcccccagaactctgcccgaagcaacttagctgaatacttcaaagacagcagaaacgtgaagaagcttaaagatcccaccctgcggttccggctgttaaagcatacacgtctcaacgttgttgccttcctcaacgagttacccaaaactcaacatgatatcaattcctttgtggtagacataagtgcccaaacaagcacattgctatgtttttctgtcaatggagtcttcaaggaagtggatgggaagtctcgagattctttacgtgcgttcacgagaacgtttgttgctgttcctgccagcaattcagggctatgtattgtaaatgatgaattatttgtgcggaatgccagccctgaagaaatccaaagagccttcgccatgcctgcacccacaccttcctccagcccagtgcccacgctctccccagaacaacaggaaatgttgcaagcattctctacccagtctggcatgaacctcgagtggtctcagaagtgccttcaagacaacaactgggactataccagatctgctcaggccttcactcatctcaaggccaagggagagattccagaagtagcgtttatgaaatgatcacaggaaaagcccccttgtaaatagcccgtggataatattgtctggctgtcatctgccatctcctgtcccgcccgaggccagcctgtaactgtgactgaggagggagggctgcctcatcttcctcacctaccttctggaagacttacagaagacttctggaagattgagcctcgtggtgccaggaagccaaagcttactttgtagagctgacactaaactacccgaaggacttaggtgctctgtgtacttaacccctgattccctttactttttaagataaagagtgatattgtaaaaaaaaaaaaaaaaaaaaaaaaaaaaa

SEQ ID NO: 2971 - DNA, 1808 bp, Cricetulus griseus
gcctggcctggctaaggggaggcgggcgggcgggcgggcgcgatggcggaggccgggccacaggcgccgccgcccccgggcactccaagcaggcacgagaaaagcctgggacttctcaccaccaagttcgtgtcgcttctgcaggaagccaaggacggtgtgcttgacctcaagctggcagccgacactctagctgtgcgtcagaaacggcggatttacgacatcaccaacgtgttggaaggtattggtctgatcgagaaaaagtccaagaacagcatccagtggaagggtgtggggccgggttgcaatacccgggagattgccgacaagctgattgagctcaaggcagagatcgaggagctgcagcagcgggagcaagaacttgaccagcacaaggtgtgggtgcagcagagcatccggaatgtcacagaggacgtccagaacagctgcttggcctatgtgactcatgaagacatctgcaggtgctttgccggagataccctgcttgccatcagggccccatcgggcaccagcctagaggtgcccatcccagagggtctcaatggtcaaaagaagtaccagattcacttaaagagcatgagtggccccatcgaggtgctgctagtgaacaaggaggcatggagttcaccacctgtggctgtgcctgtccctccccctgaggatctgctccagagtccacctgctgtttctacccctccacctctgcccaagcctgccttatctcaaccccaagaaacctctcgtccatgcagtccccagctaactacccctgctcctgtccttggcagcactgaagtctcagaggcagcaggccagacagctgagattgcagtgagtggtggccctggaactgaaaacaaggatggtggtgagctcagctcactcccactgggcctgacagcactggacactcggcctctgcagtcttctgccctcctggacagcagtagcagcagtagcagcagcagcagcagcagcagcagcagttcatctggacccaatccttctacctccttcgagcccatcaaggcagaccccacaggtgttctggatctccccaaagagctgtcagaaatctttgaccccacacgagagtgcatgagctctgagctgctggaagaattgatgtcttcagaagtgtttgccccccttcttcgactttctccacccccgggagaccacgattacatctacaacctggacgagagtgaaggtgtctgtgatctctttgatgttcctgttctcaacctctgaccacagggacatgtcctgtgcagctgcaacccagactgtcttgattaggagccaactagggactgcccccaacccccactcccacccgcagcttgagagcccctaactcttggcttactcagccttccccagatgctcagttctggccatgctaccctgtcttgcactggcacttgtactgtgctagcagaacaggggcgagagcttagccctcgctacatagagcctggtggagggggttaataagaaggaattgatatgtctaattaggaatctgggtgggctggtccctgaagagtggcccaacttcctgataccccatactcactcccctcacttccgtttattcacttaccctcatttagagccatttgcagagatttagaaagatttacattaacgaatggattcctatataaagattatttttatacttttttcagcaaaaggaaattgtaatatttgtacagcctccaagtgaataaagacatgcctaaggcgaaaaaaaaaaaaaaaaaaaaaaaaaaaaaaaa

SEQ ID NO: 2972 - DNA, 1808 bp, Cricetulus griseus
gatggcatatttggtactgggaatggctctacttcctccagtcccaatattggagttttgggaattacaaaggttggcagccgcagagtgatccagtatggcgcagcactcatgctgggcttgggcatgattggcaagttcagtgccctgtttgcatccctcccagaccctgtgcttggagccctcttctgcacactctttggaatgatcacagctgttggcctctctaacctgcagttcattgacttgaattcttcccggaacctgtttgtgcttggattttccatattctttgggcttgttcttccaagttacctcagacaaaacccactggtcacaggtataacaggaattgatcaagtactgaatgtccttctcacaactgcgatgttcgtaggaggatgtgtggcttttattttggacaacaccatcccaggtaccccggaggaaagaggaatcaagaaatggaagaaaggcgtgagcaaaggaacaagtccttacagggcattccatctctagttctcacagtgaacacttgcctcttgccttcacctgagagcaagcatttgtgtcagcacagaaagcagaacacgtgaacaaggacaggaagtactgtccagttgaaggtaatgggaaatggcagcagtctttgtaagtgattttcattctcgtttatgagttaaaccttgattcattgggacatttatgctcagaatctttcttaagagggtttccagtgttaacatttattgggattgattcagacaagagaagtgattttaccaggcgagctagagtgaagtattgtgggtcccactggtgtcctatttccactgtaacaaattcacatgcaggacttactttatactgtagaatactgactttcatgatgacaacttgatttatgcatgaatatcacagtatttccatatagtaaaataacatttctgcccaggataatagttttccagggagggaatgatataattttcatgacaatgtcatgtgctgatagaatttctccattgatgaacctctagtatgtgtgtatactttatttacccatgtgtatattttatgatcatgagctaaactgttaatactttcattcatgtcccagctgacacactgatattggcaacttagacttaaagttggcaagtttagtcatcagtcataccagtgccacagaggtgaagcctaagtttagaacccatctggctagaaaagaggcagcatcctgcaggtgactatgcctgggatcgatatttggctgctggtaccaggcttggcatggcttggagtgaggtacccagttgttgctggacgccaactgtgcatacccaagtatgcccactgcatactgggtgacagtagagatgcctctattttatttgagttttgtgactgactttacctatatatcttcctggggttttgtttttaatttttattttgcatactgagggtatttggggtgggattgttttttgagatgtgtaattcttttatggagtttttaaaaagaattttcatattgtttttctaacatggcttcattaaacgtttaagtattttaaaaatatgtaatatttggaccagatgttgtgaataatagtagagataaagctattttattctgtatttttaaaactgttccgtacaaataaaagctctcctggatgtaaaaaaaaaaaaaaaaaaaaaaaaaaaaaaaaaaaaaaaaaaaaaaaaaaaaaaaaaaaaaaaaaaaaaaaaaaaaaaaaaaaaaaaaaaaaaaaaaaaaaaaaaaaaaaaaaaaaaaaaaa

SEQ ID NO: 2973 - DNA, 1808 bp, Cricetulus griseus
gcctgtcagcactgccccggcactggggaccatggccacggattcatgggccctagcggtggacgaacaggaagccgcggctgagtcgttgagcaacttgcatcttaaggaggagaaaaatcaaaaccagatgccaatggtgctgttgttaaaaccagtgttaatgcagagaaaacagatgaagaagagaaagaggacagagctgctcagtctttactcaacaaactcatcagaagcaatcttgtggataacaccaaccaagtaaaaagttctgcagagggacccaaactcccctctctactcagtgaagtcttttgaagagcttcgcctgaaaccacagcttctccagggagtctatgctatgggtttcaaccgtccatccaaaatacaagagaatgcattgcctttgatgcttgctgaacccccacagaacttaattgcccaatctcagtctggtactggtaaaacagctgcctttgtgttggccatgctcagccaagtagagcctgcaaacagctatccccagtgtctctgcctctctccaacctatgagcttgctcttcaaacaggaaaagtgattgaacagatgggcaagttttaccctgaactgaagctagcttatgctgttcgaggcaataaattggacagaggtcagaaggtcagtgagcagattgtcattggcacccccgggaccgtcctggactggtgctccaagctgaagttcattgaccccaagaagatcaaggtgtttgttctggacgaggctgacgtgatgatagcaactcagggccaccaagaccagagcatccgcatccagaggatgctgcccagaaactgccagatgctgctcttctctgccacctttgaagactcagtgtggaagtttgcccagaaggtggtcccagaccccaacatcatcaaacttaagcgtgaagaggagactttggacaccatcaaacagtattatgtcctttgcaataacagagaggagaagttccaggccctgtgcaacctgtatggggccatcaccatcgcccaagccatgatcttctgccatacccgcaaaacagctagctggctggcagcagagctctccaaagagggccaccaggtggctctgctgagtggagaaatgatggtggaacagagggcagctgttattgagcgcttccgggaaggcaaagagaaggtcctggtgaccaccaacgtgtgtgcccgtggtattgatgttgaacaagtgtctgtcgtcatcaattttgaccttcctgtggacaaggacgggaacccagacaatgagacctacctgcatcgcatcgggcgcactggccgctttggcaagaggggtctggcagtaaacatggttgacagcaagcacagcatgaatatcctcaacagaatccaggagcattttaataagaagatagaaagattggacacagatgatttggatgagatcgagaaaatagccaactgagaagcttcaccagcgactggcgccaccctcagcactgtccctgcctgggagcctagtgctttcatggcaaaggccttgacaggcacctcaaagaccaaggcctgagtagagactacctacctcattcagaattacgtttggacttgacagaaatttgtgcaaatgatgggggatggtagaaaatttgtttaacacaactttggaagattaggcatgaatacacagaaatttaccttttagaagttccgtcttttttttttggcctagtatttctccatcatcacctagtctagataatatgtcccacgattccttatgacaaactttagctgtt

SEQ ID NO: 2974 - DNA, 1807 bp, Cricetulus griseus
ggcaccttcgacgtgtccatcctgaccatcgaggacggcatctttcgaggtgaagtccacggccggagacacacacctgggtggcgaagacttcgacaaccgtatggtgagccacctggcggaggagttcaagcgcaaacacaagaagggacattgggcccaactaagcgcgccgtgcgccggctgcgcaccgcctgcgagcgcgccaagcgcaccctgagctcgtccacgcaggccagcatcgagatcgactcgctctacgagggcgtggatttctacacgtccatcacccgcgcccgcttcgaggagctcaacgccgacctcttccgagggaccctggagccggtggaaaaggcgctgcgcgatgccaagctggacaagggccagatccaggagattgtgctggtgggcggctccacccgcatccctaagatccagaagctcctgcaggatttcttcaacggcaaggagctgaataagagcatcaaccccgacgaggcggtggcctatggcgccgccgtgcaggcggctatcctcattggcgacaagtcagagaatgtgcaggatctgctgttactcgacgtgactccactgtcgcttggtatcgaaaccgctggcggggtcatgaccccgctcatcaagaggaacaccacgatccccaccaagcagacgcagaccttcactacctactcagacaaccagagcagcgtgctggtgcaagtgtacgagggcgaacgggccatgaccaaggacaataacctcttgggcaagttcgacctgactgggatccccccagcaccccgtggggtcccccagatcgaggtcaccttcgacatcgatgccaatggcatccttaacgtcaccgctgccgacaagagcactggcaaagaaaataagatcaccatcaccaacgacaagggtcgcctgagcaaggacgacattgaccgtatggtgcaggaggcagagcggtacaaatcggaagatgaagctaatcgcgatcgcgtggcagccaaaaacgcagttgagtcctatacctacaacatcaaacagacggtggaagacgagaaactgaggggcaagattagcgagcaggacaaaaacaagatcctcgacaagtgtcaggaggtgatcaactggctggaccggaaccagatggcagagaaagatgagtacgaacacaagcaaaaagagcttgagagagtgtgcaaccccatcatcagcaaactttaccaaggcggtcctggcggaggcggcggcggctctggaggacccaccatcgaggaagtggactaactaagcttgcactggagtccgcggaaacctcggaaacctcctcccccattttccccccccttccccccccccccctcccttttgttatggtttctttgaaatgtcctcgtgccaagtaagagctgttgttggaagtctttagcctggtgcatacatatgaaaggaaaggtgcagcaacttagtttaagttacaaaaggttagttctaaagtttgatttgggggaaaaatgaggtttctatctaatgcatttttagtgtttgctgatttgagcatatttttttggttaagcttagtttgtacgtggagatttgctcgaaatgggaaactgatgtttgcacacctgtcctatggaagcttggtaacactaaatacagagaagcttgaattgtttatttttatgtactactttgagattaaacattgcggtaattttaaagacaggtatattctgtaaacacataaatgcaaatttaaagtaaagctgaaattgatctcaaaaaaaaaaaaaaaaaa

SEQ ID NO: 2975 - DNA, 1806 bp, Cricetulus griseus
gcgctggccgaggcgctcgaagagcccgggtcgcccgtggccggcgtcctcgcgccccgcagtctctgcctcggttcattccagacacagtgcttgtggacttggtcagtgacagcgacgaggaggtcctggaagtcgtcgcggacccggtagaagtgccggccgcccggccccccgcgccggccgcacctgggcaggacagcgacagtaacagtgaaggggcggacgaggggcctacgggagctcctcgtaccttggtccggaggcggcggcggcggctgctggatcccggcgaagcgccggtggttcctgtgtactccgggaaggtacaaagcagcctcaacctcatcccagataattcgtccctcttgaaactttgcccctcagagcctgaagatgaggcagatatgacagattctggcagtcctccccctgaggatgccctactttcaggttctccctggaagaagaagctgaggagtaagaatgagaaagacgagatgaaaatggaagagtttccggaccaggacatctctcctttgccccaaccgtcaccaagaaacaaaagcagaaagcatactgaggcgctacagaagttgagggaagtaaacaagcgcctccaagatctccaggcctgcctgagccccaagcagcaccagagcccagcccttcagagcctagatgatgaggtggtcctagtggagggggctgccttgccacagagtccgagacccttcaccctcaagatccggtgccgggctgatcttgtcagattgcctgtcttgacgtcggaaccccttcagaatgtggtggattacatggccaatcatcttggggtgtccccaagcaggattcttttactctctggagagacggaactgtcgcccactgccacccttaggaccttaaagcttggagtggctgacatcattgattgtgtggtgttgacaagttcttcagaggccacagagacaacccagaagctccgactccgggtgccagggggaaggagaaacaccagatgttggagatctcgctatctcctgattctcctcttaaggtccttatgtcacattacgaggaggccatgggactctccggacacaagctctcctttttctttgatggaacaaaactttcgggcaaggagctgccagctgatttgggcatggaaactggggatctcattgaagtttggggctgaagcttcctcctcctgtttggatgcagagccaagacttggggacaacagctcccacttattactatttttttgccccataagggctaacaaactgaattagaactcgtttatttatttatttccggtactggggattgaactctggactatgcacatgctaagaatgtatgaagttgtggtaaaaccaaggcaaggtgtggacctttgggcctgtctcttgttgactgtagtctcaaacagttgactgattggtagttttgtggcttgtctggtacacacttcctggcatgtacatctagccacatctgagcacatgcagctgttaactttgaggttctactttagtttttggtcctccttcccttgtactgcctctcctgttagcacccacttagtatatttgcatctttgaatatgaatgtctttataagataaatttctgaatgtgtgtgattttagtgtatatacacggtattgtgcaatagacattctgtcttcactcagtatgagtgacaatctagccatgttagcgccttctagatctgttgttgctctgatctactgtgggtgccccatagtggcattcaatgattttactcaca

SEQ ID NO: 2976 - DNA, 1806 bp, Cricetulus griseus
gtgcaacccaaaaactaggaggtggtgggtttaggtacagctctgggaaaacggaccttcagacggatggggcgagcccaagagactgagcttcaatgctgaactcggcaaaatgtctccaaataagctcaagctaagtgcgctgaagaaaaaaaccaagctggtgcagaaggcgattcttcagaagaacagatctgcaaagcagaagacagacctgaaggacacttccgaggtatcctcgcacatttgcccttactgtgacagggagttcacatacatcggcagcctcaacaagcacgctgccttcagctgtcctaaaaagcccctatctccccccaaaagaaaagtttcccattcatctaagaaaggtggccacgcttcacctgccagcagtgacagaaacaacagcagcaatccccggagacggaccgcagacacagagattaagatgcagagcacgcaggcgcccttgggcaagaccagagctcggagctcaggccctgcccaggcctcactgccctcctcatccttcagatccagacagaatgtcaagtttgcagcttcagttaaatccaaaaaggcaagctcttcatccttgaggaactccagtcctataagaatggccaaaattactcatgttgagggtaagaagtccaaagctgttgccaagagtcattctactcagctgtcaagcaaatcatccagaaacctgcacgtgagagtgcagaagagcaaggccgttctacagagtaagactgctctggccagtaagaaaagaacagaccgcttcatggtaaaatctagagagcggagtgggggtccaattaccagaagccttcagctggcagctgctgcggacctgagtgaaagcaggagagaggacagcagtgccaggcatgagctgaaggacttgaggtaagcctccgcctggcgtcccgatgcacctcatcagcagccccttacgtcaccagacaatgcaggaaggtcaaggccgcagcagcaactcagttccacaactctgtaatatgtatgtagacacttttaaaagcacgttattttatggtcccgactgtaaatgctccatttttaaagtttttataacacgtgtaatttaattaatcagtcggctggctgcagtaaggggactgactggtccaggaaaaggggaccctagagaccctcacatgggcagaaaaccatccatcattgtccagcgttaccgttttcctgttcacccacccagctaaactctgctgtaccctttttcatttcttcaactagaatttttcttttacacactctgcagttaatccttgcaagcatggactgtggctgttgctaaccccactgacacagtatgcctcacagctgatcacacagaccgtctcagcctgtcccagcagccaggaaaactcacgaacccgaagccttggcaagctgctttcagccaaacttgggaaaactctggaaaacgttgctgggctcttgggggattccctctctctctctctctctctctctctctctctctctctctctctctctctctctctctctctccctctcctcctctcctcccgtccctccttctctttgcatgagcaaattgtgctgggtcacccttcagcacttcccagattgtcaggaaaacgaggagaaagttttgtcaagcgtggtgtctcctgttcagtggaggtcttctagcgtggttctaggtcacgcgagaagacggttctgtatctgccgtgcgaagaatgtgaacaataaaagtgcggagcgattgtagaaaccaacaaaaaaaaaaaa

SEQ ID NO: 2977 - DNA, 1806 bp, Cricetulus griseus
agatgagggaccggctgctgcaggccatcgactcccagagtaacatcaggaacatggttgcagtattggaagtgatctccagtctggagagataccccatcaccaaagaaggcactagaggagacacgacccgggaagctcatcaatgacgtccgcaagaaaaccaagaacgaggagctagccaagagggccaagaggcttctgcggagctggcagaagctcatcgagccagtgcaccagaatgaggtagccctacgggcactggcgggagctgccggctctgccaatgggggcgcacacaactgccggtcagaggtgggagtagccagcacacccaagagcatccatgacctgaagaatcgcaatgacatccagaggcttcctggggagcggctagacaggctgggcagccgtaagcgtagaggggatcagcgtgacctgggccacccggggccaccccacatggtagtgggcgacttgggccctcgatagccagccgcctggaacccagcgacaatgagaagcacagtaccaagatccccgtcgaacgccgtgcggccccgcccccacgctccccctggcctgggcaagccccccgtgccctgcctgcagacaaaggctgcacagctggacagagcagatgagccgccaggcccctcccccatcccagggggacctctcgctgctccttcagcccccggaactcacggcatgaaggctcctttgcccggcagcggagctcatacatagcgaagggctctgtgtccagcccctcccaacgcccccacacagggtaattggtatgactggacgcaatgcatatcgctcgacccgcatggcgatgatgggcgcttgaacattctgccttatgtctgcttggactgagcacctggcctggccatcaagtgcattcccaccttgcagggggtaggctggccagccaggagggcgagcatgaggctcaccctccaccctccttttgtgaaatgctgctaccagtttactaacgattgcaaaggaagggctgctcagagggcagatggcagagggagtccagaactctatagcaagccagctatataaagcgttaggtcccccaccccagaagaggtgcagagcccctctagcaccgaaggtggggacctcagtggcaggcaggcacaggaaacctgcgggagaggttaccttaacagcaacagatgcacatctcatctctgaatctcctactctttggctctggccagtctctggcctcggccaagccagtgttttcttttccctcgtgttatgcgctagaagcttctctgctatggtgaaccctggcattgggcgggtgagccagcttcacccacttgcacaggtgtccacccatttgtatatggtttcagttcaacccctgttcttaaagaaatgctgcaaaaacttcagttttcttgtttatttcatcctcttttccacctgaccaccagccaaatgacttttcctttctatctcttcctgtctacatctctaggaaatgccatctttctagagcccctcaacctcacaaagttcccgagggtgctactggcgtgagttgccctgctgggcgaggagagccgtctgttagctggaaacactcataaccattcctttagattcgtttgccttatggttgtcataaacgcaatttgcaaaaaaaaggagccttagtgaatgtacagtacctagacttctgcgtcctcgcagaagggagcaactttgctatttggtccagtaagtggataccttgtgatataaatgtaggaaaataaaaaaaacatttgc

SEQ ID NO: 2978 - DNA, 1806 bp, Cricetulus griseus
  modified_base (1504)..(1504): a, c, t, g, unknown or other
cccttcaaccagtctctgggccaaaactttagcccacctggtgggcagatgatgccgggcccgacgtggggggagtttggttcccactgatctcacccaccatgggacagcctcctagaggggagctgggtcctccctcctctcccccaacgctttgcccaaccaggagctccttttggtccttcccttcagagacctggtcagggactccccagcctgcctcctaacacaagtcccttccctggtccagaccctggttttccaggccctggcggtgaggatgggggaaagcccttgaacccacctgctcccactgcttttccccaggagccccactcaggctccccggctgcagctgttaatgggaaccagcctagtttccccccaagcagcagtggtcgaggcgggggcactccagatgccaacagcctggcacccccaggccaaggcaggtggaggctcagggccccagcctcccccaggcctggtgtacccttgtggtgcctgtcggagtgaggtgaatgatgaccaggatgccattctgtgtgaggcctcctgccagaagtggttttcaccgagagtgtactggaatgacagaaagcgcctatggggtgctaaccaccgaagcctctgcagtctgggcctgtgatctgtgtctcaagaccaaggagatccagtctgtctacatccgagagggcatggggcagttggtggctgctaacgatgggtgactccagtggggtggcctggggaagtgcacatttcttattgtgctcttgcagagtaattacgtggctctcactcctcgtttttcactggcttcccatccacatggagcagaaacacacggttcctggaagcagaagaggaactgaagcgggcaggcagaagaacctcgattgcttgtttgtttgttttgtttttgtttttcctgggaacttgtgcattgagacctttggagatgcaggaagcccaatccctgctgagcagggagccattcctagagtcttgctggaggctgcaagagaaaagggactagaggaagttccagatggcaaggatgtcctgcctgcagatgaccaccaaataccttgaagaagcagcattcctgacttggcagttgcttgtctgggggtcaagactgtagatacaagatgctgagaatacatcttcctcacaccaaagtcactggtcctttctcagcttctctgtgcttttctctcagtgaccatgtttttgccaaaagtttgggatatgtggtcggtctgaccagaatatttgaagtttgggctcccctggaagtctggactggagatattaaccccttcattcccccctgctactgcacattgtggtagctgttcttcaactcttggtgccccactttctctgcctcgggaaagtttggaaaggcatgaagcccttatacctcattccttccctaataaaaggatccaagtgaggccctgctgtggctttggaggggttggggtgggcagcaggntcctcaaagccatggtacagcctttgaagctgaggagaagggtggacctgcttcctactttgtccccaactcctaaactttgtatgtggcagcctttgctcacctttgtattgtgttgtggttctgtttacccctattacctgttgctacttttgtgttgtcttcatggtttgtaaaatgctcctggggagggttcatccccatgttcctctctgctactttttggaagaaggtgggttggcagagatgtggttacaggatcttttttatatggttggactaataaaatgacttgaaaatcc

SEQ ID NO: 2979 - DNA, 1806 bp, Cricetulus griseus
aggaggaggagcggcggcgctgggcggcatgcgatggggaactgctgctggacgcagtgcttcgggctgctccgccgcgaagcgggtcggctgcagcgagccggcggaggatcgaagtattttagaacatgcccaagaggagagcacttgaccatagagtttgagaatctcgtagagagtgatgaagggagagcccaggaagcagccatagggcacttactgaggaagaaattgttgacttacaagagaggcattatgactccattgctgagaaacagaaagacgtggataggaagattcagagggagttagccttacaagaggagaagttaagactagaagaagaagctttatacgctgcccagcgtgaagcagccagggcagcaaggcagcgaaagctcctggagcaagaaaagcagagagtaacacagtgctatcatcctagcagcggagactatcaaagtgcaggaccagaagatgactttgaatcttgtttgagaaatataaagtcgcagtacgaagtttttcgaagtagcagactctcatctgacgccacagtattgacaccaaataccgaaagcagctgtgacttaatgaccaaaaccaaatcaactagtgggaatgatgacagcacctccttagacctggagtgggaagatgaagaaggaatgaataggatgctacccatgagagaacgctcaaagacagaagaagacattcttcgggcagcactgaagtacagcagcaagaagggtagcaaccccacctccacctctgatgattccaatgggctggaatgggagaatgacttcgttagtgccgagatggacgataatggcaattccgagtactctgggtttgtgaatcctgtgttagagctgtcagattctgccaccaagcagtctgatacggatcaacagatccgataggatgaaattgtgtgtaacctcacttagcaaacattaaagtcaaccagaatgtacagatgggtgctgagcccttttgtgaggccgcacagggaccacatgactaatgctgtttccaaaaaagggcagagtggagaggcagctgaatgctttgggcacatgtggtctcaacatccgccttctttcattcaatctgaataaaagataataggattaaagaagcttccagagtttgtacactttgagttggtaataattaaataacacttaacaatataaatttaaaatttttacttaattcctgtatgacaccatattggctttcaattgagatcttagatttttattttcattttttaaaattctatatttccagtgaatgatctttgaaagattttacacagaacatatcctgtgaatgatttaagaaaacattaaaatacgggtatttcaaagtaaataaaatcctttctgataggaaaggtcccattgattgtattgccctttactttgccttgtagtacaaggtgctttgtgggatggagctaacgtgttggtgtattgacgacctgtgtctgtaaatctgtgtaagagaccagggctgggaaatgcaccctaactgcagtccttgctttggctgagaactgagtatcatcactttggcaagcacactgtattctgtctcccttgctgttttgttctctttggcagtgatggtgcatgctctgaacagtacaggaaggtccaggtagagatagtaaagttcttgctgtacgtgaaaaattatgtgaccctcttgatatctgaactgctatacaatgacatctgtaaatttgtcactttttaatctcatagaaataaatatactttgatatgtaaa

SEQ ID NO: 2980 - DNA, 1806 bp, Cricetulus griseus
tctctggcttccagggttggacttctgggccaggcaatggctctcctgtggctcttttctttgtggttgctggttccgggaactcaaggtaccgaagatggggacatgcgtctggttaatggagcctcagccagtgagggccgcgtggagatcttctacagaggccagtgggggacagtgtgtgacaacctctggaacattttagatgccaacgtcgtttgccgggccctgggctacgagaacgccactcgggcgctgggcagagctgccttcgggccaggacagggacctgtcatgctggatgaggtggaatgtgcaggaacggagccctcgctggccaattgcagctccctgggctggctgaagagccgctgcgggcacgagaaggatgcgggcgtggtctgttccaacgaaactgagagcatgcacatcctggacctctccggagacctcccagatgcgctgggccagatctttgacagccagcagggctgtgacctgttcattcaggtgacagggcaagggcacagggatctgaccctctgtgcccacaagctgatcctgaacaccaactcggaggcccaggccctgtggcacgcagagggcagcagcgtcatcatgagagtggacgtggactgcatgcccgtggtcagagacttcctcaggtacttttactcccgaagaatcgaggtcaccatgtcttctgttaagtgcttgcacaagctagcctctgcctacggggccacacagcttcgagactattgcagccggctgttcgccaccctcctccccgaggatcccactttccacacgcccctggagctctatgagtacgcacaggccaccagggactctgtgctggaagagctgtgcgtgcagttcctggcctggaactttgagcctctgacacaggttgaggcctggctgagtgttcccaccaccttgctccaggctctcctctccaagagtgagctggctgtgtctagtgagctggacttgctgaaggccgtggatcagtggagcgcggagagtggcgcctcccatgctgaggtggagggcctggtggaacaggtccgcttccccatgatgctgccccagcagctgtttgagctgcagttcaacctgtccttgtaccagggtcaccaggcactgttccaaaggaagaccatggaggccctggagttccacactgtgcctttcccagtactggccaagtacagaggcctgaacctcacggagaacacctacaagccccggctttacacctcctcaacctggagcaccttggtgacagaccgttcctcaaggtcacagggtgcgcaagtgtatgggtactattcatatggctatgattcagtaagtcggtactccccctaccggtccttccagaccccacaacaccccagctttctcttcacggacaagctaatctcctggtcggccacctacctccccaccgtccagagctgctggaactatggcttctcctgcacctctgacgagctcccagttctgggcctcaccaagtccagctactccgagcctatgattggctatgaaaacaaagcactgatgctctgtggaggtcacagtgtggtggatgtcaccaactttgccggctctaaggctcctgtccccagtgccctggataccaatagttccaagatttcttccctctttccctgcacctcgggggccttcagcggcttccgtgtggtcatccgccccttctacctgactaactccactgacctggactagatggtccctctcagtggtgggaactcagacacccacgtgtcccct

SEQ ID NO: 2981 - DNA, 1806 bp, Cricetulus griseus
cagcgcccgagcgcagacgcgcccgccatgagggagattgtgcacatccaggcgggccagtgcgggaaccagatcggtaccaagttttgggaagtgatcagcgatgagcacggcatcgaccaggccggaggctacgtgggcgactcagcgctgcagctggagcggatcagcgtctactacaatgagtcatcttctcagaagtatgtgcctagggctgcgctggtggacttggaacccggcactatggacagtgtgaggtctgggccttttgggcagctcttccggcctgacaacttcatcttcggacagacgggcgccgggaacaactgggccaagggccactacactgagggcgccgagctggtggactcagtgctggatgtgattcgcaaggagtgtgaacactgcgactgcctgcagggcttccagctcacccactcgttgggcggcggcacaggatcaggcatgggcaccctgctcatcagcaagatccgggaggagtacccggaccgcatcatgaacaccttcagcgtcatgccgtcgcccaaggtctcagacaccgtggtggaaccttacaatgccacattgtcggtacaccagctggtagagaacactgacgagacctactgcatcgacaacgaggccctctacgacatctgcttccgcactctcaagctgaccacacccacgtacggggacctcaaccatctggtgtctgccaccatgagcggtgtcaccacatccctgcgttttcccggccagctcaacgctgacctgcgcaagctggctgtgaacatggtgcccttcccacgcctgcacttcttcatgcccggcttcgccccactcacagcccggggcagtcagcagtaccgtgccctgacagtgcccgagctcacacagcagatgttcgatgccaagaacatgatggctgcctgcgacccacgccacggccgctacctgaccgttgccaccgtctttaggggccccatgtccatgaaggaggtggacgagcagatgctggccatccagaacaagaatagcagctactttgtggagtggatccccaacaacgttaaagtggccgtgtgtgacatcccaccccggggcctgaagatggcttccaccttcattggcaatagcactgccatccaggagctattcaagcgcatctccgagcagttctcggccatgtttcgccgcaaggcctttctgcactggttcaccggcgagggcatggacgagatggagttcaccgaggctgagagtaacatgaacgacttggtgtctgagtaccagcagtatcaggacgccacggtcaacgacggggaagaagcttttgaagatgaggatgaagaagagatcaatgaatagggggcctttaagatgctatggtgcacacctgctcttagccctgatggtgtgagcacggtgccctggtctacacatcacaggcccctctcaaccaaatacacaccactgttccccaggttatctggaacagtcctaccagaccagggtgatttcatacaggaacactgaaagcaaagttagggggctgtaaaaggctgaagacagagaccaccttccgttaagtgcccagccatcagagttagcagggaagttagaataaagatttgtgtttcatccttggtgataaaatctaaagcaccgcattgttgccttaattgaatatacaatatggaactttgtgacaatccattcataataaaatgctaaacctgaaaaaaaaaaaaaaaaaaaaaaaaaaaaaaaaaaaaaaaaaaaaaaaaaaaaaaaaaaaaaaaa

SEQ ID NO: 2982 - DNA, 1805 bp, Cricetulus griseus
cgccgccgccatggccatgaggcagacgccgctcacctgctcgggccacacgcggcccgtggtggatttggccttcagcggcatcacgccttacggctactttctgatcagcgcttgcaaggatggcaaacctatgctccgacagggagatacaggagactggattggaacgtttttgggtcataaaggtgctgtttggggtgcaacgttgaataaggatgccaccaaagctgccacagcagccgcagatttcacggccaaagtgtgggatgctgtctcaggagatgaattgatgaccttggctcataagcacattgtcaagactgtggatttcacacaggatagcaactacctgttaaccggggggcaggataaactgctgcgcatatatgacttgaacaaacctgaggcagaacctaaggagattagtggtcacacttccggcatcaaaaaggctctgtggtgtagtgaggataaacagatcctttcagctgatgataagactgttcgtctttgggatcatgctacaatgacagaagtgaaatctgtgaattttaacatgtctgttagcagcatggagtatatccctgagggagaagtcctggttctcacttacgggcggactattgcttttcatagtgcagtaagtctggagccaattaaatcatttgaagctcctgcaaccatcaattccgcatctcttcatcctgagaaggaatttcttgttgcaggtggagaagactttaaactctataagtatgattataacagtggagaagaattagagtcctacaaaggtcactttggtcccattcactgtgtgagattcagtcctgatggtgagctctatgccagtggttctgaagatgggacattgagattgtggcaaactgtggtaggaaaaacctatggcctttggaaatgcgtgcttcctgaagaagacagtgctgaactggcaaagccaaagatcggttttccagaaacaacagaagaggagctggaagaaattacttcagagaattcagattccatgtattcttcaactcctgaagttaaagcctgagcatcagatgtttgccatagaaaccatatagtttatggactaaacaagcgccttcagagttactctctccatgtggcaaagagggcagaaaacattggggagtatgaatttgctccagtgcacgaacaactactcggttttcctgtgagtgagaatggctgagtgtgaggtgcaggcgggagggctttgctaatgagtgccacgccctgctgtctcagtgaacatgccaacgtacaattcccatttcacacttacgtttctggtagctgtttatgttatggagaagaaaaatatattggcctatttttctgacttttcccttaaagcagaatgtctttttctctttgcttagttgtgaagaagaggaaatacatgataaagtaactggtttgatctctttcattgtacactgactgcttctggacatctaatattttttagttatctaaataaaatgcctctaaaacaaaataatgttctgtttctttgggaaattctgatacatttgagtattaaaactggaagtacccagaaagtttcttcatcatacacagcagtgtgtagcaagtgacagtttggttacaggatctgagctgaacatgccctaattttgaaattcaattgtataaacttgaaattttcctgggtgttcatttacttccttccagattgatagaattgcttctctttcctcttgaaatatgcatgttacttacttaagaagaaaagcaagtagaaagag

SEQ ID NO: 2983 - DNA, 1805 bp, Cricetulus griseus
ggcggcggcggcggcggcggcggcagtgcggacccggatcctgcaggtttcttctaaagtaaacacgtggcatctggcatcctccttttcttcatcatcagtgccaactgtaaaactcttcattgatgggaaatttgttgaatccaaaagcgacagatggattgatatccacaacccagctaccaatgaaatcatcggtcgggtacctcagtccaccaaagctgaaatggatgcagctgttgctgcctgcaaacgtgctttctctgcatgggcagacacatccattttaagccgtcagcaggtcctgctccgctatcaacaacttattaaagaaacctgaaagaaattgccaagttaatcacattggaacaagggaagactctagctgatgctgaaggagatgtattccgaggccttcaggtggttgagcatgcctgtagtgtgacatccctcctgatgggagagaccatgccatctatcaccaaagacatggacctttattcctaccgtctgcctctgggtgtgtgtgcaggcattgcaccatttaatttccctgccatgatccccctttggatgtttcccatggctatagtttgtggaaatactttcctaatgaaaccatcagagagagtacctggagcaactatgctccttgctaaattgtttcaggatgctgggacccccgacggagccctgaacatcatccatggacagcatgaagctgtgaattttatttgcgatcacccagacatcaaagcaatcagttttgtgggctccaaccaggcaggagagtatatctttgaaagagggtcaagaaatggcaagagagttcaagccaatatgggagccaaaaatcatggagtagtcatgccagatgccaataaggaaaatacactaaaccaactggtcggggctgcatttggagctgctggccaacgctgcatggctctttcaacagccatccttgtcggagaagctaaaaaatggctgccagagctggtggaccgtgccaaaaacctgcgagtcaatgcaggggaccagcctggagctgatcttggccctctgatcaccccccaagccaaagagcgagtctgcagtctgatagatagtggaacaaaagagggagctaccatccttttggatgggcgaaaaattaaagtcaaaggctatgaaaatggtaactttgttggaccaaccatcatctccaatgtcaagccaagtatgacctgttacaaagaggagatttttggtccagttcttgtggttctggagacagagacattggatgaagccatcaagattgtaaatgacaacccatatggaaacggaactgccatctttactaccaatggagccactgcacggaaatactctcacttggtggatgttgggcaggtgggcgtcaatgtccccattccagtgcctttgcccatgttctccttcaccggctctcgatcttccttcaggggagacaccaatttctatggcaaacagggcatccagttttacactcagcttaagactatcacatctcagtggaaagaagaggatgctactctttcctcacctgctgtagtcatgcctaccatggggcgttaggaacaagttcttcaagactcagtccaactggtgtaatttcccatcactcttggccaccctcacttgtcatctttgctcaaatcagatccatgagaatggaatatgttgcagccaatctctttctcagaactgtcagttccttcaaattaatagagagactgcagggaaacactaatgctgggtctgcacttgctcttcatacgtct

SEQ ID NO: 2984 - DNA, 1804 bp, Cricetulus griseus
gggtggccgggccggttttggatcctgcaggcagcggggaactgaaggaagcgacgccgagaaagcgggcgcaccacagaggcagagacgaggtctggaagcccggcaacgcttttacgcacagctgccaaccggccgccgccggcggtctccagttcccgaggacgcgcgaccggacaccgggtcccgccgcagccgaggacagctcgccgctcgcagcagcgaggcctggggcggcccttcagggggacctttcccagacccagaccgcccggatgtgcacgaaaatggaacagcctttctatcacgacgactcatacgcagcggcgggatacggtcggacccctggcagcctgtctctccacgactacaaactcctgaaacccaccttggcactcaacctgacggatccctaccggggtctcaagggcccgggagcgcgcggcccgggcccagagggcagcggggcagcaggcagctacttttcgggtcagggatcagacacaggcgcgtctctgaagctcgcctccacggaactggagcgtttgatcgtccccaacagcaacggcgtgatcacgacgacgcccacgcctccgggacagtacttttacccccgtgggggtggcagcagtggaggcacagggggcggcgtcaccgaggagcaggagggcttcgcggacggctttgtcaaagccctggacgacctgcacaagatgaaccacgtgacgccccccaacgtgtccctgggcgccagcgggggtccccaggccgggccagggggcgtctacgcaggtccagagccgccccccgtctataccaacctcagcagttactccccagcctccgcaccctctgggggcgccggggccgccgtcgggactgggagctcgtacccgacggccaccatcagctacctcccacacgcaccaccctttgcgggcggccacccggcacagctgggcttgggtcgcggcgcctccgcctttaaggaggaaccgcagaccgtaccagaggcacgcagccgcgacgccaccccgccggtgtcccctatcaacatggaagaccaggagcgcatcaaagtggagcgaaagcggctgcggaacaggctggcggccaccaaatgccggaagcggaagctggagcgcatcgcgcgcctggaggacaaggtgaagacgctcaaggctgagaatgcggggctgtcgagtactgccggccttctccgggagcaagtggcccagctcaagcagaaggtcatgacccacgtcagcaacggctgccagctgctgctgggggtcaaaggacacgccttctgagcgcctccctcgctcgccccgcacggacaccccggccgggaaggctggacgcccgcccccccctggggtgaggggggcgggcgatgggcaccggcccggaggtctggagcgccgcgcacacactggactctggctcgctcgcctgcgcccagtccttccacctcgacgtttacatggccccccttccagcgtattttgtatgttttttttttctgggaagagaccggattcatattgaatataatatatttgtgtatttaacagggagggagaagggggctacgctatcgcggcggagctggccccgccgcctggtactcagcctgccgggacactagggagggacctccgccccctgccctccccctctgcacaggactgtggagaagaaacacgcacttcgtgtctagagtctattttaagatgtgtttgtgtgtgtgtgtttgactttttattgaatctatttaagtaaaaaaaaaattgtctttatt

SEQ ID NO: 2985 - DNA, 1804 bp, Cricetulus griseus
aagatatgggagagaatggagtcttctgagagaagtcctcagacagggcctggccagagccaggccaatggctttgagctacaagagccactgttcattttggaggaacatgagctgggggccatcactgaggagtttgccgtggcttctccggaaagttcctctccccccgagcagcccaacccagcccacctggcccaggagctgaaagagctggtgaaagagctgagcagcggggcccaggggggagctgggttaccccactgcatccccgtattgtacagctctcccatgtgatggacagccatatgagcgagcgtgtcaagaacaaggtctaccagctggcccgccagtacagcctccgaattaagaacatcaagacagctaggccacctctgcagtgggataaagcaactcctgaccaggatgagcagaatccccaacatctccggcctgccagaagaggaagctgtagagctgttagggggcaaagccaggagaaagcctgtgctgtcactcctcagctatgagcagctgatggctcaagatcagggcacctccaaatttcctctgctgcggagacctccccacgccgtgtctccctcagcccttccgcgctcagcccaagaaccacctcccccgggtctcagccttctactcggagccctctcagccccttcgacactgagaccttcaactggcctgatgtccgagagctctgctccaaatatacgtcccatgacaaggctgcccaagccgagagcaactggccacgtggcctgctggtcaaccggagccgctccttgcctgagaacatagtagagcctcctgtgtctggcaaggtgggcctctgctgcagcatgaacactaagaggccccagcaaggtggggaggcatcccaccctccaccttctcaccctcctcctcaaagcagcctgaatggaggtgaatctctgtatatcaccgcagaccttaccctggagaacaaccatcgagtgattgtcatggagaaggggccccatcctatctccactgtggggctggaggagggcagtgggaaggaaccaagttccccagtggttttgaagggacggggccaaggttttcaggagtgtgcagagtaccaccagcccaaggaagaaggtcccagggacccagctgacacaagcaagcagggtagagtgagaaacctgagggagaaattccaggccttgaactctgtgggttgactgactcttcaaggagagaacagcggcgtggctcactaaggctgttcctccattcttctggaaaagtggtttggggtacctgtgtgaacgtacctgctatctgtgctggcacaccctcacctcctcagggaggtcctgataactttccttaggcccagatgagccacttaccttgtaaatacttctctgataagaaaccaaatattttatttaagcttactctgcccagggagagcaagcactgtcctcgcttcccttactggcttgccgttgcctggctgaggacccaagggcagagctaggaagcagcccaggcaggctttgctcttcacctgccttttcttagggcctaggcaggaatgaggccaataatttattgctttcaatcctgtggtgtgtgtgcgtgcgtgcgtgcgtgcgtgcgtgcgtgcgtgtgtgtgtgtgtgtgagtcctgtgaagaatgtaacagactttgttcaggtactctcgaaggttttctttgctggccctgtggttgttggtgatgtacacacatttcattatttgtcaatggcacaataaccactgctgacca

SEQ ID NO: 2986 - DNA, 1802 bp, Cricetulus griseus
gggattgcgtatcacatgaggtcagagcacgggcctgtcttcttcccagaatcaggacagcaagactgtttgaaggagatgagtctggaggcaaaaggtggaggctgagttcagcggcgttctgccaagatagctgtgtaccatctgcaggagctggcctctgctgagctgaccaaggaatggccgaagaggaaggtgctcaggacctggtgccagatgatcggaaagttaaaatatactcgccctgggttacctacattcagccaggaagtactgcacaagtggaaaacagatattaagaagtatcatcgcatccagtgtcctaaccagggctgtgaggctgtctacagcagtgtgtctggccttaaagctcacctgggctcttgtacactgggcaactttgtggctggaaaatacaagtgtcttctgtgtcagaaagaatttgtgtcagagagtggtgtcaagtatcacatcaactctgtccacgccgaggattggtttgttgtaaacccaacaaccaccaaaagctttgagaagctgatgaagatcaagcagcggcagcaggaagaggagaagcagcggcagcagcagggaagtcgacggtctctgagaagacagcagcagcctcgccctgagcagccagagagtcaaccggagtcccgggcaggggaagggccagggtgggaatgaggaactggtggtttctttgttctttcctgtctgggaaatgaatgttcttggaatctttgttgatttagtggcttctccatcatctagcttataaaacagttcctaactaatttttttaaaaagccttaacaggctttatccttctgtatttgtaacataagaggactagaaaggagaactgccacttttgttacagtgtgaccctgaaccccaggaagcagaacccaaccaaggatacttatctgtaatttgtttttactgttgagaggaagaaaatgattgagcatgaaaaagctctgtgttgactccatgccctggcctctggaaatgccactggggttgcaaaccaaggtgagcttcccctctcccctgcacttacctcacgttagaccacacccacttaagtcctcacccagggcattggcccacttctgtccctgaatgttctgagaatattgtcctactgttttgtacatggagttttatctgctttatattgtgagcttttgtacaccagatgtagatatttctctggagccggaaagaatggtctctctctgtacctcatgcctgtctggtggtgttcagtgggctctctccctgtgagggtggatgtctttggaacgtggcttagattaagtagccttgttgtcgtgtttctggtttctctttctccttctgtataaatattgttcttctatattcctgcctattgtatatgcctattgcatatgccactgacaaagttaaccttgatatggacaaatactaccttttcaaacccgaaaaggctatttgccgccctgaagtctctgttctctgtgctcctctaaatagctttatcatgtgtgctttgtgaagatcacttttcaataatggggcattaatacttgaatcaggcactgccagaaggggttatgtggaaacaggtcacggaaatgatgtatttgtgctgtttttattcctatgtatacccttgaagcccctgtagtagatgagggttgtcgaggaggagaaatgagaagctgtgctaagttctggtgacaaggacttgggtactgtttggcaatggcaaataaaatgactcaatgagaaaaaaaaaaaaaaaaaaa

SEQ ID NO: 2987 - DNA, 1801 bp, Cricetulus griseus
gatgcagatcctcggcctggtggtctgtcttttcctttcggtcctgctttctgggaggcccacggggtccattccacatgtggaccccgaagcaaacatgaacgtgaccgaaatgatcaggtactggggatacccgagtgaggagcatatgatccagacagaggacgggtatattctgggtgttcaccgaatccctcatggccggaagaaccattctcacaaaggtcccaaaccagttgtctatcttcagcatggcttcctggcagattctagtaactgggtcacaaactctgacaacagcagcctgggcttcattctggccgatgctggttttgatgtgtggctggggaacagcagaggaaacacctggtctctgaaacataggactctctccatttctcaggatgaattctgggccttcagttttgatgagatggcaaaatatgacctacctgcttcaatttattacattgtgaataaaactggtcaagaacaagtgtattatgtgggtcattctcaaggcaccaccataggttttatagcattttcacagatacctgagctggcaaagaagattaaaatgttttttgccttggcccctgtggtgtttctcaatttcgccttgagccctgtgatcaagatttcaaagtggccagaagttattattgaggacttgtttggacacaaacagtttttcccccagagtgctaaactgaaatggctgagcactcacgtttgcaatcgcgttgtcctgaagaagctttgcacaaatgtcttctttcttatatgtggtttcaatgagaagaatttaaatgagtctagagtgaatgtgtatacatcacactctcctgcgggaacctcggtgcaaaacttacgacactggggccagattgctaaacaccatatgtttcaagcttttgactggggaagcaaggccaagaattattttcattacaaccagacttgccctcccgtgtatgacttaaaagacatgcttgtacccactgctttgtggagtggggaccatgactggctggcagaccccagtgacgtcaacatcttgctgactcagatccccaacttggtgtaccacaagcgcctccctgactgggaacatctggattttctctggggtttggatgccccctggaggatgtataacgaaatagtcaatctattgaggaaataccagtgaaaacctgacttgagataattaccctttagtagtacggggcaaaaaaaaaacatgtttagctttcgaatttctgtaaaatgcttgtgtttttcccttgccctagatcttttgttatttcagctagactggctgaccaactgaacctccaggatctgcctgtctctaccttcctctctcatcagtgctttttactttggttctaggggcataaactcaggttctcatgcttgtgaaaaccaaagacaaaggaacaacaaaaccaaagtgctcagttctcttttctttgccttagatgctctccagcccagtgttcctgtgtttacctgcctcaacaacattttcatgttttatgcactaactacctagtcaaatccagtgttaccccagccttgtcaggaatattctttcttcaagttttaccaaacctcaataacaaaaaaaaaattaaaaaaaaaaaagttaaattaatgatgcagcaatattacttgatattggctcatacatgcagacagaatgatacaactttgtaacattttaaaggttcgtatttgaacttttcaataaagctcagcctcacaggcctgaacaaaaaaaaaaaaaaaaaaa

SEQ ID NO: 2988 - DNA, 1801 bp, Cricetulus griseus
cgtcgaccggggaggccgagggagcggagcgccgagggcacccgcccgctcggaagccagaccccgaggcgggcaggatggaccaccaccagctggggactggccgctaccaggtgcttcacaatgaagaagaccattcagaatcatctgctgtcgagcagccatcaacttctaactcaacagcacacgctgtgggagctgctccttcagcaccagccctggaaaccgactctgcgcctccaccctatagtagcattactgttgaagtacctacaacttcagatgctgaagtttacagtgagttttaccccgtgccacctccatacagtgtcgctacctctcttcctacatacgatgaagctgaaaaggctaaagctgccgccatggcagccgcagcagcagaaacacctcaaagaaaccaggaggaagagtgtacaccaagagatgacttcagtgatgtagaccagcttagagtaggcaatgacggcattttcatgctggcatttttcatggcattcattttcaattggcttggattctgcttatccttctgtatcaccaacaccatagctggaaggtacggtgccatctgtggatttggcctctctctgatcaaatggatccttattgtcaggttttctgactattttactggctatttcaatggacagtattggctttggtggatatttcttgtacttggcctgctcctattcttcagagggtttgttaattacctaaaagtcagaaacatgtctgaaagtatggcagctgcacacagaacaagatacttcttcttactatagagattgcatcaagccaacattcctttcttataccaatgtgaaatgtccacgtcatctgtaaacctgcagctttgctaagatagaagactgctgagagcagaagaaaacttagagagaggtggagcttcaacatgaaatggcagggtggtttaagcttaaaagccattctgctcattgtttaattatctgtatttcatttattttgcacatttgtatatgtgcctatttaaaagatacgcatatacttgaaagaatccataaagttgttgcagcaaagtccggtcacacttggttaatcagtgtttgatataattggaagagttgagtgataaacacttccagcatgtaaatgcttctaacttgaccactagtgtaataaaaattacattattaatcttgtcaaatgctttagtttctggctcttagattcatttggtatttccaaacatgaaatattctttgctatagataatgtttattaaaacttgcagtgtgattattagaaaagatttgtcaaatttttgagtatgatattatttagggaaactgtaaataaccatgcataagttgctttttacattcttttcttagaattgtgtctagatttcttttcattaatttaaaattaagtaaactaaatatatagaaataaactttgttcaagatagagtggtttcagatgaactttaagaaaatgagtaaaccaaacgttgtttaaagaaaagctaagcggcaatactagttttaggggttttcaaatgagaagcttacatttaaggattactcaccttagcagttcttacaagaagatattacattagatcttatatttatttacatctaagacaattcaaaaaattgatttatcaaatattctcatttgcatttgtcttttaaaagccaataaaagttatctttcaatattactgtaatcattttttctttaaatgcttagtttgttaaaacttagcaaataaaatcctgttctgttaata

SEQ ID NO: 2989 - DNA, 1801 bp, Cricetulus griseus
tgaaatacttctgaagaaaaagatctacaaagatcagatggaatacatgttgcagaatcatgtatttcctctcttcagcagtgagctaggctacatgagagcaagagcttgctgggtacttcactatttttgcgaagtgaagttcaagagtgatcagaacctccaaacagctttagagctgacaagaagatgtctgattgatgatcgagaaatgcctgtaaaagtggaagctgccattgcactgcaagtgttgatcagcaatcaagaaaaagctaaagaatacatcactccatttatcagacctgtaatgcaggctcttcttcatattataagagaaaacagaaaaatgatgatcttacaaatgtaattcagaaaatgatctgcgaatatagtagaagaggttactcccattgctgtagaaatgacacagcatctggcaattacatttaaccaagtaattcagactgggccagatgaggaggaagtgatgacaaagcagtcaccgctatgggaattctaaaatacaattgacacacttctgagtgtggttgaagatcacaaagagataacccagcagcttgagggaatctgcttacaagtcattgggaccgttttacaacagcatgtcttagaattctatgaagagatcttctctttggcacatagtctgacatgtcaacaagtgtctccacagatgtggcagttactgccccttgtatttgaggtatttcagcaagatggctttgattactttacagacatgatgcctcttctgcataactatgtaacagttgatacagatacactcctatctgataccaagtatcttgagatgatatacagtatgtgtaaaaaggttcttactggagttgcaggagaagatgcagaatgccatgcagcaaaattgttagaggtcatcattctacagtgcaaagggcgtggcatcgatcagtgtattccattattcgtggaagcggctttagagagactgacgagggaggttaagaccagtgaacttcgaacaatgtgcctgcaagttgcaattgcagcattgtattataatccacacctacttcttaataccttagaaaatctacgcttccctaataatgttgaaccagttacaaatcattttatcactcaatggcttaatgacgtagactgtttcctggggcttcatgacagaaagatgtgtgttctcggcttgtgtgcccttattgatatggaacaaataccacaggttttaaatcaggtttcaggacagattttgccagcatttatccttttatttaatggattgaaaagagcatatgcctgccatgcagaacatgagaatgacagtgatgatgatgatgaagctgaagatgatgatgaaactgaagaactggggagtgatgaagatgatattgatgaagatgggcaggaatatttagagattctggctaagcaagcaggtgaagatggagatgatgaggattgggaagaagatgatgctgaggagactgctctcgaaggctattccacaatcattgatgatgaagacaaccctgttgatgagtatcagatttttaaagctatatttcaaactattcaaaatcgtaatcctgtatggtatcaggctttgactcatggtcttaatgaagaacaaagaaaacagttgcaggacatagcaactctcgctgatcaaagaagagcagcccatgaatctaaaatgattgaaaaacatggaggatacaaattcagcgctccagttgtgccaagttcatttaattttggaggcccggcaccagggatgaattga

SEQ ID NO: 2990 - DNA, 1800 bp, Cricetulus griseus
aggaaatgccggagccaaagttcatgtatgggagtcactactcttccccaggctatgtgctcttttacctcgttaggattgcaccagagtatatgctatgtctacagaatggaagatttgataatgcagatagaatgttcaacagtattgcagaaacctggaaaaactgtttggatggtgcaacggattttaaagagttgattccagaattttatgacgaagacatcagctttttagtcaatagtagttggatctgggaaagagacaaggaggacagatggttgacgatgtggagcttccggggcctcaagtccccaagactttctccagaagaacaaagatgcgttggaaagcagctatgtgtccgagcaccttcatgagtggattgatctgatattcggatataagcagaaagggagtgaggctgtaggggctcataacgtatttcatcccctgacctatgaaggtggtgtagaccatgctgacccaaattttggaatttgggcagacaccaaaacagttatttgtgacaccacatcctcgaaggatcacccccaaattgaaaagtatgtcccaagcctccagctatagcgcttctgtgacagattccccaggttctccaggggaggagtcgtttgaagacctgaccgaggaaagcagaagtctggcctggaataatatcaccaagttgcagctacacgagcagtacaaaatccacaaagaggcagttacagggatagcagtgtcttgcaatggctcttcggtcttcaccacatcacaagattccactttgaagatgttttctaaggaatccaaaatgctacaaagaagcatatcattttcaaatatggctttatcatcttgtttacttttgtccaggagacaccactgtcataagttcttcatgggataataatgtctatttttactccatagcatttggaagacgccaagacacactgatgggacatgatgatgctgtcagtaagatctgttggcataacgacaggctatattctgcatcttgggactctaccgtaaaggtgtggtccggtgttcctgcagaaatgtcaggcaccaaaagacaccagtttgacttggtggccgagctagaacatgatgtcagtgtcaataccatcaatttaaatgctgtaagcacactgttagtttctggcaccaaagaaggcatggtaaatatttgggacctcactacagcaacattattacaccagatttcatgccattcagggacagtatgtgatgctgcttttagcccagatagtcgccatgtcctcagcacgggagtagacggctgtctgaaggtgatcgatgtgcagacaggcacactcatctcctccatgacctccgaggagccacagaggtgcttcgtctgggatggaaattctgtcttatctggaagtcggtctggtgaactgtttgtttgggacctccttggagcaaaaatcagtgagcggatacagggccacacaggtgccgtgacatgcatatggatgaatgaacagtgtagcagcatcatcacaggaggagaagacagacaaattatgttttggaaattgcagtattaagtgccttttcctctctattaagttcaattctatttaatgtgtttttaaaccaaacttttaactggtgaatgtgcaatggtagtacttagaagtttcaccacatgaagaattggtggtgtcaacttcctaaatcatggtgacttcattcaaagccatttgtcatcatcgattagggcaggtaaaaacacgacagtcttaggggcaagaacacaga

SEQ ID NO: 2991 - DNA, 1799 bp, Cricetulus griseus
atgtcaacagcagcgactgcattgtggtggacactatgcagtgtcctgccatgcccaacaagagtgtgctgctgtacacgctctccttcatctacattttcatctttgtgattggcatgattgccaactccgtggtggttctggggttaacatccaggccaagaccacaaggctacgacaacacactgctacatcttgaacctggccattgcagacctgtgggtcgtcatcaccatccccgtctgggtggtcagtctcgtgcagcataaccagtggcccatgggtgagctcacatgcaaggtcacacacctcatcttttccatcaaccttttcgggagcatcttcttcctcgcatgcatgagcgtggaccgctatctctccatcacctacttcaccagcacctctagctataagaagaagctggccgcgccgtgttgtctgcatccttggtgtggctgctggccttctttgtgtctctgcccgatacctactacctgaagacggtcacatctgcttctaacaacgagacctactgccggtccttctaccccgagcacagtatcaaggagtggctgataggcatggagctggtctctgtcatcctgggttttgccattcccttcaccatcattgctatcttctacttcctgcttgccagagccatgtcagcatcgggtgaccaggagaagcacagcagccggaagatcatcttctcctacgtggtggtcttcctggtgtgttggctgccataccatgccgtggttcttctggacatcttctccatcttgcactacattccattcacctgccagctggagaatgtgctcttcacggcgctgcatgtcacacagtgcctgtccctggtgcactgctgtgtcaacccagtgctctatagcttcatcaaccgcaactacaggtacgagctgatgaaggccttcattttcaagtactcagccaagacaggcctcaccaagctcatcgatgcctcccgcgtgtcagagacggagtactctgccctggaacagaacaccaagtgatcgctctctagagggcgtggggatataggcatgttgccagtggaacactgggccctgtggtttctacaagaaagcaatgtagctttgggtccggttgcttgagcggtatgaagaggagaaggtgtgtgactgtgcttcctgtctctccttctccagccaaggtggctgtcacctggacactcaccctggcagcttgcagcaggcaggctgtgctgtgcagccagagctgtatataaaagccagcctcaggacaggcgcatggacatctgtacaataaatagaaccttctgtgtctcctcaagtttttacttggtggcttttgtatttaatttttaagactttattttctcactatggatgtaccttataaatgtatttgaaagttaaatatattttaaatattgtatgggaggtgtaatgctgttgtattcagaccacgtaggcctcagattagctggacttgagttttgactaaggatgacattaattgttagctgatttgaaattatatatatataagtatatatatatatatataatttatgccagtcttggctgaaatgttttatttacaatagttttatatctgtgtggtgttttgtgcctgcacaggatatggaacaaaaactgccccgcaatgcagtttgtgacatgaaccgtattgtagagttatgtttctggctgcaaacccgtgaacaaagggaacagggtgttctctttatttgtaagttattttttaataaagatttttgtttcctaaaa

SEQ ID NO: 2992 - DNA, 1799 bp, Cricetulus griseus
gcgctccgcacctcggagtcgctgcgagccttcccgcccgctggtcgccgttctcagccatggctcttcgctgctggcgctggtggcgctggtccgcgcggccgggggcccggccgcctccctccaggagcatcccgaccccaggcttctgccagcagttctccacgcaagagacccctcagatctgtgtggttggcagtggcccagctggcttctacacagcccagcacctgttaaagcaccacacccaggcccatgttgacatctacgagaagcagtttgtgccctttggcctggtgcgctttggcgtggcacctgaccaccccgaagtaaagaatgtcatcaacacgtttacacacacagcccgctcagatcgctgttctttctggggcaacgtggtggtgggcagggatgtgtcggtgccggagcttcaggaagcctaccatgcggtggtgctgagttatggagcagaggaccaccagaccctgggaattcctggcgaggagctacctggggtggtctcagcccgggcctttgtgggctggtacaatgggcttcctgagaaccaggagctggcaccggatctgagctgtgacacagctgtgattctgggacaggggaacgtggctctggatgtggcccggatcctgctgaccccacctgagcacctggagaaaacagacatcacagaatctgccctgggggtactgaggcagagtcaggtgaagactgtgtggatagtgggccggcgtggacccctgcaagtggccttcaccattaaggagcttcgagagatgattcagttgccaggaacccggcccattttggatccttcgaatttcttgggcctccaggacagaattaaggatgtcccccgtccaaggaaacggctgacagaactgttgcttcggacagccacagagaagccaggcatggaagaggctgcccgccaggcactggcctccagggcctggggcctccgctttttccgaagcccccaacaggtgctacccacaccagatgggcaacgggtagcaggcatccgcctggcagttaccagactggagggtgttggtgagtccactcgggcagtacccacggaagatgtggaggacatcccttgtgggctggtgctgagcagcgttgggtataagagccgccccattgatcccagtgtgccctttgaccccaagcttggagtcattcccaacacagaaggccgggttgtgaatgttccaggcctctattgcagtggctgggtgaagaggggacccacaggtgttatcaccacgactatgacggacagcttcctcaccagccaactgttgctgcaggacctgaaggcggggctgctgccctctggccccagacctggctatacagccattcaagcgctgctcagcagtcgaggggtccggccagtctctttctcagactgggagaagctggatgctgaggaggtatctcgaggccagggcactgggaaaccgagggagaagctggtggatccgagggagatgctgcagctgctggggccctgagcctggaccccagcccccccatgagggaagacgcggggccggagggaggcagtctgagttggactcttcccagatacagtgctgactggcctggcttggaggccgagctgtggcccttccaggggcctctgagctctgccttctgcaagttgaccttgccagtgtgggtctaggccaaggagggaacctttggctggggatgaatggatgtacaggctgactctacccccttctgattccctcctgatgaactttgga

SEQ ID NO: 2993 - DNA, 1798 bp, Cricetulus griseus
ggcgaacgcatttgcgctctcgcttccgaggcctagcgggccttcagtggccgagaggttaggcgtttcagtggggtgagagctcgcggccagccgcgcagcgccgtgacccggcctcaccatgctggtcttatttgagacgtccgttggctacgccatctttaaggttctgaatgagaagaaacttcaagaggttgatagtttgtggaaagaatttgaaacgccagaaaaagcgaataaaatagtaaagctaaaacattttgaaaaatttcaggatacagcggaagcattagcagcatttacagctctgatggagggcaaaatcaataagcagctgaagaaagttctgaagaaaatagtaaaagaagcccatgaacctctggctgtggctgacgctaaactaggaggggtgataaaggaaaagttgaatctcagctgtatccatagtcctgttgttaatgaacttatgagaggaattcgatcacaaatggatggcttgattcctggggtagaaccacgtgagatggcagccatgtgtcttggattggcccacagcctgtctcgatacagattgaaattcagtgctgataaagtagatacaatgattgttcaggcaatttccttattagatgacttggataaagaactaaacaactacattatgcggtgtagggagtggtatggctggcacttccctgagttggggaaaattatttcagataatttgacatactgcaagtgtttacagagagttggtgacaggaagaactatgcatctgccactctttctgacttgctgtcagaggaaatggaagctgaagtgaaagcagccgccgagatatctatgggaacagaagtttctgaagaagatatttgcaacattctacatctgtgtacccaggtgattgaaatttctgagtatagaactcagttgtatgaatatctgcaaaatcgaatgatggccatcgcacctaatgttacagttatggttggggagttagttggagcacggctcattgctcatgcaggttctcttttgaatttggccaagcatgcagcttctacagtacagattcttggcgcagaaaaagcacttttcagggcccttaaatctagacgagatacccctaagtatgggctcatttatcatgcttctctggtaggccagacaagtcccaaacacaaaggaaagatttctcgaatgctggcagccaaaactgttttggctatccgatatgatgcttttggtgaagattccagttctgcaatgggagttgagaacagagccaaattagaggccagattgagaattttggaggacagagggataagaaaaataagtggaacaggaaaggcattagcaaaagcagaaaagtatgaacacaaaagtgaagtgaagacatatgatccctctggtgactccacacttgcaacttgttctaaaaaacgcaaaatagaagaggtagataaagaggatgaaattactgaaaagaaagcaaaaaagcccaagattaaaattaaagctgaggtagaagaggaggtggaggaggtagaggaggtggaggaggaagaagaacaggtagaagaggagccatctgtaaggaagaagaagaagaaggataaaaagaagcacattaaggaggagccgctttctgacgaagagccatgcaccagcacagcaattcctagtccagagaaaaagaagaaaaagaaaaaaaagaaagaagctgaggactgatggaaaggaactgtaattctgtcaaccggacacatcatgcttaagattcagttgggagca

SEQ ID NO: 2994 - DNA, 1798 bp, Cricetulus griseus
gcaggcgggcggccgggtgggtagcgcggcgcgggcggtcagcaagcatattctaggcacggggcccccgcccgggacgacttgcgccgggcggcaatagtgagaggcctctaagggactcgcgcggcgccgcccgtcgagaagctgaggcgggggccagacccggccgtcgaagagcgcaagaggccggtgggccgggccgcgcgtcgcagctatgcctggctttacgtgctgcgtaccgggctgctacaacaactcacaccgggacaaggcgctgcacttctacacgtttcccaaggacgctgagctgcggcgcctctggctcaagaacgtgtcccgtgcgggcgtcagtgggtgcttctccaccttccagcccaccacgggccaccgtctctgcagcgttcacttccagggcggtcgcaagacctatacggttcgcgttcccaccatcttcccgctgcgtggcgtcaatgagcgcaaagtagcgcggagacctgcaggagctgcggctgcccgccgtaggcagcagcagcagcagcagcagcagcaacaacaacagcagcagcaacagcaacagcagcaggcgtctcagtcctcctccactgcccagaccacccagttgcagccgaacctggtgtctgcctctgcggccgtgcttctcacccttcaggccgctgtagacagcagccaggcttcgggatccgtggctccggcgcccaccactccctcgggagatgatgtgaagcccatcgaccttacggtgcaagtagagtttgcagctgctgaaggctcagccgccgctgccgcgtcagagctagaggctgctacagctggcctggaggccgctgagtgcgctctgggccctcagctggtggtggtaggggaagagggcttccctgatactggctccgaccactcgtactccttgtcgtcaggtaccacggaggaggagctcctgcgcaagctgaatgagcaacgggacatcttggccctgatggaagtgaagatgaaagagatgaagggtagtatccgccatctgcgtcttaccgaggccaagctccgtgaagaacttcgcgagaaggatcgcctgcttgccatggctgtcattcgtaagaagcatggaatgtgaatggttcccttcagcaacctgcagaattcgtgactccttccagcccaaggaatcctcaggcggatgttgaactcccaatattctggttgacagtgctgaggtttagggcagcgggactctcatctggcaccctcatttgtttgctcctgaagtaggagttgggaacttaagaatctggtgacaccagcaattatgactttgtctttcactccccagtttatgttccagattctggttaagcaaatgtttcagaaccattgaacttgaaacttatcctggagggatgcaggtgggactcttaggaactttgggattcagaaaaccacatctttaggttggccagcgattggagacagctttggtgtgtgtagtgataagagatctcaataacatcatttctccttttcatgcttacctgtttcaggttcggcctgtgattctgatggggactagttggtctgtgcctctgccttctaggacctttctacccagaaggtcatttatgagagggctctgggtgacttgctgatggagatccagcttaccagggacttaggtttatctctgttatgtttgctaccggttaaaattctattttctgtacaattagactaaagttttcactgtgtttgtttggcaaaacaaaattaaaaaaaaaagtaaggtttt

SEQ ID NO: 2995 - DNA, 1797 bp, Cricetulus griseus
agagcacgttgttctcggcctctccctgagctcggccggccatggcggcggtgaagagcctaaaccctaaagccgaggtggcccgggcgcaggcagcgttggccgtgaacatcagcgcggcacggggcctgcaggatgtactgaggaccaacttggggccgaagggcaccatgaagatgcttgtttctggtgctggagacatcaagcttactaaagatggcaatgtgctgcttcacgaaatgcaaattcaacacccaacagcttctttaatagcaaaagtagctacagcccaggatgacataactggtgatggtactacatccaatgtccttatcattggggagctgctaaaacaggcagatctctacatttctgagggtcttcatcccaggataataactgaaggttttgaagctgcaaaggaaaaggcactccagtttttggaacaagtcaaagtaagcagagagatggacagagaaacactcatcgatgtggccagaacatctcttcgaactaaagttcatgctgaactcgcagatgtcttaacagaggctgtagtggattccgttttgtccattaagaaaacaaatgaacccattgacctcttcatggttgagatcatggagatgaaacataaatctgaaactgatacaagcttaatcaggggacttgttttggatcatggagcacggcatcctgatatgaagaaaagagtagaaaatgcctacatcctcacgtgcaacgtgtccttagaatatgagaaaacagaagtgaattctgggtttttttacaagagtgccgaagagcgagaaaaactagtaaaggctgaaagaaaattcattgaagatagagttaaaaagataatagaactgaaaaagaatgtctgtggtgattcagataaaggatttgtcgttattaaccaaaaggggattgaccccttttccttggatgcacttgcaaaagaaggcatcgttgctctgcgcagggccaagaggagaaacatggagaggctgacacttgcttgtggcggtatagctctgaattccttagatgacctgaatcctgactgtttggggcatgcaggtcttgtctatgagtatacattgggcgaagagaagttcacctttattgagaaatgtaacaatccccgttctgtcacattactggttaaaggaccaaacaagcacacactgactcaaatcaaagatgcaataagagatggcttgagggccgtcaaaaatgctatcgatgatggctgtgttgtcccaggcgctggtgcaatagaagtggcaatggcagaagctctgattaaatacaagcccagcgtgaaaggcagggctcagctgggagtccaggcatttgcagatgccttgctcattattcccaaggttcttgcacagaactctggttttgaccttcaggaaacattagttaaagttcaagctgaacattcagaatcgggtcaacttgtcggtgtggacttgaacacaggtgagccaatggtggcagcagagatgggtgtgtgggataactactgtgtcaagaagcagctgcttcactcctgtactgtgatcgccaccaacattctcctggttgatgagatcatgagagcggggatgtcctctctgaaaggctgagggatgttttaactaacattgacacaaaaattacatattaagatgtggttgtattttaaattagccaactaactccctgttaaacatgtaagattcttgccagtgcagaacacatctgggtaatttatggttttcatagtgtctaataaatacttaaaag

SEQ ID NO: 2996 - DNA, 1797 bp, Cricetulus griseus
agaggtgttttcgggcggtttccgagttcttgctccgcattgggcctgcagagttgagcccggctcgggtctcacgccctggtggtatcgaccttggatctcgtcagctcctcacctcctccctccttgcacagtctgtcgggccccaagatgcctggcgtctcagcccgtggcctctcgcatgaggagaggagacagctggctgtgaacctcacccgcgtcctggcgctctaccgttccatcctggacgcctacatcatcgaatttttcaccgacagcctgtggggcacactccccagctcatggcaagaagcgctagatggactaaccccaccacagctggccaccctgctgctgggaatgcccagggaaggggaggagatcaggtacaggtccgtgtggccacttaccctgctggccctgaagtccacagcctgtgctctcgcctttacccggacacctggctttcagaccccatcagagttcctggagaaccccagccaaagctcccgactcatggcaccttttcgaaaacatgtcaagcccaaaaagcagcatgagatccggaggctgggagagttggtgaagaagctgagtgatctcactggctgcacccaggttgtggatgtgggctcaggccagggccatctctcccgtttcatgtctctcgggctggggctgatggtgaagagccttgaaggaaatcaaaggctagttagcagagcccagcgcctagaccaggagctcctgcaggctctgaacaaaatggagaaaaggcacccaaaggtggtgcaaagaggtccccgccattccccccatcatgtggttcagtgggtcagccccacagccctgtgtgaggagcttctgcttcctctggagacatcgggccagggtagtgcccgcctgctactcacgggcctccatgcttgtggggatctgagtgttgccttgctgagacacttctgctgctgttctgaagtggtggccttagcctctgtgggctgctgctacatgaaactcagtgaccctggcagctaccccctgagtcagtgggtagctggactgcctggccatgaactaccctacaggctccgggagggggcctgccatgccctagaagactatgcagagaggctacagaatgcaggccctggcttgcaaacacattgcttccgtgcagcactggagacagtcatcagacatgtctgccctgagcttcggaggcctggtgtgcaaggaatccccagggtccatgaactcaagattgaagagtatgtgcaacaagggttacagcgagtaggtctagaccctcagctgccactggatcttgctgcccttcgggcccagcaggcccaagagaatcgagtggtggccttcttcagcttggccctcatgctggccccactggtggagacactgattctgctagaccggctgctctatctcgaggagcaaggcttctatgctgagctcttgcccatcttcagccctgaactctctcccagaaatctggttctggtggccaccaagacacccctgggtcaggctttctctattcttgagaatgaagacatctagctgacggtctgaaaccaagatgccaacatggctctcagggctctttattggtgttgggggaagagcagcctccaccctcaaggtaaagactgagcaggcagaaccagcactctcaggctcaataccaataaaccttcttgtgttttcgaggctcctggatccccattgcctccatcacatcttcttctaatgtctttagccggggcacataagtttttt

SEQ ID NO: 2997 - DNA, 1796 bp, Cricetulus griseus
aggcactgtcccaggatgtggacatacaggtcatttcaagacaggatgtcccaccgatagtccagaattgctgcttgcctgcggtggtagaaaaatcagatgttttctgtagagcaggacttgccgttgttctgagacacataatccagaaatcctatgaagctaagccgtcaagaaaggaaattttggaacttctgggttttaaaaagacttgtcttaaagcctgtgctgaagtcagtgagtggaccaggctatgtgaactcaccatccctttggctgttgagaattttctccaagagtcttctgaccagtccccagctatccctgaagaaatcctacagcttgagagaaagctcagtgagcctgtcagagtacacaatgatgacaaactccgtagacagaagctaaagcaacagaagactgctggagttgagcctccctctggcaagggaaaagcaaagggcaaggctggtgcacagaaaccatccaaagagttgtctggctcgtccaagagtctggaactaaaggtggcattctcaaagctcacaatgcaagacacagctgataccaacagggagccttctcacatcaggaaagcaaaagcctctgcccttccgcctctggagcacgtgtttgcagaaggactgtacttcaccttggcggacattgtgcttttgccctgtgttcatcactttttggtaattatctgcaggaaatattatgagaagctggagcagtttcccctgctaacctcttggtatcagaggattcaggaagtgccaaaagtaaagacagcagcttccaagtgggggatccacttcctgtgtttaccagaattgctgaattctgaaagtaaaccacacctgaactctgatgaagtgacagctgtagaggaaccaagtgaccctttatttacaggaggaccaagaccaaccatgaccaagttaacggaaacaggcattgaagcaatgttttctccgcacccttgtccctcttggacccttgactggaacagccttcctgctgctgtcagcccaaaagaaggcaaaatgtccattgaccgagctttgaggaagcagcaacagttaaacaaccttgtttacatggtgctaaatcaagccaaacctggtgacagaattgtggatttctgcagtggcgggggccatgttggaattgtgcttgcgcatatgctgccttcttgccaggttacattaatagaaaacaaggaattatcactaatccgtgccaagaagagaagtgacgaactaggtttaagcaatatttggtttattcaagcaaatatggagtattttacaggaatgtttaacattggggtcgcgctgcatgcttgtggagtagcaacagacatggtgattgagcactgcgtccaaacacgggcttctttcatcacgtgcccctgctgctacgggttcattcagaacacgtccaagttcaacttcccaaaaagtgaaaaattcaagaaaactttatcatacaaggaacacatgattctgtgcagatttgcagatcagacagctgttcagctcccaccccagagaagactcatagggaagaagtgcatgtgcctggtggatatggaccgcgcaaccgctgcggaagagcacggctactctgttcaagtgctatctatggagccagagagctgctctcccaaaaataacatgattgtgggtgtccccgtttagaatgaggctcttgctcttgatgttttgccactggcttcctggtgaaagcccaggggcatgcagggagttcttggtgtcttactggaagca

SEQ ID NO: 2998 - DNA, 1796 bp, Cricetulus griseus
ctccgccctcctcgccgtgacgaatcggcgcccggctgggacgggacccaaactggaagagttctgaggagagtgtcggagacctggaaaaaaaaaaatcctcggctgcactaagcctcgccgagtcctccctgggaagacccgatcgcctgaggagagccggccgcggcccgcggagaaatcccggagcgtgtggaaagtgcgagcgcggaagctccggcgcgaggggcggggcgagcgcgggacaaagggaagcgaagccggagctgcgggcgccttttcggcccgcggtgtctcagattcattcttaaggaactgagaacttaatcttccaaaatgtcaaaaagaccatcttatgccccacctcccaccccagctcctgcaacacaaatgcccagcacaccagggtttgtgggatacaatccatacagtcatctcgcctacaacaactacaggctgggagggaacccgggcaccaacagccgggtcacggcatcctctggtattacgattccaaagcctccaaagccaccagataagccgctgatgccctacatgaggtatagcagaaaggtctgggaccaagtaaaggcttccaaccctgacctaaagttgtgggaaattggcaagattattggtggcatgtggcgagatctcactgatgaagagaaacaagaatatttaaacgaatacgaagcagaaaagatagagtacaatgaatctatgaaggcctatcataattcccctgcataccttgcatacattaatgcaaaaagtcgtgcagaagctgcattagaggaagaaagtcgacagagacagtctcgcatggagaaaggagagccttatatgagcattcagcctgctgaagatccagacgattatgatgatggcttttcgatgaagcatacagccaccgcccgtttccagagaaaccaccgcctcatcagtgagatcctcagtgagagtgtggtgcctgatgtgcggtcggttgtcacaacagctagaatgcaggtcctcaagagacaggtccagtctttaatggttcatcagcgaaaactagaagctgaactccttcagatagaggagcgacaccaggaaaagaagaggaaattcctggaaagcacggattcctttaataatgagcttaaaaggttatgcactctgaaggtggaagtagacatggagaaaattgcagctgaaattgcacaggctgaggaacaggcccgcaaaaggcaagaggagagggagaaggaggcagcagagcaagctgaacgcagtcagggcagcatcgcccctgaggaagagcaagtggcaaacaaagccgaggagaagaaggatgaggagagcatccctatggagacagaggagacacacctggaagaaaccacagagagccaacagaatggtgaagaaggcacttcgactcctgaggacaaggagagtgggcaggagggggttgacagcatggaggtagaagggaccagtgatagtaatactggctcagagagcaacagcgcaacagtagaggagccacccacagaccccatgcccgaagatgagaagaaggaataaatgttgccttgttttatttgtcctaaaacttttttaaatgaaaaaaaaatgtgtttttttttttggtttaatggtgttatgtggtctgtgtattaattatttccttttccattgataccaccaaagtctttccaactatcaacatcatagcctcatgtcagtaaaaaaaaaattaagacaaaaaaaaaaaaaaaaaaaaaaaaaaaaaaaaaaaaaaaaaaaaa

SEQ ID NO: 2999 - DNA, 1796 bp, Cricetulus griseus
acctccaaacctgagtttgaatttagcaggttggacttccctgaactgcagagttcaaagaccagtaatgtgcaagagacacagaagcagcccaggtgggggcctcttggctctgctgccaggaacgcgtctcttctgagagacgcaggcaagcccagtgcagggatggtagcgggtgaaatggtgaagaccaatcacacaggtggagctgtgactcacagagctgctaacagctccccttcatgtacacgagagttatcttggacaccaatgggttatattgttcggcagacagtgtcttcagggtccgcagcagcgactgaaaatgttagctctgtgataaccctaaagaagacggcttcatcaactgatcctcagagcgctggtgtggccctgaggctgtatcttcagactctcctacacaggagacgtctgttcattctgctacaaagcagcagcaagtcccgcatgccaagccatcctccagacccgttgtattctcagtcggagcagtgccagtcctttctaaggatgcctcctcgggtgagaggggtcgccgctccagtcaggtgaagaccccacacaaccccttggactccagtgccccgctgatgaagaaggggaagcagagggaaatccctaaggccaagaagccccacctccctgaagaagataattttgaaagaacggcaagagagaatgcagctgcgactccaagaaagtgctgtgagcctggctgtggcacaggacgtagagagtagtgccagtgaccacgtcccccagcaggtccaccccacaggtccagagaagacagaagaatcagtgtcttctacacctgtgattgagggtgagtcagaagagccaaccggcacggagttccagaagaacccagcagcctgccagcctgcccctggcagtgccaccttccccaagatccacagccggaggttccgagactactgcagccagatgcttagtaaagaagtagatgcttgtgtcacggggctgctgaaggaactggtacgcttccaagaccggatgtaccagaaggatcccgtcaaggccaagaccaaacgccggcttgtgttgggcctgagggaagtcctgaagcacctgaagctcaggaagctgaagtgcatcatcatctctcccaactgtgagaagacgcagtccaaaggtggactggacgacactctgcacaccatcattgattgtgcctgtgagcagaatatacccttcgtgtttgcactcaaccgcaaggcactggggcgtagtctgaacaaagcagttcctgtcagcatcgtggggatcttcagctatgatggggcccaggaccagttccacaagatggttgagctgaccatggcggcccggcaggcatataaaaccatgctggagacggtgcggcaggagctggcaggacagcctgggcctcagacccctcccagcccacccatacaggaccccatccagtccactgaagaaggcaccctcgagtctactggaaaggaaccacactatattgagatttggagaaagcacctggaggcatacagtcagcaggccctggagctggaagactcactggaggcgtcaacctctcagatgatgaacttgaatttataggaagagttcttgcctgtgtgtctgtgtattgggtaaggatgggagaggcaggaaaaaggcttccttctcaattctttactgacctggtgtaggtcacaagactgtagagttggaaattcactgggcctaagggcagagggagccactggggtagcactgtgagtccatca

SEQ ID NO: 3000 - DNA, 1796 bp, Cricetulus griseus
ttcgcccttttcctgatcactgtggcaggagacccgcttcgggtcatcatcctggtcgcgggtagccttttttctggctggtctccctgctcttggcctctgtggtctggttcatcttggtccatgtgacagaccgatcagatgcccggctccagtatggtctcctgatttttggtgctgctgtttctgtccttctacaggaagtgttccgaatttgcctactacaagctccttaagaaggcagatgagggcttagcatcactgagcgaggacggaagatcacccatttccatccgccagatggcctacgtttctggtctgtccttcggtatcatcagtggtgtcttctctgttatcaatattttggccgatgcacttgggccaggtgtggttgggatccatggagactcaccctattacttcctgacttcagcctttctgaccgcagccattatcctgctccataccttttggggagttgtgttctttgatgcctgtgagaggagacggtactgggctttgagcctggtagttgggagtcacctactgacatcaggactgacattcctgaacccctggtatgaggccagcctgctgcccatctatgcagtcactgtttccatggggctctgggcattcatcacagctggaggctccctccgaagtatccagcgcagcctttcgtgtaaggactgactacctggactgctcgcccgacagatcccatctgcctgtccactgcccatgactgagcccagccccagcccgggtccattgcccacatcctccgtctcctcgctgatgtgccccgctaccttccgggtgtggcgttgtccatttgtgacctgtagtctctaagctttatcaggagcagcctgggtgcagcccaacagggactggtgggtttgaatctgcatttctccccaccacctggggagccccttgtccaggtctccccatgtgtcagtgctctggtctcaccctgcccatgactcaccccgcttcccctctgcaggccgacggcaggaggacagtcgggtgatggtgtattctgccctgcgcatcccacccgaggactaagggaacatgggggggacccctgggcctggggtgccctcccgatctcctcgtcctgtatttctccatctccagttctggacagtgcaggttgccaagaaaagggacctaggttagccatggccctggtgatgaagtcactggaggctcaagggtagatgagttcagttttcctgtatctcctgcccagactggacatcatggtctttttctcaggtctgaaaggaaccatttttggtatgataaagaccccagaaatgccttttttttaaagtggggagagggaggaggtgtactgggagcctcctaacctccttgggctgtatttttgctcctgaaactgctgatcatggctcatttctatctctttttccccttggtcccaggccctggggaaaaggaaggaagtgcatgtttgggaactggtaccactggaacttacgttttaatgtccgtgaccattagcacccctcctctccccaaggtgaagtggagggtgttgtgggggttggcccactccatggcagtgtccctggaggagatagactaccatggcatcgcaggccaagagggcagacatttttctagtttttaattggggtgtgggagggctggggaggttttctatcactgtatcatttttctgctgaggttgggatgtcccatccttttaatcaaggtgattgtgattttgacaaataaaaaggactttataattg

SEQ ID NO: 3001 - DNA, 1795 bp, Cricetulus griseus
acactgcagctggagcacacattcgtacgtgggggcaggattccagccgaagtgtggcttgcatggtcgattccagcctgggtgtgtgggtgaccttgaaagggagtgacccacgttttgtctctaccatccagacacctttgaacagctggcggaagtagatgtcacgcctcctgtgcacaggatgctggcaggttctgacgccatcatccgacagcacaaggcagcctgcctgaggatcacagcgctgctggtgtgtgaggagctgctgtgggtgggcaccagtgctggggttgtgctgacgatgcccacctccccaagtactgtcagctgcccacgagcacctctcagccccgctggcctaggccagggacacactggccatgttcgcttcctggcagcagtccagctgcctgatggcttcgaccttctctgtccaaccccactgcctcccccagacacaggccctgagaagctgccatccctggatcaccgggactcccccaggcaccgaagccccacctcaaacaggcctaaaatgctagttatcagtggtggtgatggctatgaggacttccgactcagcagcgggggtggcggcagtagtgagactgtgggccgagacgacagcacaaaccacctcctcctatggagggtgtgatcctgcccactgaggcccaggactcacctgtccatctgccctcagcctgcctgtctcttcccaggccacacacagaccatgagcagagtgtccaagcaggggcataccatgtggacacactctcatctttgtggaagcattcctggtagaacactgccagccaggccgaggcctctcctacccactgactgccctggtgctcccatttgggaccagggtggagatgtggcgactgcccaggacctctgtccctgaagcttctaccaaagacacagctgggcctggaccccacagggctggggaggccatgtgcaatatgtggagggttttctgggacagtgggaaagctaagggacagcatcctttcctgtgtacagtatttatgttactttttagatgaatactttccaaagcacttatttatgcagtgacctggggcaggacatggtgtgaggaagtgacaggaggataaaagcctattcctgcgtgagaggccaccctggaaccctaaccaagctttcctggaaggaccaatgcccatccattacacacacagacacatacacacacactcacattcacattcactctgcatgttcagggcactaagacactgtccctgggaacattggtgggtctgggacagggcttcctcaggtaagagaaaagggccttccctcctcacagctggccctagcctcagctcctgcctccccatgtcttatgcactggcacgatggtcaccttgggggtggacctatgagtcccctttctctgaccactgaatcgaatccctctctgaacaccccatcctgccagggcagcccctttaggaagaacgccactcccaaagttgagagctcagccttcttaactgggaaagcttccactttggggaagtctctccctcacctccaggctgccgggagccgccctgccccttagccccttgcttcagctacaactccaaaggtctggtttcagatagggtttgtttgttctgtttgattttgttttctttggggtggtgggtcattgtggttcttagattatgtttctcttgctaccaaacagtcatgtattaactctcctcggatgatgaaatttaaagagtcaataaatagaaacaccaaa

SEQ ID NO: 3002 - DNA, 1795 bp, Cricetulus griseus
cggaggatgaaaggcggatacttggaccagcgagtgccctacaccttctgcagcaaatctcccggaaatgggagcttgggcgaagcgctgatggtcccgcaggggaagctcatggacccgggctccctgccgccttccgactcagaagatctcttccaggatctcagtcacttccaagagacgtggctcgctgaagctcaggtaccagacagcgatgagcagtttgtccctgatttccattcagaaaactaagctttccatagccccaccaccaggatcaagaaggaaccccagagtccccgcacagaaccggccctgtcctgcagcaggaagccaccactcccctaccaccatggagagcagtgcctttactccagtgcctatgactcccccagacaaatcgccatcaagtcccccgcccccggtgccccctggacagtcacccctgcagccctttcccagggcagaacagcagcagagcctcctgagaacctccagcttccctaccctggccatgggtaccttggtgagcacagctctgtcttccagcagcccctggatatgtgccactccttcacatctcctcagggagggggccgggaacctctcccagccccctaccaacaccagctgtcggagccctgcccaccctacccccagcagagcttcaagcaggagtaccacgaccccttgtatgaacaggctggccagccggctgcgacccagggtggggtcagtgggcacaggtacccaggggcgggggtggtgatcaaacaggagcgcacagacttcgcctatgactcagatgtcccagggtgtgcatcaatgtacctccacccagagggcttctcggggccctctccaggtgatggggtgataggttatggctatgagaaatctcttcgaccattcccagatgatgtctgcattgtccctgaaaaatttgaaggagacatcaaacaggaaggggttggagctttccgggaggggccaccctaccagcgccggggtgccttgcaactgtggcagtttctggtggccctgctggatgacccaacgaatgcgcatttcattgcttggacaggccgggggatggagtttaaactaattgaacctgaagaggtcgccaggctctggggcatccagaagaacaggccagccatgaactatgacaagctgagccgttcacttcgatactattatgagaaaggcattatgcagaaggtggctggtgagcgctacgtgtacaagtttgtgtgtgagcccgaggccctgttctctctggccttcccggataatcagcgtccagctctgaaggctgagtttgaccggccagtcagcgaggaggacacagtccctttgtcccacttggatgagagccctgcctacctcccagaactggctggccctgctcagccctttagccacaaaggtggatattcttattaggtaccagtggctttcccttgccatgggtggggctgcccgatgtacatatcaacagattcggcgttggggaagccctcatgttgatgcccatacaagtctctggggtcacatcgtcattattccatcttactcctggccagactcggccaaaaagcagtcttcgggaaggacagtgaggcaggacaagtctaaaggcagcaatgaatttgctgtcattcacctctgccctcaggggttcagcttggccgcctgggctctgccctgagctgggatcctgtgttcttggtgctgtgctctgggaggcaggagcaggtgggaggcagctggggtgggtgttgggtggaag

SEQ ID NO: 3003 - DNA, 1795 bp, Cricetulus griseus
tggcgcggcagtcgcttctttggggtttcttctacttgccggctccgggtaccgtgagttgcctcccgcctagccgccgcgtctggttgccccccgctgcccctccatgtgcccaggcgccgccgttccgcctcgggccgccgctcaccccggggtctatggaagtgatggaaggacccctcaaccttgctcaccaacagagccgacgagcagaccgtttgttagctgctgggaaatacgaagaagctatttcttgtcacaaaaaggcttcagcttatctctctgaagccatgaagttgacacagtctgagcaggctcacttatcactggaactgcaacgggacagccacatgaaacagcttctcctcatccaggagaggtggaagagggcaaaacgcgaggagcggttgaaagcacagcatagcacagacagggacggaaacccccacctgcaggcatctcacaggccctctgaggacatggagggccagaaccctctgctttctcaaacatacatcccttccatagagaagcgcctccctgagggtcagggagtctttgacagggatccggacacactgctatatttacttcagcaaaagaatgagccaacagaaccgtgcattggaagcaaagcccccaaagacgataaaacaattatagaggagcaggcaaccagaattgcggatttgaagaggcacgtggagttcctggtggctgagaatgaaagattgaggaaagaaaacaaacaactaaaggctgagaaggccagacttctgaaaggttcaacagagaaggagctggacgttgatgccgactttgttgagaagtcagagctgtggagcttgccaccacactcagaaactgccacagcctcttcaacctggcagaagtttgccgcgaatactgggaaagccaaggacattccaatacccaatcttcctcctctggacttcccatctccagaacttcctcttatggagctctctgaggacattctgaaaggattcatgaatgattaaaatggaaggccattggagaggctggtgacagttaatccagaaaagaaacaaagggaaagcaacgccccaggggaatcccagaaatgctccttcatctggtctactgtgagagaagaggccatgccaggacctgggaaagtcactgtgaaacatcacttatcttacaactacagctcatgattccgacttggcagacactgaactcttggatggaggttcgctttcttatgatacaaaccaaatggctacctggaataatttttcaaacagttatttttcttcagggttaaatgtataaaagtatgtcacgtgtaattaatctataatgccataaatgataatgcaaaagctaaatatggtggcctgaaaggctcgcttgtatttggaacatgctttctatcatgcattgactgtatgcattttatgcacattttgtttgttgagatacggtgtgtaagagacaccttccagatggaactgtatgtgccacggtttgcactactcgtaacataatgataacctcaagactatcaggagaaatatttaaatttccattttatgaagaaaggaaccaaattattagttatgctttttaaaaaattaccagtttacataattaatcagggtgcattttaagttctaactttgtgttatatgatgcatcatttgaaaatactgaggaactctcctttgttctgaatgatgcatgtgtgaaagtaatgctagttagcagtatttgattgtaagaaatcaataaaagtaattgtgtttca

SEQ ID NO: 3004 - DNA, 1795 bp, Cricetulus griseus
caccgcgcgggacggagctgaggtctcatctttggcctgtgtacgccggcagtcgagccgagcgacaccgtcggtggacgcggacgagctcccgggggtgcgggtgtcagcgcggccaagcccgcggcgccttccgcggcgagtagggcctcgcggcgtcatcggcggcgaggagccgctgcggcctggccgaccatgtcggacgcggctgaggagcagcccatggagacgacgggcgccactgagaacggacacgaggccgcccccgaaggcgaggccccggtcgagcccggcgccggggcaccggcccccgcagccccggccgcgtctgggggcgggaccacggcgaccccgagcgggaaccagaacggcgccgagggcgatcagatcaacgccagcaagaacgaggaggacgcgggaaaaatgttcgttggtggtctgagttgggataccagcaaaaaagacttaaaggattattttactaagtttggagaggtcgtggactgtacaattaaaatggatcccaacactggacgatcaagagggtttgggtttatcctattcaaagattcttccagtgtagagaaggtcttagaccagaaggaacacaggctggacggtcgtgttattgaccctaaaaaggcgatggctatgaagaaggatcctgtgaagaaaatctttgtgggaggtctgaaccctgaagccacagaggaaaagatcagagaatacttcggccagtttggggagattgaagccattgagcttccaatagatcccaagttgaacaaaagacggggttttgtttttattacatataaagaggaagaccctgtgaagaaagttctggagaaaaagttccatactgtcagcggaagcaagtgtgaaatcaaggttgcccagcccaaagaggtgtatcagcaacagcagtatggttctgggggacgaggaaaccgcaatcgagggaaccgaggcagtggtggaggtggaggtcagagtcagagttggaatcagggctacggcaactactggaaccagggctacggctaccagcagggctacgggcccggctatggcggctacgactactcgccctatggctattacggctacggccccggctacgactacagtcagggtagtacaaattacgggaagagccagcgacgcggtggccatcagaataactacaagccatactgagaggcggcaggagcggccgactgacgaccgcacacgctttgtttggacgcggagtgaacacaattatgtaccaaatttaacttggcaaacttttatggcctgtcccatgtgcatcttatttaaaatttccccccggaaatcactctcctgtttactattccagagctgtagttgtaggcagcgtgtggcgtctcagaggccagagcagcatgggggggggctgattttattaccaggttaccctgtactagattggagggtctgcttcctgctgccgctctgcagcctggacctgtggaccctggttgtaaagagtaaactgtatcttaggaaaccagtgtcacctttttcaccttttaattttatattatttgtgtcatacatttccagtaatggaagtgttaattttactgtactttttggtaccttttgggaatctaatgtattgtaaggtattttacacgtgtcctgattttgccacgacctggatattgaagctatccaagcttttgaaataaaaattaaaaaaaaacccccacgcctgggtgagtgtgggatgctctctctgtgagaccttgcccagtgttggaggtgc

SEQ ID NO: 3005 - DNA, 1795 bp, Cricetulus griseus
  modified_base (399)..(399): a, c, t, g, unknown or other
ccatcgaaatagtaaaacaaggttagttggctggatgacatcaactgctatgacaggactgattgtatagaaaaaaaagacagccctgaagtgtacttttgttgctgtgagggcaatatgtgtaatgaaaagttctcttattttccggagatggaagtcacacagcccacttcaaatcctgttacaccaaagccaccctattacaacatcttgctgtattccttggtaccacttatgttgattgcagggattgtcatttgtgcattttgggtgtatagacatcacaagatggcataccctccagtacttgttcctactcaagacccaggaccacccccaccttccccattgctaggtttgaagccactgcagctattagaagtgaaagcaagggggaanatttggttgtgtgtggaaagcccagttgctcaatgaatatgtggctagtcaaaatatttccaatacaggacaaacagtcctggcagaatgaatatgaagtctatagtttacctggaatgaagcatgagaacatactacagttcattggtgcagaaaaaagcgaggcaccagcgttgatgtggacctgtggctaatcacagcatttcatgaaaagggttcactgtcagacttccttaaggctaatgtggtctcttggaatgaactttgtcatattgcagaaaccatggctagaggattggcatatttacatgaagatatacctggcttaaaagatggccacaagcctgcaatatctcacagggacatcaaaagtaagaatgtgctgttgaaaaacaatctgacagcttgcattgctgactttgggtttgggcattaaagtttgaggctggcaagtctgcaggtgatactcatggacaggttggtactcggaggtatatggctccagaggtgttagagggcgctataaacttccaaagggatgcatttttgaggatagatatgtacgccatgggattagtcctgtgggaactggcttctcgttgtactgctgcagatggacctgtagatgagtatatgttgccatttgaggaggaaattggccagcatccatcgcttgaagatatgcaggaagtagttgtgcataaaaaaagaggcctgttttaagagattattggcagaaacatgcaggaatggcaatgctctgtgaaacgatagaagaatgttgggatcatgatgcagaagccaggttatcagctggatgtgtaggtgaaagaattaacaaatatcattactacagaggacattgtaacagtggtcacaatggtgacaaatgttgactttcctccccaaagaatctagtctatgatggtggcaccatctttacacactgagaattgggactcggaactggagctgctaagctaaggaaactgcttagtgtattttctgtgtgaaatgagtaggatgcctccgggacatgtacgcaggcagccccttgtggaacgcatggctctgggagatggctctgggagacttactgcatcatctgcagcacagatatgaaggggagtctaagggaaaagctgcaaactataatgaactgagaaatgtacacgaagaatgtggctctctccaaatcaaggctcttttggacctggctaatcaagtatttgaaaactgacatcagattttaatgtctgtcagaagacactaatccttaaatgaactactgctattttttttaaatcaaaaacttttcatttcagattttaaaaagggtaactttttattgcatttgctgttgtttctataaatgactattgtaatgccaacatga

SEQ ID NO: 3006 - DNA, 1794 bp, Cricetulus griseus
cccgggatcccaacccctcccggctcgcccgccgccatggctgacaaggaagctgcctttgacgacgcggtggaagagcgtgtgatcaatgaggaatacaaaatatggaagaagaataccccttttctttatgatttggtgatgacccatgccctggagttggcccagtttaactgcccagtggcttccagatgtaaccaggcctgaaggaaaagacttcagcattcaccggcttgtcctgggaacacatacgtcagatgaacaaaaccacctggtgatagccagtgtccagcttccgaacgatgatgctcagtttgacgcatctcactatgacagtgagaaaggagaattcggaggttttggctctgtcagtgggaaaattgaaatagaaatcaagatcaaccatgaaggagaagtaaacagggctcgatacatgccccagaacccttgcatcattgcaacaaagactccatccagtgatgtgcttgtttttgactacacaaagcacccttctaaaccagacccttctggagaatgcaacccagatttacgtctccgtggacatcagaaggaaggttatggtctttcttggaatccaaatctcagtgggcacttacttagtgcttcagatgaccataccatctgcctgtgggacatcagtgcagttccaaaagaaggaaaggtggtggatgcaaagaccatcttcacagggcatacagcagtagtagaggacgtttcctggcatctgctccacgagtctctgtttgggtctgttgctgacgatcagaaacttatgatctgggatactcgttcgaacaatacttccaagccaagccactcggttgatgctcacactgctgaagtgaactgcctgtctttcaatccttacagtgagttcattcttgccacaggatcagctgacaagactgttgccttgtgggatctgagaaacctgaaactcaagttgcattcctttgagtcacataaggatgaaatattccaagttcaatggtcacctcacaacgagactattttggcttctagtggtactgaccgtaggctgaatgtctgggatttaagtaaaattggagaagaacagtccccagaagatgcagaagatggcccaccagagttgttgtttattcatggtggtcacactgccaagatatctgatttctcctggaatcccaatgaaccttgggtgatttgttctgtatcagaagacaatatcatgcaagtgtggcagatggcagagaacatttataatgatgaagaccctgaaggaagtgtggatccagaaggacaaggatcgtagacatgtctgcacttgtgatttagactccccttgttttcttctgaaccctgaggtggatttaacactggtttgagacacagactttgttaagctatccagctataataggtgccaccaacaatactattagcccaagccatgggtgttttctaaatcttaactgggggacttaattcaacaaagcctttttttgtttgtttttttgaacttgggaccaccaagttgtaagatgtatgtttttaactgacagtcagtaccactggtgactgtcaagttgagaaagagtgtattgctagtttgtatttgtttttaaaattaaattaatccttgataaaagttgcttttttaggagttagtccttgaccactatagtttgatgccatctccagtttggttaacctgtctcaccatcaggcctgttactctccatgactaactgtgtaagtgcttataatggaataaattgcttttctatatag

SEQ ID NO: 3007 - DNA, 1793 bp, Cricetulus griseus
  modified_base (1781)..(1781): a, c, t, g, unknown or other
gccaccgccaccgcaccgccaccgccaccggctgagtcgcagtcctcgagatcccaaccatcatcatgtctatagagaagatctgggcccgagagatcttggactcccgtgggaatcccaccgtggaggtggatctctatactgccaaaggtcttttccgggctgcagtccccagtggagcctccactggcatctatgaggccctggagctaagggatggagacaaacagcgttacttaggcaaaggtgtcctgaaggcagtagaccacatcaacaccaccattgcaccagccctcgtcagctcaggtctttccgtggtggagcaagagaaactggacaacctgatgctggagttagatggcactgagaacaaatccaagtttggggccaatgccatcctgggtgtgtctctggctgtgtgtaaggctggggcagctgagagggacctgcccctatatcgccacattgctcaactggctgggaactcggacctcatcctgcctgtgccggcttttaatgtgatcaatggtggctctcatgctgggaacaagttggccatgcaggagttcatgatcctcccagtgggtgctgagagcttccgggatgccatgcgacttggggcagaggtgtaccacacactcaagggggtcatcaaggacaagtatggcaaggatgccactaatgtgggggatgaaggtggctttgctcccaatatcctggagaacagtgaagccttggagctggtgaaggaagccatcgacaaggctggctacacggaaaagatggtgattggcatggatgtcgctgcctctgagttttatcgtgatggcaaatacgacttggacttcaagtctcccgctgacccttcccgatacatcagtggggaccagctgggggcactgtaccaggactttgttcggaactatcctgtggtctccattgaagacccctttgaccaggatgattgggcagcttggtccaagttcacagccaatgtcggcatccagatagtgggtgatgacctcacggtgaccaacccaaagcgtatcgagcgggccgtggaggaaaaggcctgcaactgtttgctgctcaaggtcaatcagattggctcagtcacagaagccatccaagcgtgcaagctggcccaggagaatggctggggggttatggtgagtcatcgctctggagaaacagaggacacattcattgctgacctggtatgggactgtgcacaggccagatcaagactggggccccatgcaggtctgaacgcctggcgaagtacaaccagctcatgagaattgaagaagagctgggggacgaagctcgattcgccggacataatttccgaaatcccagcgtgctgtgagccctctgcttgcctgaagactggaccctccatctcaccctcctgaagcctccttcttgctgtcctgacctgccatagttcacactgataccttgagcccaaagtcacccagaacacctcaacttacctgctctggctgctcatggttgccacaaccccttgctgtctctgctcttcctcctctctggacccgtttttggggggattccattcttcccactttcctgtctattctctctttttttttgttatttatttatttatttatttatttatttatttatttatttagtgtgccttggctgtcctggcactcactctgtagaccaggctggcctccaactcacagagacccacctgcctctgtctcccgagtgctgggattaaaggcgtgtaccaccaataaaaaaanaaaaaaaaaaaa

SEQ ID NO: 3008 - DNA, 1793 bp, Cricetulus griseus
ccttgctcatgcagttggactacagcatgaaggcagaagccgatgccctgcaccacaaacatgacaagaggaagcggcaagggaagaatgcattacccgcaggtgatgagccacttgctgaaacagagagtgaaagcgaggcagagctggctggcttctctccagtggtggatgtgaagaaaacagccctggccttagctattacagactcagagctgtcagatgaggaggcctctatcttagagagcggcggcttctctgtgtctcgggccaccactccacaactgacagatgtttctgaggatttggaccagcagagcctaccaagtgagccagaagaggctctgagcagagaacttggggagggggaagagacagagctggcccctcctgaagacctgctaaatgctcctccagccttctcaaagcaagccctggatacagaagaagaagctatagccaaggaaaccttgcttcagctctcatcccctcttcactttgtgaatacgcacttcaatggggcagggtccccccaggatggagtgaagtgctctcctggaggaccagtgaagaccctgagcccagaggcagtgagtggtgacctaatggctgcacccagcaccctctcacccccactttgcctggctgaaagtggtccagttaccctcctttccccctctgtgctcccatcccttccccaggactcacctcaacccctggctgcccctgaggaggaagaggcagtcaccactgaggactttgagttgctggatcagggagagctggagcaactgaatgcagagctgggcttgggaccagagatgcccccaaagcccccggatgctctgcctcctcctcccctggggccagacagccattctctggtacagtcagaccaagaggctcatacagtggttgagccatgagccatggcagaatgagctgcaggcatagcagggcttcctgactaaagggtgtcacattttctcctttccctgccactctggggagaggcactatgtggagaagctggctgtcagatggaagccagcccattctctgcctgcttgcctgcctgcctgcctgcctgctgtcctgggatctggtatagtacctgtgcctaggattggttttcagtttgtaaataattttccatttggttagtggatgtgattggggctagggaagtccttccatagcctgcacttgcttccctgcctcatctctttttactctactgtgtccccagccctggcggtctaccctttcttttcttcctatcctcagggacctgtgctgctgtgccctcatgtcccacttggttgtttagttcaggcactttatcgttttctctactgtcctacactccccttggctttatttccctgccatgtcctgtccttagcagtgtgatccccactctttgccaactcctcctccacaggcattggccaagttttagggtaggtcctcttctaagaaagaataaacctggagtggtgtcaggccagtagtgctgcacttaggtcactgtcgcctcagacctgcactgtacccttgcccagttcaaccctcatggtgcagggcagcagggtcccatagcactttgccagcactggggttgaggagcattccctccctccctctctctctttctgaggtgaggggcttccctaccatcttaaaacctactcttctggaccgcagttgagactccctgctagggtctgaagtggatagtaccatctgtgtaggtgataactggagaaataaagtgttgattggctagaaaa

SEQ ID NO: 3009 - DNA, 1792 bp, Cricetulus griseus
gcgacactcagctgcaggtcacgctggtcgactgccccgggcacgcctccctcatccggaccatcattggcggtgcccagatcattgatctaatgatgctcgtgattgatgtgaccaagggaatgcagacacagtccgctgagtgccttgtgattggccagatcgcctgccagaagctggttgtggtgctgaacaagatagacctgttagcagaagggaagaggcaggcagcaatcgacaaaatgaccaagaaaatgcagaagacccttgagaacaccaaattccggggtgcaccaattattcccgtggcagccaagcctggggaccagaggccctgaaacggaagctccacagggcatctcagaactcattgagctcctgaagtcccagatttccatcccagcaagagacccctcgggaccgttccttatgtctgtggaccactgcttctccatcaagggtcagggcactgtgatgactggaaccatcctctcaggcactatcagcctcggggacagtgtggagatccctgccctcaaggtggtgaaaaaagtaaagtccatgcagatgttccacacacccgtcacctctgccacacaaggagatcgactgggcatctgtgtcacccagtttgaccccaagctgttggaacgtgggctggtatgtgcacctgagtctctgcacaccattcatgcagccctcatctctgtggaaaagatcccttacttccggggcctcctgcagactaaggccaagttccatatcaccgtgggccacgagacagtcatgggccgcatgctgttcttcagccctgctcctgacaactttgacctggagcccacacttgattctttcgacctctcccgggaatacctcttccaagagcagtacctctgcaaggactccatgcccacagccacagaaggtggtgatgaggtggacagaaaagcggatgacactccaggaggccagtgcccccggcaacagtgggccctggtagagtttgagaagccagtcacctgcccccaactatgcttggtgattggttccagactggatgccgacattcataccaacacatgccggctggccttccatggtgtcttgctacaaggattggaagacaagaactacacagagagcttcctaccagcactgagggtgtacaagctgaagcacaagcatggtcttgtggagcgggtaatggatgactacagcgtgattggacgctccctgttcaaaaaggagaccaacatccagctctttgtggggcttaaggtgcagctgtctacaggggagcagggcatcatcgacagtgccttcggccagagtggcaagttcaaaatccacatccctggtggcctcagccctgagtctaagaagatcctaacacctacactcaagaagcggaaccgagccggccgcggggagaccaccaagcaagaggagggcactgagcggccagagcccatgcagcctgtgacactcagcctgtctttcaagcgctatgtctttgacacccagaagcgcatggtacagactccctaagtgaaccatcctgcccagctgccagccagactacagtgccagatgccccccgatgtgcctcagccaccctagtcctgcaggcagccccagcccactgccatccccactgatgttgagcctcactgagaaaacctggggaaagtgaagagcagtgccagaaagtcctgccactccatcctggcaccacctaggatagcaactaagcccggctaggaaagggccttggcagagccagaaaccgggg

SEQ ID NO: 3010 - DNA, 1792 bp, Cricetulus griseus
tcaccttttatatcattactggattgctgtaagccataaggccccagcattcctgtatgatatctacctcaggatgactggaagaagcccaaggatgatgaaaacaatcactcgtcttcacaaagccatggtatttcttgagtatttcacaagtaactcttgggtttggaatactgataatgtcaatatgttaatgaaccagctaaatcctgaagataaaaagacctttaatattgatgtacggcagttacattgggcagaatatatagagaactactgcatggggactaaaaaatatgtattgaatgaagaaatgtctggtctccctgcagctagaaagcatctaaacaaattgcggaatatccgttatggtttcaataccattcttgtgattcttatctggcgcattttttattgcaagatcacaaatggcaagaaacatctggtactttgtggttagtctgtgttacaaatttctgtcatacttccgagaggaaaacatttttctagtctatgttttgatcaaatggaactctggggagatgtgttttcattttgaagaggatttcttaagacttgattggaggtgggattggggacggattcatcatatgtgttctctcctcccttataaattttctcacgggagttaccccgtctgaacatgcattattatgaaggaatgtagttgcagcttttaacattaagaaaatgtcttcatgtgttttgccaacacatactaattttgactttgaaagctgaattccttaaaaataaatgatgcataagtatgtgtataaaattaaaataaaaaattttaccatgtaagtagcaaacttttgaatgaatatcaagtcatcatttctttgcatgttgttttagctttagaaagacatgcgttatagaaacaataacagcaagaaaattgatgtgtatttattgatacattacaattccctttaaatcttactagtttgttactattttgtcatatattttctttaatgacttgttcagcacaacactgttataattaagctgatcaagttgtactacatttaaatcatcagcaatgtatcttgaaagtgctcaaaggggtcagttcacactgtacaagaaattaaatgtaactttacattttaattttttgtttgaagccagacttggtgtagtaaacttttaaacgtaattttaaaagaagtatgtatgtaaatatctgtgtattctttggaatgatactgaagtttctggtctaggaccatgccttgtgtaaggtatgagagaccatggtagtgtgtgaaaatagaataaaatgatgcctttgatttaaggtggcccatataatatacattaagtactctgtctccaaatacatttccatgatgtaatgaaaacacactaacctttgtatgatttttatacatctgcccaaatataacctagaatctggtgaatttgtgtctttttgttttattgctcttgtactctaatttaaagaaatgctaactagggtcatgctaaggagattataattaattttgtgtgtttagaattctgttgtcaaaagaaagataatgaataaattatattcatcctgaaatttacaattttgaaattagtatggagagtaaaatttgagattgtcagtcctcaccaaatatgctttggattcaagtcatatttgaagagtttggaaacatattctgtttgtaatttgctagacagtatttttagttctgattatattttccatacagattattcataggacaacctgtaaaataaattaatt

SEQ ID NO: 3011 - DNA, 1792 bp, Cricetulus griseus
gtgggctgcaggccccaggcggttgccaggcgcgcgtgcgagcgggctgcgggcatgggcggcctgcggctgctggctgtcgccctcacgtgcagctgctggtggccgcagggcggccagggcaagaccctgcggggcagcttcagcagcgccgcggcccgggacgcccagggccagagcatcggccacttcgagttccacggtgaccatgctcttctgtgtgtcagaatcaacaacatagcaatggctgttggcaaagaagctaaactctacctgttccaagcccaggaatggctgaagcttcaggagagcagtcctgggtatagctgtagtgagaggttatccagagctcagttgacaatgacaatgaaccagaccgaacacaacctgacagtgtcccagattccggctccccaaacatggcatgtgttctatgcagacaaatacacctgcagagaggacgtggagagtccccagggggaagatatcccatttgaaatggtgttactaaacccagatgctgaaggaaacccatttgatcattttagcgctggggaatcagggttgcatgagttcttcttcctcctagtcctggtgtactttgtggtggcctgcgtttatgctcaggcgctgtggcaggctctcaggaagggaggtcccatgcacatggtcttgaaggtcctgacaactgcactgctgctacaagctgcctcagccctagctaattacattcatttctccaggtactccaaggatggaataggggtacctcttatgggaagtctggccgaagtttttgacattgcctcccagattcagatgttgtacctgctcctgagcctgtgcatggggtggacaattgtcagaatgaagaagtctccaagcagacctctccagtgggactcaacccctgcgtccacaggcatcgcagtggtcattgtcgtgacccagagcattttgctcctttgggagcagtttgaagacacgcgtcaccatagctcgcattctcaccgcagcttagcaggggtccttctgatcgtcttaagaatttgcctggccctgtcactgggctgtggcctctcccagatcatcaccatggagaggagcacgctcaagagggacttctacatcacattcgccaaaggctgtatcttgtggttcctgtgccagccagtgcttgcctgtgtcgctgtaatatttaatgagtaccaaagagataaggttatcacaatcggtgttatcctttgccagtctgtttccatggtaattttgtatagactcttcctgtcccacagtctatactgggaagtttcctcactttcctcagtgacactaccactgaccattccatctggacataaaagtcgccctcatttctgaatccatgttggcactggattgtaagtagttgccatcttgaatcctttgtaataaagctgtgtgtgtgtgtgtgtgacagtgtgtgtgtgtgtgtgtgtgtgtgtgtgtgtgtgtgtttgtgtgtgtgtgtgtgttggtatttgtcaagttgtttggaccttttgtttgcctttggctaattttaaatatttgtatctgcttaccatgttttaaagcatggaatggtgcaatagcctggtaattgagttttttaatgaaagattcaggtaacatagcacaattacaaagtacctgtggctttatcttatttttcccttgcatgtagttttattggaaatgaaaatattctgcttcattttaaaggcaaaacatgtttgcagctagcaaattggcaaagtaacacagtccagcc

SEQ ID NO: 3012 - DNA, 1791 bp, Cricetulus griseus
gcagcgcgggcggaggggacgcagcgctggatttcaagttggcggctgctgtgctgaggacgggcggcggaggtggtgcctctggaagcgacgaggacgaggtgtccgaggttgaatcatttattttggaccaagaagatttggataacccagtccttaaaacgtcagagatattcttatcaagtacagcagaaggagctgatttacgcacagtggatccagagacccaagcaagactggaagcattgctagaagcagcaggaattggcaagttgtcaactgccgatggtaaagcttttgcagatcctgaatacacacccttgatggaagctgctcgggaagggcatgaagagatggtggcgctgctgttggcacaaggtgcaaatataaaatgcccagacagaagaaacccaagaaactgcccttaccttggcttgctgtggaggcttttctgaagttgcagatttcctgattaaggcaggggctgacatagaacttggctgctccacacctctcatggaggcttcccaggagggacacctggagttggttaaatatttgctggctgctggtaccactttggctggcatccaatggtggtcattttgatgtagtacaattgctagtgcaagcaggtgctgatgtggatgcagcagacaaccgaaaaatcacacctcttatgtcagcatttcgaaagggtcatgtaaaagttgttcagtatttggtgaaggaagtcaatcagtttccatctgatatagaatgcatgagatacatagcaacgattacagataaggaactactgaaaaaagtgtcaccaatgtgttgagacaattgtgaaggctaaagaccagcaggctgcagaagcaaataaaaaatgcaagcattctcctaaaagagcttgatctggaaaagataatcaggacactggtaatttacctcagttagctgtaccaacacctcgagttctcatcgaatgcagcctagaggttctttttactcagtggtaccaaatgcaactatacaccaggatccccagtcaatctttgttaccaatcctgttcctttaacaccaccacaaggcccaccagctgcagtgcagctttcctcagctgtaaacatgatgaatgggtctcagatgcacataaatccagcaaataagtctttgcaacctacgtttggcccagccacactttttaatcacttcagcagtctttttgatagcagtcaggtgccagctaaccaagggtggggagatggtccactgccctcaagagttgctgcagatgcttctttcactgttcagtcagctttcctgagtaactctgtactcggacacttggaaaatgtgcaccctgataactccaaggcacctggcttcagaccaccttcccagagagtttctaccagtccagttgggttgccatccattgatccatcaggtagctccccatctgctgctgctcctctgacaagtttctctggcattaccaggaacaagggttttcctgcaagggccagcacctgtcggaactcctagtttcaacagacaacatttttctccccatccttggacaagcacctcaaacacatgtgactctcctattccatctgtttcttcgggatcatcttcacctctttcagccacttctgcaccacaaacattgggccaacaaccaaaaggaacagtgccagtcaggatcgaaagatacctcctcctatttacttaaaaggaaaaaaaaaagttaatttcaataaataaaatgaacagtagaaaaaaaaaaaaaaaaaaaa

SEQ ID NO: 3013 - DNA, 1791 bp, Cricetulus griseus
ggaagcccttgaggatgagaggcaggcccggcaggatgaagagacagtgcgcaagcttcaggccaggttgttggaggaagagtcttctaagagggcggaattggaaaagtggcacctggcacagcagcaggctatccagacgacagaggcggagaagcaggaactggagcagcagcgtgtcatgaaggagcaggctctgcaggaggccatggcacagctggaacagctggagctcgagcggaaacaggcgctggagcagtatggagggagttaaaagagctagagatccaggttcaaagaatcctcacttgatcaccaactggggacccgcagcattcacccaggcagagctcgaggagagagagaagagctggaaagagaagaagaccacggagtgacagctctcccagtggccaccccaggcacagtcacatcagtgaggagccgagctccatgcccaggacaaggacactggctttgctgcttctaaccatctttcctcagggctccagcggggtccacatgttgaggacactgtatttaccttctagagctgtctgagctttcctgggtgagaacataggcacaggtgtggctggggccaccttcactgtcaccttctgcagccctgcagccgctgatgtcagcccttctctgcataggacgtctgctgcctcctaaagtaagctttcccatgctagttggaatctataagctcagtgactccatggacagccacagtgctttacattgtaaacagaagggtgatttccaagttacagaaaaggtgaaattcagtaacagagcagaggaccccgagtgtcctggtccttgcctttccttgccttggggcagagaggaggccattccagacatgtgcaagtctagagatagatttcagtgttcctggtatttatataaggactggatagaatcccataaatctctaccttttatgactggaaaacatttgccaatggaagtctcataaatttttcttaagattttggtctgcttaactgtaattttatttaatgtttatagttgctttcatagagtttagatttgtatgcagaatatcactgtatcgtgaaccttaagctaacctgggtgtgggtttctgcctggccattcattcacctcacccaccagtgttttcttttcgttgctgctgggctatcagatgagggggccagggcctccccagtggcttaatgatgtctcctaggggacttcagtgaccctggagagaatgaggaaaagaaaccgcaagaaagttctgactggtgtgaaatgtctggatggaagctgaaggcctaggagtccaggggagactggggtgaagggactgccatgtcctggctggcagaccattcattcctccttaagcctgactttctttgaacacagccagaagcagtggataagaagacagcacagatgtggactctgcgacttttggtcagatgctttgatgctcatggatctctcctgatccttgctgtggcttcagctaagtgcctgtcgaccccttgcctcacctctgtaatagctacaggaaacttcaggagtgcctgtctgtaggcactgtaatcagcccttcctactgttagagataagattatctgcaggaattgtggatgaaaaacattttgaaatctgttttggaatctgcctgtattgagaaggaacaaaatatttataattttaattttatctaaacattgtacaatgtaatatgctcaactttctttaatttttttgtcatacaaaaaaaaaaaaaaaaaaaaa

SEQ ID NO: 3014 - DNA, 1790 bp, Cricetulus griseus
cccagcctcaccagcagagcctgacggctttggcggtgccggagtaaccctggcggcgtcaggggccgcagcctgctggaggacggcttccctgcgcttccggggatcgcagtacagggggcgagactcagcccggcggggaaggcagtgcgggcggtggcggcagcggcggcggctgcgctggtgcgggtagtggcggcggtgcgggtgcaagtgcgggtgcgggtgcgggcagtggctgtggcagctgctgcccaggcggcctgcggcggagcctccttactcacggcgcgcgcagcaagccctactcttgcctggagtgcggcaagaccttcggcgtgcgcaagagcctcatcatccaccaccgcagccacaccaaggaacggccctatgagtgcgcggaatgcgagaaaagcttcaactgccactccggcctcatccgccaccagatgacgcaccgtggtgaacggccctacaaatgctccgttctgatcagggagagtgaacagggagtctcaaaacccctctaaaataaggaaatgtgatccaacctaaggtgaggagacaccctgaaaaagaaagcaaagatgcaataggaaactgagggatgtgctaagggtaacattctcatgacaacactgcctcgtgctctaacagcgctttatacttttttaaggagtgttttctattcgttaatctatttacacccttagcttatcccttcgagataggtggggtaggattttcctgatatggtagctgaggaaagtgagacacaggtgagatagatgtttagcaagaccaagtgagaacagtgtggctgagccgcaccagggctccagccagcgcagtgtccccaccgcacacactgcctacctctgtcggtctcagacctctctcacctggccttcctggtttctttcttctctcccttccctcccctggtccccccaaatcctctcagaagcaacgggggacaactcctggggttactgggaatgggtaattgattggctgtaaatgtctaggcttgttcttgggaaggctcgtctttgatgtgagcctgggccctagcatcctggtcccccagcctgtctttcccaatgttgatcattcagtcaggtgcagcagcagcttttcactgcacagttaaggccaggccctccagaggcagctggtgccctgggtcagacctcaccctgatgatttactcatttcccagggcacagggtgaggaaagaccggctgctagagtagccaccaaggaatgagactctgcccaagagggctgggcaagtgggtgctagagcctgagctctctcctgccctgggcatcccagttggtgctatctgttaactgattgtgctcatggacatggacacagacctactatgctctgaccctgcaggcgccttgggaagcgcccaaaggactccttttcatgttggtgcatcgctccacggctcccagcactgcagcctggtgggccagtctccatttcagcatcttgcatggccaggcacgtggggtggggtggcatgccccaggacccttgtttgtgtcaaagtggctttcctgctcctcttgtggtattccttgttttcttcttcccggccagggagtgtggtgggtggccagcattccacggcaccgcctttgtgagcttctgtccttttgctcatctgtgctgctccgctttcctcagacccctttttgccgtgcaaagggaattcttgaaattaaataaaaggtatccagattgaataataattaaaaataaaaaaaaaag

SEQ ID NO: 3015 - DNA, 1790 bp, Cricetulus griseus
gtcttgtctcaactgctgaacacatctgctcactagccagaggaaggcctaggtcccagaagatggcggacatgtccagtggcgagtcctgcacctccccactggagctgttcaacagcatagctgctcaaggggagctcgtgaggtccctcaaggctggaaatgcaccaaaagaatgaagttgattctgcagtgaagatgttgctgtcattaaaaacgagctataaagctgccatgggggaggaggtacaaggccgactgccctccaagaaacccagcagctgggagcaatagtgatccagatgccacaaaggccaaacgaggattttgtggacccttggacagtgcggacaagcagtgcgaaaggcatcgactatgacaagctcattgttcagtttggaagcagcaaaattgacaaagagctgataaaccgaatagagaaagctactggccagagaccacaccgcttcctgcgcagaggcatcttcttctcccacagagatatgaatcaagtccttgatgcctacgaaaataagaagccattttatctgtacacgggcagggggccctcctctgaagcaatgcatctggggcatcttgtcccctttattttcacaaagtggctgcaggatgtattcgacgtgcctctggtcatccagatgtctgacgatgagaagtacctgtggaaggacttgactctggagcaggcatacagctacacagtggaaaatgccaaggacatcattgcctgtggtttcgacatcaacaaaactttcatcttctctgaccttgagtttatggggcagagcccaggcttctacaagaatgtggtgaagattcagaagcacgtcacgttcaaccaagtgaaaggcatttttggcttcactgacagtgactgcattgggaagatcagctttcctgctgtccaggctgcaccatcattcagcaactctttcccgaagatcttccgagacaggacggacatccagtgcctcatcccatgcgccattgaccaggacccttacttcagaatgacgagggacgtggctcccaggatcggctaccctaaacctgccctgctgcactcgaccttcttccctgccctgcagggtgcccagaccaagatgagtgccagtgaccccaactcctccatcttcctcacagacacagccaagcagatcaagagcaaggtgaacaagcacgcgttttctggtggaagagacaccgtggaggagcacaggcagtttgggggcaactgtgaagtggacgtgtccttcatgtacctgaccttcttccttgaagatgacgacaggctggaacagatccgaaaggattacaccagcggagccatgctcactggggagctcaagaagacactcatagatgtccttcagcccctgatcgccgagcaccaggcccgacgcaaggaggtcactgaggaaaccgtgaaggagttcatgactccccggcagctgtcattccactttcagtgcttttgttttgacacttgactgaagtggagggcagcacagacagtgcgctggccgtaccccaggccggtggactatagctagacaggaaagaacagcagctgcccaggccctggtgtcctccctctgggctgaccatgtgtagcaagccaccactcagagtcttggcaaagcagaagccgaatctcagggaaagcccctggttgacgtgtctgccttctctgaaggcaccaaggctactcatgagtgttctgttcttgcatcactttcaggcaaaaaataaactttattgtgctcctg

SEQ ID NO: 3016 - DNA, 1789 bp, Cricetulus griseus
ggagacactgatggagcgagaacacacagacaccttacgccatctgaacttgatgttaatgtttactgagtgtgtgctggacctgacagctgtgaggggggggaacccgtgaactgtgcacatctgctgtgtccttgtaccagattcaagagagtgtagtcgtggaccagatcagccagctaagcaaagattgggggcgggtggagcagctggtgttatacatgaaagcagcacagctgctggcagcttccctgcatctacgccaaagctcagatcaagtctgggaagctgagcccatccacagctgtgaaacaagttgttaaaaatactgaatgaacgatataaattctgcatcaccatgtgcaagaaacttaacagaaaagactgaatcgcttcttctctgataaacagagatttattgatgaaatcaacagtgtaactgcagagaaactcatctataattgtgctgtggaaatggttcagtctgcagcccttgatgagatgtttcagcagactgaagacattgtttatcgctaccacaaagcagcccttcttttggaaggcctaactaagattctgcaggaccctacagatgttgaacctggcaaataaatgtaccttagaactagaatcataagtacagttattcttgtggataattaaacaggagacaaagtgagtgacacttcactcaactctctgaatagtacatgaaattccatgttttgctaaagcatatacaagcaaagagtctacagctcatccagacaatttgggatttggggtaagtttgtctgaatctgagcatgcatctttaaacagctcaggaggaagaatgtgtattggtattttgcaatttaaaactaactgaggcacaatggacttgtttagaatattttacttgattatatacataggcccttttcagaattcacaatgtattctccattgaacttttaatggtcgaaacttgcattcatgtgaacctttgcatttttcttacctgtaatcttcaccaacagatcttctcagtggtattttgagttgctggttgtttgcattttttgttgtgcatgcagaatgtgcattgatacctgtgaccttaggtttattaaaggctaagattatttgggcagtattagaaagttatcatgaatcaagagatactcttgagaattttaatagggccaaatcaaagtgatgaataaaggcttgttagtgatgtagagtttctacaagaaattagaaagaagtgaggtttgtttattcttagaaaaatgggcagctctctccaaactaatgtgcacttttcagtgttaatcctgacaattcaccaaatagctagtcatggtgaattaacatctctccaagaatggttcctatgttatatattgtttagttcttttacttacctgcttgaatacttgaataaagcattcacccgtcttaacccctttctttcaaccctttcacataagacctgctctctgacagctgcacagaagctctttggcttaacagagacagtgtggttttcatttacttggtggacaaagtaatgtaatttctacattatttatctgtatgaatttccagtagttaatttgaactttatttataagatgtttgtatttttaggtctttactacagtgtttctacctctcatttgtaactgcattattcttcaaactaggtaaaactcactgaatcattgtgtaataaatagcctttttttaaattgcttgtacaaatgtatattaaggttaaataaaactgacagtgttttta

SEQ ID NO: 3017 - DNA, 1789 bp, Cricetulus griseus
agtataaagatggccgtctgtgagattaaagtccattcagcagacaacacaagaatggaattaatcattccaggagagcagcatttctacatgaaggcagtaaatgccgctgagagacagaggtggctggtcgcgctggggagctccaaagcgtgtttgactgacactaggactgcaaaagaaaaagaaataagtgagaccagtgaatctctgaaaaccaaaatgtctgaacttcgcctctactgtgacctcctaatgcagcaggttcatacaatccaggaatttgttcaccacgatgagagtcattcatctcccagtgtagagaacatgaatgaagcctcatccttgcttagtgccacctgtaatacattcattacaacccttgaggaatgtgtgaagatagccaatgccaagtttaaacctgagatgtttcaactgcctcatccggatcccttggtttctcctgtgtcgccttctcctgttcagatgatgaagcgttctgccagccatcctggttcctgcagctcagagaggagcagctgctccatcaaagaagcagcctctgcccttcaccgacttcctcaacgccgccgcagaacctactcggacacagactcctctaatgatgttccccccgaagacccagagagacctcttcactgttcaggaaacacacttaatggagatttggcatcagcaaccattcctgaagaaagcagacttctggccaagacacaatctgaatctgaagaacctcttccatctttctcctgaggaaacggacacaccccgcctcctctgagccatctttctcctgaggaaacggacacaccccgcctcctctgagtgttgctatgcaaaagctgctgtaattaaactctttctggggtagcttcccctctccttaggatttctctgcactttatagaatattgtaaacaaacaacccacatacttttgaagtgtattttatctttctatagtttacttgcaagagtattttcctaataacttcacagtatggatgtgcatctttttttttttttaaacaaatgatggtgtaacattttgacatccataaggacaaatgtagatatttttctaaaaaactgtgagggactgacagcttggtcagtattgtagtatataaacatgaaatctcggcaggtttgtttgacagaaatgtgatagatgtaacttgtgccatggaccaaaaggtcacttcaccccagcttcaaattaattaccgtagcagcttgatggtgattggatcatattcctttaagcaaagaaaggaaacacttaatgttctgaaggtctttagcccaaatactatgacatattgaatattaaaaaaagaatcagactctgcgtccttcgtatgtgaagttgacactactgatttgtcaataccaaacatcaggttacagtgtttattttttatttatttattttcttactgcatcaaaagatgattatgtcctgacttttatgacctttccaatttaaaatgtatatgcattgttgttatttgcattgttctaagagaggcaagtgtctcctgaccttgtttacttataccagagaaataaatggctttcaatggaaaaggattttagtgaagctactgttgtaaggtgtgatttgcagctctttggcatatctagagacatttttaatttatgaatatttatacaaaaaagtaatcctgtcaagatgactgttctatatcacttgagaatggcattatttaattaaagaacaatttgcattttttggtagtgcctgt

SEQ ID NO: 3018 - DNA, 1789 bp, Cricetulus griseus
agatggctgctgctgtgactctccaggcctcccctactgcttcggccacggctacagccacagcagccgcgctgggggaggtagaagatgaaggacttttggcgtcgctgttccgcgaccgctttcccgaggcccagtggcgtgagcgacctgacgtaggccgctacctccgggagctgagcggctcggggctagaccggctgcgacgagagcccgagcgcttggcggaggagcgggcccagctgctgcagcagacgcgcgacctggccttcgccaactacaagacgttcattcgcggtgccgagtgcaccgagcgcatccaccgtctctttggagacgtggagacgtccctcggtcacctactcgaccgcttgcccggcttccagcagagctgcaggaacttgtgaaggaagccgaggagatcagctctaaccgccggatgaacaccctgactctaaaccggcacacagaaatcctagagattttagagattccccagcttatggacacctgtgtccgaaacagctattatgaagaggccctggagcttgcagcctatgtgcgacgactggaaaaggaaatactcctccatccctgtcatccagggcattgtgaatgaagttcgtcagtccatgcaactgatgctcagccagctgatccagcaactaaggaccagtatccagctcccagcctgcctgcgtgtcattggctatcttcggcgcatggatgtcttcactgaggctgagctgagagtgaagtttcttcaggcccgggatgcttggcttcgctccatcctgactgccatccctaatgatgatccttatttccatatcacaaaaaccattgaggcctgccgggtccacctctttgatatcatcacccagtaccgtgccatcttctcagatgaagaccccttgctcccacctgccatgggagagtacactgtgaatgagggtgccatctttcatggctgggtgctgcagaaaatctcacagttcctgcaggtgctagagactgacctttacaggggtgtaggtggtcgtttggactctctgctgggccagtgcatgtactttgggctgtcctttagccgggtaggggctgatttccgaggccagttggctcctgttttccagagggtggcaatcaacactttccagaaagctgttgaggaagcagtggagaaattccaggatgaaatgacttcctacaccctcatctcagctgcagccatcctgggcagcagtaacatgtctactgcagtgccagccacacagccagggacattgcagccaccaatggtgctcttagacttcccacccctagcctgcttcctcaacaacattttggttgcttttaatgatttgcgtctctgctgtcctgtggccctagcgcaggatgtgactcaggccttggaggatgcccttgctaaggtaaccaaaacaatcctcgcattccatcgtgctgaagaggctgcgttcagcagtggggagcaggaaatctttgtccagttctgcactgccttcctggaagaccttgttccctatttgaaccgctgtcttcaagtccttttcccaccagctcagatagcccagactctcggcatctcccccacccagctctcgaagcacggaaaccttgggcatgtgaacatcagtgccatccaggagcctctcgcctttatcctgcctaagagagagacagtcttctgtctagatgaccaggagctagtaccggacctcgcggccccagaattagagctttctgtggagcatcccagcctggagcc

SEQ ID NO: 3019 - DNA, 1788 bp, Cricetulus griseus
  modified_base (217)..(217): a, c, t, g, unknown or other
ccagtctgctgcgactcaatctttccagtaaccagctgaagagtttgccagcagaaataagcagaatgcaaagattaaagcatttggattgtgactccaatctcctggagactgtgcctcctgatgtgggcagcatggaatcactggaattgctttatttgcggagaaataaattacgtgttttacctgaatttccttcctctaggcaactaaaggngctgcacctaggtgaaaaccagatcgaaacgctaggggcagagcatcttcagcagttgcaggccatccttgtgctggacctgaggggcaacaagctgcggtctgttcctgaggaaatggccctgctgcagtctttggaaaggctcgacttgagcaacaatgacattagtagtctgccctgctctttgggaaaccttcatttgaaattcctggcactagaaggaaatcctctaagaaccattcgaagagaaattatagctaaaggaactcaagtaagtccttaaaatacctgcgaagcaagatcaaagatgatgggaccagtcaaaatgattctgttcctgagactgccatgacgctaccaagtgaatccagagtcaacatccatgctatagtcactctaaagctgctagactacagtgataaacaagcaaccttgattcctgatgacgtatttgatgccgcaaaaagcaataccatcatttctgtcaacttcagtaagaatcagctgtgtgagattccaaaaaggattattgagctgaaagagatggtatcagatgtcaacctcagttttaacaagctttcctttatatcccaggaattttgcttgcttcagaaattgacatttttagatttaaggaataattttttaaattctttgcccgaagagatgtcatcactgacaaaactgcaaacaatcaatctttcttttaacagattcaaagtgctgcctgcagttctgtatcacattcccacattagaagcagttctcatcagcaacaatcaggttggctccgtggaccctcagaaggtgaaactgatggaaaacctgagcactctggaccttcagaacaatgacctcctgcaggttcccccagagctcggaaactgtgtgcagctacgaacactactgctagatggaaatccattccgagttcctcgagcggccatattaatgaagggcacagctgctgtgctggagtatttgagagacagaattcctgcctgaggatagctgacatcttattctggtggtcattctggatagaagagagtcagcctccagtttcataataataaggcagccatctatttagatctggattcctcccggttactttttattttccaaataatgtgaactgagcaagactgtattacgtgtaagccagcaaattttactaaagtattattctttggcatttaaaagaaaatcagacttttcattccccaggttaggacttgctgtgtggtcagtgtcaatgcatgtttatgtgtaggattttggcttttaatttttttaaacttctacatgtgtgggcatcctttattccggcctggtacttcttatttccaacaacatggttcccaaatctgcttacagcctgattaaagctagactgtcagttttacagtgatttttctaaaagggaattagttatatacaagcttgatttaataaaaaccaaatataaacattgttgtttacactgaaattatcaaaagcaggtttatgagctcttctggctcaccatatgattgtgtcaagaagccagttcagaagtaacgtgtgtc

SEQ ID NO: 3020 - DNA, 1787 bp, Cricetulus griseus
ctggatctgccctcgacatgctacgggcgcgcgggcctgggccgggagctcggctgctccgggacgcgctgggtctagggcggcgggggcgagcatggcagaggccacaaggccaggacactggcgtgcaggtgcacaacagcctcaccggcaggaaggagccgctgatcgtggcccgcacggacgcggtctcctggtatagctgtggaccgaccgtgtacgaccatgcacaccttggccatgcttgctcatatgttagatttgatattatccgaaggatcctgaccaaggtgtttggatgcaatgtggtcatggcgatgagcattaccgatgtggatgataaaataatcagaagagctaatgagatgaacgtgtcacctgcttctcttgccagcctttttgaagaagaatttaaacaagacatggcggccctgaaggttctaccgccaacggtgtacttgagagtaacagagaacatcccgcagatcattgctttcattgaaggcatcattgctcatggccatgcttactccacagcaacaggcagtgtctacttcgatctgcaagctcgaggggacaagtatggcaagctcatcaatgtggttcccagtgcacctgtagagccagctgactctggtaagcggcatgccagcgactttgccctgtggaaggcggccaaacctcaggaggtgttctggacctccccatggggagacggacggcccggttggcacattgagtgctctgccatggccagcgaggtgtttggaagccaactggacatccacacaggtggcatagacttggccttcccacatcatgaaaacgaaatagcacagagtgaagtcttccaccagtgtcagcaatggggaaattacttcctacactctgggcatttgcatgtgaaaggcaaagaagaaaaaatgtccaaatccctaaaaaactacatcaccattaaggacttcctgcagactttctcccctgatgtcttccggcttttctgcatgcgcaccagctataggtcagccattgaatacagtgacagtaccttgttggaagctaagcacctcctgctggggctgacctcatttgtggaggatgcacgagcctatgtaaaagggcagctgacttgtggccctgttgcggaagatgtgctgtgggagaggctggccagcaccaagaaggctgtgagggctgcgctagccaatgactttgacacgccgagggcagtgaatgccctcctggaccttgtgcaccatgggaacagagagcttagagcagtctcgaaggaagctggtggcccaagaagtcccactgtgtttggtgccatcatctcctacgttgagcagttttttgagactgttgggatttctctggcaaatcgacagtgtgtttcaggagacagcggcacagcaactctgcactctgtggtagatgaactcgtgcgcttcaggctgaaggtccgccagtatgcactggccacacctggggctactggggagacccggagacagcagctccaggagaggcagcccttgctagaggcatgtgatgcattgcgccaggacctcgccacccacggcatcaatgttaaggacagaggcagtacaacctccacatgggaactgctggatccaaggacaaaacaccagaaacctgcaagttgaggattaggcagctgtggttccacgtgctaccacaccatgacacctgttcttttgtgacaaaaactttatattaaagttgccaattgtggctgtttagccaataaaaaaaaaaaaaaaaaa

SEQ ID NO: 3021 - DNA, 1787 bp, Cricetulus griseus
ggttcttggaacagagaggatttctgaataaaaagaaccaaccccctagcaaggtgtctaagttgcattcagaacctccaaagaaaagggcaatcttcaagagtagatgacattttgaatacccttccatgcccaaagaagaaggaggcagcggcctccaagagggagtcagagcagtccacagacaggaaagcatcattgtcttggctgacccctgctccttcaaagaagactaattctgttgtggctaaaaaagatttgttaggggagtttcagagtgcccttccaaagattaagagccacccatgctacacagaactccacccaagctcattcggagaataaaggctccaagaagaagtccttgaaaaatgttgcacaaaattccacacaagcttgttcggaggaaaagtgccttaaaatctcccaaaacttgcctgggaagatggtggcagttgactgtgaaatggtgggcacaggacccaaggggcgtgtgagctccttggctcgatgcagcattgtaaactacaatggagatgtgctctacgatgactacatcctccccccctgccatattgtggactaccggaccagatggagtggcatccgaaagtgccacatggttaatgctacacccttcaagattgctcggagtcagatcttgaagatactcacagggaagatagtggtagggcacgccatccacaatgactacaaagccctacagtatttccatcccaagtccctcactcgagacacttctcaaataccactcctcaaccggaaggctgactgcccagaaaatgtcactttgtcactgaagcatctcaccaagaagctgctgaatcgggatatccaggctggaaaaagtggacattcctcagtggaagatgcccaggccaccatggagctgtacaagttggttgaagttgaatgggagcagcacctggcccagaaccctccagaaaattagcagtcccggggagacacatgccgtgcagtagaccattccacagttctactagcttcacacctgtagaagctagaattgttggggagaggggcttgaccagagagttaatacccattgaaatttcatctcagctgttgtggggtcactgtgtggttaagtgtctcatgaaaggagaaagtgttcatgttaaaacccacctctaggccaggcaggtggcacaggcctgtaattccacagacttgggagattgagacaaagttttaagtttaaggtctgcctgggctacagaattagttaaaggccattgagaccctgtcctaacacaaaaagagggctaggagtaaagctcagtgctagagcactttcccagcatgcataagcccctagttcaatatctagtagtgaggtggggcatgaactatagaccatttacttcttgaatagtgctaaccacatgtcctagggtgcttgtgccagtcagctttcgtgactttgaggaagcaaggcacacagggttttttgttataaagtaattaatatcttttcactttcagaagtgttctgattggaggtaggcatggtggtctctaatcccaggactctggaggccaaggcaggaagatcaaaagttcaaggccagtccgattacgtagagcagctctggctcatagaaatagaaaaagagaaggaacagattgtgtggctggttgctgtatagccacattacatagcacagaatagcagagtttacttcatttaggttctgcttagttacaaagaatttacattgttttaatagtctttcaaccctttt

SEQ ID NO: 3022 - DNA, 1787 bp, Cricetulus griseus
tttgcactacactaaggaatttcttcctttcctgtccgattcttgctgtattttgcaccagctttatcttcagatatacagcaagtttcctccaagcctacatgctgccagtatttccaaagcacagcaggaggaaatagcaggcaatttccttgtggtactggacccactcatcagtcagctgctcacaacccagccttttgtgcaggcagttttggataataaactagacctgccctgtgagctgcagctcccacaagtcctactcctacttgttgtcatggataagctgccctctcagcctaaggatatacagaacctgtggtgcacagaagctacggctaggatgtccctactcaaagctattttctacagttttgagcagtgttctggtgaactctctctgactgctcatttacaggaagtaaagcataaagggcaagctgaggtgtctgtcactttatatcagcatgtttgtgttcatctgtgtgcatttgttgcttcttttcatccctcactgtttcctgagctggatgctgctctattgaatgctgtgcttagtactaatatgactacctcattgttagcaatggatgtgtggtgtttccttgctagatatggaactgctgaacttggtttacatcatgtcaccttagtggctcacctgataaaatcttgccctggagagtgtattcagcttaccaacttatcaatactgttgaagcgtctctttttcttcatggccccaccccatcaggtggaatttatccagaagttttctccaaaagcagcagacaactttcctctttggcagtgtatttcctttcaggcattacctgctgacctgaggaaacaagctgcatgtgacgcgatcagagggtgcactgtacattgcatgaagtggttgaacagcagtcatactttggcagaacttgactctctgaacacagcactctctgttttgcttactgtatgtaattctgctggtgatgctttggatattagacaacgaactacagttattgaagttgtgggtcagctttgggcttttataaacattcaacaagtaatcagtcagccctacgttcagcagacattttgccttttacttcaactactggcatcttttatccaaactgtagatccgaagctgataagtcaggtagtaactttactgacctcactacttaaattagagcctcctgaccatgtctctctggcagtgctggattttatatcctctctgggcagactttttatacctctatctatccaggagaaggtgctgcccaacctgtcttgtattcttgctttactgctagccagcgggaattggctgctagaacaactcactttggaggcatttactcagtttgctgagggaacaaatcatgaagagatagttccacagtgtctcagttctgaagaaatcaagaacaaagttgtagcctttttggaaaagacaggatttgtagatgaaactgaagctgccagagtggactatgtgaaacaggagaaaggcacttcctgggaatccactgccaaggttactgtagaagcagcaaatgggtccgttttacagccttgtacaaaaagagcccgtcgtgagctccccttcgaagaagagtatagggcagcatttcaagcagcagcagaggctttagaaacaactgagttgttgctccaacaggcccctgctccaccctggctgctaacggaactggatgcactgcaagaaagggttgagaagctaaaatgctgtatacctgagggtaacacatgaatgg

SEQ ID NO: 3023 - DNA, 1786 bp, Cricetulus griseus
  modified_base (804)..(804): a, c, t, g, unknown or other
tttgggatccgaagacagaatagtgtgaatagtggaatacttctgccaatgaacaaagacaagacagagttacagaagtctccctccacttcctgtctgtatggaaagaaactctccaatggctccattgtgcccctagaagacagcctgaacctcattgaggtggccacagaagccccaaaaggaaactggctattttgcggcccccactcagctggaacccgacggagtcagtttgttgtgcctcgtgacctggaagaagaagtgaaggagcagatgaagcagcaccaggagaacaggcctgagcccgagcccagtgaagaggaccggactgagccgctagaagagtttgatacagcgctgtgatgatgctgccccgaaaagggcacacagcatggagggagggctaatgtggtagttggggaagggaccgtttaggagagtgctttgcctcagtgtttcaaaccatagatgtgtggagtagaatttggagccaaaaagttgaacactatcagggtctggttctgggtgagctagtaccgccatcagtgttaagcttcacatggaaccttctttggattcccagcattgctgggagaccacagatgttactcagtgtcagtcctgccacctgccattaaccccttctctcctaggatcatttgagaatttgcctgcctgggcaggaaagggactattcctgtggaggaagtaactgaaggttgattccctttactaattgctgctgatggatctctgtgacagagaaatcaccttatgtctcagactaactagtggggggtnatgtgactagtcacatggcttttcattctctacgagaatacagcctatcaaaatgatgtctattggagatacagaaccattcaagcaggtaatttatgtatgtaatgtatgtaacctctctctctctctctctctctctcttcttccactcctgacacaagcaaggcttgattacactactgtggagcatacatgtgcaataagcagtgaacttgtttccctggcgtacagaaaagtcacctgagcagctggtaatctctgggtgctattacagtgcgtgtgatgagtgctgtttcccagaccatcagattgggctgatcctctgaatatccaacagtgctcttctttctgtgtagaccttcagcaaaagcaggtacttggaaatcacaggctcaccttctctatctattcaataattattaatgaagagacctctgtaagggagcacttggctgttactgataaatgtaccaattactaaagaatccgtctccaagccatctggtgatgtctgcagcatcactctagaactgtcttgtgtcactttttacttccctctgggtggagcctttcagactccccaaggcaggttaatctttctctccgggcagtgactttgccctgtggttgggcaagcactctctagactgagagaagtagctacatacatctgctctgtaccgtcatttggtgatcagccaatcagcattagctccttgtaatctaaatctcatgcacctctcccaaatgctatagggttttctctcactgttgccaatggatgtcatccagacagtgggctcatatctttggtttttgtgcaatcattgttgtattgtagtcctaagactcattatagtgtatttttgatatttttgaaatgtgttaaatttttttaattcaataatatgtagccagagcatgttgcagcaaatactattgtttgttaaaaataaataacaataaataaaataaaatagga

SEQ ID NO: 3024 - DNA, 1786 bp, Cricetulus griseus
cgccatgccgactgtcagcgtgaagcgagacctgctcttccaagctctgggccggacctacactgatgaagaatttgacgagctatgttttgaatttggtttggaacttgatgaaattacttctgagaagcaaatcataagtaaggaacaaggcaatgtaaaggcagagggggcctcagatgttgtgctttacaaggttgacgtgcctgccaacagatacgatctcctatgtctggaaggactggctcggggactccaagtcttcaaagaaaggataaaagctccagtatataaacgagtaatgcctaagggagaaatccaaaaattgattatcacagaagagacagctaaagtacgtccatttgctgtagcagccgttctccggaatatcaagttcacgaaagatcgatacgacagtttcattgaacttcaagagaaactacaccagaatatttgcagaaaaagagcattggttgctattggcactcatgacttggacactttatcaggcccatttacttttactgcaaaacgtccttcagatatcaaattcaagcctctgaataagaccaaggagtatacagcttgtgaactaatgaatatatacaagactgacaaccaccttaagcattatttacatatcattgaaaataagcccctgtatccagttatctatgacagcaatggtgtggtcctctcgatgcctccaataataaatgggaatcattcaaaaataacagtaaatactaggaatatatttattgaatgcacaggaactgacttcactaaggcaaaaattgtgcttgacattattgtcaccatgttcagtgaatactgtgaaaatcagtttacagttgaagcagctgaagtagtttctcctaatggaaaatcaagtacctttccagagctggcttacagaaaagagatggtgagagctgatttaattaacaagaaagttggaatcagggaatctcctgcaaaccttgccaagctcctgaccagaatgtgtctaaagtcagaagtcataggtgatggcaatcagattgaggttgaaattcctcccaccagagccgacgttatccatgcctgtgacatcgtggaggacgcagctattgcctatggatataacaacattcagatgactctgccgaaaacatacaccatagctaatcaatttcctctcaacaagctcacggagctcctcagacttgacatggctgctgctggcttcactgaagctcttacttttgccctgtgctcccaagaagatattgctgataaacttggcttggatatctctgaaacaaaggcagttcacataagtaatcccaaaactgctgagttccaggtggcgcgcactacccttcttcctggccttctaaagaccattgcggcaaaccgaaagatgccacttcctctcaaactgtttgaaatctctgacattgtagtaaaagattctagcaaagacgtaggtgcgaaaaactacaggcatctctgtgctgtttattacaacaagaatcctgggtttgagatcatccatgggctcctggacagaattatgcagctgcttgatgtgcctcctagtgaggagaaggggggctacgtgatcaaagcatcaacaggttctgcattcttccctgggcggtgtgctgaaatctttgcccggggtcaaagcatcgggaagctgggcgtccttcatcctgatgttatcaccaaatttgagctgaccatgccctgttcctctctagaaatcaatattgagccctttttgtgaagttggtctctg

SEQ ID NO: 3025 - DNA, 1786 bp, Cricetulus griseus
gagaagaaactaaaatacttgcatttagatctgcaaggagtgttatcttaatattttctgtccgagaaagtggaaaatttcaaggttttgccagactatcttcagaatcacatcatggtggatctcctatacactgggtgcttccagcaggaatgagtgctaaaatgcttggaggtgtctttaaaattgactggatttgcaggcgtgaattaccctttactaaatcagctcatcttaccaatccttggaatgaacataagccagtcaagattgggcgtgatggacaggaaattgaacttgaatgtggaacccagctttgtcttctgtttccccctgatgaaagtattgacttgtatcagctcattcataaaatgcgtcacaagagaagaatgcattctcaacctcgatcaagaggacgtccatcccgtcgagaaccagtccgggatgtgggaaggcgtcgaccagaagattatgatattcataacagcagaaagaaaccaaggattgactatccccctgagtttcaccagagaccagggtatttaaaggatccccgataccaggaagttgacagtttcacaaatcttattcccaacagacgattttcaggagttcgccgagatgtgtttttaaatgggtcctacaatgattatgtgagggaatttcataacatgggaccaccacctccttggcaaggaatgcctccttacccgggaatggaacagcctccacaccatccttattaccagcaccatgctccacctcctcaagcccaccccccttactcaggacaccatcctgtaccacatgaagcaagatacagagataaacgagtacatgattatgatatgagggtggatgatttccttcgacgcacacaagctgttgtcagtggtcggagaagtagaccccgtgaaagagatcgggagagagaacgagaccgtcctagagataacagaagagacagagagcgagacagaggtcgtgatcgagaagagaaagagaaagaatatgtgatcgggacagagaccgaggggagagaggtcgttatcgaagataatgcgcttttggaagcactgattgaagataaaaaaaatattgtattttttttgtgtgtttacaagtagtaaatttattttcagctgtctacttaaagctcattgtgtagaaggatttattatcatctttgttccaagcatgcagtagaataagaactggaaatctcaaatccgccaaaaatgcacagttgacagttgacacttttattggggcagaacggaacagtccaagaatgtagatattgattcattctctataaatgttctttttacagtgtattcatcctagagttactttgttttctttcttttggatcttgatcaataactgccatagtattttgctttctgtttctacatgtagctgcacacagttcagtaaaaataatgctgctatcaagtatgcaaatattgaagtatgatggtttgactatatggcagtgttgtagcagcctgtttctcctcttccctttttttttaaacctataaagtcatttttatagtcttcaatgatgagagcaatattaagaagacattgctatctaatttttaatctttttaaataaaaagttcccgtgttcagtagcatggttgatgctattgtttagccttccttctaaactgtacatcggcttggaatgttcacaatttgcgtgtggcagcagaagataaccccacattctacattgctactgttttgtatgaaataaattggtaaaagattgaca

SEQ ID NO: 3026 - DNA, 1786 bp, Cricetulus griseus
gggacgctatcgcggaagcttcacacagcagtgcggttcccgcgaagaccccactggtgacttgccaaccgtgccaccatgaacggggtcgtaatcccccaaacgcccattgccgtggacttttggagcctgcgccgtgctggtaccgcgcggctcttcttcttatcccacatgcattctgacccacacggtgggcttgtccagcacttgggcacggcccctctactgctccccaatcactgcccacctcctacaccgtcgcctacaggtgattttcgatatacaccatccatgctgaaggagcctgccctgatactggggaaacagattcatactttataccttgacaacaccaattgcaatccagccttggttcttccatcccgacaagaagctactcagcagattgtccagctcattcgacagttcccacaacacaacataaagattggactctatagcctaggaaaagaatcactgctggagcaactagcccttgagtttcggacctgggtggtattaagtcctcaacgcctggagttggtacagctgctggggctcgcagatgtgttcacagttgaggaaaaagttgggcgcatccatgctgtagaccacatggagatctgccattctgccatgcttcagtggaaccagactcaccctaccattgctattcttcccacaagccgaaaagtacgaagccctcacccaggcatccacaccatcccttactccgaccattcatcttactctgagcttcgggcttttgttgcagctctgaagccttgccgggtggtgcccattgttcgccaacagccttgtggagagttctttgagggcagctcgagtcccaggctccctatactgatgattccacactctgtgcagcaatacatgtgttcctccgctaggaaagcaaatgtgctttggcagttagaaaggagactaaagaggccaagaatccagggagttgtgtttgaatcccctgaggaaaaagctgaccagactaaagttgaccgagtcgcaaagaagcgcatgaaagaaaacctctcactctggcctggggaccttgagaagctctgtcctcatcctcttccggccaggaagcagttgttcccagacttctgcagagaagaatgtgatgagccagtccttttttgtaactccaaaaagatggcgactgtgttgactgccccagtggaattttcaatgcaattacagcctgtagatgtgtttatctctccagaaaccaggcaggaaattggtgtagggtcccgattgatacctaggagaggctcaccagctagagggaaccaaagtgactggataggctgtgattctcccctgtctcacattagcaaagacactcatctagctactgagtccggggacctggcgctaaaataccttcttactccagtgaatttcttccaagcagggttctcttccaggaactttgaccagcaagtggaaaaataccagcagagtacagtataacaatcctgcagttttgaaaacagtagatgatggctagtggcaaaagtttgtttgctgtcttcctttacagaattctgtggctcaccctggagtagctctaatgaagtttgtttgtggagtcctggtgcctatgaaacccttagctttatatctgattatttatgttagttttattatatttagcaaacagttttcattataaactatttagtgtttataagaacattaaaagttcatagaagacccatagcaacctaatctgttcaacttggtttaacccagtttttct

SEQ ID NO: 3027 - DNA, 1785 bp, Cricetulus griseus
tctgcctcagccgctgccgccgccgctgcttgctgcaggatccgccgcagccaccggtctcgcgcgtcgtcgctccctccttggacagtaattttatgaataagcatcagaagccagtactaacaggccagcggttcaaaacccggaaaagggatgaaaaagagaaattcgaacccacggtcttcagggatacacttgtccaggggcttaatgaagctggtgatgaccttgaagctatagccaaatttttggattctactggctcacggttagattaccgtcgctatgcagacacactctttgatatcctggtggcaggcagcatgcttgcccctggaggaacacgcatagatgatggtgacaagaccaagatgaccaaccactgtgtgttttcagcaaatgaagatcatgaaaccatccgaaactatgctcaggtcttcaataaactcatcaggagatacaaatatttggaaaaggcatttgaagatgaaatgaaaaagcttctcctcttccttaaagcattttcggaaacagagcagacaaagttggccatgctgtcgggcatcctgctgggcaatggaaccctcccagcagccatcctcaccagtctcttcaccgacagcttagtcaaagaaggcattgcagcctcctttgctgtcaagcttttcaaagcctggatggcagagaaagatgccaattccgttacctcttccttgcgaaaagccaacttggacaagcggctgcttgaactcttcccagtgaacagacagagtgtggaccattttgctaagtacttcactgacgcggggttgaaagagctgtcagactttctccgagtccagcagtcactgggcaccaggaaggagctgcagaaggagctgcaagagcgactgtctcaggaatgtcctatcaaggaggtggtgctttatgtcaaagaggaaatgaaaaggaacgacctcccggagacagccgtgatcgggctcctctggacctgtgtcatgaatgctgttgagtggaacaagaaggaggaactcgttgcagagcaggctcttaagcacctaaagcaatatgcacccctgctggctgtgttcagttcccaaggccagtcagagcttgttctcctgcagaaggttcaggaatactgctatgacaacatccacttcatgaaagccttccagaagatcgtggttctcttttataaagccgatgttctgagcgaagaagcaatactgaagtggtataaagaagcgcacgccgccaaaggcaaaagtgtctttcttgaccagatgaagaaatttgtggagtggctacaaaatgcagaagaagaatctgaatcagaaggtgaagaaaactaaatgtctcgagcacactgcctccacacttttcgggtgggaatgctgaagcatttggggagggaaactttggcttctgtttgtatggaggatacaaatgataggcgaggcttccctgctcagaggggaaggggttttcatttctgttgtgtttaaacggagccctgaggcatcagctactacacttgggactctacctctcactgtatgctaattaaagccattcaacaaggggtcaggtaggagcctgaagcttagtcctcagcagacccctgttttagctgtatttacaggtactgtgtgagcgccccactggtgtctatcacagggccacttccatagttgtgtttctcctgctcgtgtatgtgatttgacaaaccagttttttaaataaatggctttttaaaaatcgttgaaaaaaaaaaaaaaaaaa

SEQ ID NO: 3028 - DNA, 1785 bp, Cricetulus griseus
ggcgggctcggctagccgggcgggtcgactgcttcggcggttcccctcggacccgggcccagggtctagcctcgcgatggaagctgttctgccggcgctgagcatgtcagcatcctcgagggacccacatccctgaaatccgagaaaagccctgcccactcactttctggtcctctttggggtcaccactacctgtcgggtccccagtcctatagcggcagcctagttcaacaaagaaacaggacaatgatactgacttttgtgctgggcagcggccttcggggcgggccttcacttcggcccgtcttggggtcctcattgtcactccgggttcgatcaacatcagtcaccgatacacaccatgtagagctggccagggaacgctccaagactgtcacctccttttacaaccagtcagccatcgacgtggcagcagagaagccctcagtccgcctcacccccaccatgatgctttattctggccgttcacaggatggcagccaccttctgaaaagtggccgctacttgcagcaagagttaccagtgaggattgctcaccgcatcaagggcttccgtagccttcctttcatcattggttgcaatcccaccatactgcatgtgcacgagctatacatccgggccttccagaagctgacagacttccctccgatcaaggaccaggcagatgaggcccagtattgccagctggttcgacagctgctagatgaccacaaggatgtcgtgaccctgttagctgagggtcttcgagagagccggaaacacatagaggatgaaaagctggtccggtacttcttggacaagactctgacttcaaggcttgggatccgaatgctggctactcaccacctggcactgcatgaagacaagcctgattttgttggcatcatctgcactcgtctatcaccaaagaagatcattgaaaagtgggtggattttgccagacgcctgtgtgagcacaagtatggcaatgcccctcgagtccgcatcaatggacatgtggctgcccgtttccccttcattcccatgccgctggactatatcctgcctgagctgctcaagaatgccatgagagccaccatggagagtcacctagatactccctacaatgttccagatgtggtcatcaccatcgccaataatgatattgatctcatcatcaggatctcagacaggggtggaggaattgctcacaaagacctggatcgagtcatggactaccacttcaccacagctgaggccagcacccaggacccccgaatcagccccctcttcggccacctggatatgcacagtggcggccagtcaggacctatgcatggctttggcttcgggctgcccacgtccagggcctatgcggagtacctcggtggctccctgcagctgcagtccctgcagggcattggcacagatgtctacctgcggctccgccacattgatggccgggaggagagcttcagaatctgactgcggattttggcctgctagcctgccacactcctcctaggaccctctcggcctggtgggggccactacgctccacacactacagctttgtggggcttagggcctcagacaggtggacttccatggagctgggcaccactcctcctcagcagggcccactgcttcctactccaagtgttggaagggaggaagcaggagcccctgaggcctctaataccagctctgctgttctcactcttgaggaacccttctttgacctgctgtttattaaagtttgcatttttgaatgaccctcttggg

SEQ ID NO: 3029 - DNA, 1785 bp, Cricetulus griseus
ctggaagacgctgggctttagcgtggattgacggcggttcccgcgagcgaagtgggactcagactgggcccacgtccaactgggctaggggacagagttcagtggctcaactttcccctccacacggctcagaagccgaggaaaggtgaacacaaatgggcagctgtggtaggactggaaattcatgtccagatttcctccaactctaaactcttctctggagctcaagtgtgctttgcagctcccccgaattctttggtttctttttttgatgcatctctgcctggaactttgccggttctcaacaggaggtgtgtagaagctgcagtgatgactggcttggcactgaactgccacataaacaagaagtctttgtttgacaggaagcactacttctactcagaccttcctgcaggctaccagatcacccaacagaggctcccaattgctgccaatgggcacttgacgtacagtgtctacatggggaagaaacggagtcagatgaccaccaagacagtgaggatcaaacagatccaattggagcaggacagtggcaaaagcctccatgatgacctgaggtcccagacgctcattgatttgaatagagctggagttggccttctcgaagtggtcctggagcctgacctgtgctgtggagaagaggcagccatagctgtcagggaactgcagatgatccttcaagccctgggaaccagccaggcaaacatggcagagggtcaactgagagtagacgccaatgtatccgtgcatcaccccggggaacctctgggtgtccggacggaagtgaagaatctcaacagcctcagattttggctaaagctatagactatgaaattcagagacaaatcactgaacttgagaatggaggtgaaattctaaatgaaactcgttcgtttgattataagctggggtgcaccgtgtcaatgagagacaaagaaggaaagcaagactacaggtttatgccagagcccaacctgccccccttagtgctctatgatgccacatctctgcctgcagatgcagactctcagcaggtggtcaatattgaccagcttcgggacatgcttcctgagctccccagtgcaaccagagaaaggcttgtccagcagtatgggatactgccagagcacagcttcacattactgaatgaagttggcctactggagttcttccaaagtgtgataaaagaaactagggcagagccaaaaagggtgattaactgggtcctgaatactcttctgtactatttaaagcaacagaatcttgccgtcagtgagagtcctgtcacacctgctgcgctcgccgagctccttgacctcctggacagtaaagcaatttcttcctcagcagctaaacaggtgtttgaggagctgtggaagggagaggggaagacagcagcacagattgtgacagaacagcagctggaactaatgcaggatcgagaggccctggaacagctctataaaagaaatactggagaggaaactgtcattgtgagatgtgctgaggtccctctgcctgaggaaggacagtgtggccctgagaacaggagcccatgaaaactggtgttcatgtgggtacaatttgtgtctctcagtccctggccaagctacacctctcgagagggtaaaccattttttacacaaatgtgtgtcctctgagaccctatgacctggaggcagccatcatggaagaccagaagctggaggtctgcctcattgtctggaaacagttctgtgatgatggcagcggtgattaaagaaa

SEQ ID NO: 3030 - DNA, 1785 bp, Cricetulus griseus
cattgcccctcgaatgttcaaggcgctcattggcaagggccatcctgagttctccacaatcggcagcaggatgcccaggaattcttccttcaccttatcaacatggtggagaggaattgccggagttctgaaaatccaaatgaagtgttccgcttcttggtggaagagaagatcaaatgcctggccacagagaaggtgaagtacacgcagcgagtcgactacatcatgcagttgcctgtgcccatggatgcagcgctgaacaaagaggagcttctagagtatgaagagaagaagcggcaagctgaggaggagaaagtaccactgccggaactggttcgggcccaggtgcccttcagctcctgtctggaagcctatggggcccctgagcaggtggacgacttctggagcacagccctacaggcgaaatcagtagctgtcaagactacacggtttgcctccttccctgactacctggtcatccagatcaagaagttcacctttggcttagactgggtgcccaagaaactggatgtttccattgagatgccagaggagctagacatctcccagttgaggggcgcagggctacagccaggagaggaggagctgcctgatattgccccacccctggtcactccggatgagcccaaaggtagccttggtttctatggcaacgaagacgaagactccttctgctcccctcacttctcctctccgacatcacccatgttggatgaatccgttatcatacagttggtggaaatgggcttccccatggacgcctgccggaaagctgtctactatacagggaatagtggggccgaagcagccatgaattgggtcatgtctcacatggatgatccagattttgccaatcccctcatcctgcctggctccagtgggcctggctccaccagtgctgcagctgatcccccaccagaggactgtgtgaccaccattgtttccatgggcttctcaagggaccaggccctgaaagctctgcgggccacgaacaatagtttagaacgggctgtagattggatcttcagtcacattgatgacctagatgcagaagctgctatggacatctcagagggacgctcagctgctgactccatctctgagtctgtacctgtgggacctaaagtccgggatggtcctggaaagtatcagctctttgccttcattagtcacatggggacttctactatgtgtggtcactatgtctgccacatcaagaaggaaggcagatgggtgatctacaatgaccagaaagtgtgtgcctctgaaaagccacccaaggacctgggctacatctacttctaccagagagtggtcagctaagagcctgacctcaacccttaccacttcgggcaggggacagaccatctggcatgagggatggggttgagggatggacttaagccccctgctctgtaccctttttccttttgtccccagcagccggaaagagctggaggcggtaggagaatggccaagcaaagagaaggggtactcagtagactttggggatagagcagggatgggacaggaaggggccgactgcctgtccacactgggaccttgttgcttcctttccctgcccctggaatccacagtgctctgcttctctgtgatgacccagcccctcgagttgggaggggtcttaactgtgtgtgcgtgggtgtggctttatgcatccttccaggggagggaggcgactgtgcctcccctcccctggtcctcgtggaaaaatgccaaaatacatgatgtgaataaaagtac

SEQ ID NO: 3031 - DNA, 1784 bp, Cricetulus griseus
  modified_base (1772)..(1772): a, c, t, g, unknown or other
atggccagtgtccagaacgcccagagagagaactctggagacagagcagacttctggaggatgcgcggccagagatccggggtcaagaagaacatccgaaagagccgggaagacctgacagctgccgtgtcagtcagcaccaagttccctgcctacgagaaggttctgctgcgggaagctggcttcaagagacctgtggtcttatttggccccatagcagatatagccatggaaaggcttgccaacgagttacctgactggtttcaaactgcaaaaactgaacccaaagatgcaggatctgagaaatccagtggagtagttcggttgaacactgtgaggcaaattattgagcaggacaagcatgctctgctcgatgtgacgcccaaagctgtggacctgctcaactacactcagtggttcccaatcgtgatctttttcaacctggattccagacaaggtgttaaaaccataagacagaggttgaatccgacatccaataaaagttcacggaagttatttgatcaagccaacaagctcaaaaaaacctgttctcatctttttacagctacaattaacgtgaattcggccaatgatggttggtttggcagcttgaaggacagcattcagcagcagcaaggcgaagcagtctgggtctctgaaggaaagatggaagggatggatgatgaccctcaagaccgcatgtcctacttaactgccatgggcgcggactatctgagttgtgacagccgtctcatcagtgactttgaagataccgacggcgagggaggcgcctacactgacaatgagctggatgagccagctgaggagtccctggtgtcttctatcacccgctcctcagagccggtgcagcacgaggagagcataaggaaacccagcccagagccacgagctcacatgaggagggctgctagcagagatcaacttagggatggtagcccgcccccagcattcaagccagagccgcccaaggccagaaaccagaacagagaagaatcctacgactcctccaagtcaaacacctctgccatggctgccagtggaatcccgggggggtctaccagagggtgtcctccccctattgcagtgaaacctgcttccggccgatccatcctgaagccttccactcctgtccttgcgcctgagagcgaggaggtggaggagagcaccgaggagcaggacggtgctcccagatcagtcctgggcagagtgaaaatatttgagcagatggatcacaaggcaaaattacagaggatgcaggagctccaagaagcacagaatgcgaggattgaaattgctcagaagcaccctgacatctatgctgttcctatcaaagccccaaagcctgatgctggtttgcccccgcacatgagctctagacctccagagccacagaaatctccgtccagactctaccacgacacgagctatggcagtgatgcagaggaggaggaataccgccaacagttggcagcgcactcaaagcgtggttactacagccagccttcccggtacagagacacagaattgtagatggctgtgtgtggactcctgggaggccaacctggagatctccagttaaagtgcactgcagagatactgtggggacccaggtgacagacagcacgaattaccaactgaagtctctgtgtgtgggactggggtaaagctgagtatgattttacagtctgacactgttacttgctttggtgtggaccaaatctgtattaatctctctgtaagttaaaaaaaanaaaaaaaaaagg

SEQ ID NO: 3032 - DNA, 1784 bp, Cricetulus griseus
gttaactcgtgaggcagaaggatggtgctggacctggatttgtttcgtgtggataaaggaggggacccagccctcattcgagagacgcaggagaagcgcttcaaggacccggggctggtggaccagctggtgaaggcggacagtgagtggcgacgatgcaggttccgggcagacaacttgaacaagctgaagaacttatgcagcaagactattggtgagaaaatgaagaaaaaagagccagtgggagatgacgagttcatcccagaggacgtgttgaatttcgatgaccttactgcagacacgttatctgccctgaaagtctcacaaattaaaaaagtccgactcctcatcgatgaagccatccagaagtgtgatggggagcggttaaagctggaggcagagcggtttgagaacctccgagagatcgggaaccttctgcacccctctgtgcccatcagtaacgatgaggatgcagacaacaaagtagagcgcatctggggtgattgtacagtcaggaagaagtattcccatgtggatctggtggtgatggtagacggctttgaaggcgaaaagggagccgtggtggctggtagtcgagggtacttcctgaagggggtcttggtgttcctggagcaggcgctcatccagtatgcactccgtaccttgggaagtcgaggctacactcccatctatacccccttcttcatgaggaaagaggtcatgcaggaggtggcacagctcagccagtttgatgaagaactttataaggtaattggcaaaggcagtgaaaagtctgatgacagttcttacgatgaaaaatacctgattgccacctcagagcagcccattgcagctctgcaccgtgacgagtggctgcggccagaagacctgcccatcaagtatgctggcctctccacctgctttcgtcaggaagtgggctcacatggccgtgatacacgtggtatcttccgagtccatcagtttgagaagattgaacagttcgtgtactcatcacctcatgacaataagtcatgggagatgtttgaagagatgatcggcaccgcagaagaattctaccagtctttggggatcccttaccatatcgtgaatattgtctcaggctctttgaatcatgctgccagtaagaagctcgacctggaggcctggttcccaggctcaggtgccttccgtgagttggtctcctgttctaattgcacggattaccaggctcgccggctccgaatccgatatgggcagaccaagaagatgatggacaagaaggtggagtttgtccatatgcttaatgccacaatgtgtgctaccacccggaccatctgcgccatcctggagaactaccagacagagaaaggcatcattgtgccggagaagttgagggagttcatgcctccaggactccaagaactgatcccatttgtgaagcctgcacccattgaccaggagccatctaaaaagcagaagaagcaacatgagggcagcaaaaagaaagcaaaagaggtcaccctggagagccagctgcagaacatggaggtcactgaggcctgaacactgcctcctcccagtctgccagacttactttctgcctgctgggatctctggctttcagggaggccgagtaccactcctcaccctgtcccatctgactgcacagccgacggggaaccatctgcggtgtaccaagcaggtgttcccatctcctcgcatgggccaagggtctcctcactgatgactgctgagccatgcaataaagtgtttctggggagggc

SEQ ID NO: 3033 - DNA, 1784 bp, Cricetulus griseus
gatcgagaaccctgcccagtcaccggagctagcactgcccgcagcttcctggcctaagtgcgtctgcccacccagaacaactgatctcgaggcctgctctagcaatggccttcgcaaatctgcgcaaagtgctcatcagtgacagcctggacccctgctgccggaagatcctgcaagatggagggctgcaggtagtggagaagcagaacttgagcaaggaggagctgatagccgagctgcaggactgcgaaggccttattgtccggtctgccactaaggtcaccgctgatgtcatcaatgcagcagagaagctccaggtggtgggcagggctggcacaggcgtggacaacgtggatctggaggctgccacgaggaagggcatcctagtcatgaacacccctaatggaaacagcctcagcgccgcagaactcacctgtgggatgatcatgtgcctggccagacagattccccaggcaacagcttcgatgaaagatggcaaatgggaccggaaaaagttcatggggacagagctgaacggaaagacactgggaattcttggcctgggcagaattggaagagaggtggccacccgaatgcagtcctttgggatgaagactgtaggctatgaccccatcatttctccagaagtggcagcctcctttggtgttcaacagctgcctctggaggagatctggcctctctgtgatttcatcactgtccacactcccctcctgccctccaccacaggcttgctgaatgacagcacttttgcccagtgcaagaagggcgtgcgagtagtgaactgtgctcgagggggaattgtggatgaaggtgccctgctccgtgccctgcagtctggacagtgtgctggtgctgcactggatgtgtttacagaagagccaccacgggaccgggccttagtggaccatgagaatgtcatcagctgtccccatctgggtgccagcaccaaggaggcccagagccgctgtggggaggagatcgcagtccagtttgtggacatggtgaagggaaagtctctaacaggggtcgtaaatgcgcaggctcttaccagtgccttctctccacacaccaagccttggattggtctggcagaagcgttgggcactctgatgcatgcctgggctggctcgcctaaagggaccatccaggtggtgacacaaggaacatctctgaaaaacgctgggacctgcctgagccctgcagtcattgttggacttttgagggaagcgtcaaagcaagcggatgtgaacttggtgaacgctaagctgctggtgaaagaggctggcctcaatgtcaccacctcccacaaccctgtggtcccgggagaccagagcagtggggaatgcctcctgactgtggccctggcaggcgccccctaccaagctgtgggcttggtccagggcaccacaccgatgctgcaggtgctcaatggagctgtcttcaggccagaggtgccactacgccggggccagcccctgctcatgttccgggctcagccctccaaccctgtaatgctgcccactatgattggcctcctggcagaggcaggtgtgcaactgctttcctaccaaacctccaaggcatctgacggagagacctggcacgtcatgggcctttcgtccctgttgcctagcctggaagcatggaagcagcatgtgtctgaggccttccagttctgcttctgacactggggctcagaagcgccagcccctcaggcctttctgaagaaacctaattgctgtgatctattgggggaggagatc

SEQ ID NO: 3034 - DNA, 1784 bp, Cricetulus griseus
gtttaagaattaacagcccggcgtgcctttagctggtcggggaaagaaggcgttcggcagactcacgcaccaactgtgaggagccgggggtttgtgcctgggaaggccgcgtaccgggaggtgcccgactggtgggagctgtggccggcggagcccagaagcccggcgcagtcccgaactcggtcgcctcttgcccctgtaggcactgtcatggcgcagttcgtgttcgagagcgacttgcactctctccttaaactggacgcgcccatccccaatgcacccgttgcgcgctggcagcgcaaagcgaaggaagccaccggcccagctccctcgcccatgcgggccgccaacagatctcacagcgccggccggaccccgggccgaactcctggcaaatctaattccaaggttcagagcacccctagcaaacctggaggtgaccgctatatcccccatcgcagtgcttctcaaatggaggtggccagcttcctcttgagcaaggagaaccagccagaagacggggagacgcccaccaagaaggagcatcagaaagcctgggctctgaacctgaacggtttcgatgtagaggaagccaagatcctcaggctcagtggaaaacctcagaatgccccagaaggctaccagaacagactgaaagtgctctacagccagaaagccacgcctgggtccagccggaagacttgcagatatattccttcgctaccagacaggatacttgatgcccctgaaatccgaaatgactactacttgaaccttgttgattggagctctggaaatgtactggctgtggcactggacaacagtgtgtacttatggaatgctggttctggtgacatcctgcagctgttgcaaatggagcagcctggggactacatatcctctgtggcctggatcaaagagggcaactacctggctgtgggcaccagtaacgctgaagtgcagctctgggatgtgcagcagcagaaacggcttcggaacatggccagtcactcggctcgagtaagctctctaagttggaacagctatattctgtccagtggttcacgttctggccacattcaccaccatgatgttcgggtagcagaacaccatgtagccacactgagtggccatagccaggaagtatgtgggttgcgctgggccccagatggacggcatctggcaagcggtggcaatgataacgtggtcaatgtgtggcccagtggtcctggagaaagtggctgggctcccctgcaaacattcactcaacatcaaggtgctgtcaaggctgttgcatggtgtccctggcagtccaatattctggcaacaggaggaggcaccagtgaccgacacatccgaatttggaacgtctgctctggggcctgtctgagtgctgtggatgcccattcccaggtgtgttccatcctctggtctccccactataaggagcttatctcaggccatggctttgcccagaaccagctggttatttggaagtacccaaccatggccaaggtggctgagctcaaaggtcacacagcccgagtcctgagtcttaccatgagtccagatggggccacagtggcatcagcagcagctgatgagactctacggctgtggcgttgctttgagttggaccctgccctgcgtaaggagagggagaaagccagtgtagctaaaagtagccttatccaccaaggaatccgttgaaaacagacccctcttgtttttttgtttttgttttttatttttctaataaagctatttcttccttaaaaaaaaaa

SEQ ID NO: 3035 - DNA, 1784 bp, Cricetulus griseus
  modified_base (1464)..(1464): a, c, t, g, unknown or other
agagtctggccattctttatcaggcactgccttctgccaccgggaagccagctggagggagccagaagaagagatggccatggaagatagtcccaccatggttaaaagtagaccgcggtgaaaaccagatctcatcatgtcgggggagacggtgtggcttcaaagtgcttggctatgtcactggtgatatgaaagaatttgccagctggctcaaagacaagcctgtggtactccagttcgtggactggatccttcgtggaatgtctcaggtggtgtttgtcagcaatcccatcagtggaatcctaattctggtggggcttttggtccagaacccctggtgggctctctgtggctgtgtaggaactgtggtctccactctgacggccctcttgctgagccaagacaggtcagcaatagcagccgggctccagggctacaatgccacccttgtggggatactcatggctgtcttctcagacaagggtgactatttctggtggctgatattccctgtatctgctatgtctatgacttgcccagttttctcaagtgcattgaactccgtgttcagcaaatgggacctccctgtcttcactctccctttcaacatggcgctgtcgatgtacgtttcagccacaggacattacaatacgttctttccaagtaaactcttcacacccgtcacctctgtgcccaatatcacatggtcggagctcaatgccctggagctattgaagtctcttccagtgggagttggtcagatatatggctgtgacaacccatggacagggggcattttcctatgtgccattcttcttttctctccactcatgtgcctgcatgctgctattggatcactgctgggtgtcatcgcaggactcagtcttgcagctccatttgaagacatctactctgggctctggggtttcaacagttctctcgcctgcattgcaattggaggcatgttcatggcactcacctggcagacccacctcctggctctggcctgtgccctgttcactgcctactttggagcctgtatgacacacctaatggctgtggtccaactgccagctggtacttgggccttctgtttggccacgctcctgttcctcttgatgaccacgaaaaaccccaacatctacaggatacccctcagcaaagtcacctactctgaagagaaccgcatcttctacctacaaaacaagaaaaggatagttgaaagccctctgtaaaagcaaccccacacaatagctgtggtcatgagtcatttctaagtgcagctccagttggcttctgattctcagcaacttcttttcatcacggggtacaactttcagactatcagtgacccatccttttgcctgctttgtgtttttcttttgactgtatgccgccaagcacatgagaaccatgtccaggtcatgatctctggaatgcaatttaagcccttctgtgcttttnttttctttctttcttttatttagttaagctatggatttgcaactgtcattgattcctaagtcatcctaaagttctaacccacctaagccagtgctgtctcagacctttgaatgggaacaagcttaaagccttctatattattttatttatataatattagtgtctttaaggtatttttgttactaagtattatcctaaagttaagtgaaaactcttagggttcctttgtaccttttttgctattgtctgtgcaacagattcctgtgtaaatatatgaataaattatattcacagctcaaaaaaaaaaaaaaaaaaaaaaa

SEQ ID NO: 3036 - DNA, 1783 bp, Cricetulus griseus
  modified_base (1746)..(1746): a, c, t, g, unknown or other
  modified_base (1757)..(1757): a, c, t, g, unknown or other
tacttcacctactggctgacctgtgtccacatcatcgtcactctgctggtgatctgcacatacggcattgcacctgtgggctttgcccagcatgtcaccacccagctggtgctaaagaacagaggtgtgtatgagagcgtgaaatacatccagcaggaaaacttctggattggccccagctcgattgacctgatccacctaggagcaaagttctcgccctgcatccggaaagaccagcaaattgaacagctggtgcagagggagcgtgatgttgagcgtgcctcaggctgctgtgtccagaatgaccgctcgagggtgcatccagacgcagaagaaggactgctcggagacgctagccactttcatgaaatggcagaatgatactgggccctcagacttgtctgagggccagaagcagccatctgcggttgtgtgccaccaagaccccagaacctgtgaagaaccagcctccagtggggcccacatctggcctgatgacattaccaagtggccgatctgcacagagcaagcccagagcaaccacacggggttattgcacatagactgcaagatcaaaggccgtccctgctgcatcggcaccaagggcagctgtgagatcaccacgcgggagtattgtgagttcatgcatggctatttccacgaggaggccacgctctgctcccaggtgcactgtttggacaaggtgtgcgggctgctgcctttcctcaaccccgaggtccccgaccagttctaccgcatttggctgtctctgttcttgcatgctgggatagtgcactgcctcgtgtctgtggtcttccaaatgaccatcctgagggacctagagaagctggccggctgccaccgcatctccatcatcttcatccttagcggcatcacaggcaacctggccagcgccatcttcctcccctatcgggcagaggtgggcccagccgggtcacagtttggcctcctcgcgtgtctctttgtggagcttttccagagctggcaactgctggagcggccgtggaaggcgttcttcaacctgtcggccatcgtgctttttctcttcatctgtggcctcctgccctggatagacaacattgcccacatcttcggtttcctcagcggtatgctgctggccttcgccttcctgccctacatcaccttcggcaccagtgacaagtaccgcaagcgggcgctcatcctggcctcgctgctggtgttcgctgggctctttgcctccctggtgctgtggctgtacatctatcccatcaattggccctggatcgaacacctcacctgctttcccttcaccagccgcttctgcgagaagtacgacctggaccaggtgctacactaattgcagaggtggtgtctctggcctctgcaggtgccatcttctcattgtcactgtgactgtgacctcaccagacatacacacagctgctccctcagttgtccccggggttgaggtccccaccatgctgctatgacccttttcctgtctctcctctcctccctgtcctacaagcctccctgcatttgtccatgggttcatgaacctgctcctaaggctcctggattagtgtgtgggagaggctttggccattgtctagggccagtgacagcaaggagagatggctataggggtctgctaagggcttttgtaatcaagaagccagatctggtgaaccaccagctcagccctagctccaggacttctgtctgaccacacaggtcagttcngatgctgggtntccctccacctcttcctcactcctgc

SEQ ID NO: 3037 - DNA, 1783 bp, Cricetulus griseus
ttatgctccgttctctacagcaatcacaacagaatgggccgccacaagccccatttagctctccggcaggtagaacagtgtttaaagcgtttgaaaaacatgaatttggagggctcagttgaagacctgtctcagttgttgtctgccaatgaaacccagccaggagctactgaaaaccgtagttgtccccacgccagccggtggtggaggtggtgctgatgaaggttttgggaggctgcaagttgttactgcgcttgttggactgctgctgcaaggcatttcggttgaccgtgaagcacttaggactgcaagaattcattattttgaaccttgtgatgattgggctggtgagcaggttatgggttctccataagggacttttaaggaggtctggtttccttatacgagccattgttccagttgcttcaggaggtctccaggattcatcccatgccttacttcaaagagtatgcctttccttctgatgtcactgattttctagggccaccttacgtggaactctttaagggaaaaccgacctgaagctgttgccactaaaggagtaactaagttagctaaataaacagttttcaatgaaagaacaactaccaaaggtcagtgaagacactctagatagaatttctaaaacatctgaacaaatgaagaacaatgcacagagtagtatggacctgggacagccagtgaaaatgagcaaaaagaccagaaaagaaaagccatcaggatttgatgtgcgagctctctgcacaaggcttcgaaacaaggctactcaggagaccagccgggagtttaaatgttctcaatccagattgaagacaagcaaactttcctctcagaaactgacacgaactctctgggctagcaatattgtgcaaagaatccgagtgaccaagactttcacccagctttctgaggaaatccaaacggcagtcatgtggtgccggagcaaaaagctcaaggctcaggccacctatctgggcaacaaacttctcaagagtaacaggcttaggcatgtggaagctcaaggttatagtttgccaaagaagctacagtgcatgaaaacatctctttgcaactgccttcttcgaggctccattatcagcacttcaaagtgttctcctagacaaaaaagatcaaagcataaagttttatcgagacagaggaaaccgcagagaaagttacagtcaactcttttaaaggaaactcagcaggaacctgaagggactctgaagagcactagggaccctagtgctaagtggagccgctcaggtgggacagttcagaggacagatgtctgtcctaacagaaagcaggtcttgagaagactttcaaagtctgtcctgaaaacaaaggagccggggttccatgggaatctcacagcaggcagtagaaatgaaactggtttgtggacaaacagacaaacacacacacacagtgtgccacaagctgctaaagaggcagatgacattgatgatatttttgctttgatgggcgtttagatgtgcacatgtgaaacttctgggcagttacccagatcgttcagggttctgctgtttaagtggaactgctgagagctggaaacactgctggggccaggagctgcttctctgcagcattccacacgcgtgcttgccagttcaataaacacttaacaggggttttactgctgtgaagaggcatcatgaccacaacaacttataaggaaaacatttaattgggtctggcttacagtttcaaaggttttagtcctatttatcatcatggt

SEQ ID NO: 3038 - DNA, 1783 bp, Cricetulus griseus
gtcacttggtgcgggagggagcgcgagagcgacggtcgagcctccggtatcccaggttagaggtgagcatggcagaacaggagcccaccgctgagcagcttgcgcagatcgcggccgagaatgaggaggatgagcactctgtcaactacaagcccccagcccagaagagcatccaggagatccaggaactggacaaggatgatgagagccttcgaaagtataaggaggccctgctgggccgagtggctgtctctgcagaccccaatgtccccaatgtcattgtgacccgcctgaccttggtgtgcagcacgtccccgggccctctggaactggacctgacaggtgatctggagagcttcaagaaacagtcgtttgtgttgaaggaaggtgtggagtaccggataaaaatctctttccgggtgaacagagagatcgtgtcaggcatgaagtacatccagcacacatacaggaaaggggtcaaaatcgacaagaccgactacatggtcgggagctatgggccccgggctgaggagtatgagttcctgacacccatggaagaggcccccaaaggcatgctcgctcggggcagctacaacatcaagtcccgattcacagacgatgacaagacggaccacctgtcctgggaatggaacctcaccatcaaaaaggagtggaaggactgagctccagctgggaggcgggcagggcggcggacagacagaaggaccgacatgccccaccccaaacccctacccaccccaaaccaaagtgctgacaggaccctccctcacccaccattcctcccctcttctgtctgcccctcctccacctcctgcctgcaggcccctgtggtctccagtgttgtcacattgctgcttctgcctgtgcagtggggaggggtttcagcccaggcctccaatctgctgtgtcccccaggtttcctctgtcgtcccttcctcaggccctggcttctagaatggaatggaacactgtctgggttgcccagcccaccttgtctctgccccagctggggaagggctgggttgtgtcctctaagcaccacccccctggccaggtcatccatcactgtcagtcactgtctaaccatgatgccttaacatgtggaacatgtactgggggccgtcgctaactcttaactccactgtctgcatgagcatgtggtctcccctgtccttgccttgtctgccatccccatcctggtgacccacccagggaggcctggagtgtgctgctgttgcttcctgcaggcctggccagctctttccccctccccatggccagggttgggggtggctccagtagctaggggagggtcaattgccaaaactcaatgcctccagccccacctaggaggcaggacagggtgcctcattcctctgccttctctgtccttgtaggcagcactcaaagcccctgtccccacagagcccccgaggacaaagccagccgagccttactagtctcacctgggccctgtggcctgaacctcgtgcctggcctgtcagtatttattgcctccatttgggccagctggcctgatgcctctgccctggctcttggtgccaccatccctgggcaggccctccctggacccagccaggacaaacgtgggaccaagtgcacacagttgggagctgtctcctgtgcctcccctccccgttcccgttcccgtgtggtgtctgccaggcctaggcctcaacaggcagaggagcctgtccctgcttctcttctgactgggaaataaacaccctgaaggagtctg

SEQ ID NO: 3039 - DNA, 1783 bp, Cricetulus griseus
  modified_base (305)..(305): a, c, t, g, unknown or other
  modified_base (337)..(337): a, c, t, g, unknown or other
gacaaagctgggaactatgaggaagcccttcaactctaccaacatgctgttcagtattttctccatgtcgttaagtatgaagcacaaggtgataaagccaagcaaagtatcagggccaagtgtacagaataccttgatagagcagaaaaactgaaggagtatttgaagaaaaaggagaagaagccacagaagcccgtgaaagaggaacagtccagtgcagttgatgagaaggggaatgacagtgatgggggaagcagaatctgatgatcctagaaaaaaagaactacagaatcaacttcaaggtnccattgttatagagcgtgtgaagtggagtgangttgctggcttgaaggagccaaagaagcacttaaagaagctgtgattctgcctattaaatttcctcatctgtttacagggaagaggacaccttggagaggaatcctattatttgggccaccaggaacaggaaagtcctatttagccaaagctgttgcaacggaagcaaacaactcaacatttttctctatatcttcctctgaccttgtttctaagtggctgggagaaagtgaaaaactggttaagaacttattccagcttgccagagagaacaagccttccattatcttcattgatgagattgactctctgtgcggttccagaagtgaaaatgaaagtgaagctgcacggagaattaagaccgaattcctggttcaaatgcaaggagttggtgtggacaatgatggtattttggttctgggagctacaaatataccctgggttctggattctgcaattagacgaagatttgagaaacgtatttatatccctttgcctgaagcacatgcccgtgcagccatgtttaaactgcacttgggcagcactcagaacagcctcacagaagcagactttcaagaacttgggaggaagacggatggctattcaggagcagatataagtatcattgtacgagatgcacttatgcagcctgttagaaaagttcagtcggctactcatttcaaaaaggttcgtggaccctcaagatctgatccaaactgcattgtaaatgacctgctgaccccctgctctccaggagatcctggggctatggaaatgacatggatggatgtccctggagataaactcttggagccagtcgtttccatgtgggatatgctgcggtcactgaccagcaccaagccaaccgtcaatgaacatgacttgttgaagttgaagaagtttacagaggactttggccaggaaggctagtgcaaagacagcaagaacatgtttacactgcatttcttttcttttgtaggtactcttggatgacattcagattatttccagtaaaactcttttacacaggaaaacatacatctcacttcagtgttcctttaagtttgggttgtacttttcctatactacctgttaaattctctaattaacaaaaattgtaaaatggtaaggaagtgagcagtggtatgaaaaatagcagagctgagggtgtgtgtcacacacttgtgtaccaactctgagttgtgccttggacatttgcattgactacatgcaaacaattactaggttacctagaattgctatgcagttctaccttgcaagtgctacatacacaataattacattttaaagtatatttgcacattttacatgctatgctatatgattgcctttaggtttctgtacagattatttttgtgtgatattcaatgaaaatcataggcccaaaatatactgttcttatgtgaagtaaattgctataaaccta

SEQ ID NO: 3040 - DNA, 1782 bp, Cricetulus griseus
cagctgctggagggccgaggaggcggagcggcgggtcctgtcctcgccatgaggccgcagcaggcgccggtgtccgggaaggtgttcattcagcgagactacagcagcggcacacgctgccagttccagaccaagttccccgcggagctggagaacaggattgatagacagcagtttgaagaaacagttcgaactctaaataatctttacgcagaagcagagaagcttgggggccagtcatatcttgaaggctgcttggcttgtttaacagcatataccatcttcttatgcatggaaactcattatgagaaggtcctgaagaaagtctccaaatacattcaagaacagaatgagaagatatatgctccccaaggcctcctcctaacagaccccattgagagaggactccgagttattgaaatcaccatctatgaagacagaggtgtgagcagtggaagataaaccatagaatttaagatcccgcctccagctgggaccttcgtctatccactggccaatggcaaagtgtccctacctcctctccagagcgttattctcttgtatctgctgccagagccacggtgccacacctggagtgacttcttgtcactcagcatccacttcgtgtctcccaattgtgtaggactctgtaatttttgattcgtttccaagaaaatacaaggaagcattcactttttaaaattcaaagccatttaaataataagcagttggtcagctcaagacaaagtttttcttaactgacaccagtatcagtggttctgttcattccttgggacagttccctcggtggctttgtaattcaacaagtcatgtcttaacgaagttactcccccagattagtgacaggctttgagggtgtgtcacacctgtggtttggctaatgcaccacccagatctccaaaagctgccaatcttgacatgattctaatctcaagattgatttctgctgttcaatttcagaaaccgaagctccctgagagaataatatatgtcatttgttttagtattgcagttgttattaaagcagtatttaatgcaattcaggttatttctttgaaagcatttatgttaatgtgcattacctcgaaatgtggggaagatgttgtgtgtgttgcttgttcattacacaaataagtaagcacaataagtagatgctcagccatcagatatgcctgtccctgctctgccccaagtgtgtaataagcaagtgtcctaataactctagttttgttacaaatataacttaggagaaaaagttgataggaattatactctatgttgctaatttgtaactactcataaactgattcatagcctcctcacatacagtattcagggcacagaaatcttttgattgactcgagtaagttctggcttccacattaaacttgcaagttcaagtcaatttttccagttctttatctctatactcttagtattggaatttcttatgtcctttcttttaggagtttgaaagcactgtatttgggagaaagataagaaatctaagaaatgaacgaagcagttgagatattgtaggtgctaaatactggatttaatctttcatatttaatttgttttctgggccttgtagttattcagtaaacccccatagatctgtgtaataatttaattgtataaacctcatttgttcctttaaagcctatactagtctgtctgccttttaaacttgttgcaataactttgctgaaatattaccacgttagtaaaactttcttaaataaactctgtgttgtttta

SEQ ID NO: 3041 - DNA, 1782 bp, Cricetulus griseus
gacttctgcatgctcatggtgggcgagcaatgctggtagtcggtggggatgaccaaggagcacctgggcttggcattggcactcaatgtacctgtttttgttggttgtcaccaagattgacatgtgtcctgccaacatccttcaagaaaccctgaagctgctacagcgactgctgaagtcaccaggctgccggaagattcctgtcttggtgcagagcaaagatgatgtgattgtcacagcctccaacttcagctctgagaggatgtgcccgatattccagatctccaatgtcacaggcgagaacctcgatctgctcaagatgtttctcaacctcctgtccccccgcaccagctacaaggaagaagaacctgctgagtttcagatagatgacacctactctgtccctggtgtggggacagtggtgtctgggaccacgttgagaggcctgatcaagctgaatgacacactgctcctgggcccagaccccttgggtaacttcctgtccattgctgtcaagtcaatccatcgaaagcgcatgcctgtcaaggaggtgcgggggggccagacagcctcctttgcactgaagaagataaagcgctcatccatccggaaaggcatggtgatggtttccccacgcttgaatccccaagcctcctgggaatttgaggctgagattcttgtcctccaccatcccaccacaattagtccacgctatcaagccatggtacactgtgggagcatccggcagacagctaccatcttgagcatggataaagactgtctgcgcacaggagacaaggccactgtccacttccgcttcatcaagacccctgagtacctgcacatagaccagcggctggtgttccgggaaggtcgcaccaaggctgttggcaccatcaccaagcttctccagacaaccaacaactcccccatgaactccaagccccagcagattaaaatgcagtccacaaaaaagggtcccccaagcaaacgagaagaaggaggtccacctggggtgccagcagcaggggtgaccccaactggagatgaagcttcttctctagggactacacaggctgctacatgcagtagtctccagccgcagcccaagcccagcagtgggggccggcgacgagggggccagcgccacaaggtgaagtcccagggggcctgtgtgactcctgccagcggctgctgaatatccctggtccacttgaccacccatgggatcctcactctggctactgctcaccagctgggcagagcatctttgaccgccacccacccactccagcccacagccagagcatccttgttgccacacccccattttccagagggggattgtaatttataagatgaggaaggactagatgtccgaggactgaccgtctcccacctgactcctcccttactcacacatctttcgtacatctgggcccttaatttctattctttttattatatatctctgtcgtgtgtgtgtgtgtgtgtgtgtgtgtctgtgggcaagccctgcaccgtgacctcaggctggggtgctccttctcagccaggacatacccagctggctgggtccctcttcagccccacctcgactcctaagctctcttttgtcctttgctcctgactgctcttacctccctgtcctttctcccagctgtttctagttgccactgccccgtggccatggactgaccagaccagcattcacaataaaagtttgttttaagttgaaaaaaaaaaaaaaaaaaaaaaaaaaaaaaaaaaaaaaaaaaaaaa

SEQ ID NO: 3042 - DNA, 1782 bp, Cricetulus griseus
atgacatgcggcaagccaggcagcacatggaagtggagctgccgtatcgctacattacctacgggatggttggtttctccatcacatttttggttccctacgtattttcctttattggtatctcttgatggagaaatagtgtttattataagaaaggaggctaccagttgtatccaaaaccattctccaggtaaaacactcggatcagaggcttttgcaagaatttagcttaaataagtaaattctgcagtccgtgcatttgatcattgcacatccagatgttttaggtgggctgagctccttcagtaccgagaagtggtgtgcccatttagaatgttcacaaaatgtttggagagttccgtgttgttacaaattgtagtcatatataatatatattaaggtatacagtgtgcaaatgtgtatctagtatatattatatatctaaatcatttgcctaagaactgtggggtgcattggaagatcaataacaatatgcagttgtgccggcacatttttggaactaatgcaggcatgttgttattaacaaattgggtttaacgtttatttcctacgggagccatttcctagttgaattgataaatgccagaaagattccatatgctaccacatactgatttactgtcctttttacacttgccatcccctttcatgttatccaaagttctgtacactgtgttgaatgtacttttttcccctcaattattttggtcaaattcaggtactgaatttgattgttgctaactgtgcctttcttttgctgggttaagagacaccatgtatactgtgatgtaaaagtaagactctaattctaccttaagctatataatcaggcaactattttagaaatatacatgtcaatctaacagagatagaagcagatgacccataacactttaaaagtcttttttaggaagaaatgtggaatagctaaattttctcactaatttattggaaagctaaatggataagtatttccatttttgtaggtatttttctgcgtgttgcaagtgataggaacaatatatatcttatgtacatcatcttgattgtttataatacaggcaaacatttccagtgagtggaaatgcaactgaagtttatagatgagacagtgtacaccctttctatgtaaacaagccatttttttctaaattatttgaaaaggattggatttcccactgttaattttcaacacccactcactagcaacctaaggtagactataaaatccaagcgtgatgtatcagtagtttaggctctattattttcccagcttattatttttacagtgggagatttaatgtatgagtactattttttctatctgcctttatattttgaagtgtgactgtaattaggttaacattacatttatttatagtgagtttttcacaaagaagagaactaactttccatataaatgaacatcaggtatggagctaacgacttcggtgcaatatctctggtaactcagaaggaaatgtttctattttggacaacagaagtatttgagctcatattttttataatcctgattgaaaacttaggggcctggtaatttttacccaaatggaatctgatcaactttagccagtaaatttgggccctttggctgccaggaaaagaaagcgggtgcttaggaagccatcggtacgctggaagctgggaagctaaagaatttgagaatattctatttctttgtgttttattattttttgtttgatgacagttctatgctaaatgtattttaaaataaaagcc

SEQ ID NO: 3043 - DNA, 1781 bp, Cricetulus griseus
cgggcgggctgaggagggaagcgggcgagcgaagtcccagtgcgcgccgcggcggccggggtaccctccccttccgggcgtgaggcgctgagaggaaagcggagcggagcggactcgcatcggcagcgaggtgcttctcggggtgccccagaccggcctcccgcggcttcggcgctccagtcgcggggcccgggttcctccacacacctagctccagccgccgtcagagcttgtccccagttcctcgaagccccggcggcagcctgggctctcggcggggaggatgacggagctgcagtctgcgctgctactgcgaagacagctggcagaactcaacaaaaatccagtggaaggcttttcagcaggtttaatagacgacaatgatctctatcgatgggaagtccttattattggtcctccagatacactttacgaaggtggtgtttttaaggctcatctcactttcccaaaagattaccccctccggcctcctaaaatgaaattcattacagagatttggcacccaaatgttgataaaaatggtgatgtttgcatttctattcttcatgagcctggggaagataaatatggttatgagaagccagaggaacgttggttgcctatccatactgtggaaaccatcatgattagtgtcatttctatgctggcagaccctaatggagattcacctgcaaatgtagatgctgcgaaagagtggagggaagacagaaatggagaatttaaaaggaaagttgcccgctgtgtaagaaaaagccaagaaactgcttttgagtgatgtttattcaatagctagtaacttcaattatttcagggtctccaattgagaaacatggcactgtttttcctgcactctacccacctattgctggacttctgttgtaacaagttggcaaactctggctggaactgggctgcaataaaacatgccagtcattaatgctgacaagagcctaacaagtgccaacttacagatgattacgcattttgaattctaatgaactgttttaaccttcaggaagaattgtaaagacctgtacatagcacaacatgatccggataatatatatactgttcatgtacatccacaaacacaccttgtaccaaataatgctttcttgtagtagaataagaatcgtgtaaattctaaaagactttagcaggttttcttttcccattcatcgtttcttatcagttcaaaaagattccttaaagcatgtcaggtgaaaaccaataaggattaaaagtttccatgtaatttcctttaaaccattgagtcttcattacactctatttactaatcttttgtattttgtttgttttgacacattcccctttccttttatctcttctatctgccagaaagttctcaaatcacttagttaaaatactgaaatactagtaaattacttgattttccacgatgacttcagaggtggggtcatcactaggtgctttgtccttttgtactgagattcacccatctcttggattggatgtagcaataacattttctggctgttgagagctcttgatcctagtcattatctcttgagaactttaaaagaaaaaaaaagtaaagtctgttctaagttcaacttagtgaattttattccaaacaatacaaaaatccagatttggtttttgcccgtaagttgcctaatattaaggttggatgaataaagcatgcacagctacaggctttctacatctgggattgctattaaaaatgctatttgtcctcttacccttctccttagtcc

SEQ ID NO: 3044 - DNA, 1781 bp, Cricetulus griseus
gagccgagaagatgtttctgctgcctcttccggctgtcgcgcgagtcgctctccgccgcctgggagtgagacgtctctgggatcggggtctctccacagcagacatgacgaagggtcttgttttaggaatttattccaaagataaagatgatgacacaccacagtttacaagtgcaggagagaattttaataagttggtggctggaaagctgagagaaatgttgaacatatctggacctcctctgaaggcaggcaaaacccgaaccttctatggtctgcatgaggacttccccagtgtggtggtggtcggccttggcaagagatcagccggagttgatgaccaggagaactggaatgaaggcaaagaaaacatcagagctgctgttgcagcgggatgcaggcaggttcaagacctggagctgccttcagtggaggtggatccctgtggagatgctcaggctgctgcagaaggagccgtgcttggtctctatgagtttgatgacctaaagcagaaaaagaaggtggctgtatcagcgaagctctatggaagtggcgatcaagaggcctgggagagaggggtcctctttgcttctgggcagaacttggcccgccagctgatggagtctccagccaatgagatgacaccaaccagattcgctgaaattattgaaagaaatctcaaacatgccagtagtaaaacagaggtccatatcagacccaagtcttggatagaggaacaagaaatgggctcgttccttagtgtggccaaggggtctgaagaaccaccagtcttcttggaaatccactacacaggcagccccaatgcaagtgaagcacccctggtgtttgtgggaaagggaattacctttgacagtggaggtatctccatcaaggcttctgcaaatatggacctcatgcgggctgacatgggaggagctgcaacaatatgctcggccattgtgtctgcagcaaagctcaatttgcctattaatatcataggtttggcccctctttgtgaaaacatgcctagtggcaaggccaacaaaccaggcgatgttgtcagagccaggaacgggaaaaccattcaggttgataatactgatgctgaggggaggctcatcctggccgatgcactctgttatgcacacaccttcaatcccaaggtcatcatcaatgctgccaccttaacaggtgccatggacatagccctgggatcaggtgctactggggtctttaccaattcatcctggctatggaacaaactatttgaggccagcatagacactggggaccgggtctggaggatgcctctctttgagcattatacaagacaagttgtagactgccagcttgctgatgtcaataacattggaaaataccgatctgcaggtgcatgtacagctgctgcattcctgcgggagtttgtgactcattcgaaatgggcacatttagacatagcaggtgtgatgaccaacaaagatgaggttccgtaccttcggaaaggcatgagtgggcggcccacaaggaccctgattgagttcttacttcgcttcagtaaagacagctcttagttcaatactaagaaatttctccatatgtcttgaattgaatatttgggcttcaaaatatttttaaattaatgaaatttttttaaagtcaaaaatgagtggtgttcttttactttcattttaattttcaaaattagtatgcttgagtcatgaaaatctaaattttatatatggattaatatagaccctttaaactaataaaacatcttataa

SEQ ID NO: 3045 - DNA, 1781 bp, Cricetulus griseus
  modified_base (65)..(65): a, c, t, g, unknown or other
tctccagctactgcaaagccatcaagggcagacactgcttcaccttgcagtagtaatgtaaacanacccacagctgtgagtctacaggaacctcgaaagttaagttacgctgaagtatgtcagaagcctcctaaggagccatctccagtgcttgtacaaccactgcgggaactgcgatccaatgttgtatctcccaccagaaacgaagagaatggagcacccgagaagcctgtggaaaaaacacacgagaaaccagaaacaagggctagtaaggatcattctggcttccgaggcaataccattccccggggagcagctggaaaaatcagggaacagagacgccagtttagccatagggctacacctcagggaatgactcgacgtaatgggaaagagcagttcgtgccacccagatcaccaaagtaaaagcaaaacataacaaaaactactcagaaaacttctctcttcccactaaacttgagcctatattgaactgttttgaagggaggaagtagccaggaaagatgggaagtatgtccttaaatattatggattttggaattttaagaggagcccaaaattcatctctaagtgattttcaaatgctggaggattccaatcagtataaatatatataaatatatatatatatacacacacatatatataaatattaattttcctatttttgtttttgtattttaatttgctaggttatacatccttcagtataggagatgagggagtgagagaaaatattttttgaagaaacatttctgtaaaattagaaattacttttttaaatctatttaaagtttggcttgaaaaatgccatctctgacaaatggccttgtgttgcagagcaggtcagtagctgaggtgtctgttctgggtgtgagtgtgtgcaaagtgattgaagccaaatatgttgtcatgttagtaaatgatttgaaaactgaatgtaatacttgagtagatctttttgtagtttggaatttagttagtttttgttttttgactattactaatattgtattgtagcataatttctcagtgaataaagttatagctgtcatatattaaataggcaagtttacatactgatatttagaaaacaagctcaaatatgaaaaaaccatgttggattgatctatttgaagtcataccatttttattagttgtatgtagggtggtggtttatttttctgcttagggatagttacagtagtaagaactgtcccttacattagtgagttacgtatgtacaaattgaaactgtaaattgtggacactggaaagcaccattgtgacataaacatcgtagtaatatatttaaaatgaatgtaaatggaagttaaagttatattactgtgaaactgatcttccaactcctaagtgtcagagatttgtgttagtgggtaattcctaagagctttgaaaacactgcacaatttgtgtaacctgcaattattatttctttgtaatttatttagcttggcaatcgcttatggtttggtgggttggtaacatggtatatttgctcagttggaaacgattagttctacatactgttttttaatcatctactagatgaaacatagaataaaactacctgtagtaaaatttgggaaaactttagatccattaaaagtattaataatcaatcgttagctacatctatgataaaaagtgtttattctcattacttagaaatgataaacatttaaagtgttaacaccctatgaatgcagtggattaatagaataaacattttgcaaaaa

SEQ ID NO: 3046 - DNA, 1780 bp, Cricetulus griseus
tctctctctctctctctctctctctctctctctctctctctctctctggccatactcagcaaagaaacagaggtgccggatagccacatccattcctatgttaatacactcctcatacctggaccaacaggcaagacaaaattagagaaacaattccagcttctgagtcagtcaaatattcttcagagtgactactctacagccctgaagcagtgcaacagggagaagaacagaacgtcctccatcatccctgtggaaagatcaagggtgggcatttcatccctgagcggagaaggtacagactacatcaatgcatcctatatcatgggttattaccagagcaatgaattcatcatcacccagcatccccttctgcacaccattaaggacttctggagaatgatatgggatcataatgcccagcttgtggttatgattccagatggtacaaaacatggcagaagatgaatttgtttattggccaaacaaagatgatcccataaactgtgaaagcttcaaagtcactcttatgtctagaagaacacaaatgtctatcaaatgaggaaaagctcatagttcaagacttcatcttagaagcaacacaggatgattatgtgctggaagtaaggcattttcagtgccccaaatggccaaacccagatagtcccattagtaaaacatttgaactcataagtattatcaaagaagaagctgctaacagggatgggcccatgattgttcacgatgagcatggaggagtaacggcaggaactttctgtgccctgacaacccttatgcaccaactagaaaaagaaaattccatggatgtttatcaagtagccaagatgatcaatttaatgaggccgggagtcttcactgacattgaacagtatcagtttctctacaaagtggtcctcagcctcgtcagcacaaggcaggaagagaatccgtccgcatccctggatagcaatggtgcagctttgcctgatggaaacagagctgaaagcctggagtctctagtttaacactgaaagggtgaaggacaacccagtctaagcattgttcttctctttctaaaactaaaaaaagaaaaatgagtcagttctgttgtcctgtttacttcccatgacatgacagtaactcgttctgctgccaaattgacaccattaacaacgtgtgcctttttgaaagacttcttgtagttcacttgttatgtttgaactaaaatgattgaattttacaggatttctaagaagttaattgtggtatttttttccatattgattttaacggaaaaactcaatttatagataataggaatcaccatccttgggacatgtttgtttttaagtgtcaaatttttagctgtatttgtaacatgtatcatcatgtttgctagaaatataacttttaatatagtagattgtaagtaaaccattttatctcctgatgatattcaacatcttacaactgcagtattcatctgaagtagaagtgatctagtaacttatgtaaatactgctctggtgtctccatggaccaaatttatatttataattgtagatttttatattttactactgtgtgagttttctagtggtatacttgagtttaatgatgtagtttattctctggtcttacttactcaacatgtcttctaaaactgtactgtgctagccaaggaactaaccctgtttcttctgcatgtcattttgactctcgtggaaagtagaaagccatttgttttaaaagattgtttttatgagaataacaccttacc

SEQ ID NO: 3047 - DNA, 1780 bp, Cricetulus griseus
  modified_base (1702)..(1702): a, c, t, g, unknown or other
gaagatgatgccggcgaggcgcagggcctgcggggccagaatcaagtgggtattatgcccacagcccttgaattcctggagaaccatgggaagaatatcctcttatccaacgggaaccgtacagccacccgagtggccagctacaattcagggcatcgttgtcatcagccaacccctggtaccccatctgcttgttcaggtgcggatagacttcctgaaccgacagtggacatcttctcttgtcctgggagtcatcacctgcccaccagagaggcttaacttccctgcctcggcttgtgcacttaaacgggcagcctggctcctgcggggccgtggtgtcttccacaatggtctgaagatctgtgagaaatttgggccgaatcttgacacctgccctgaaggcaccatcctggggcttcggctagactgctctggagggcttcatctgcatgtcaatggggtggaccaaggggtagctgtgccagatgtgccccagccgtgccatgcccttgtggacctctatggacagtgcgagcaggtgacaattgtgagccctgacccaggggctgccagtgggaagattgctggaacccaaggagacatggaaaaagctgatatggtagatggtataaaggaaagtgtgtgctggggtccaccgcctgctgctagccctttaaagagctgcgagtaccatgccctttgctcccgcttccaagaactgctgttgcttccagaagattatttcatgcctccaccaaagcgtagcttatgctactgtgaatcttgccggaagcttcgaggagatgaggcccacaggcgccgaggagagcctccccgggaatacgccctgccttttggatggtgcaggttcaatcttagggtgaacccccatctagaagctgggacggcaacaaagaagtggcacatggcataccatggaagcagtgtggccgttgtacggagggtgctggaccgaggggagctgggagcaggcactacctccatcctgagctgccgacccttgaagggagagcctggggtgggatttgaggagcctggtgagaactgtgcacctccccgggaggagcaacctccttcagtgctgctctccccgtcccttcagtatgctggggcagagaccctggcctccaaagtgcaattccgggacccaaaatcccagcggacacaccaggctcaggtggcctttcaggtgtgcgtgcgccctggctcctacactcctggccctccttctgctgctgccctcagagaacttcctgaccagcacttcagcccatcggaacttgagtgggtcactaaggaaaaaggagccacactcctctatgccctgctggtacgggtggaataaggggtgagatgccactactacaagcacagctgggtctcaagccgcctccacctcattccagtgacttacagcatggataggtgctttcctggcaggaggagcacatagacaggctttgattagaccaggtgtgaagcacatctctacattcagggcccagcacactccctctgctgaggagggagcctctgggcccccccttcatgcactgatttgtggaacatgactccctattaccctcccccatatcacttaatttattttccgtttttgttctggttactgtgaatccccaaaggagtctctctgtgccccacacgaagctgctttttccgnggccaaggaagctgcgggccctctgtacagttgttactgactctgatttctaaggagccaataaatactgtcttcaga

SEQ ID NO: 3048 - DNA, 1780 bp, Cricetulus griseus
cggtggaacgcacagacgagctggtccgggagtacttgctcttccgcggtttcacgcacacgctgcggcagctggatgcagagatcaaggcgctacttttctcgacagtgggccgacactttcattgtttctctgcacaacttcctgagtgttctcttccagtgcatgccagtccctgtgatcctgaacttcgatgtggagtgccagaggaccaaccaggttcaagaagaaaatgaaagctctgcgccagaagctttttgccttgcaagctgaaatccatcggctgaaagaaggaagaccagcagcaagaggaggaagaggccttggtccaacacaaactgcccccttatcgtctccagcatggaccgccttggggactcagagctagccatggtgtgcagccagaggactgcctccctctcccagtcgcctcgagtgggcttcctgtcttcactgctgcctcagagtaagaagagcccttcaaggttgtcacccgctcaaggcccagaagctgagccctgcctggaactccacatggggccagtagagccactggcccgggtgtccacagcaggctctgagggaggccgccccgagcagcccttcatagtgctgagccaggaggagtatggggaggcaccattcgtccatcatgcactgcagagtggactgctctggtaggagagttgccagcttagacgtggatggggtcatcaaagtgtggtccttcaaccccatcatgcagaccaaagcgtcctccatttctaagtcaccactgctctctctagagtgggccaccaagcgagacaggctgctcctcctgggcagtggtgtggggacggttcgtctttatgatacagaagccaagaagaacctctgtgagatcaacatcaacgatgacatgcccagaatcctgtctcttgcctgcagcccaacgggcctcttcgtctgttcagcatgagctggaaggcccacttcggagaggtctactccgtggaattcagctgtgatgagaatgccgtgtacagcattggcgaggatggcaagttcatccagtggaacattcataagagtggcctcaaggtgaccgaacacagcctcccttcagatgccactggtccctttgtcctgtctggctacagtggctacaaacaggttcaagttcccaggggccggctcttcgctttcgactcagagggcaaccacatgctcacgtgctctgcctcggggggcgtcatctacaagctgggcggcgatgaaaaagttctagagagctgcttgagtctgggtggccaccgggcccctgtggtcactgtggactggagcaccgccatggactgtgggacatgcctcacggcctccatggatggcaagatcaagctgaccactctcctggcccataagctctgatgtcctgcctgcaatgacacatggcaaacagaattgtccctggtggaagtgaggcgagacaggacagacagcgcttccttctggctctgcactgtcagggctgtggatcttcagggaaagacccgacaggggggctcagccatgtagctgcagctactggagtaggagcctctggagcaggctgcagtgcttcctagatacttgagtggtggcccgagagggcatgctacagagcacaggattacagtcaaaaaaaaaaaaaaaaaaaaaaaaaaaaaaaaaaaaaaaaaaaaaaaaaaaaaaaaaaaaaaaaaaaaaaaaaaaaaaaaaaaaaaaaaaaaaaaaaaaaaaaaaaaaaaaaaaaaaaaaa

SEQ ID NO: 3049 - DNA, 1780 bp, Cricetulus griseus
ctcagccgcctcaaactggataatggggaagctgacaggactcctggcacagcggatgtttgtgatgctaccctgtggtggggttggggtagatactgacaccatctggaacgagctgcattcctccaatgcagcccgctgggctgcaggcagtgtcaccgaccttgcattcaaagtagcttcccgagaactaaagaatggttttgctgtggtgcggcccccaggacaccatgcagatcattctacagccatgggcttttgcttcttcaactctgtggccattgcctgccgacagctacaacagcaaggcaaagccagcaagatcctcattgttgactgggatgttcaccatggcaatggcacacagcaaactttctaccaggaccccagcgtgctgtacatctccttgcatcgccatgactgggttggctaccatgtttctgtccaaatgttttgggtatatgacacagcaactgatgaccttggcaggaggtgcagtggtaattggcctttagagggtggccatgacctcacagccatctgcgatgcctctgaggcctgtgtggctgctcttctgggcaacaaggtggatctcctttcagaagaaggctggaaacagaaacccaaccccaatgccatccgctctctggaagctgtgatcagggtgcacaggaaatactggggctgcatgcagcgcttggcttcctgtccagactcctggctgcccagagtgccaggggctgacgcagaagtagaagctgtgactgcactggcatcactctccgtgggcatcctggctgaagacaggccctcagagcagctggtagaagaggaagaacctatgaatctctagggcttcagaacagatcacctgctctccagacgtggctctcttcacctgtggtcagccctgttcctgtgtctgcagagatcctctgggcaggcagtcaggtccagagcacaacctaccctgacagctacccaaggaacttgacaaggccactgggtctgggatggggaccaggaaggctcctgggaggaggcaggctgggcactaaggcccagctaggctctttcagaatggatccagctctctggtgtccaggcccctagcctgtggcctccatccctcaggactgcacagcggaggactggttcaggtgggcccaccactaccactattcttaacttggcctcagccagggtggcccttccaaggttctgaagggctaggggagtagaaggagccaaggggtcccctattcctgaggacaggagagttcctctcacctgcttcctcagttgtcttctggtagcactgggctctgagagccattctgagctgctctctccctgtgacttgtcaccagcaagcctcccatctggtcactgtcctgccagaggccaccctatgtggaccatctcagtgccctggtgcagcagacaggttctctatgagtcctgtgcttcctgacccaatggtgccaaaccttcatctccccttaaaagcacaacacaatcccagggatgcctggtcactgctcccagtatgagcctgtcttctgtttctggggttcccccacacctcagttctgactgctgccccacataggactagcttgactgagggggatagggaggggagagtagacagatagtgggggaggggaggccatcccagaagtcttcaaggcttttgaggtctaggcctggggccaagaaagagtattgtgtgtgtgtgtgtgtgtgtgtgtgtgtgtgtgtgtgtgtgtgtgtgtgt

SEQ ID NO: 3050 - DNA, 1780 bp, Cricetulus griseus
ctctgcctcctccatgggcagcagtctccaggatcaccaagaaaaggcagagcctcaaagtagctcatttgccaaggtctcctctcaggagttgattgtaccccagggagccccctcagtggtggggacagggcctcagcccctgtggtcaccacagcctgtggcccctgggagtgatgctactagcctgggtaagagacaactctcctttcaggcagagtactgggcctgtgtgctgccaaattctctgcctccctcgcctgaccgccactccccactctggaacccaaataaagaatatgaagatttgcttgactacacttacccactgaggcctgggcctcagctcccaaagcagtttgagagtcttgtgctgactgatcctgtcatgcaggattcaggtgtagatctggacagtttctctgtctccccagcaagtactctcaagtcacccactaatgtctcccacaattgcttagcagcagaagtacctaccctgccattttctggagccagggagccatgccttaagaattggcccttgggagtatcccagaaacaggatggcataagcctgccatcttggaaccagcttacatcaacgccctagaaccttaggcactgaggatgcttcttgcaaaaacagagaggcagccctgagggacacaaagaactatctgcctataggcaagaacctcagtgtaggctccccgcagctaaggatgaaggagagggcaccaccctttcccagactagacactggggctgctgaggagtgcagttcactgattgtctcagacagtgatgggccagtttcctccacattggactctagccaaaggcagcatccttctggtgctgccttccaagggcctgtggtccagaactcctgctttgtggactctatacatcccaaggactccacaggcaaaagtagtaaagtgagcagccaggcccttggggtctcttctggactgctgcacgctcacccctccttgcaagctgcatcagacaggtggccgttctcagagccagttgctggagagaatcttcccaggaacagagggcaggagaaagcgtcactggtgcaatgtgtgcagacattttgctgtcagctggaagagctgatctgctggttgtataatgtcacagacgttgctgacctcagtactccacccaggtccactcttacaggtctcaagtcttctctgcagctttaccggcaatttaagaaagatatagacaaacatcagtccctgacagagaatgtcttggagaagggggaagattcttcttcagtgcctgacggataacaccccagttttaaaggatgttcttgggaagatcgcaaagcagtctggtgagctggagagccacgccgatcacctttatgactctatcttggcctctctggacatgttggctggctgcaccctcatccctgacaataggccagacagcagctaaagacacccacgtgaaagacaaggtttctctgtataacaggtttcccaacaaagtactacttgcctgaagatggtctatgcttttgttcatcctctttgtaacaaaaagatacttttttataactaaagggtgtaaactgtgaccttggctgtgaatgccacttaggaatggcaacacaaatgttaattatattttctgctgtgtgttaagaactttgagctgaaattgtcttcagcctagtatgatgacacctttccatgtgcagatgcgatcagggtagattcacatggacatgctaaaatttatacatggt

SEQ ID NO: 3051 - DNA, 1779 bp, Cricetulus griseus
  modified_base (1418)..(1418): a, c, t, g, unknown or other
gaatgtcgttagctgtggagaaagatggcggaaaatttaaaaggctgcagagtatgttgcaaatcatcctggaatcagcttcaggatctgtgccgactggccaagctttcttgtcccgcccttggcgtttctaagaagaatctttatgactttgaagtcgagtacctgtgtgattataagaagatccgtgagcaagagtactacctggttaagtggcgtggatatcccgactcagaaaacacttgggagccacggcagaatctcaagtgtgtgcgcattctcaagcagttccacaaggacttagaaagagagcttctccggcggcaccgccggtcaaagccacccaggcatctggacccaaacttagctaactacctggtgcagaaggccaagcagaggcgggcactgcagccgctgggagcaagagctcaaggccgaagcgtcagccacctgggacgcatcactgtggagaaatgaggtagacctggattggcccatccctacgagtgtaactcccgatgttgctgtggctatgattgccctaaccgtgtagtccagaaaggcatccgctacgacctctgcatcttccgtactaatgatgggcgaggctggggtgtccgcacgctggaaaagatccgcaaaatagctttgttatggagtatgtgggagagattattacctcagaggaggcagagcggcggggccagatctacgaccgccagggtgccacctacctctttgacctggactacgtggaagacgtatatactgtggatgccgcctattatggcaacatctctcattttgtcaaccatagttgtgatcccaacctgcaggtgtacaacgtattcatagacaaccttgatgagcgactaccccgcatcgctttctttgccacaagaaccatctgggcaggcgaggagctcacctttgattacaacatgcaagtggaccccgtggacatggaaagtaccagaatggactccaactttggcctggctgggctccctggctcccccaagaaacgggtccgtattgaatgcaaatgtgggacaacagcttgccgaaaatacctcttctagccctgagaagtttgaagccacactaactgaaggggcctgaagccaccttcctctctactgctgccctcttgtcaagaatgaccatcagagccttgtctgcctccacttgtcctcatctgccccaacctgttccccacctgctccagggtcagtgttctggtgaggactgactctgggtgccctttctctgttcctttcccctgtcccaggcccatcaggcattgcacttaacaacgcccagcccccattttcagtatatattttacatcagggttccctggaattgggatgcattcacccatggagcaaagggtgagcaactcagccccagaacanaaaaaaaaattttggacagcatctctgcagctctatgtagttcatagttcaggctggtgttggactcttaatcctcctgtctcagctttcctcatgctgagcatttaggtgtatacccagtgctggaaaccctgccttggcatgcgataccactggaactactagaagctgaaaccaagatatagatagtctgtaaatagcacttaagacaataatgtgcattgattagaagctgatgaggtgcctggcacaggttagagcacctgatccatatggattgtctcagggaagccttgaaaaccacagaggtggagcccaggaaaaggcccatgtggcagaaggcaatatctaggccagaaat

SEQ ID NO: 3052 - DNA, 1779 bp, Cricetulus griseus
gagcgatcgggttgttcaggacaaggaggtgtgaacagactcctgggctggctgatccatcatggcggaaaaagtgaacaacttcccaccattgcccaaattcatcccgctgaagccatgtttctaccaagacttcgaggcagacatccctcctcagcatctcagcttgaccaagcgcctctactacctctggatgttgaacagcgtcacgctggccgtgaacctggtgggctgtctcgcgtggctgatcggagcggggagccaccaactttggcctcgcctttctctggctcatcctcttcacaccttgctcctacgtctgctggtttcggcccatttacaaggccttcaagacagacagctccttcagcttcatggccttcttcttcaccttcatggcccagttggtcatcagcatcatccaggctgtgggaattccaggctggggtgtctgtggctggatcgccaccatctccttcttcgggacaaacattggctcagcggtggtgatgctcattcccacgatcatgtttacagttgtggctgtcttttccttcatcgctcttagcatggttcataagttctaccggggcagcgggggcagtttcagcaaagctcaggaggaatggaccactggagcgtggaagaacccacatgtgcaacaggcagcccagaatgcagccatgggggctgcacagggtgccatgaatcaaccgcagacgcaatattctgccacccccaactacacatactccaatgagatgtgagccagccaagcctaccaggaggcagggctgggggccagtgggacagggggctcaagccacatcatctgtgtggtgaccaagcagggttcccccttcccttttctcctccccaactttgtacaaagaatcagagttatatatatatatatatgtgtgtgtgtatatatgtatatgtctaccccctaccccaccttttgggtcctgctcttggcactccgagagctgtgggctgcacatggagtggtcctgtgcattggtagctgagttcatgtccccttgtgaaataacgtgcagtggagatctcttgttgtggtgctagatgtctgtttagaactaaaccagctcccctccatgaggcctgaagggtaggtaggccatgccaaggagcagctgcctgttttctcatcccttctcttggtcctctggaagttccacgagggctgtgatccagctgccagcctagcatccacgatctgtaggatgttacctccaatttcctgtcctactgccctttcctctttcctggctcagacctattggccatgcctggcgctgcccttgggaaagcctgttaccagtgtctggcccagctgctcaggccctggaatgctgcatctccaggcaactatgcactttcatgaggagggaaccaggatgagaaagggggctgggcacagatggtttaatttgggggtgggaggagggcccagttggttctggggatcctcctgtctgttgccagccagtgacctgcttttgcattctcctggtgcccactgccccttgtttctgagagacacacattattccctagctggcagttgacctgcctgagccaatgtgtctatctgtggtaactggatgaaccataataaaagggatcatttgaccctgtaaaaaaaaaaaaaaaaaaaaaaaaaaaaaaaaaaaaaaaaaaaaaaaaaaaaaaaaaaaaaaaaaaaaaaaaaaaaaaaaaaaaaaaaaaaaaaaaaaaaaaaaaaaaaaaaaaaaa

SEQ ID NO: 3053 - DNA, 1778 bp, Cricetulus griseus
tggagaatcaacagagccatccagagggaagtggccactgacactgtgaaggagctcatgtgccctgaagcccaactaccccaagtgtaccccttcgcctctgctgtgtaccagcaggagctgtctgtgcttcagaagcagcagcagagggagctgagccaggaagagctctttgtggctgtggagatgctgtcagctgtggttctcattaaccgtgctctggaagcgagggatgcctgtgccttctgggacaatctggtgaaccctgctacgggcttggcccaggtagaagaagaaaatgctcaacgttacttgatgccctggtaaaggtgcaacggcttcaaggatggatagagccttcctgagctggaatgacctacaggctgccgtgggaagaaacagatcaggtcctcgccatcagcctcatcaatgaggctctggaccagggtcctatcctgaaaagactttgtctgccctgctgcttccagcggctggcctggaagatgtcagccttcatgttgctcctcggtatcatctcctcctagtggcagccaagaggaagaaagccaaggtgacaggagatcctggggctgtactgtggctgggaaagagatccgccagggagtggccagagccaatgaggacacagacacacctcagaaaatagcccttggtgtggctgccatcaatcaggccatcaaggagggcaaggcagcccagacagagcgggtgttaaggaaccccaatgtggctcttcgagggatagttcctgactgtgctgacagctaccagcaggcccctggaaggaacagcagcaaggaagcgacgtcctggggatacagccgccttctgggttcaacatgacaacgtagccacagatgggcaagtggatctgagcagactcgaagtgtccctgacactcaccaacaagttggaagggctggagtccgatactgacgacaccagcaaccaaagcctgcttctgagtaccaaacagatgctggctgacctcatccagttccaccctggggattctctcgaggagatcctgtccttctcagctcccagagagcaggaagaggcccatcaccggctgatgtgttggcgccaggcctgtgacacccagaaaccagagtctctgcgacgacaccactcaatgatggcacactccctcctgccactggcagagaagcagcgacgcgtccagcgcaacctgcgtcggctacagggcctggggctggtcagggccggtgactgctaccagggactggtggatgagctggccaaggacatctggcaaccagcgcaggcaccggcaacggcggaaggcagagatgctgagacttcgggccacactgcagggcctagatgcaaaaaccaccttctatgaggaacagggcgactactacaaccagtacatccaggcctgccttgaccacctggcccccaaagccaagagttctggaaaggggagaagcagccgtgtcttcattacacagccgcccagctgctggaaaagggcgtcttggtggaaattgaagacctccctgtctctcacttcaggatgtcatcttgacatcacgcccggagatgaggcaggaaggtttgctgtaaatgccaagttcctgggtgtggacatggagcaatttcagctccactaccaggacctcttgcagctgcagtatgagggtgtggctgtcatgaagctctttaacaaagccaaagtcaatgtcaatcttctcatcttcctcctcaacaagaagttccttcggaagtga

SEQ ID NO: 3054 - DNA, 1777 bp, Cricetulus griseus
cgaggaagaggaccctgggaaacttaaatttcttgaaaaggacactggagattgcagctgctgagcagagattctggaaagtcactctgtccctgagccgttagcatggcgggtctgaagcgtcgggcaagccaggcgtggccggaagagcagtgtgagcaggaacatgggctctacagcctccaccggatgtttgacatcgtggggcacccacctaacgcacagagatgttcgttgtgctttctttcctctttgttgatgttattgatgagcatgagcgtggactcatccgaaatggacgtgacttcttactggcactggagcgccagggccgctgtgatgagagcaactttcgccaggtgctgcagctgctgcgcatcatcactcgccatgacctgctgccctacgtcactctcaagaagagacgggcctgtgtgccctgaccttgtagacaagtatctggaggaaaacatcaattcgctatgtgacccccagagccctcagtgatccagaaccgaggcctccccagccctctaaaacagtgcctccccactatcccagcatgagactgctctgcaaggcaatgtcttctccaataagcaggacccacttgagcgccagtttgagcgctttaaccaggccaacactatcctcaagtcccgggacctgggctcaatcatctgtgacatcaagttctctgagctcacctacctcgacgcattctggcgctgggccgacagaaactcctgaggaacttgatgctgcaagcattgccctgacctttcccccttctcacctctctggggattgtttgctccatcacctctggagcttacatactgttctggggtttgttctttacccttcaaccaatcacaccgtttcctttttttttttttttattttttttttaaaggaaaagacaaaggaaagtggaagtggtgttccctacccctccctgcacccatgtgcctgggcttcccctccgtttcctgttgccacttatcccctaaatgtgtgtctctacagccaccttaccactgagccgtaagacaagtgtatagggacggagtctatggaacatagcctttgtaagggactgaacattgctttcaggtgcattgaggggtaatcaatacctatggctttatgagggctcttaaattttgtctgaaaaaccaaagggctgtgagtaaaggagcgagctatgtggaaggtgggactctgaagtgtattttggaaattaattaccaccttcttccaaattatagaattttttaaaacaaagaagctgtggccctctccactctctcctggcctctggtgctactcctctctgcctttccttcattccacagctcctctggagaatggggctaggacatgcactgagcgttgttgcactttcttaggcagggaggtatgtttgagccaggaggcctataagtagagcctatttgagcaggtaccataccacctccccttccagttccccaaaggagatgcccagacagacattatgattattataatttttttcaatgccagtgctgctcagccctcagcataacttcagttttcatgaaataaaaacactgactatataaaattttacttttctgaaactgaaatctgaggtcaggtcaaagttatttctttcccatgaacttgaacctgtgttccattaagagagtttaaggttctgcaagtggagggaactgtgcttgggtcctgcctacaagtcacagtagcatcacctcacagctgtgcgtgtgtc

SEQ ID NO: 3055 - DNA, 1777 bp, Cricetulus griseus
tgccccctccggctcccccaggattctccgggcctgtcagcagccctcagatcaactccacagtgtcgctccctgggggtgggtctggcccccctgaagatgtgaagccaccggtcctaggggtccggggcctgcactgtcctccccctcccggtggccccgggactggcaaacggctgtgtgcaatctgcggggaccgaagctcaggcaagcactatggagtttacagctgtgaggggtgcaaggggttcttcaaacgcaccattcggaaggacctgacctactcgtgccgcgataacaaagactgcacagtggacaagcgccagcgaaaccgctgccagtactgccgctatcagaagtgcctggccaccggcatgaaaagggaggcggtacaggaggagcggcaacggggcaaaagacaaagacggggacggggatggggctgggggagccctgaggagatgcctgtggacaggatcctggaggcagagcttgctgtggagcagaagagtgaccaaggcgttgagggtcccgggggaaccgggggtagtggcagcagcccgaatgacccagtgactaacatctgccaggcagctgacaaacagctgttcacgctcgttgagtgggcgaagaggatcccacacttctcctccctgcccctggatgaccaggtcatactgctgcgggcaggctggaatgagctcctcattgcctccttctcccatcggtccattgatgtccgagatggcatcctcctagccacgggtctccatgtgcacagaaactcagcccattccgcaggcgtgggagccatctttgatcgggtgctgacagagctagtgtccaaaatgcgtgacatgaggatggacaagacagagcttggctgcctgcgggcaatcattctgtttaatccagatgccaagggcctctccaaccccggcgaggtggaggtcctgcgggagaaggtgtacgcgtccctggagacctactgcaaacagaagtaccccgagcagcaaggccggtttgccaagctgctgctgcgtctccctgccctccgctccatcggcctcaagtgtctggaacacctgttcttcttcaagctcatcggcgacacccccattgataccttcctcatggagatgctcgaggctccccaccagctagcctgacccccagagccgtgggcaaatggtgcagaggagggtgctcctgcagcctcaagggatctggtggccccgagcagggtttcctggtctccagtcagaagggacccagatccctgtgacgaccacatgtctaccttcagtggccttgagtctctgaatttgccggggtctccctgacaggggcgactctcatcccggctcccccagcacaaagcactggccctgctcacagggcccggctcccttcttctcaagagtggaacggagctcctctagaaagggcaccatcgagcgggccccccccccccaagttgatggtcttgggagcagggctctaatagtcctttatcatccccagcttgacagatgggggcaggagggaggggaccctcctgcagtcagactgacgaataaagggtgtgtgggtgaaggggctggtggagatggaggaaccgacggctaattttaatttcctctgaggagagactgggagttagactcaaagaagtactgtacatccccaggttgacgtcagtgccaggactggaggtggcatgtggtcaaggaggcctctcaggtggtctgtcccagtggctctctgggcgctgcct

SEQ ID NO: 3056 - DNA, 1777 bp, Cricetulus griseus
cgatggatctggaggaggcgaaatcattcacagaacgctgttcacaatgtgctgctgtctcctggggccttactgatgaaggcaaatactattgtacttcctgccacaatgtcacagatcgatctgaggaagttgtaagcactgctgtcattactaataccaagatcaactccatcagcagggggctgagaaagagaagcaagcatgaaaaaggctgggattggtatgtgtgtgaaggttttcagtgcatactataccaccaggcagaagccctgaagaccctgggagtaggtgcagagctaaagaatgaagttttgcacaatctttggaagcgctaccttcagaagagcaagcaggcctattgtaaaaacccagttcgtacaagaggacggaaagccaaggtattgggagataatctccagagttcagactgtgccagtgaacttgagctgctaagtgacaccacccttgaaagtggagcagagttccagtctgacccccagattccaaagcctttcccacttgtcaaagcatccccaaagtcagaagcagcagatgtctgttccggatctgtggatggagtggaatactcggagtggaaggagaagggtgtcctgaagatgactgtgcccaggacccttgctctctgctacctgtctttgctctggcagagagagacaattaccctttcagatcttttgaggtttgtagaagaggaccgtatcccgtacgtaaatgcttttcagctttttccagaagagatgaaagtgtatggtcgtgacaaaggcatctttgctgtagagtcttggcctgactatgaagacatctataaaacatgattgaagttgcctatatttttagatttacctcgttttccagacgtaactgaagactgctaccttcatcccaacatcttgtgcatgaagtacttactggggctcaacctccctgaaatgcacagtttaacctgccaagtggtaaagatgactggaatcggagaagtggattttctgacgtttgatcctatagctaaaaagaaaaggacagttaaatatgatgtgcaggctgtggctgtcatcgtggttgtgttgaaactgctctttttgctggatgacaaattagaatggtcctactctagtctcgctgaagcgtataatgaagaacacagagaagatgagccacagtttgatttcagaaaatggtaccaagttatgaagaaaacttttgatgagaaaagacaaaaatgggaggaagcaagagccaaatattcttggaaaaccaaaagaccaatctaccgttcacacattgacaagtcagtcatgtataagagaagagaaatggtggagcatcttcaaaagcagtttagtgccctggttggttcaacacctgtggctgaaaagaaggacccttcgagttttcagttcaactggacagaaggagacactggtagcccttgtttccatggacacagccttcagggactcctgagaacaaaaggccagtccttgataaccaagaactcactgtattggctcagtacccaaaaattctgcaaaagctattgtaaacatgtgacaacgtatgaagaatccaatttttctctgagttaccagtttatactaagtatcttctcattcttactaagaataaagacttctattctccatgaagaagtgagcttaattgaaaagaaactttttgaaaagaaatacaatgaatcaaaaaagagatcaagacccaagaaagtaagaagacactgagaaccagagaggggctt

SEQ ID NO: 3057 - DNA, 1777 bp, Cricetulus griseus
ctgcggatgctgatgcatgggaaggaggtgggcagtatcatcgggaagaagggagagactgtaaagcgaattcgggagcagagcagtgccaggataaccatctctgagggctcctgccctgagcggatcaccaccatcactgggtctacagctgctgttttccatgcagtctccatgatcgccttcaagctggatgaggacctttgtgctgctcctgcaaatggtggcagtgtctcccaggcctcctgtgaccttgcgccttgtcatccctgccagccagtgtggatcactgattggaaaggcaggcaccaaaatcaaggagatccgggagactacgggagcccaggtgcaggtggcaggggacctgctccccaattccacagaacgtgctgtcaccgtgtctggggtgcctgatgccatcatcctgtgtgtgcgacagatctgtgctgttattctggagtccccacccaaaggagccactatcccatatcatccaagcctctccttaggtactgtcctcctctccaccaaccagggtttctctgtccagggtcagtatggagcagtggcccctgcggaggtcaccaagctccagcagctctcaggccatgcagttccctttgcctcgcccagtgtggtgccaggactggatcccagcacacagaccagctcgcaggagttcctggttcccaatgatctgattggctgtgtgatcggacgccagggcagcaagatcagcgagatccggcagatgtcaggggcacatattaagattgggaaccaagcagagggtgccggcgagcggcatgtgaccatcactggctcaccggtctccattgccctggctcagtacctcatcactgcctgtctagagacggccaagtctacctctggggggacacctggctcagcccccgcagacctgcccacccctttctcgccacccctgacggccctgcccacagctcccccaggcctgctgggcacgccttacgccatctccctctccaacttcatcggcctcaagcctgtgcccttcttggctctaccacctgcttccccagggccaccgccgggcttggcggcctacactgccaagatggcagcggccaatgggagcaagaaagctgaacggcagaaattctccccctactgaggccagctgaggcccaggcaggggcaggcaggaccgccggcaggggctgcctccacatccttcctgcccaaggagactccaccatggggtctcaagcgccagtaatgccagacgcatggatgcatcccctaccctgccctgtctttggagttcttcctcagagaggggacagtttctggcccagggttctaggagctatggcagccccagagcaggggctccaccccttcagacctatgcttggatgccaggaatggccagggcctccctagtgccctgccatgggaggccactcatgtcctccttccctttgggcttttagcctactgccccagtgggaattggaggagggtgaggggtggctggggccaagcttctcttcatcccctgcagatcctgctgcttccaccatacccttttgactggaatagactggctgggcttgtcagggggcaacccaaagagagggctctgccttgagtgagggagtggcctggggcaggggcccagttctcagcagcagattctctgtacagttttttcaatccctgtttttgaataaatattctcagcgaaccagaaaaaaaaaaaaaaaaaaaaaaaaaaaaaaaaaaaaaaaaa

SEQ ID NO: 3058 - DNA, 1776 bp, Cricetulus griseus
cagctgctcctgttgaagcattgagataaacagtgaagaggacatatggatctgtttctccctacagaggcaagtggaggtgagtcgctgcccggcatgaacggcacccccagaaacaggaagtagaagctaaagcagctgtctgtctgccatggcctgtgagcctcccacagaccctggtggggcagctggtcccctgcccacctctatcttgggctgcagcaccctgcctcaaaggagccctcctggctggggacaagagctgcacaatggccaggtcctcacagtcctccggatcgacaatacctgtgcacctatctcctttgaccggctggcctttgctgttgtattctatgtggtggtgtgggccaacatctactctaccagccaaatgtttgccctgggcaaccagtgggcaggcgtgctgcttgccactctgactgccgtcagcctgaccctgacccttgtgctggtctttgagagacagcagagaaaggctaacactaacacagacctgaggctggtggccaccaatggagcccttctgagacaccgggtgctgctggggatgactgactcagtggaaggatgccagagtgtgatccagctctggtttgtctactttgacctggagaactgtgtgcagtttttgtccgaccatgtccaagaaatgaagaggagccaagagtccttgctgaaaagcagattaagccagctatgtgttgtcatggagacgggagtgagcactgtggtggaagggcctgaggatttggaagatgcccccctcctgcccagcactcctggtcatcaggaaagaccactcatgcagactgaactctatcagcttgttccggatgctgagccagaggagatggctcggcagctgctggcagtgtttggtggctactacactcggctcctggtgacctctcagctcccccagccaatgggaactcgacacacagactctgcaagggtcccatgcccctgccagctcatagaagcacacattttgggcacaggatgctgcccattcctggccaggtgacctaggaatcttcatcttcctccgagactgagaagtggaggaggagtcaggatcctggtgtgggggacagtgagttcagatgaaatcagcatttggagacactttggagagtctcagactggttttgcgcagccacatgctggcttgtgatggtgattttctcctgcagatcagcaatggtgttttctgacactccgctgttatggaacgaagtgtgatcagacattctgggtttgaataaagaggtcagagacttctctaagagtttgaagactgcccacagcaccatgtccatagcccttatcttgtgtgaaggtccagctccaagatccagccttcatggtttttgtcccccacaaatcaccattataagttggaattcttccctgaactggcagatgtatttgttcctgttggactcttactcatgcttcaaaatccagctttccgcatcccttctgctgctttctgtctcgttgaaattcctgatggagatattctgtcattccatttttctcctgtatatatacctcttttctatcgagactgtcaactcctcaaggtccaacactgtacccatcttccttttgtaaatgacctggacttgcttagaacaaagtaactctgaaaagtcccatggttcggttgctttatcctctctaccagttgtggcaaattgttctgcaaacgtggttgaatgataagacctagatcatgatggaccagag

SEQ ID NO: 3059 - DNA, 1776 bp, Cricetulus griseus
gacttgaagattagatggggtgtgaccgatgttgggtatccctcagctttcgaagatcccagaattgaaaaagatcgtggggcgagcctcttggggcccagtgaaggtgaaaaaggaagaggatgagcatggaactatgagtccggcatccagtcagcaagtgtactctgacaatgtcaaggcctggggccctggggcaggtccttatttaagcatcaatgtatcagaagaggaggaaaagggtcagaaaatgttctgggacatggcactggtcctaaaagcaacacaggaggctgctgctgctgcggtaccccttgggagctactcattaccagggactctggccaagagtgaaatccgtggagcctcatcgggaacccagccccgctagatactgacaccaagaacctacaactactggatcctaagacagagatacatgatgaagcagaagagcctctcctgattttaggaagaatccaaaaaggtgaccttcaaggacctgagctaggagaatcttgtgaaaagggaaatgtattaaaaaggcagaaaataaagcgggaaaaagagataccagaaaagtgacagtgaaagaagaagtctaagaagaaatacagccttagttctgggccagctaaaaatcagaaaatacaacctggggaaaagccttttacgtgtagtgagtgtgggaaaggctttagtcagagtgcaaaccttgttgtacatcagcgaatccacaccggggagaaaccctttgagtgtcatgagtgtgggaaagccttcattcagagtgcaaaccttgttgtgcatcagaggatccacactggacagaaaccctatgtttgtgcaaaatgtgggaaggctttcactcagagttcaaatctgactgtacatcaaaaaatccactccttagaaaaaacctttaagtgtggtgaatgtgagaaagccttcagttacagttcgcaacttgctcggcaccagaaagtccatataactgagaaatgctatgaatgcagcgagtgtgggaaagccttcactagaagctccaacctcattgtccaccagaggatccacactggggagaagcctttcgcctgtaacgactgtggcaaagcctttacccagagtgcaaatctcattgtacaccagcgaagccatactggtgagaagccatacgagtgtaaagattgtgggaaagcctttagttgtttttctcacctcattgtgcatcagagaattcacactgcagagaagccttatgactgcagtgagtgtggaaaagccttcagtcagctctcctgccttattgtccaccagaggattcacagtggggaccttccttatgtatgtagtgagtgtgggaaggccttcacttgtagctcatacctactcattcatcaaagaatccataatggggaaaaaccttatacctgtaaccaatgtggtaaggccttcagacagcgctcgagcctcactgtccaccagcgaactcacacaggggagaagccctatgaatgcgcaaagtgtggtgcagcgttcatttctaactcacacctcatgcgacaccacagaacccatcttgttgagtagcaacagggtgtttccttgatgttggtcataacctactgctcccgatagtaggcacctctgttctgctttattcttccattgttaaaacaaagtctatacactttaaagttattttctgtaatggaaggtaaacacaagcatttcagaggctaatttaaagagaataaaaaaacatctaaaagccaa

SEQ ID NO: 3060 - DNA, 1776 bp, Cricetulus griseus
caacacccctaaaaaactggctaagaagttgaagacgtccatcagtaaagctgcaggaaggaaaataagttcagcgcttcaggaagagaccccagagacatacttgctcgtcagctctgtttcgggtgcgaagtaccatttgctagcacacaccaccctgaccttggagagtgctggggactgcttcaagacccataatctgtccgttcatggagatgaggactgttccttttggcttcccttgtacggcaatgtgtgctgccggttagtggcccagccagcttgtatggctgaagatgcatttgcgggattccttaacgagcagcaaacagtaaaaggtctggttggctggagaaggctgtactgtgctctgagagggggtaaactccactgttactacggaccagaagaaattgaagctaaagtggagccaactctggtggtctccattgacaaggaaaccagaattcagaccatggacaaggatgcaaagaaaatgcatcatttctgtgtcaccaacactgttgctgggcgcacagtgcctcacatctttgcggctgacagcctagaagaccttcaggagtggatgggtgccatcaggcagcatctctttgattcttagccaatggaagcattgttgtgaagaacttatagaaaattggaagtattatgtcaccacggaaaccacctttgttcctgacaaaggaggcgacctccgtgtactacgatatgaggtgaaacttgaaagttaactgagataatacaaagaaaattaggagagactaatgggcaggtcctcattagtcgggatgaagcatccatgccaccccactgggccgcagtctttgatggcaatcatgaaatggtcatccagaagaaagtgttgtcccccacaggcaaccagcccctgatgggaaaaggaagaagaggcgagcaccacttcctcctactgatcagcctcccttctagttgtgaagacacagggcggcacagatcagtccaagggtagcgaggcccaggccagtgtctccggagcctcgccttctgattccagactatcatcatccatgcatcacttccagaaaaccggtggctgcccctcgaaaacttctctctgccaggaaaaacagttcagctgatgatgagcacacggacactaaaaccagttttgaaggcaaaccggtgccggctccaaggcagaaatccatcagggacattctgcccccattgctccgttttgctgtgtgatgctaatctccattgtgccctctggagtttggggaggcaagtagctgattaatgtcttgaaatttatttagtacttatttttaaaagcagatgacagattcaaaaattataagaaaagttgaccatagtaattttcaggattaatcccttttcaaatttttaattagtatttccttttttttttgagtaagggttgatgtctgttattgatattattcattaaaagtaatattcagtaatcacattggcatcatttccataggaggtaatttccatagcaactaatcacagtgacctaaacaggattatgaattgaatggggataaatagcaagaggatgaatatcttaaatgaacaaaagaaaaatccactttttataataaccctctttgtaaacaagaacagcagaacagttttaaaatgtcatcagaatttccaagccaaactgcccagaaggtgtcaaactcagccctgagagtctaggaccgcccaagccctaacttttttttttttttttttttaattaaa

SEQ ID NO: 3061 - DNA, 1776 bp, Cricetulus griseus
actgtgacagcatcacccaagccaaagacaagctgttggatactgtgtacaagggtatcccatactctcagcgccccaaagctgaggacatggacttggaatggcgccagggccgcatggcccgcatcatccttcaagatgaggatgtcactacaaagatagagtgtgactggaagagagtcaactcactggcccactaccaggtgacagatggttccttagtagcactggtgcccaaacaagtgtctgcttataacatggccaactctttcacctttacccgttcactcagtcgttatgagagcttgctccgtgctgccagcagcccggatagcctccgttcccgagcacctatgctcacacctgaccaggaggcgggcaccaagctgtggcatctggtgaagaaccacgaccatgctgatcaccgagagggagaccgtggcagcaagatggtctcagaaatatatctgacaaggctgctggccaccaagggcacgttgcagaagtttgtggatgacctatttgaaactgtgttcagtactgcccaccggggctcagctcagagcaccgtctgggcaaggactcccttccaacaagctgctctatgccaaggacatccctaattacaagagttgggtggagaggtactaccgagatatctcaaagatggcatcaatcagtgaccaggacatggacgcctacctagtggaacagtcccgcctccatgccaatgacttcaatgtcctaagtgcactcagcgagctctacttctacgttaccaagtaccgtcaggagatccttacctcactggaccgagatgcctcttgtcggaagcacaagtttcggcagaagctggaacagatcatcagcctggtgtccagcagcagctgagtggggagatggtgaggagggggcttctcacttctgagccatcctcccatccagggagtggctggctgtagcctgagtctccagggctgagacccagatctggtgttgttggggaggttaccaggccaagatgcccccatcacacctgggccctcttcgttagtgccttgctttgggtcctgcagggggaggggtgacaggaccaagctccctcaccagcagcagcaatacccccacctcttgcccttgtgtttccatgtcaagaagtcttgccctcttagctctgtacaccctacacacctattattaaggcctggccagtgtccctcttcagatgtttcaggtgtcagaccacattttcatgggggcctgttgtctctgagacaactataaccaggttgtgcttgggcctgatgtgggcctggacctctgggacattcctcgtgtccgtactgccaaacttcctcagtgttgtaggcatttgccctgaaccccctgagcctcagctgccccattatgtgcccatctctaggggacaaggtggcagtgccttactgttttgtgtctcctcctgcctcctctgaggaatatggccctgtctgatagtcccagaccccaccacactcttctttcgttgcatgtagtttttcttttgttgtaaatttttcctaattaaatgttgggaaatggggtcagtgcatgtctttgtctttggcgcaagtgggtagaccattgggctgtggataagcttgactgtgggaggaaataataactctttgtaggatttcttatgatttgaggaagatcatagccatgggtagtccattaggcaatcttggtggccctagcttcaagactgaataagtctgcttccttctccttgca

SEQ ID NO: 3062 - DNA, 1776 bp, Cricetulus griseus
gcatgtgtccatgtatgacagagtgctcatgcgcaagcctgagaaggaggagttcttccaccaggaactgccgctctacatccccccacccatcttctccaggctcgacacacctgtggactatttctatcgccctgagacacagcaccgggaaggttatcacaatccctccatctcaggtgagaacctgattggattgagtagagcccggcgcccccataatgccatctttgtcaacttcgaggaccctgaggtacctctacagcctttggaggctgcagtaacgacatggaagaaggcctgcactaaccccatagatcagaaggtggaggaagagctgaggaagctctttgatgttcgtcccatatggtcacgaaatgctgtcaagtccaatgtcagtgtccaccctgacaagctcaagatcttacttccctacatggcttattacatgataacaggtccatggagaagcttgtggattcgatttggctatgaccctcgaaaacacccagatgccaagatttatcaagtccttgactttcgaatccgttgtggaatgaaatatggttatggctccagggacatgcctgtcaaagcaaagcgcagcacatacaactatagcctccccatcaccgtcaagaagacatccaaccagcttgtcaccatgcatgacctgaagcagggcctgggcccatcaggaacagacggcccacggaaattgacctacaataagtacaagctcaaggattcagtctacatcttccgggaaggggctctgccaccctatcgacagatgttctaccagctgtgtgatttgaatgtggaggagttgcagaaaattgttcaccgcaatgatgggacagagagtgtgtgcacagagagagatggctggtgcctcccgaagaccacagaccacctgagggacaccatgtcactcatgattctgcagaccatccgctctgaaaggcctgggaagactgatcgtgggaaagggcagctgatgtttgagtctggagaggagggcgaggaggaagaggaggaggaggacgaggaggatttcaagccctcagatgggagtgaaaatgagatggagacggagattctggattatgtgtgacaaagcactggtcccgggcaaccaggacatgctggtataccaagatgggacagttgggacaggcctgtgcccccacccagggcagaggggtgaggacactgggcatcctcaggctgggctcagcctgacttcaccaaatggacccagcaagtccaaagccaaatgcttcaagctagccccattgtttcatttggcctaagtgggcacccctaggaacttcccagccttgcagggaagcagctggacagaccgtgtcccctgctgaccctgcttcctgctgcttggaagaaagctcagcccagaggcaggaagtacttcttccctaaaggctggccagccttgcctgtactgcagaggacttctttcacagcagctgccaggacacctcagctgggagtactctcacttctgagctgctgcccagcctggtctttggggaggaggtctaggttctggtcccatctacccaggaatgccttgactctagatataaggaaggtgctgagtgagcgacctcatgccctctgaaggccttacccacacagcccaggccaatggcagtcttgccttaggttggccagactagaaggacttctgaggtctagccacatttggcaaagtgtggttattcttctcctgaattcccatgtaaataaagt

SEQ ID NO: 3063 - DNA, 1776 bp, Cricetulus griseus
gtccctgaggtttattaaactcctggctgtgctcaagacctcagcagcggccctggctgggagcctgggaagcctgggaggcgggtgacttgctgatagcctggtgaggtgggacagacagaggcccttttgggattctgctgggcctgcttggtgggtcacatttgtgagccaggatcccagctcccttctgggcagcggatggttgggcttgtggctaacagaagatcagaattttctgaagcggaggactaaactctgaaaaccatctcaagccacatcaccttgctgtgtgatcttgggtaggtggctctgtctctctgagcctctatttcccctcagctcagcagacaccatggctgatgggcagttgcctttcccgtgctcctacccaagccgcttgcgcagagaccccttccgggactcaccgctctcttcccgcctgctggacgatggctttggcatggaccccttcccagatgacttgacagccccttggcctgattgggctttgcctcggctctcatctgcctggcccggaaccctaagatccggcatggtgccccgggggcctacagccacagccaggtttggagtgcctgctgagggcaggagccccccacccttccccggggagccctggaaagtgtgtgtcaacgtgcacagcttcaaacctgaagagctgatggtgaagaccaaggatggatacgtagaggtgtcaggcaaacacgaagagaagcagcaggaaggtggaattgtctccaagaacttcaccaagaaaatccagcttcccgcagaagtggatccagtgaccgtatttgcctcactgtccccagagggtctgcttatcatcgaagctccccaagtccctccttactcaacctttggagagaacagcttcaatcacgagcttccccaagacaacccggaagtcacctgttcctaagaattcagccttggtccttctttgttcctgtccccagtgccagggggcctctggtttggagggtacactactttacagcactcaatttagcagaactcagatgttgggggatgggagggaaaacagaatgaccacagagtccctggataatgtagtagtagatgtctccacagggtgacacaatggatggccttgcttgattgtgttaggtcacagtattgggaggatgtcccttcatcttgtctagttgaagtcactgtacggtctatagttgcaaaacaagcaaaggaggattgaacacttcatgttacatctttaccttacagctaactcaagggttgtttttctctggggaccgtcccatcacccagatccctgctctaggctctcctaatgtgtggcttgattgatggagcctctggctcaccccagtgtgtttctaaactttttgtctaggagaacttataggcaggtctaatatccccatatgggatttatcagccacacaaaacagtgccttttatatacggcatgaccccatggctctcaaactgtcaccatcaaggactccgggaacccctcagttgatttctgactaaggtttcccgttattgtgtcccctgtgtccaagtcagatttttacagagagctgtctctaagcagctctaccaggaaccaagcaaaggccagacagcctggcatgcaggctagtggtatcgtgtatggggggaggggcggggaatgtgtgtgtctttgttgtgtgaattgtgctgttgtttaggggaaaataacagtaaataataataataccaataaaggagctgatgttc

SEQ ID NO: 3064 - DNA, 1776 bp, Cricetulus griseus
ccgtccccttcctcttccccggcctgcgtctagccccgaagcttctgggtacttctccggcgcggagcattgtgggcttgggtgggcggtcccgaggccgagaacagacgagtgtcggggccctgaagccgcttccaagatgatgcccacaccagttatcctgttgaaagaggggactgatagctcccaaggcatccctcagcttgtgagtaacatcagtgcttgccaggtgattgctgaggctgtaagaaccacactgggtccccgtggcatggacaagcttattgtggatggtcgaggcaaagcaacaatttctaatgatggggccacaattctgaaactccttgatgttgtccatcctgcagccaagactttagtagacattgccaaatcccaagacgctgaggttggtgacggcaccacctcagtgaccctgctggctgctgagtttctgaagcaggtgaagccctatgtggaggaaggtttgcaccctcagatcatcatccgagctttccgcacagccacccaattggctgttgacaaaatcaaagagattgctgtgactgtgaagaaacaagataaagtagaacagaggaagatgctggaaaagtgtgcgatgacagccctgagctccaagttgatctctcagcagaagaccttcttcgccaagatggtggttgatgctgtgatgatgcttgatgagttgctgcagcttaaaatgattggcatcaagaaagttcagggtggagctttagaggagtctcagttggtggctggtgtcgcattcaagaagactttttcttatgccgggtttgaaatgcagcccaagaaatataagaaccccaagattgccctcttaaatgttgagcttgagctgaaagcagagaaagataatgctgaaatcagagtccacacggtggaggattaccaggcaattgttgatgctgagtggaacattctctatgacaagctagagaagatccatcagtctggagccaaagtcatcttgtccaaactccccattggggatgtggctacccagtactttgctgatagggacatgttctgtgctggccgagtgcctgaggaggatctgaagaggacaatgatggcctgtggaggctcaatccagaccagtgtgaatgctctgattccagatgtgctgggccactgccaattgtttgaagagacccaaattggaggcgagaggtacaatttcttcactggctgccctaaggccaagacgtgtaccatcatcctccgtggaggcgctgaacagtttatggaggaaacagaacggtccttgcatgatgctatcatgatcgtgaggagggccatcaagaatgactctgtggtggctggtggtggggccattgagatggagctctccaaataccttcgggattactcaaggaccattccagggaaacagcagctgttgattggggcatatgccaaggccctggaaattattccacgacagctgtgtgacaacgctggctttgatgccacaaacatccttaacaaacttcgggctcggcatgcacaggggggcatgtggtacggagtggacgtcaacaacgaggacatcgctgacaacttccaggcctttgtgtgggagccagccatggtgcgcatcaatgccctgacagcagcttctgaggctgcgtgccttattgtatccgtggatgagactatcaagaacccccgctccaccgtggatgctcctgcaggggctggccgtggtcgaggccaaggccgcctccattgagaggc

SEQ ID NO: 3065 - DNA, 1776 bp, Cricetulus griseus
acatctacaggaaatatgtgccctaccaaggtccccgctcggagtcagcctggcccggaaccctgaagcgagtggcggaggtgtggatggatgagtacgcagaatacatataccagcgcagaccagagtaccgccacctctcagctggggatgttgtggctcagaaaaggctcccgaggctcccctcaactgcaagagcttcaagtggtttatgaccaagattgcctgggacctgcccaagttctacccacctgtagagcccccagctgcagcgtggggggagattcgcaatgtgggcacaggactgtgcacagacacaaagcatggcacatcgggcttaccattgaggcttgagacctgcattcggggccgtggggaggctgcctggaacagcatgcaggtcttcaccttcacctggaaggaagacatccggccctcggagaccctccagcacaccaagaagctctgctttgatgctgtctcccacaatagcccagtcaccctctacgactgccacagcatgaagggcaaccagctgtggaagtaccgcaaggacaagaccctgtaccaccctgtgagtggcggctgcatggactgtagtgaaagtgaccacaggatcttcatgaacacctgcaacccctcctccctcacccagcagtggctctttgaacataccaactctacggtcttagaagagttcaacagaaactgagtcctcagacctcctcaacaagcccctcaggttgctatggagcttgcaagccttcctcccgtgggagaaggggacctatgggcaccaaggtgctgggcagacatgacagtgccctacaaagaaaggtggtattggccttaggacggcttttaagcctatgtgccagccactggcaaggcaatttgcctgtgctgggggtgactgccagtactgcccagcttctgtgttggtccaggacaatgaaagcccactgtgacctcagagtgttccataactagccctggccagcagccaggcaagattccccccttactctgcagccaggtgtaaaggatgtctcccctggctctctgggtatttcagatgcccattttagcttcagggctgtctgggcaccaggtttttggggctagttcagctggataagtagacctccagactgaacagctcccagtacatgcttccaaagccctttctctatctccttagcagctccttgccctcagagaggaacggggtgctgtgaggtgctcacctccagagtcccagtgggggcagcatccccagataatgaccattgtggttctaacctcacagaaccctggagtttcttaaaagtgctgtggttctgtacaaagccaagatgagccattaggtgtgtgagcatacaatgcaagcagccgagtgtcatgtagagccacctccatgcagcccctgtgctgtcccagctcactcatggattcctagcttccttttccatatgaacattctaccttacaaatagccagctaggaaggaatcaaaatggggggtggaagggtgtctagaatccagtggggatgggagttgctgccaaggggagtcaagtcctcagagagcagtgtggcctcattacaataaaaatcgtgccttttacaaagaagaaaatgcctcactatcaggggtgagatgacctgctgatcaacacttgtccctaatgctttctatgataaatccaagtcatattttggttcaaggttgatgctcgagccaggaccctgctaacaccattaggtgagagtggt

SEQ ID NO: 3066 - DNA, 1776 bp, Cricetulus griseus
gggaggcgggcggagtggagatggcggcggcggcggctccgggggcgggggcggggagccccggggagccgctggggtcggcccgggggtcccgggggaggtggaggtggtgaagggacagccattcgacgtgggcccgcgctacacgcagctgcagtacatcggcgagggcgcgtatggcatggtcagctctgcttatgaccacgtgcgcaagactagagtggccatcaagaagatcagccccttcgagcaccaaacctactgccagcgcacactgagagaaatccagatcttgctgcgattccgccatgagaatgtcataggcatccgagacatcctccgagcacccaccctggaagccatgagggatgtttacattgttcaggacctcatggagacagacctgtacaagctgcttaagagccagcagctgagcaatgaccatatctgctacttcctctaccagatccttcggggcctcaagtacatacactcagccaatgtgctccaccgggacctgaagccctccaacctgcttatcaataccacctgcgaccttaagatctgtgattttggcctggcccggattgctgaccctgagcatgaccacactggctttctgacggagtatgtggccacacgctggtaccgagccccagagatcatgcttaactctaagggctacaccaaatccatcgacatctggtctgtgggctgcattctggctgagatgctctccaaccggcccatcttccccggcaagcactatctggaccagctcaaccacattctaggtatcttgggctccccatcccaggaggaccttaattgcatcatcaacatgaaggctcgaaactacctacagtctctgccctctaaaactaaggtggcatgggccaagctttttcccaaatctgactccaaagctcttgacctgctggaccggatgttaaccttcaaccccaacaagcgcatcacagtagaggacgcactggctcacccgtacctggaacagtactatgacccaacagatgagccagtggctgaggagcccttcacttttgacatggagctggatgatctccccaaggagaggctgaaggaactgatcttccaagagacagcccgcttccagccaggggcaccagaggccccctaacaacaacagacatccctgttccctaagacctggtcctgctcctacctgctccttctctgcagattattagaaaatgaactttgctcaacccagaccctggcagcccaggctggaccaagggtgggcctggccaccttctttcactttgctggggtctcctgcttcaggcaggctcctttcaccccaattcccttccccatctccccggggcctaagtggtgaggtggccccagagctgatctctgctgctctgcctttatctacccctgctagccctggctctggcagaccattctggaatggaagggctatatgactgccctaggacctatgctacagaggggtggaaggcactgagtagggctctgccctactcatcttgttggaaccccaccctattttccctgaaggaacattcctaagtctcaagggctagtttccctgaggagccaggcccaggccaaaccctctccctctcaaagctgccacctgtaacgcccttgctgcttctgtgtgtgggttattgggagtggaggtggcccgtggagagccggtgcccctccccaccttccccgtgcctgtatctaatatataaatatagagatgtgtatatagga

SEQ ID NO: 3067 - DNA, 1775 bp, Cricetulus griseus
gcacacacacaagcgcacgcgctcacacacggagaaaccctttgcctcttgatttatggaaacaattatgattctgctggaggatttctcagctgagaaatagtttgtagctacagtagagaggctcaagttgcacgaggcagacagcagacacggaactcttgtgtacccagctgttctaaaagagaacaaaaagtcaaaggagcaaaaacggaaacacgacagcaactggccttgttgcaacctgtttttagaaggagacatctaccaactgtcttactgaaggaggaatcctgttattggtatcagaagctaaaagataaacttaacagtttggaaagagcgactaccttttctcaaaccaatctacagttcacagacaggaggaggcccatgacctaggagtagcaatcaactcaagattcagttctcattatgttattcatgaacacccggagcactacactataatgcacaaatggatactgacatggatcctgccaactctgctctacaggtcatgcttccaccttgtctgtctagtgggtactatatctttagcatgcaatgacatgagcccagagcaaacggctacgaatgtgaactgttctagccctgagcgacacacaagaagttatgattacatggaaggaggggatataagggtgaggagactgttctgtcgcacacagtggtatctgaggattgacaaacgaggcaaggtgaaagggacccaggagatgaagaacagttacaacatcatggaaatcaggactgtggcagttggaatcgtggcaatcaaaggggtggaaagtgaatactaccttgcaatgaacaaagaaggaaaactctatgcaaagaagaatgcaatgaggattgcaacttcaaagaactaattctggaaaaccattacaacacgtatgcatcagctaaatggacacacagtggcggagaaatgtttgttgccttaaatcaaaaggggcttcccgtcaaagggaagaaaacgaagaaagaacaaaagacggcccattttcttcctatggcaataacctaatcatacacggtgtttgagaaaccagtttcattcagcagggagatttctttacagtggacttttcttctctctctctctctctctctctctctctctctctctcttaaagtaaccaagaaaggctggaaactactgaaaactgatcaagctggacttgcgcatttttgtttattttaaaagaatgaaagaaagaaagaggaagaagaatacacaaaaatcagatcagagtaactaactaaaagttgtaaaaaagttgtaaaagtggttgtacaatcatgttagtaatagtgatgtttttcttaaattaatttacccttaagagtatgttagatttgactatctgataatgagtatttaatatcactatctgcttataaaatggctgctataataataaatgccactcaaattgaaaaggtattgctaacaggatgttttagaaatctgtatataaaatagcaataatgatgataatactgtatttcatctcaccacaaaataacattttataatccctaaaaataaaattccaaaatctttaagtctttttcaagtaatatatctatcttttgtataattcacgtttgggaacacaacttttaataatgttcttcccacaaataatcatgctttccccctgtggttacagcattaaactctaagttgtatttgaattttattgttttgttatttaagtttattgttatttattaaagaaaaa

SEQ ID NO: 3068 - DNA, 1775 bp, Cricetulus griseus
acttgcctcggagtgctcgttctcggtgcttcttcctcgtcgcctgtgctctgcccgccgccgccgccatggcccaagctgacattgccctgattggactggccgtcatgggccagaacttaattttgaacatgaacgaccatggatttgtggtctgtactttcaataggactgtctccaaggttgatgacttcttggccaatgaggcaaagggaaccaaagtggttggcgcaaagtccttgaaggagatggtctccatgctgaagaagccccgccggatcatacttctcgtgaaggctgggcaagctgttgatgacttcattgagaaactggtaccattgttgaacactggtgatatcatcattgatggaggaaattctgaataccgggatacaacaaggagatgcagggacctcaaggccaagggaatcttgtttgtggggagtggagtcagtggtggtgaggaaggggctcggtatgggccgtcactcatgccaggagggaacaaagaggcttggccccacatcaagacgatcttccaagccatcgctgcaaaagtgggaactggagaaccctgctgtgattgggtgggagaagagggggctgggcactttgtgaagatggtgcataacgggatcgagtacggcgacatgcagctgatctgcgaggcttaccacctgatgaaggatgttctgggcatgcagcacgaggagatggcccaggcatttgaggaatggaacaagacagagctggactcgttcctgattgaaatcactgctaatatcctcaaattccgagacactgatggccaagagctgttaccaaagatccgggacagcgctgggcagaagggcactgggaagtggaccgccatctcagcgctggaatatggcatgcccgtcaccctcatcggagaagctgtcttcgctcggtgcttgtcctctctgaaggaggagcgagttcaggccagcaaaacgctgacgggccctcagaagactcagctggcccacaataaggagtcattcctggaggacattcgaaaggcgctgtatgcttccaagatcatctcctacgcgcaaggctttatgctgctcagacaggcagccatgcagtttggctggaccctcaattatggtggcattgccctcatgtggagagggggctgcatcatcagaagtgtgttcctgggaaaaattaaagatgcatttgagcgaaacccagaacttcagaacctgctgctagatgacttctttaagtcagcagttgacaactgccaggactcctggcggcgggtggtcagcactggggtgcaagcaggcattcccatgccctgcttcactactgccctctccttctatgatgggtacagacacgaggtgctaccagccaacctcatccaggctcagcgggattactttggggctcatacctatgaactcttagccaaaccaggagagtttatccataccaactggacaggccacggtggcagcgtgtcatcctcttcatacaacgcctagtaggactgtgtcgtcaccctccctcccaccaacaggacagtcccagtggtatgcagcactcctctttgtcctagttcctgctcagatcttttagccaagtgtcggctttgattgccgaagaagtcgctgaggtctcactgcgtgactgctcccctgactgagctgtgccatgtgggtcagacaggctgcagctcttggcacacagagggcatgtgtgtgtgggattgtacaacctgaaccgtggatcatgcgtgt

SEQ ID NO: 3069 - DNA, 1775 bp, Cricetulus griseus
ggcgactcggacgcagctgctggaggaagagctgagcagcctaaaggaggagctagccctgtgtcaggctgacaaagaatttgtatggtctttgtggaaacgtctccaggcaacaaatcctgatctcactcaaactgtcagcttggtcgtggaaagagaaaaacagaaatctgaagccaaagacagaaaagttctggaaattttacaagtcaaggatgttaaaatacaagaactggagcagaccgaatcagtactaaatcaggaaataaatgaccttgtaaaacagaagactaaggttgatgaagaaaatgccttcttgaggaaagaattcggtgatttacagaagaaatttaaagataaaagccaagaagttaagaacactaaggaagtgtctacagattaaagaagagacaaaacagaagccacattgagaacctcagcaaggacggctgggaggacgtgagtgaaggcagcagtgattctgaagcacaaagttctcaaaatttgggaacaattattgtggaaacatcccagaaaataagccctatagaagatgatgaagaccagaaaggaagtgttcaaacagaagacagctatgctcaacaaagggaaatgcagaaatcctcacgtgaggagggcaaggccctgaaggatatttctcattataagaataccaagaaaatggcttttcaaaagaagagtggaagcatgcagaagagtttccatacagtagttcctgccaaagttaacagagacaagtgcaaaaatatacctgcccaaaaatccagtagcaacactattttattacgagaaaggattgtgtccttgcagcaacaaaacagtttgcttcataatgccaggaaagcagcagagtcatctgctaaggagtataaagaagcaaacgagaaactcctccatcaactctcgaatggagagagatataaccatgaagagacacctgattgaggacttaaaatttcgacagaaagtaaattcagaaagtaatgaaagttttaatgaaatgttagaaagtacttgaaaaaaaggtgaagacactaactgaagaatgttccaacaagaaggtatccgttgattcactaaagcaaagacttaatgttgctgtgaaagagaagtcacaatatgaacagatgtatcataaaactaaagaggagctagaaaaaaaggatctcaagctgagtctcctcacatcaaaaaataaatgaaacagaaacagcaatggcacagattgagacagcagcgtcgaaacagctccaaggcttagcactgcagagtgaacaggtcctggaaagtgcacagaagaaactgctggcagccaatgaaaaactagaagagtttgccttctttgtgaaggctttggtcaaagagttacaaagtgatgtccataggacccgacatcaaatcaaagagcttaagaagatgcagaaagacaaacatgcttgtaaaacctcaacccataaagtccagaccttggcagcatccatcctgaacatttcaccatcagacctggaggaaatactggacacagaaaatgaaatggaatttgaaaagacaaagattgatgctgaaaatgacaaggaatggctgttgtatattcagaaacttctagaaggacagcttccttttgcctcatatttactagaagcaatactggagaaaataagtgaaaacaagaaactaactgaagggtatttgacagttatgaaagacattagataacaataaagattaattatgaaaaaaaaaaaaaaaaaaaa

SEQ ID NO: 3070 - DNA, 1775 bp, Cricetulus griseus
caatgaacccccagggcatcttgaaggcttttcccaagcgaaagaaaattcatgcagatccaccatcaaaagcacttgcaaagattcccaaacaggaggtgggagaagctggagaatggctgagttccctgagggctcacattatacccactggcattggacgagcccgggcaagagctctttgagaagcagattatccatcatggtggccagatatgctctgcccaggccccaggagtcactcacattgtggtagatgaaaatatggactgtgagcgagctctccggctccttagactgcctcagctaccccccagtgctcagctggtgaagtcaacgtggctgagcttgtgcctgcaggagagacggctgattgacacggctggattcagtgtctgcatccccaagagttccttggaccaaccacagcccaacaaggcaggatgaaaccagtgatgaagaagggccccaggttagctcagcagatctggaagccttgatcagtgggcactacccggctcctcttgagaaagatggtgggcctgacccagttccagaagccctggagaagtgggtctgtgcacagccctcaagccagaaggcaactaattataaccagcacatcacagagaagctagaggtgctggctaaagcctacagtgtccagggagacaagtggagggccctgggctatgccaaggccatcaatgcccttaagagcttccacaagcctgtcagctcctaccaggaggcctgcggcatcccagggattggcaagcggatggctgagaagatcgtggagatcctagagagtgggcatcttcggaagctagaccacatcagtgacagtgtgcctgtcttggagctcttctccaacatctggggagctgggactaagactgcccagatgtggtaccatcagggtttccggaacctagaagacatcagaagcctggattcactgaccactcagcaggccattggcttgaagcactatgatgacttcctggagcgcatgcccagggaggaggctgcagacatcgaaaagacagtccggatatcagcccaggccttcaatcctgggctgctgtgtgtggcctgtggctcctaccgaaggggaaagatgacctgtggggatgtcgatgtgctcatcactcacccagatggccggtcccaccagggcatcttcagccgcctccttgacagccttcggcagcaagggttcctcacagatgacttggtgagccatgaggagaatggccagcagcagaagtacttgggtgtgtgccggcttccagggcccaagcagaggcaccggcgactggacattatcgtcgtgccctacagtgaatttgcctgtgccctgctctacttcactggttctgctcacttcaaccggtccatgcgtgctctggccaagaccaagggcatgagcctgtcggagcatgccctcagcgcagctgtggtccggaacagccaaggtgtcaaggtggggcctggtcgagtgctgcccactcctacagagaaggacgtcttcaggcttttaggcctgccctaccgagagccggctgagcgggactggtgacctagggcttgggtgaggggaagccacgctgggtgagctgtctctctcatttagccatccaccactgctctagctttgcctagcttctcacttcctgtgcagctggagctgctggggatggcctgcccagactctgtgaggactgctcctcgaaaggaccctagggcctagtaagaggctttgacattca

SEQ ID NO: 3071 - DNA, 1775 bp, Cricetulus griseus
cttcccgtcgtcggaaccgccatgacccatttcaacaagggcccttcctacgggctctccgccgaggtcaagaacaagattgcatccaagtatgaccaacaagcggaggaagatctccgcaattggatagaagaggtgacgggcatgggcatcggcaccaacttccagctgggcttgaaggacggcatcatcctctgcgaactcatcaacaagctacagccaggctctgtgaagaaagtcaatgaatcctcactaaactggcctcagttggagaatatcggcaactttattaaagctattcaggcttatggaatgaagccccatgacatatttgaagcaaatgatctttttgagaatggcaacatgacccaggttcagactacgctggtggctctagcaggcctggcaaaaacaaaagggttccacacgaccattgacattggagttaagtatgcagaaaaacaaacaagacgtttcgatgaaggcaaattaaaggctggccaaagtgtaattggtttacagatgggaaccaacaagtgtgccagccaggcggggatgacagcctatgggaccaggaggcatctttatgatcccaaaatgcagactgacaagccttttgaccagaccacgattagtctgcagatgggcaccaacaagggagccagccaggctgggatgttagcaccgggtaccagaagagacatctacgaccagaagctgacattacagccagtggacaactcaaccatttctctacagatgggtaccaacaaagttgcttcccagaaaggaatgagcgtatatgggcttgggcggcaagtgtatgaccccaagtactgtgccgcccccacagaacctgtcattcacaacggaagccagggcacaggaacaaatgggtcagaaatcagtgatagtgattatcaggcagaataccccgatgagtaccatggcgagtacccagaagactacccccgagagtaccaatatggtgatgaccagggcattgattactagtcagatacaggagcgcagtatttagtccattgtttttatccagtgagacccaagctagccttgagtaattctcgtcttcctaaaacactattatgcttatcttaccttaaaaaaaaatgccttacatacattccttttccttttctgcctcctccctaaatagttgccttttagtgctgtaaccattaaatcctacagcataaccagtaacttgcatatgaagtaaaaagcaatgctgtgagaggacagccaattcttttattgaagatctatgcattcttttttacaaccttacacttaaactggtattttcaaacaataggaaactattttttctttttttacagtttagcgtgtatctggcttgtacatggaagactaaaatgtttgatttgctaaatgtggtctttgccaactaaatctaagatgcagcatttagaacctgacacgtggatgtttttctgcagtactgcttgctgagttctaaataaagtcatgatcagtgtgcatttgtgattatacgtgtactcattctcttccttaagctgacaaggtcttttcagagtggcgcttctaagggcgtgtgtacaaaaatggccgcagacgtgcaggtttgggtggtgtgcctgcagacttcacttgtgccaatgtaatcactgtagactcgctctgtttcccccgactgtatttattgctgcatttctcagcataaacttatcccattgtaatttttataaataattatttttttttgaactatt

SEQ ID NO: 3072 - DNA, 1775 bp, Cricetulus griseus
tggcccctaatgggccatcagccacgggcctggctgcccctcagtcttcatcttcctcccggcctcccacccgagcccatggtgctcccagcccaggagtgctgggccccaaccccctgtccctgggccccctgggcctcgctcaccacagcgggagccccagagagtgtcccacgagcagttccgggctgctctgcagctggtagtagacccaggggacccccgttcctatctagataacttcatcaagattggcgagggctctactggtatcgtgtgcatagccactgtgcgcagctcaggcaaactggtggccgtcaagaagatggacctgcgcaaacagcaaagacgggagctgctcttcaacgaggtggtgatcatgcgggactaccggcatgagaacgtggtggagatgtacaacagctacctggtgggtgacgagctctgggtggtcatggagttcctggagggaggcgccctcaccgatatcgtcacccacaccaggatgaacgaggaacagattgctgctgtgtgcctggcggtgctccaagcgctgtctgtgctccacgcccagggcgtcattcaccgagacatcaagagtgactccatcttgctgacccatgatggccgggtgaagctgtccgacttcgggttctgtgcccaggtgagcaaggaggtgccaaggaggaagtcgttggtgggcactccctactggatggccccagagctgatctcccgcctgccctacgggccagaggtggacatctggtcattgggggtgatggtgatcgagatggtggatggagaacccccctacttcaacgagccacccctcaaagccatgaagatgattcgggacaacttgccaccccgactaaagaacctgcacaaggcatcaccatctctgaaaggcttcctggaccgcctgctggtgcgagacccagcccagcgggctactgctgctgagctcctgaagcacccgtttctcaccaaggcagggccaccggccagcatcgtacccctcatgcgccagcaccggaccagatgagctggagcctggttctaaaccaaagagccctgggccaccctgcccagcacaggccagtagggggccgacccactcccacagccttcgagacactggggaaaccaccattactgtgccgggggcttcctgggacccagctactgaactccggttttggttccatgacttgtaaagcaacaccggaacgtgggagcgagtgaggctcccggagaaggcagctgccccatctggagatctgtatcaggggccactggggcagagatgatgctgtgagaaaggggtgtgtgtaaagagtgtgtgtgtgtgtgtgtatgtgtgtgtggagagtgtgagtgagagagtgtgtgtgagagagagagtgtgtgagtgtatgagagagagagctggtgcccggcccctgaccctgagccattgaagggtcaatcatgaatgtttgaagagtggccttttcccagagccccacgccttctctccatggagagacaggctggggcctccctcccccagcctctgcagcgatgactactgcacctggacagcctccattttctagaagtctatttatattgtcattttataacactagctgtgtcccaacctgggacatgtgatccctgacctgtagatggggtggcccagggacagagccactttgaagaatcaggcccctgtcccccatcccctcaccactccctcaagttagtttcacaattaaaacattttcttg

SEQ ID NO: 3073 - DNA, 1775 bp, Cricetulus griseus
ctgactagagaaccaaggacatttctggaactgttgctttcagggacaaagttttcttaagattaaccttttaaatttattttgaagatcccaaggtctggggaacacgtgactcgtggtttgtttattcaaatagcaagccccgctttggttttcagcggtctttggacttaagcagcatgagtgtgtctccgtggctggcttgtgcggtgctttctgtcttctgtgttttacaagtcagttctctggacacttttgttgcagccgtttacgagcatgctgtgatcctgcctagtgacacttcattaccggtgtctcacagtgaggcactggcactaatgaatcggaatctggatcttctggaaggagcgatcgagtctgcagcaaagcagggcgcacatattattgtgactccagaagatggcatatatggggtgcagtttaccagggatactatctacccatatttggaggatatcccagaccctcaagtgaactggatcccctgtgataatgctaacagatttggctacacccctgtacaggaaagactcagctgcttggccaagaacaattcaatctatgttgtggcaaacatgggggacaagaagccatgcaacactagtgaccctcagtgtcctcctgatgggcgtttccagtacaacactaatgtggtgtttgattccctgggaaaactggttgcacgataccataagcaaaaccttttcatgggcgaagaacaattcaatgcacccacggagcccgagttggtgacgttcaacaccccatttggaaagtttggcatcttcacatgctttgatatactcttccatgatcctgctgtaaccctggtgaccaagttgcaggtggacaccatactgttcccaaccgcttggatggatgttctgcctcatttggcagccattgaattccactcagcgtgggctatgggcatgggggtcaatttccttgcagccaatatacatagtcccttgaggagaatgacaggaagtggcatctatgcccccaactctccaaaggcctttcactatgacaggaaaaccaacgagggaaaacttgttctagcgaagctggagtcccacccaggtcgctccgtggtgaactggacttcttatgccagcagtatagaagtaccctcgacaggaaacgaggaatttcagagtgtcgttttctttgatgagtttacctttgtggagctcaaaggaatctcaggaaatcacactgtttgccagaatgatctctgctgtcatctaagctaccagatgtctgagaagcgagctgatgaagtttatgccctgggggcatttgatgggttgcacaccgtggaaggccagtatcatctgcagatctgtactctgctgaaatgtaaaaccaccgatttacgcacctgtggtagttcagtggacatggcttccaccaggtttgaaatgttctccctcagtggcacgtttggaacccagtatgtcttccccgaggtgttgctgagcgaagtcaagcttgcacctggggagtttcaggtgtcaagtgatgggcgtttgtttagcctgaagccgacatctggacctgtgttaacagtcactctgtttgggagggtgtatgagaaggactgggtgtctggtgcttcctcagacctcataacacactggctgatggtaatagtgatgatcatcacacctattgtgcattacttatgttaataagaatttttacattctctattttatttggactaatttaaagttagtggatgaaga

SEQ ID NO: 3074 - DNA, 1774 bp, Cricetulus griseus
aagatggcggtgcaggtggtgcaagctgtgcaagcggttcatcttgagtctgacgctttcctagtttgtctcaaccacgctctgagcactgaaaaggaggaggtgatgggtctatgtataggggagttgaatgatgacataaggagtgactccaaatttacatacactgggactgaaatgcgcacaggtgcagaaaagatggataccatcagaattgttcatatccattctgtcatcatcttgcgacgttctgacaagagaaaggaccgtgtagaaatttctccagagcagctgtctgcagcctcaacagaggcagaaaggttggctgaactaacaggccgtcccatgagagttgttggctggtatcattcccaccctcatataaccgtttggccttcccatgttgatgttcgtacacaagctatgtaccaaatgatggatcaaggctttgtaggacttatttttcctgtttcatagaagacaagaacacaaagactggtcgggtactctatacttgcttccaatccatacaagcccaaaaaagctcagagtatgagagaattgaaattccaatccatattgtacctcatatcactattgggaaagtatgccttgaatcagcagtagagctgccaaagatcctgtgtcaggaagaacaggatgcatatagaaggattcacagccttacacatctggactcagtaaccaagatccataatggctcggtgtttactaagaatttatgcagtcagatgtcagcagtcagtgggcctctactacagtggttggaggacagattagaacaaaaccagcagcatttgcaggagttgcaacaagaaaaggaagagcttatggaggagctgtcttccctggagtaaagcaagaggacaaaaaatgtgggcagatgaaaataccgggcatacaatttattaaactaaatcaattttgaaaaaagttggaggacccacattatataacttcaagacttactataaagctgcagtaaccaagatactatgatatttgcagaagaatagaagtataaatcaatggaacaggaaagaaattcagaaataaacacaatagtatgcttagctaattttgaaaaagtacaaggtgaccaataagaaaggacagtcattaattatgtgaaaatatattgaccctcataagtcattggggaatacaaattaaaactgcattgtgacattctttatagttataagaattgctaaaggaaaaatagtaaaaaatgccaaatatgttgaggatgcaaactagatttctcatacagtgacaggaatgtaaaatacagctagttgctgggtagaatttggaaatttttataaaattaagcatacacttaacatgacctagcaatcatactatcttggcacaaaaactttttacatattttttcttggcagctttatctgtgatagctgccaaactagaaacaacctaaatgttctgcagtgatgagccttggggcatatagtaaatgaaaaaagtgagtcttaaaaggtcacttactatatggttgcatttctagagcattgttgaaatgtcagaattaatgaaaaggaagaacaggtttccagagtcagggactgggctttgtatagcatacatattgttattatggtgtgacataagagttcatttagtcttaagaaacaattttgtatcttaaatttagtgttgttataaatctgttcctgtgttagcattttatagatttatatacataaaaatcaatgtatataaaatctag

SEQ ID NO: 3075 - DNA, 1774 bp, Cricetulus griseus
tgagaaaactgcaatgtctaggaaacaaagccagaaggattcatcaggattcatttttgatttgcagtccaatactgtactggcccagggaggaacttttgaaaacatgaaagagaagataaacgcagtgcgtgcaatagttcctaataagagcaataatgaaaatcatcctggttctgcagcactttgataattgtgtggacaaaacagtacaagcattcatggaaggtagtgccagtgacgtactcaaagaatggatagtaacaggcaagaaaaagaacaagaagaaaaaaagcaaaccaaaacctagcatcagaagcaaatagcaatgccccggactccagtaagtcagtgcctattcaagaggaacagcctgcatcttcagagaaaggaggcattaatggttaccacgttaacggggctatcaatgatgctgagtctgtggactcactcagtgaaggtttggagacactttcaatagatgccagagaactggaggatcctgagtttgccacaccagatacactggatagaactggctctgtgctggagaatggtgtgtctgacttcgagcccaaatctttgacaacgcactctattccgaatgcccagcagtctcggaatgctgccaaatctctctcaagagccaccacaggagcccaggtttcaaatctgggaatggagaatgctccactgtcttctaccaataaaaggctaggttctaatattgagaagtctgtgaaagaccttcagcgatgcacagtgtctcttgcaagatatcgagttgtagttaaagaagagatggatgcatccattaagaaaatgaaacaagcttttgctgaattgcaaagctgtttaatggatcgagaagtggcattgcttgctgaaatggacaaagtgaaagctgaagcaatggaaattctgctcagccggcagaagaaagcagaagttctgaagaagatgacggacgtggctgtacgcatgtcggaggagcagttgattgaactcagggctgacatcaagcactttgttagtgagcggaaatatgatgaagatctgggaagggtagcccggttcacctgtgatgtggagaccctgaaacagagtattgattcatttggacaagtgtcacatccaaagaacagctattcaaccagatctcgatgcagctccgtggtatctgtgtccttgagcggccctggtgatgtgtctgctgcttcctcttccccctgtgcctctgctcccagccttccaggtgctaacaagagaaactgtgccccaggagagacttcagcagccatgacaaactccagtgacaagccctgccaggctcatcaggaggtgtttccaggcaacaggcgaggaggacaaggctacaggccacaaaaccaaaagaccactgaccccacaaaccaagggcggcatgacagtgcgggtcgttacagaaacagctcgtggtattcatctgggtccaggtatcagagtacttcacctcaggccccaggaaacgctagtgaatggagccaggcttactctgcagggaccaatggaactggagccagcatggcacctagcccacccaagccttcattcaaaaaggggctcccacagcgcaaaccgaggacctctcaggccgcagctgtgaactcttgagggaaatttccagtcggcctctcttctatcccattcagttcaacctagtaactggactttaggaaatgtatacttagatataataacaaaaagaaatttatgcataatacaaaaaaaaaaa

SEQ ID NO: 3076 - DNA, 1774 bp, Cricetulus griseus
  modified_base (1764)..(1764): a, c, t, g, unknown or other
tcacatacgcacacacacaggagagaagccctacgagtgcaacatctgcaaggttcgcttcaccaggcaggacaagctgaaggtgcacatgaggaagcacacgggggagaagccgtacctgtgtcagcagtgtggtgcggccttcgcgcacaactacgacctgaagaaccacatgcgtgtgcacacggggctgcggccgtaccagtgcgacagctgctgcaagaccttcgtgcgctccgatcacctgcacagacacctcaagaaggacggctgcaacggggtcccctcgcgccgtggccgcaagccgcgcgtgcggggtgtgccccccgatgtccccagtggggccaccgcgccctctgggctccccgacaccccgcgcaatggccaggagaagcactttaaggacgaggatgaggatgaggacgaggctggcccggatggcttgggccgcctgaatgtagcaggcagcggtcaccccgcgccccactttttaaagcactttttagatctatttccccttttcctccttaaagacagtttatatagagatatagagagagagatatatatataaaatattcttttctcagaggagccggcgacagtttgggggaatgtagccaagatcagagggaaccccagggactcaggcagggacaggggagggggcaagagagggcccacagcttaaatatcacaaaacagcaataaaaccccaggattttagtaaacacgaatgcagaacatattttctctgttggagaccacaggcccgggcagccgctgtcccctccggctcgccagtttgcttcccagctcagggatgtccccgagagagggctggtttccggccagccagaccctgctacccctgcctggccccctccccctgtggtggtcccctcctaggcaccccctctttttactcaaaggcactgactgtaacccagggactggctcctgaccacccccaactccggcttgccccaaaaggcccggtgtgaccgagccacaggccacggacaggggccagggttgggggacatcgctgcaataacacgtcatcctggccagtggccaccagacttggggccagtggagcccttggggactgtggtgggggtgccccatagcccgccagcgacagcgcaacaccccccgggaattgcactaaccccttgcccctagctctgcgctcagcttctgcccacccacacccaccttgccttaaccgtcagcccgtcctggggggccgcagccaccgcatgggcccagtgctgggaccaccccccaccccatatactgcaatcacatactgtatatagaatgtggatcgatttttacaaattttattctttaaattaaggccgtgataaaagttgccaaagagaattgtggaattcactagaggtttgagcggacgagggtgctgtagaagggtttttatttgcttgtttgagggtttagtgtgtgtgtgtgtgtgtgtgtgtgtgtgtgtgtgtgtggttttgtttccctgttttgtttttcctttttgtgtgtctgagtgtgtgagacagttgagagagggcccagcctggggggttccggggaccccaggactggggagggcatgtggcctgcagctgtccccagcctgtgacctgagcataggccacccctgccgagtagttgctgctctttgcctttctacccctaccggcctttcgagattaagaaaaaataaaaaaaaaggcaaaaaaataataaaaatgaaaaaaaaanaaaaaaaaaa

SEQ ID NO: 3077 - DNA, 1774 bp, Cricetulus griseus
ggttttggtatgaacaggattcggattcacgtcttgccaacgaatcgggggaggatcaccccagtgcccagatcgcaggagcccctttcttgttcgttcactcaccgcccatgctctcaaccgcgtctggaggggcaggaattttgcatcaagcatatccttgaagacaagaatgcacccttcaaacaatgtagctatatatcgacgaagaatggaaaacggtgtcccagtgctgcccccaagcccgagaagaaagatggggtatctttctgtgccgaacatgctcgaaggaatgccctagcacttcatgctcaaatgaagaagaacaatccaggccctatgggtgaaaccctcttatgccagttgagctcatatgactaaaacagagctgggctctcagaccccagagagcagtcgaagcgaagctagccggatactggatgaagacagctggagtgatggggaccaggaacccattactgtggatcagacatggagaggtgaccctgacagtgaagctgatagcatagacagtgatcaagaagatcccctaaaacatgctggtgtctacacagctgaagaagtggctcttattatgagagaaaagctaattcgtttgcagtctttgtacattgatcagtttaaacgactacagcacctactcaaagagaagaagcgccgttacttgcacaatcgaaaagtggaacatgaagctttaggtagtagtctcttgactggcccagagggacttttagccaaagaaagagagaatttaaagcgactaaaatgtcttaggcgataccgtcaacgctatggagtagaagccttactgcacaggcagctgaaggaacgcagaatgctggccacagatggggctgctcaacaggctcatacaactcgttccagtcagaggtgcttagcttttgtggatgatgttcgttgctcgaatcagtctcttccaatgaccagacactgccttacccatatttgccaggacacaaatcaggttctcttcaaatgctgccaggggtctgaagaggtaccctgcaacaaacctgttcctgtaagcctttctgaggacccctgctgtccactgcatttccagttgcctcctcagatgtataagcccgagcaggtactgtctgtgccagacgatctggaagccggccccatggatctgtacttgagtgctgccgagcttcagcccactgagagtttaccactggagttcagtgatgacttggacgttgtgggtgatggtatgccgtgccctccgtcgcccttgctctttgatccttcactaactcttgaagatcattccgacaaagaaattgctggaggcctaggccagatgcaggtgactggggatgggtgcagatcccaggtacctcgaaatttagagaaagcctgtgcatcattccctcagcgtggattgactactgcaaatggaaaaccagaacccacttctatcagttgacagttccttttggaaattgtttgactttggtggatctgaactttccattcttcaaacaagtatatctctgatcatctctcactaagcagggataacccagactacattgtttttctttggggctatagagtgctataagcaaacataaaccaaatttatgaggaatgaatctttagtatttaagttacaggattctttgcaaggaagagagtgtggtagtccctgcctttgggatggaataaatattggagactatgcctgggaaagagacatttttgtgatgtgatttcctaagcc

SEQ ID NO: 3078 - DNA, 1773 bp, Cricetulus griseus
  modified_base (1161)..(1161): a, c, t, g, unknown or other
ctggtttctggagcgaggccacacagacatcaccgtgtttgtaccatcttggaggaaagaacagcctcggccagatgtgcccatcacagaccagcacattcttcgggaactagagaaaaagaagatcctggtgttcacgccatccaggcgtgtaggtggcaagcgtgtggtgtgctatgatgaccgcttcattgtgaagctggcctatgaatccgatggggtggtagtctccaatgacacataccgggacctccaaggcgagaggcaggagtggaagcgattcattgaggagcgactgctcatgtactctttcgtcaatgacaagttcatgccccctgatgaccctttgggacggcatgggcctagcctggacaacttccttcgtaagaagtcactgccttctgaacacaggagcagccatgtccctatgggaggaagtgtacctatggaatcaagtgccgacctcttcaccccccaggaccccagttcaaggacaaaagtggcccgaggtcttcccctgcctctcagcccagctctgtgtctccagaagctgagcaaggcagcctggatgggaaaaactgggggccagatcatccccaggcccccaccaagaaggctcaacacagacttttactgcagctggtagaagcctccctgttagtgggggcagctttgggcccacagagtggttcccacacaccgtggactcactcccatacacttcccaggagtgccttgattcaggcattggctccctggagagccagatgtcagaattatggggggtgagaggaggcagccctggggagtcgggccctgctcggggcccttatgctagttatcacacctatgggtctgaactcccggcagcacctgcctatactccctttagacagcccatgggtgcaggccacttcagtgtcccgggagactatgtgccccagcctcccacctttccagccagagagtactggtctgagccatatcctttgccctcacctaccccagtcctgcaagagccccagaggcccagcccaggggctagcagaggcccctgggacagggtgaacaaaagggccaaagaaagggctgatgtgtacaccaagttgtgtggtgtctttcacccccacctggtagaagctgtgatggggcgcttccgcngctcctcggacccccagccagctggccgctgagatctttcttataaatcccagcacctcagtgagtaagccagcaggtggctcaaggggctatcaggcatcacagaccagtcctcagcccctggcccaccctggaagctggacagagggatgagtagagcaggcaagagaatcctcaaaccaaagataccataggattggttctggccctgtggcacctctatctatcccacacgggtcagaagcgatcaccctgttgatacacattgtatctctgtcatttaaggagacgttgccggtcaggccgtccatccgtggctgatgcccaaaccctctttttctcagagggcagggagggaggcctgggggagcagaggcctgaactagaccccaccctccaccctgtccctgggacgccggcaccaccggctagttgggcaccatgtgcctgccctccgagacccctctcaagccaatgcggcttcatccctgttcacagggcatgaagcttcatgtcagtaagcaagatgcttcttataacccacccgcccgctctgtccacctaccccgtcaccccaaccaggcctccaatcgcccactcgttcccacacct

SEQ ID NO: 3079 - DNA, 1773 bp, Cricetulus griseus
taaggatcatgtctgcgagtcaggattctcgatccagagacaatggccccgacgggatggagcctgaaggcgtcatcgagagtaactggaatgagattgtggatagctttgatgacatgaatctctcagaatccctcctccgtggtatttatgcctatggttttgagaagccctctgccatccagcagcgagccattcttccttgtatcaagggttatgatgtgattgctcaagcccagtctgggactgggaaaacagctacatttgccatatcaattctgcagcagattgagttagatcttaaggccactcaggctttggttctggcccccactcgtgagttggctcagcagattcaaaaggtggtcatggcattaggagactacatgggtgcctcttgtcatgcctgtattggaggcactaatgtgcgtgctgaggtgcagaagttgcagatggaagctccccatatcatcgtgggcacccctggccgggtgtttgatatgcttaaccggagatacctgtcccccaaatacatcaagatgtttgtactggatgaagcagatgaaatgttaagccgtgggttcaaggaccagatatatgatatattccaaaagctcaacagtaacacacaggtagttttgttgtctgctacaatgccctcagatgtccttgaggtgaccaagaagttcatgagagaccccattcggattcttgtcaagaaagaagagttgaccctggagggtatccgtcaattctacatcaatgtggaaagagaggagtggaagcttgacacattgtgtgacttgtatgaaaccctgactatcacccaagcagtaatctttatcaataccagaaggaaggtggattggctcactgaaaagatgcatgcccgggatttcactgtttccgccatgcatggagatatggaccaaaaggaacgagatgtgatcatgagggagttccggtctggttctagcagagtattaattaccactgacctgttggccagaggcattgatgtgcagcaggtctccttagtcatcaattacgaccttcccaccaacagggaaaactacatccacagaattggtcgtggtggtcgctttggccgtaaaggtgtggctatcaatatggtgacagaagaagacaagaggactcttcgagacattgagacattctacaacacctccattgaagagatgcccctcaatgttgctgacctcatttgaggggctgtcctgttacctggctctagccagggttcagtcctggggggctgaggaacagctggaggggggagggaagggagccaagggatggacatcttgtttttgttttggtttttttttttgtttttctctctctctctctttgaataaatgtcactttttgaggcaaaaagaaggaaccgtgaacattatagatacccttttctttggggtaggttctgccccaggcgccgtctccttcccccaacccaaacactaatccattcccctaacctgattttctaaagactttcctactaccccagccaaatctccaaaagtgaatcaaggggctaaaacatgtctggcctcatttgctggaccaaatctacagggagagtccctgcatgaagttgtccagggaattgtccccaggtgaggggagcaggggagagaaaatggtagccatttttacattgttttgtatagtatttattgattcaggaaacaaacacaaaattctgaataaaattacttggaaactgacaaaaaaaaaaaaaaaaaa

SEQ ID NO: 3080 - DNA, 1772 bp, Cricetulus griseus
cggatgcgcgcctttggcatgatcccagtgctgcctgcctccgcagggcatgtccccaaagccatcaccagggtgttcccacaggtgaatgtcttccagttgggcagctggggacacttcaattgctcctactcctgctccttccttctggccccaggagatcctgtgtttcccctcatcgggagcctcttcctaagagagctgatcaaagagtttggcacagatcatatctatggggctgacaccttcaacgagatgcagcctatctcctcggatccctccttcctcaccgcagccactgcagccgtctatgaggccatgatttcggtggaccctgacgctatatggctgctccaaggctggcttttccagcaccagcctcagttctggggccctgctcaggtcaaggctgtactgcaagctgtgccccgtggtcgtctcctggttctggacctgtttgctgagagtcatcccgtttacatgcaaacagcctccttctacggccagcccttcatctggtgcatgcttcacaactttgggggcaaccacggtctgtttggagccctggaggctgtgaaccaaggccccagggcagcccgcatcttccccaactccaccatggtcggcactggcatagcccctgagggaatcggccagaatgaaatggtctatgctctcatggctgagctgggctggcgcaaggaccctgtgccagatttggaggtctgggtgagccgcttcgccagccaccgatacgggatgtcccatccagatgcagaggcagcctggagactgctgctcaggagtgtctacaactgccctggggaaacgtacaatgggcacaaccgaagcccgctggtcaagcggccatccctacagataaataccatagtctggtacaaccgatcagatgtatttgaggcttggcgactgctgttaacagctgctccaaacctgactaccagcaaagccttccgctatgacctgctggatgtcacccgccaatcgctgcaggagctggtcagtttgttctatgaggaggcaaggatcgccttcatgaaagaggagcttgatctcctgctcagggctggaggcattatcacccgtaaactcctacctgctctggatgagctgctggcgagcgacagccgcttcttgctgggcacctggttgaatcaggcccgagcaatggctgtgagtgaagatgaggcccagttttatgaactgaacagcctctaccagctgaccctgtgggggcctgagggtaacattatggactatgccaataagcagctggcaggactggtggctgattactaccagccacgctggggtctcttcatggaggccctggctcacagcctggccagaggtgtccccttccgacagcatgagtttgagaagaatgttttcccactggagctggccttcatcatcaacaagaagaggtatcctagtcatccccaaggggacactgtggacctatccaagaagctcttcctcaaatatcacccccaggcaggctctttgtgacagatcagccatctggggacctgctggaacaggtcttcaaacctgaaaaagcacaggatggtccctacgcctgggggaaggagccagagtcagccagtgagtgacgcagatggcctggagggaaatgagctgctctattcctccactccagatctcggggttaaaagtactaattttctgttagcaataaactgctgaatctattaaattaaaaaaaaaaaaaaaaaaaaaaaaaaaaa

SEQ ID NO: 3081 - DNA, 1772 bp, Cricetulus griseus
agctcccgttgcggcggcacccttagcagccctggcggacgaaggagcgatggcagcggccgatatagctcgccaggtgggcgaaggttgccgaactgtccccctggctggacatgtggggtttgacagcttgcctgaccagctggtgaataagtcagtcagccagggcttctgcttcaacatcctgtgcgtgggggagacaggtttgggcaagtccaccctcatggataccctgttcaacaccaagttcgagggggagccagccacccacacacagccaggtgttcaactccgatctaatacctatgacctccaggagagcaacgtggggcttaagctcacgattgtgagcactgtgggttttggggaccagatcaacaaggaggacagctataaacccatcgtggaattcatagatgctcagtttgaggcctatctgcaggaggagctgaagatccggagagtactgcacacctaccacgactcccgaatccatgtctgcttgtacttcattgcccccacaggacattcacttaagtctctggacctagtaaccatgaagaagctcgacagtaaggtgaatatcatccccatcattgccaaatcagatgccatttctaagagtgagctgacaaagttcaagatcaaaatcaccagtgaacttgtgagcaatggagtccagatctatcagttccccaccgatgatgagtcagtggccgagatcaatggaaccatgaacgcccacctaccatttgctgttgttggcagcacagaagaagtgaagattggcaacaagatgatgagggcacggcagtatccttggggaactgtgcaggttgaaaatgaggcccactgcgactttgtgaaactgcgggagatgctgattcgggtgaacatggaggatctgcgggagcagacccacacccggcactatgaactgtaccgccgctgcaagctggaggagatgggcttcaaggacaccgacccggacagcaaaccattcagtttacaggagacctatgaggcaaaaagaaatgagtttcttggggagctccagaaaaaagaagaggagatgagacagatgtttgtccagagagtcaaagagaaagaagccgagctcaaggaggcagaaaaagagctgcatgagaagtttgaccgtctgaagaaactgcaccaggaagagaagaagaagctggaggataagaagaaatccctagacgatgaagtgaatgcattcaaacagagaaagacagcggctgagctgctccagtctcagggttctcaggctgggggctcgcagactctgaaaagagacaaagagaagaagaattttttttaaccttttcttcagcagctgtactaagtctaagggagaagactgccattatagaagagttagttagggctccatattgtctcaagcaagaaaccaaccagttcccctcccctgcaactgtgcacattaaaccacactcaagtgtacgtgtgtccctgtgtccagacaagaagctctcttctgacttacatggtgttttacatggaagtgtcttgtcctaaactcacaaggcaggaaaagaatcatcagagctggaaatggaccaaatgtaacctcagagaaacgacagcaggaccactcacccaggtgttaagtgactctggggcaggagatctcagctgtgggtgtggaagcgctgttcacgaggttttgcgttttattgttttttttaaaacaattctctgtttcaatggtttgactgtcttcagccactatt

SEQ ID NO: 3082 - DNA, 1772 bp, Cricetulus griseus
  modified_base (153)..(153): a, c, t, g, unknown or other
  modified_base (211)..(211): a, c, t, g, unknown or other
tccaggtccaggctatgcacccttgcgagaggaggcggtgaggctgttcctggcactgcaggcactggagggggcgcggcgccccgggcccctgatgcagggtgtgctccagacctgccgggacctgcctgcactccaggacgaactttttcngcagctggctaagcagacctctggtcctgccggtcccctggttccctgctactcaagntccagcaaccctgcggtactggcagctgctcacctgtatgagctgcaccttccggcctgggggagctgtccgagggcacctccgaatatgcgcgctttcatcaggaaagctctgggccggactcggggccgagagctggtgccttcactagcggagatttcagcgctgagcagacggcaggagctcttgtgcacggtgcactgtcctggagctggagcgtgtcctgtggccatcgactcccacactacagcgggagaggtggctcgagagttggtagggaggctgggcttggctcggagccggaatgcattcgccttgtatgagcagcgaggggcccaggagcgagccctggctgggggtaccctcgtggccgatgtgctcaccaggtttgagaatttgacctcagaggaagccggactggaggactcgcccgattccgggtggagactgtgccttcgtcttcacggacctctgcacccagaagggctatccccagatggtcacgaattgcctttcctctttgagcaggctcatgctctgctgctgcgcggccgaccgcccccgccggatgacacgctgcgcgccctggcggcgctgcgcctgcagagtttacaccaggacttttccccgcgggggcccctgccacgcctggaccgcctgctgccgccccccactccgccgcgcgaacaatccctgcgccctacccccaggccacaaccctccgcagccctgctggccggggcactctggagcccgggcctggctaaaaggcgggcggagcgtgcccggggcggctgtaccggttgctcgacgggaagcactgcccaggtgggaggaggcggcgccagcaggacgactgcggtactgggcagctggaagaggctacggggcatgggccaagctgaggccatggctgcctacctggctctggcggcgcagtgtccggggttcggcgctgctcggtatgacgttctggagctgagcacggagcctggtggaggtgctccacagaagctatgcttgggtctgggagcaaaggccatgtccctctcgaggcctggtgagacagaacccatccacagtgtcagctatggtcatgtggccgcctgccagctaataggcccccacaccttagcactgagggtgggtgacagccagctcctcctgcagagtccccaggtggaagagatcatgcagctggtgaatgcctacttggccaacccctccccggagaggccctgcacgcagcagctctgctcctccatgccaagacctgccagacaccacccctcccagccagcaccaaggcctggaagagccccagggacagtctggctgcctggggcagctgcaggactaagcctgccaagaggtcacgacttttcttttgcctatagcctgactgagctgggagtgatctgagatttaaggaaaccatggaccctttttggccctgcagggacagggtacacccacacttaagggctgcaatgtgtggacagttttctagtttgtttcttaatttatttgtagaagaaaaaaaagtccttatttacacaaa

SEQ ID NO: 3083 - DNA, 1772 bp, Cricetulus griseus
tacaactcatccaggccttctctgactcagaggaagagcatgacagtgcctgggatggtcgccttggagatagatacaacccacctgtggatgcagcccctgacactggggagctggaatacaatgagatcaagacacaggtggaattggccacagggcggctaggacttaggaagactgcccaggagcacagctttcctcgaatgttacaccagagagaacggggcctctgccaccggggaagcttctcccttggagaacagtctcgagtgatgtctcacttcttgcccaatgacctaagcttcactgatacctactctcagaaggctttctgcggcatctacagcaaagatggtcaaatcttcatgtctgcttgccaagatcagacaatccgactgtacgactgtcggtatggccgcttccataaattcaaaagcatcaaggcccgggatgtaggctggagtgtcttggatgtggccttcactcctgatggaaaccacttcctgtactccagctggtctgattacattcatatctgcaatatctatggggaaggagacacacacactgccctggatctaaggccagaagagcgtcgctttgctgtcttctccatcgctgtctcctcagatgggcgagaagtactaggaggagccaatgatggctgcctgtatgtctttgaccgagaacaaaaccggcgtactcttcagattgagtctcacgaggatgacgtgaatgcagtggcgtttgctgacataagctcccaaatcctgttctctgggggagacgatgccatctgcaaagtgtgggaccgacgcaccatgagagaggatgaccccaagcctgtgggtgcactggctggacaccaggatggcatcacctttattgacagcaagggtgatgcccggtatctcatctccaactccaaagaccagaccattaaactttgggatatcagacgcttttccagccgagaaggcatggaagcatcacgccaggctgccacacagcaaaactgggactatcggtggcaacaggtacccaagaaagcctggaagaagctgaagctcccaggagacagctccttgatgacctaccgaggccatggagtgctgcacactctcatccgctgccgattctccccagcccacagcaccggccagcagttcatctacagtggctgctctactggcaaagtagttgtatatgaccttctaagtggccacattgtgaagaagctgaccaaccacaaggcctgtgtgcgtgacgtcagttggcacccctttgaagaaaagattgtcagcagttcgtgggatgggaacctgcgtctttggcagtaccgccaggctgagtacttccaggatgacatgccagagtctgagaaatgtcccctgtgctcccacttcggtgccctgcccatctgtggccttttcctcacctcagtagatgtgaccaccagctctgtagagggtgaactctcaccatattctactgggcaaagtgacttcctcacgcattcacacccagtctgcttggatttctatctctagccagagtgtggcagcacatccgttatctggggtgcagcttctgccaacaagacaattgtcctgagtgtttttaatcatgttccgatgttaggtgttggctcctagtgtagatccctgagctctgaagagacccattagcaatgccctttgcccaggtcttcacactgagggttagattggccaatcagggctaagtatactggcctttctccctgagatctt

SEQ ID NO: 3084 - DNA, 1771 bp, Cricetulus griseus
  modified_base (325)..(325): a, c, t, g, unknown or other
cctgatgcaggcctgtctccaggctcccagggtgactctaaatcagcctttaagcgactgttcctacacaaagtcaaggataagaagcccagcctggagggcagcgtggaggaggcagagggcagcggagggcaggtggcacaggaagcccccaccaagaagagtctcgaagcactttctagccagcagcaccgccatgccgcaggcgaaaagcccctgaaagggaaaagaaccgaaaccgcaaggtcggccagatcacagtgtcagagaagtggcgtgagtcagtgttccgaaagatcaccaacgccaatgagctcaaatttcncgatgagttcctgctcaataaggtgactggctcatggacaaggctctgctgtgcagtgtgtgcaagatgacctgccacaaaaaatgtgtgcacaagattcagagctactgctcctacacaggaaggaggaagagtgatccgggtgccgagccaggccactttggtgtgtgtgtggacagtctaaccagtgacaaggcttctgtgcccatcgtgctggagaagcttctagaacatgtagagatgcacggcttgtataccgagggcctctaccgcaaatcaggtgctgccaaccggacacgggaactacggcaggcactgcagacagatcctgctgcagtcaagctggaagacttccccatccatgctatcaccggggtcctgaagcagtggctacgggagctgcccgagcccctcatgacctttgcccagtatggagacttcctcagggctgttgagcttccggagaagcaggaacagctagttgccatctatgcagtcctggaccacctgcctgaggccaaccacacctctctggagaggctcatcttccaccttgtcaaggtagccctacttgaggatgtgaaccgcatgtcaccaggagctctggccatcatcttcgcaccctgcctgctacgctgccctgacaactcagaccccctgaccagcatgaaggatgtactgaagattaccacgtgtgtggagatgctcatcaaagaacagatgaggaagtacaagatgaagatggaggagatcaaccagctggaggcagctgagagcattgcattccgcaggctctccctgttgcggcaaaatgctccatggcctctcaaactggggttttcgtctccctatgagggggtccgggccaaaatccccaggagctggaggcgctccctgaggaggctgcaggcggcgacgaggacagagagaaggagatgctcatggaacggatccagtccatcaaggaagaaaaggaggacaagagtgaagaccacccggaggacccccatcatgcccatggccaacatcaagctccccccgggcctgtccttgcacctgaccagctgggcacctgctctccgggaggccactgttcccgtgaggcgccgagagccgcccgcccgccgacaggaccaggtacattctgtatacatcgcccccggggctgaattgatgtcacagggcaccctggaatccctggaccacgatgtcagacttcctggggccaaacgcaggtactcggacccccctacctactgcctgccccccaactccagccaggccaatggctgacaaccatgacagacagtctgcatgtcctagaaccctagatctgggtgccccagctgcggagctggctttccgctctctgagaaggatccagaatgaaaagcgcccagaaggatgaggcgggcactggctctgtgtggtgtggaggctgggagc

SEQ ID NO: 3085 - DNA, 1771 bp, Cricetulus griseus
gcctacggaagcccgagattgggtggcgttgcaaggagttgcgccttagcatcctagcggttggactccaatgtggaggtctgaggcctgacgcgggttgagcgggtctgggagacggcccttgggcgaagcggctcggcgagactaaccaaaaggatggattttacagaggcttactcaagcacatgctctgcagttggaattgctgccagagaaggcaatgttaaaaattttaaggaaactcctcaaaaaaaggtcgaagtgtggatgttgctgataacaggggatggatgccaattcatgaagcagcttatcacaactccgtagaatgtttgcagatgttaattcagacagatccatctgaaaaatacattaagacaaagacttttgagggcttctgtgctttacatcttgcagtgagtcaaggacattggaaaatcacacagattcttttggaagctggagcagatcctaatgcaactactttagaaaacaccaccccattgtttttagctgttgaaagtggacagatagatgtgctgaagctgttgcttcaacatggagctaaaatcactggcttccattctatgtgtggatggaatgctttgcataaggcttctttccagggaaatgctgagattatagaacttcttcttaagcatggaacagacctcgaatgccaggatgacttcggaatcacacccttgtttgtagctgctcagtatgggaagctcaagagcttggacattcttatttcatctggtgcaaatatcaattgtcaagccttggacaaagctactcccttgtttattgctgcacaagagggtcatataaaatgtgtggaacttttgctgtccagtggggcagatcctgatctttactgtaatgaagacaattggcagttgcctattcatgccgctgcacaaatgggccatgcaaagatcttggacttgttaataccacttactaatcgcacttgtgacactggaccagacaaagtgagccctgtttactcagcagtgtttggaggacgggaagaatgcctggaaatattactgcagaatggctatgccccagatgcacagatgtgcttggtctttgggttcaattcccctttgtgtatggctttacaaaaggactgtgactgctttggaattgtgaatattcttttgaagtatggagcccagttaaatgaacttcacttggcatactgcctgaagtatgagaagttttccatgttttgctactttttgaagaaagtttgcttgtcggctccttggaatcatatatctgaatttataacttatgctgttaaagcacaaaaagaatataaaaagtggttgccacatctcctgcttgctggatttgacccattgactctgctgtgcagcagctcttgggttgactcagtcagtgatgacatccttatatttactttggaattttctaattggaagagacttccaccagctgttgaaaagattatctctgctcgtgcaaactcttcttgggctcttccgcagcatatggcctgtgttccatgcctggcccatctctgtcgtttggaaattcggaccagtttaaaagcagaacgtcttcgttctgacaatttcattcgtcagttgccacttcccagaagtctgcagagctatttgctctatgatgaggttttgaagatgaatgaaattccagaaccagcagctattcatgatggagaaattagtgaggccacctgacagctcatttttcaatgctgtttagtcacaaaaga

SEQ ID NO: 3086 - DNA, 1771 bp, Cricetulus griseus
tgaggatgatgatgatgaagatgatggaagcagcagcagcagcagcatccggagcagaagagggaggatgaggaggaggaggaggaggaagaagaggggtcttcagaaagcagcagcagcagcagcagcagtgatgaggaagggctatcaggaggcgcagcctccgctcccacactcgacgaagacggccaccacctccccacccccaccccaccacctccttcttttcgagccaaggagtgaatttgagcagatgaccatcctatatgacatttggaactcaggcctggacttggaagacatgagctatttgcggctcacgtatgagcggctattgcagcagaccagtggggctgactggcttaatgatactcactgggtccatcacacaatcaccaacctaagcactccaaagcgtaagcgacggccccaagatgggccccgggagcatcagacaggctctgcacgcagtgaaggttactaccccatcagcaagaaggagaaggacaagtacctggatgtgtgccctgtctcagcccgacagctggaaggcgtggacactcaggggacgtaatcgggtactttctgagcgacgatcagagcagcggcggttactgagcgccattggcacctcagccatcatggatagtgatctgctaaagctaaaccagctcaagttccggaagaagaaactccgatttggccggagccgaatccatgagtggggtctgtttgccatggaacccatcgcagctgatgagatggtgatagaatatgttggccagaacatccgccagatggtagctgacatgcgggagaagcgctacgttcaggagggcattggcagcagctaccttttccgggtggaccacgataccatcattgatgccaccaagtgcggcaacctggccaggttcatcaaccactgctgcacgcccaactgctacgctaaggtgatcaccatcgagtctcagaagaagattgtgatctactccaagcagcccattggcgtggatgaggagatcacctacgactacaagttcccactcgaggacaacaagatcccgtgtctgtgtggcactgaaagctgccgtggctccctcaactgaggtggggcaggactggtgccctcacccctatttattcccccttggtcgccctaagctcccagcacccccagcccttagtgggctcagcagggcccacatgtccccatctccacatgtgggataggggccctgagcccagcaagggagcctcagtcctttgaggtaacttttgactcccctgtaccccacgcccaaccaccctctttatttttttttttttctttgcggagaagaagctgtaaatgttttgtagctgccagcagctgtttcctgtggaaacctggggtaccagcctgtatagatgctattcgttgggggctaaatagccccctctgcttcatgttagtggggacttcccccttcagctctatgtgccacccctccccagtttaggggtctctggggcagtggccatgttctccccctgggggggccttttggcccctagtcctgggaactctgtgcctggaaccctgcctcatctgttcctgccagacccctgtgggtcacccctcccaccctggtgtctcagggctctggctcagtgggccaggatggtggtgggcaggcccttcttgttgggctggattgtacataatgttaatagtgaaaacccaacgccacatttttataattgtgattaaactttattgtaacaaaaa

SEQ ID NO: 3087 - DNA, 1771 bp, Cricetulus griseus
tccatccaaattcagtcttcactacctcaggaagatagccacctatgtgcgggactcgggccacagaaggcgcctacccgcgcctatactggtctacatggagacacattgcctgtggaaagctgcagctggccaaggagctggcatggctttactttgaaatatttgataatctttcggtgaggacacccgaggagcgcctggaatggtctgaaattttgtccaactgactgaggatgaagttgaaaagcaaagaaatcagctttcagtggacaccttgcagtttctgctcttcttgtacatccagcagttaaacaagatctcactgcggacgtccttgattggggaagagtggcccagtcccagaagcagaccacagtctcctagcctcaccgaaaggcccagttgtcacaacaagaattggaatgactacagtcaccaggcttttgtctgtgaccatctgttggatctccttgagctgcttctagagccagagcaacttactgcgtccttccactcaacgcacagtagtgtagtctctcgagaagctgtcctggcgctcagcttcctcatcgaaggcactgtaagcagaaccaggaaggtctatccccttcatgaacttgcaatgtggcaaccgctgcatgcagacagtggcttttcgaagatctccaagacattctctttctacaagctggaagcctggttgcgaacctgtttgactgcaaatccatttggcccatctgcttgcctcaagtctggaaagaaattggcctgggctcaccaagttgaaggtgcaaccaaaagagctaagattgcttgcaatactcatgtggcccctcagatgcaccgcatggtggtgatgagccaggtttacaagcagacgctggccaagagctcagacactctagtgggagcacacatcagggttcatcgctgcaatgagtctttcatatatctgctctcccccttgcgatccgtgacaattgaaaaatgcaggaataccacgtttgtgttgggtcctgtggagacggcccttcacctccaagattgtgaaaatctaaaaatcattgctgtttgccaccgattgtccatctcttctacaacagactgcacctttcacgttatgacaccttcacgcccacttattctctctgggaaccagagtgtaacttttgcaccatttcatacccattacccaatgctggaggaccatatggccaggactggccttgctacagtacctaactactgggataacccaatggttgtgtgcagagaaagcagtgacacaagagtcttccggctcttgccaccttgtgaattctacatatttatcattccctttgagatggaaggggacacagcagagataccagggggtctcccctctgcttaccagaaagtgctggctcaaagagagcggaagatacagatctggcagaaaactgtgaaggaggctcggctgacaaaggagcagaggaagcagttccaggtcctcgtagagaacaagttctatgaatggttgatcaatacaggacatcggcaacagctggacagcctcgttccacacgcagcagcttccaaacaagagcctggataggacccgtgcaaaaccactgggctctggaaacatgaggaatagaggaggacggtgcccactgaagactgctttggaaaggcacccttgctgcctgtgagacctcaggcctttccacctgtttaactccttttgttggttcctgttcttcactcacttaggttgaactttagc

SEQ ID NO: 3088 - DNA, 1771 bp, Cricetulus griseus
ggagtcactctcttcatggatgtgcttcccgtctgcactttgtcaaggtctcccaagtccgtatgcagggcttctcttactggtctttgccaagtatcagcatttgcccttcatccagatcatctctacaaaatccatccctactggcttctacgggtactgggggaacaaagggggagtcaacatctgcttgaagctctatggctactatgtgagcatcatcaactgccacctgcctccccatatgtccaacaatgatcagcggctggaacactttgaccgaatcctggagagtcagacttttgaaggatctgatgtccccaacatcctggaccatgacctcatactgtggtttggagacatgaactttcgcattgaggactttgggttgctctttgttcaggagtgtataacaaagcagtactaccaagagctgtgggagaaggatcagctccgcattgccaagagacgtgacccactgctgagggagttccaggaaggtccgttgctcttcccacccacctacaagtttgataggcactccaacaactatgataccagtgaagaaaaaaacgaaagcctgcatggactgaccgcatcctgtggaggctgaagcggcagccacagaccagccccttggtctccaggctgccaagctcctacttctcgctgacactgaagagctacgtcagccacatgacctacagcatcagtgaccataagcctgtcactgggaccttcaacttggagctgaacccacggatgtctgtcccactgatcaccatgatgcctgaatgcctgtggaccatggagaacgacatgttgatcagctatacctccaccccagagttcctcagcagcccctgggactggattggactatacaaggtagggatgcgccacattaatgactatgtgtcctatgcctgggttggcgacaaccaagtctcctatggcaaccacccacatcaggtatacatcaacatcagtaatgtccctgaaactgaggatcaatttcttctctgttattatagcaacaatctccactctgtggtagggataagtcaacccttcaagatcccgcttcgcttctttttgagggatgacacactgtctgatccacagatctgagcccagatgggagtcaatgaattcagggcggaggctagagctggaagccagatctgcttcagcactgccaggagcactgggtctggcccggcccctaaggaggcagctgagtatcctccagctcccaacctcccaggggagctcagccagactcctctgctctctccaggccagatgaactggccatttaatacaggtttttgttactgaggtgtgattgaaacaaagtagtgtgtcaatggtgaagacttggggcattccactgcatatggaaaagaccactagcttgcatgccattttctttattctcccttccctcctcccccaaacactccctctcacacccaagtagttgtgccaggcacatgccccatttggcacaggcctgcattcctttcacgccgtcctgggcctcgagctgcctgggagagggagatgttcacatttgtacaggccccataaattgggtggcataagccaacctgggttccagaaatcttggtgtctcatagttgtccccatggggatgagcggaggctctgagatccctgtctgcagttgaagaactatgacaaagtagatggtatacctacctctaccctataacgtggactctgatcaggaagttctagggcctaag

SEQ ID NO: 3089 - DNA, 1770 bp, Cricetulus griseus
gcagcagcagccgcagcagcagcagcagcggcggcggtgacggcaatagcggggcgctaggttcatctcccagcaccatgtcccagctgtacacaagactgaagtgaggggccaggtgtgggccctgcccagggcagcatgaccaagcctcggctcttccgtctgtggctggttctggggtcggctctcatgattcttttgatcattgtatattgggacaacgtgggcactgcccacttctatctgcacacctccctatccaggccacacatcctggagccgcttcccaccccggggttgggcggtgagaacgtgttcacttctgatgtggatgagtttttggacacactacttagttccgatgcgaagcagaatgacctttccagaagaaaaactgagcagcccccggtgctcgcccccagcaagccggtcctgagccacatggaggagaacgtgagaggctacgactggtccacccatgacgcccagcagaacccagaccgggaccggcagcaggcggagagaaggagcctcctgagagacttctgtgccaacgctagcctggcattccccacgaaggaccgtacttttgatgacatccccaactatgaactcaaccacctgatcgtggacgatcgccacggggtcatctactgctacgtgcccaaggtagcctgtaccaactggaagcgagtgatgattgtgttgagcgagagcctgctggaccggggcagcccctaccgagaccccctggacatcccccgggagcacgtgcacaactccagcacacacctgactttcaacaagttctggcgccgctacgggaagttctcgcgtcacctcatgaaggtcaagctaaagaagtacaccaagttcctgttcgtgcgggaccccttcgtgcgcctcatatcagccttccgcagcaagttcgaactggagaacgaggagttctaccgcaagttcgcggtgcccatgctccggctgtatgccaaccacaccagcctgcccgcctcggtgagcgaggccttcagcgctggtctcaaggtctccttcgccaacttcatccagtacctgttggacccacacaccgagaagctggcacccttcaacgagcactggcgacaggtgtaccgcctctgccacccgtgccagatagactatgacttcgtggggaagctggagaccctggatgaggatgctgcccagctcctgaggtccctcaaagtggactcccagcttcacttcccccccagttaccggaacaggacggccagcagctgggaggaggactggtttgccaacatccccctggcctggaggcaacagctctataaactctacgaagccgactttgttctctttggctaccccaagccggaaaacctgcttagagactgagctccccagcaccaaataagcacccacgagccccattaaacccaacgactgtcccagtgaggtggtgctttgaggatggagccctgcgccttccgggttccctcctggcttcctttccttctggtgtgacaggtagaggatgccacacctttccctactggagaccacggaacttccaagaccctagcacctcacactccagggttttgcacaccccacccttttgcaatctggatttgtttactccacagctgtattcatggaacactgttaatactgttttctaagattaatatatttcagatatatttaatacgaaagtgggagagagctggagtaaagcgtggcgcccgacaaaaaaaaaaaaaaaaa

SEQ ID NO: 3090 - DNA, 1770 bp, Cricetulus griseus
cactgaagagaagcctggcaggaaaaaggcagaggccaaaggcaacagaggctggtctgaagagtccctcaaatccagtgacaatgaacaaggcttgcctgtgttctccggctctccgcccatgaagagcctttcatccaccaatgcaagtggcaaaaagcagacccaagctgcacgccagcctcgaggctgcctgccaaacagcagaaaattaagaaagccagaagacagatgtgctgtgcacagaggaagaagaggattgccaggctgcctcccgctgcagaaatacaccgacaacagcgagaagccatccgggaagagactgtgcaaaaccaagcacttgatacctcaggagtccaggaggggcttgccaatcaccggagactactatgtggagagcactgacagcaagatgactcccagtacagactacgaattgtcaccagccaagcaagatccaaagccctttgaccgtttgcaacaattgctgccggcctcccaggccacacagctgccacgctcaagttctcctcaagagaccacccagtctcgccccatgccgccagaagctcggagacttattgtcaacaagaatgctggcgagaccctcctgcagcgggctgcccggctaggctatgaggaagtggtcttatactgcctggagaacaagatctgtgatgtgaaccatcgtgacaacgcaggttactgtgcactgcatgaagcttgtgccaggggatggctcaacatcgtccgccacctccttgaatatggcgccgatgttaactgcagtgcccaggatggaaccaggcctctgcatgatgctgtggagaatgaccacttagaaattgtccgattgcttctttcctatggtgctgaccccactttggctacatactcaggtagaaccatcatgaaaatgacccacagtgaacttatggagaagtttttaacagactatttaaacgacctacagggtcgcactgaggatgactccagtggtggttgggagttctatggcagctgtgtgtgtgaaccagatgatgaaagtggatatgatgttttggctaaccccccaggaccagaagaccaagatgaggaggaggattcctacagtgatatgtttgagtttgagttttctgaacactccctcttgccgtgttataacatccaagtgtccgtcgctcaggggccacgaaactggcttctgctctcagatgtgctcaagaggttgaaaatgtcctcccggatattccgctgcaattatcccaatttggaaattgtcaccattgcagaagcagagttttaccgacaggtctctgcaagtctcctgttctcctgccccaaagacctggaagccttcaactctgaaagcaaggagctgttggatctggtggaattcaccaatgagctccagactctactgggctccactgtggagtggctccaccctagtgacacggggggccctgaggactactggtgagccccctgccctgcccacccactgtgtacagtgtgtcatagtgttaatccttgtgcatatgtgtcataatatgacgatttctgtaaagaaaggacactattacatatgaaaatatctcttctttatataagagaagttactccagtcagaagaacttagaagcctgtgttttctttctaaactttaagtcagtttttatgaagctgttcaaatgtctttatttttcagtgcacacatgctttgagagatgtatgttttgtttttacttggaactatttttcttttct

SEQ ID NO: 3091 - DNA, 1770 bp, Cricetulus griseus
cagctcaagtaatgtgtttggcatcaaactgaacagtcactctgggccactgtccgttatctatacagtgctggaggtctgcgcaaagctgcccgagactgtgcctggcactgtggtcacagcgcttgtggcgggcgtggtacttgtgatggtgaagctgttgaatgaaaagttgaagcgccatctgcccctgcccatacctggggaactactcacgctcattggggccactggcatttcctttggtgcaaaactgaatgaaagattccggatagacgtggtggggaacatcaccacagggctgatacccccagtgccacccaacgacagagttgtttgcaacacttgtgggaaatgcctttgccattgctgtggtaggcttcgccattgccatctcacttgggaagatttttgccctgaggcatggctaccgagtggacagtaaccaggagctggtggcccttggcctcagtaatctcattggcagcttcttccagtgtttccctgtgagctgctccatgtctcggagcctggtacaggagggcaccgggggcaacacgcaggttgctggagctgtatcttctcttttgggatctcttccgagacctgcccaaggccgtcctggcagccgttattattgtgaatctaaagggcatgatgaagcagttctctgacatctgcactctgtggaaagcaaatcgagtggacctgctaatctggctggtgacctttgtggccaccattctgctgaacctggacattggcctggcagtttccatagtattctccctgctgctcgtggtgatccgaatgcagctgccccattactctatcctggggcaagtgccagatacggatatttatagagacgtggcagaatactcaggggcccaggaggtccctggagtaaaggtcttccgctcctcagccaccatttactttgccaatgccgagctctacagtgactcactgaagcagaagtgtggtgtggatgttgaccacctcatctcccagaaaaagaacgaatcaaaaagcaggaaatgaagatgaaacgaatgaagaaagccaagaagtcccagaaacagggcacctcttccaagatctcctcagtttcagtcaatgtcaacaccactttcgaagacatcaaaagcaatgacatggaggactccgaggccaaggtacaccagagggaggagctggaggatacagttaccagcaatcaagaaactgtcaaggctccaaccatgaacacactgaagtccctgggcctgccccagccaggcttccataccctcatcctagacctgagcactctctcctttgtggataccgtgtgcattaagaccctgaagaatattttccgagacttccgggagatcgaggtggaagtgtacatcgcagcctgttacagtcctgtgatcacccagcttgaggccggacacttctttggtgacgatatcactaagcagcatctttttgtctctgtccatgacgctgtgacctttgccctccaccaccggaagtctggccctaagagccctgcttcagccaccaaactctgactttgctgctggagatttcctacctctggaggttgtgacaggtcaccctcatgaaactcctgcctctaggtcacctccaggtgccacccaggactccatcccatgtatatgcacatataactcatgatggatgccttgggactcccgatttcagtgctgcaggcctggggcagggtattgcagtcaggctggccttggctgggtgctg

SEQ ID NO: 3092 - DNA, 1770 bp, Cricetulus griseus
gtgaggcggcccgagcctcccccgcgccagtcgggcgcgcccctcgctggggaggggacagcggccaaggctctgagaatccctactgccccgccacccttctctgctcgcgaccatggcgcgcggtggccgcctgggactcgccctggggctgctgctggcgctggcgctgacgctgcgggccaaacccactgtgcgcaaggagcgcgtagtgcggcccgactcggagctgggcgagcgaccgcctgaggacaaccagagcttccagtacgatcacgaggccttcctgggcaaggaggactccaagaccttcgatcaactaagcccggacgagagcaaggagaggctggggaaaattgttgatcgaattgacagtgatggagatggtctcgtcaccaccgaggagctgaaagtttggatcaaacgggtacagaaaagatacatctatgataatgtcgccaaagtctggaaggattatgatagggacaaagatgaaaggatctcctgggaagaatacaagcaggctacctatggctactacctaggaaaccccgctgaattccaagatagttctgatcatcacacctttaaaaagatgctgccacgggatgagagaaggtttaaggcttcagaccttgatggcgacctgacggctactcgggaggagttcactgcctttctgcacccagaggagtttgaacatatgaaggaaattgtagttttggaaacgctggaggacatcgacaagaacggggatggctttgtggaccaggatgagtacattgcggacatgttttcccacgaggacaacggccctgagccagactgggttttgtccgaacgggagcagttcaatgatttccgagatctgaacaaggatgggaagctggacaaggatgagattcgccactggatcctccctcaggactatgaccacgcacaggctgaggcccggcacctggtttatgagtcagacaaaaacaaggatgagatgctaaccaaggaggagattctagacaactggaacatgtttgtgggaagccaggctaccaattacggggaagatcttacaaaaaaccacgatgaactctgaaaaaacgctcatcctgttgtggccgactgtgggggcattcttcaggtgtgctgggcgggtgctacagttgtcaggtgcacagcagttgtgtccctaaacaaggagattattcctcagattggggtaaaaatgagctttcattccatatttactggaaaatagccattgctgtttattccagtaggatttcccctgaaacacattaaaatcttggcaattgcatttctcttgggggaaacaattgctacgatgtggcttactagtctgacctctcccaactttttaaaggaacaggaagaaaatgtgaaaggcttcagttgctgggggtggagcacgccatgcagagtgactgatccgtatttgaactatgagattttggattttatcattgccactgttaaacagtggtgaaggaaaagtctgaagccttggagcaggcataagtatttcaaatgctttatgttttgagctgttactgtaaatggtatataaacttttatgtgtttcttctgtatgggcctgctaatgtgcacaataatacccatatctttggtatttttttgtttttaataactaaaaagcaatacaaaaaagataatgtgaacaagaaagtaattttagagatgaaacaggccaaggtgataatctaagccattgaccaaactagctggagtaac

SEQ ID NO: 3093 - DNA, 1769 bp, Cricetulus griseus
ccgccgccgccatgatctccctcacggacacgcagaaaatcggcatggggtctttaacagggttttggagtgtttttcctgtttctttggaatgatcctctttcatgacaaagcacttctggctattggaaatgttctgtttgtggctggcttggcttttgtaattggtctagaaagaacattcagattcttcttccagaaacacaaagtgaaagccactggatttttcctgggtggtgtgttcgtggtcctcattggttggcctttgataggcatgatcttcgaaatttatggattctttctcttgttcaggggcttctttcctgtggttgttggctttatcagaagagtgcctgtccttggatccctcctaaatctacctggaataagatcatttgtagataaagttggagaaagcaacaatatggtataacagcaagggaactgaagactttaaatattttattatttatgaaccctttgaagactattcagcacaaagttcaatttcacaaactagcttgtaaagtccttcagaagtttaaaacacacaccctccaaagttccaacagttccggcagaagcacttgctgcagcctgagcaacagccgttacagagaaccgtggtgtctgttactttattttgtttgtttttagaagattcaggaacaccagtaggcatttgtattttttttttatttttattgatgtttccagatatttctaggtgtgctgggtctctgataatgatgcctgaattggattggattatgtcgtctccatgtatcagcccaaggaaagcccagtttcatgtgtgaatcactcttttttttttttttttttttttttagtaaacttagaaaaatttttcagaatacacagaggtcattttgagctgttacttctcagtcatagctgaccaagtgctttcttgactctacaatactctggatgcacaaatctcttgagtatgtcccgggtgtgttcgtacagtctgctgcacacagacgccaagcagagagcattctgaccatggagtagtctgctggagcacttcctcagatgtaatactatttatcttaccactaatgattgaactatttatttttaacacttccaatgctttttaatccagaaaatcataattgaaattgtatttatttacaaatgtctttctgtgagacattaccatgtgtgttgtttttagttaaatttcttggtgccaggagaatccccagccttgccagtctgcagaaggaaggactggtttgtagtgggatggctcattcttgtggaatactgtcgtgtttggcacttgcatatggtgtaacctgtgaaaactcgataaatggagaatcctacctcaatagctcatgggataatgaaagacctggcgctgtgtctgatgttcctcagaggcactgtctttaaaacaaaccagccttttgacttctggaagccctattcttaagggttccctcaccccacccacttctaaaatcagccttttgtctttgtgacaaaaaaaaaaaaacaaaccctcggttattccccacagatggaggaaaagttaccagtactcagccttaaatagtttctgtcatgttcaaatagtgtcttctgtaacagaaacatgcctgcaatgttgtcccctacagttctctggaattcagcggctttagaagtctcatggtcaaattctatactctaacaatggcgtattgtaaatacacttgtcttacctcaataaaagggtacttttctattca

SEQ ID NO: 3094 - DNA, 1769 bp, Cricetulus griseus
gccctcccctgaaacttgcaaatcaccggcctgtgtcacaacaggtcacctgcttgcgcactaaagtcctggaggagagtgaagccagtttctttagaaggcaccctgatcctggcaaaggtgtttgctcatgttcgtctgaagccagagaccctgagtctgagcttggagccctccctccagagcacagggtttcatttatggagaaacgcaatagatggctgggatcgcagctttcagcagcttctcccgacactggccatgactcagacaaaaacgacccaagtttacctaatgctctggcagactcctccagtggcggccaagagacgatacctcggccccggccccggccccggccccacaggaacagagcagccccagatgtgcccacgatagacactggttatgattcccagccccaggacgtcctgggcatcaggcagctggaaaggccactgcccctcacctccacgtgttacctgcaggacctccctgggcctctgaggtccagggagttccctcagtttgaacttcagaggtattccgcgtatgcacagaggctgcctctcaatccttccccacaggctccatggaactatcagtatcattgtcccggaggaccctatcaccaggcgccatatgctcatggctaccctccagcagcctaccagcaagtcatccagcctgccctgcctggacaggcccttcctggggcaagagtgagaggcctgcatcctgtacagaaagtcatcctgaatcaccccagcccccaggaccaaggagagaggcctgcacagagagacttctctttccgaaggctcccaagggaccagctctatcacccaccgtctagtggagctggagctcccgaagggtccctggaacatcctgcagagctgagaccacagggcccccaggctccatccccagctgctgtgcctagaccccctagcaaccccctagtccgaggaactctaaaaactagcaatttgccagaggaattacggaaagtctttatcacttattctatggacacagccatggaggtggtgaaatttgtgaactttttgttggtgaatggcttccaaactgcaattgacatatttgaggacaggatccggggtattgatatcattaaatggatggagcgctaccttcgagataagacagtgatgataattgtagcaatcagccccaaatacaaacaggatgtggaaggcgctgagtcgcagctggacgacgatgagcatggcttacatactaagtacattcatcgaatgatgcagatcgagttcataaatcaaggaagcatgaattttagattcatccctgtgctcttcccaaatgccaagaaggagcatgtgcccacctggcttcagaacactcatgtttacagctggcccaagaataagaaaaacatcctgctgaggctgctccgagaggaggagtatgtggctcctcccctcggtcctctgcctacccttcaggtggtacccttgtgacaccaaccatctccagctcagtgcagtcctgtcacagcatttttccagttgaggctagttggtggcactcaggctcctgagtctgagttgtccaacttgggcttccagtacttttagtgagtggatactacaggtgatggcagcaaacgcctatgaccacaaaaactctcttatgacttcagctacttttatgagttggccagatgctgtgtccttagaccaaactgaggaatgtccaaataataaaatgattacacttcgtaa

SEQ ID NO: 3095 - DNA, 1769 bp, Cricetulus griseus
cggacctgttaccatgtcccatcaacctccgagctgcctgactgagaagggggatcagcctctgtgagaccccaggaaatgaaccccctaataaggttcaccccagcctggacacattcactcctgaggagatgctgcagcaaatgaaggaactcctggttgagaaccaccagctgaaagaagccatgaagctaaacaatcaagccatgaaagggagatatgaggagctttcagcctgggcagagaagcagaaggaagaacgacagttgtttgacacacagaacaaagaagctaagaagctcctgatgaccttgagttatgaaaatgagaaactgaaggtggagcttggaaaactagagagaagtcagaaaggccattgaaggctccatatgtggctccaggcctcccatggaagacttagaacaggaagtggagcagctgaagatccaggtgcaggaagtggagcagctgaagatccaggtgatgcgccttaaagctgaaaaggctgacctgctgggcatcgtctcagaactgcagctcaagctcaactccagtggctcctcagaggactcctttgttgagatcaggatggctgaagaagaagctgaaggggcaatgaaggaaatgaagagcagtcctatacctaggaggacatacttcaccagcatgaccaaatctacagaagatgccaggacttgtgtggagtttgaggaattaactgtgagccaactcctgctttgcctaagagaaggaaaccaaaaggtgcgaagacttgaattcgcactcagagaagccaaagaaagaattgcagagtttgaaaagaaagcaaatgaccgttctgagattgggacccagacagaggagagcttagaagaggatgaagattacaaagacccagaaagtgttggaagcgaagtggaaacattgaaagttggagtgacagctctgtataaggaacttcaagaggcacacacgaaactcagtgaggctgagctaatgaagaagagacttcaagaaaagtgccaggctctggaaaggaagaactctgccaccccatcagaactgagtgagaagcaagagcttgtttacagcaacaagaagttagagctgcaggtggagagcatgcgctctgaaatcaagatggaacaagctaagacagaggatgaaaaatccaggttagccactctgcagtcaacacacatcaagcttcttcaagaacataatagtgcactgaaaacaattgaggaactaaccaaaaaacaggcagaaaaggtggacaagatgatgctgcaagagctccatgaaaagctggagctggcagagcgggctctggcatccaagcagcttcagatggaccagatgaagcagatcattgctaagcaagaggagaacctggaaaccatggctgtcctcagggctcagatggaggtgtactgttcagatttccatgctgaaagagcggcaagagagaagattcatgaagaaaaggagcagctggccttgcaactggcaattttgctgaaagagaacaatgactttgaggatggaggcagcaggcaatccttgatggaaatgcagagccggcacggggcaagaaccagtgactctgaccagcaggcttacctgcttcaaagaggagctgaggacatgagctggagtcagcagcagcctcagaatattccgattcactcttgccccaaatgtggagaaattctgccggacattgacacattacagatccatgtcatggattgcatcatttgagtgtt

SEQ ID NO: 3096 - DNA, 1769 bp, Cricetulus griseus
gtggtggtgaagcaggaagctgggccacctcgagccagatctgggcctcctgccccccagctgctcttgggcccacagggcaccagcttcctcaagagggtcactccccctactgtggtcactgactctacagggactcacctcatcctcactgtgaccaacaagagcgcagatggccctggcctgtccactgggagccctcagcagaccttgtcccagcctggctctccagcccctggcccacctgcccagatggacctggagcacccacctcagccctcatttgcagccccaacatctctgctgaagaaggagccacctgggtatgaggagagtgtgagtcagcagcctaagcagcaggaaaatggctcctccagtcagcagatggatgatctgtttgacattcttattcagagtggagagatttcagcatatttcaaggagccaccatccctaccaggaaaggagaagccaccccaacagcagcctgtgggtccctgctgacaccacaaccctcaccttcgccttcgaatgaacttccccaggctgctcctccacccgcctccccaactctcccagggcgcctagaggactttctggaaagcagcacgggactgccactgctgacgagtgggcacgaagggccagagcccctctccctcattgatgacctccatagccagatgctaagcagctctgccatcctggaccaccccccatcaccccatggacacctctgaattgcactttgctcctgagcccagcagtggtatgggcctggacctggctgatggccacctggacagcatggactggctggagctgtcctctggtggccctgtgctcagcctggctcccctcagcactgcagcccccagcctcttctccacggacttcctggatggccaggacttgcagctccactgggattcctgcttgtagctctctgactctaggctagggaagggtctgaagttggggagccacagaaccatagccagcgtgtgctacctgtgactgggagccttgacaatcacagtccctggaggctgcagccaagaccctacacctggctcaggctcatccagggcagggaatacaagccgtcaagaaacaaactctgggcccatgctgaggttggttgtgggaagctggccagacccagttcaatttgacctccttttctgaggtcagaggtgcacatctgctgaagtttgatgtatatacctctatattatatatcaacttacatatatacatatatttttaggtgtgggggaaatgggtgtggctacctccacctgctttcacatgcaaaaggcctagagagctgcttgacttcatacagggtcatcatgaggagccacatggcccagtacccaacctggcatgcagctgcctaggcctaccccacacacatttgacatgcagacagacacctgccattgcctacacgccatcctgccctgcttcctggctccttagtgccacaagggcagaagtgcttccaggttctccaggagctctctacccacccacattccgtcccatctccccactgcagccaccctggccttgggatggggggtgagggtgggtgggtcctggctatacttgctgggggctaggaggtaccttctgcccaaccccagccttgttctgtcctgattcaatatagaaaagggacagagccatcaaaaccagtgctgggacaaaagtggggaagctgtgtgaactttttaaaataaaataaaaacactgacttgcca

SEQ ID NO: 3097 - DNA, 1769 bp, Cricetulus griseus
gtgctgcagcagtaccagcacctgccctccttccgtgccatccaggatgactgccaggtcatcacagcccgcttggcccagcagctccggcagcgcttcagggaaggttggctcgggtgcaccggagcaggctgagagtgtggagttgctgctggccctgggtgagccggctgaggagctgtgcgaggagttcctggcacatgctcgggggcggctggaggaagaactgagcagcctggagactgagctggggccctccccaccagcgccggatgtgttagagttcaccgaccggggtggcaatggctttgtgggtggcctctgtcaggtggcagcggcctaccaggagctgtttgctgcccagggccctactggtacacagaagctggcagccttcgcgcgtgagttgggcggtcgctactttgtactggtggagcggcggctggcacaggagcagggtggcagtgacaactcattgctggtacgggcactagatcgcttccaccggcgcctgcgagcacctggggccctgttggccgctgctgggctttcagagtccgccacggagattgtggagcgagtagcccgagagcgcctgagtcaccatctgcagggtctgagggctgccttcctgagctgcctgacagatgttcgccaggccctggcagcacctcgcctggctgggaaggagggccccagtctggctgagttgctggccaatgtggccagctccatcctaagccacatcaaggcctctctggcctctgtgcatctttttacagccaaggaggtgtccttctccaacaagccctacttccggggtgagttctgcagccagggagtccgtgagggcctcatcgtgggtttcatccgctccatgtgccagacagcccagagcttctgtgacagccctggagaaaagggaggtgccacgccacctgccctgcttctactgctgtctcgcctgtgcctggactatgagacagccaccatctcctacatcctcaccctgactgacgaacagtttctggtgcaggatcagtctccagttacacctgtgagtacactgtgtgcagaggccagagagacagcacggcgactgctgactcactatgtgaaggtgcagggcctcgtcatatcacagatgctacgcaagagtgtggagacacgggactggctcagtactctggagccccggaacgtgcgtgctgtcatgaagcgtgtggtagaggacacgacagctattgatgtacaggtggggctcctgtatgaagagggtgtccgcaaagcccagagcagcgactctagcaaaaggaccttctctgtatacagcagctctcggcagcagggccgctatgcacctagctacacacccagtgctccgatggacacaaacctcctgagcaatattcagaagctgttctctgaacgaattgatgtgttcagtcctgtggaattcaacaaggtgtcggtgttgactggcatcattaagattagcctgaagacgctcctggagtgtgtgcgactgcgtacctttgggcgattcgggctgcagcaagtgcaggtggactgccacttcctgcagctctacttgtggcgctttgtggctgatgaggagctagtgcatctgctgctagacgaagtggtagcctcagctgcccttcgctgtccggacccggtacccatggaacccagtgttgtcgaggtcatctgtgagcgcggctaggctctaccaacgccgtcacggggcagccctattgtcctatcct

SEQ ID NO: 3098 - DNA, 1769 bp, Cricetulus griseus
agcagcctggcaagagttgtgcccagagtgaccttccactggaccggcagctcactggcctcctacgatgccttgcttgggctggcacacgcaaacccagtgggccacacaggttttcaagaacccccacgaggtggtgacggtactgctgattcagaccctgggggccttggtgccctccctgcccatgtgcctcagtgcaggtgtggagagagcgggacccgagctggagctcaccagactgctggagttttatgacactaccgcccactttgccaaggggttggagatggcactgctcccccacctccaggaccacaacctggtgaaagttgtagagctggtggatgctgtgtatggtccatataaaccctaccagctgaagtacggtgacatggaggagaacaaccttctcatacagatcagcgctgtgcctctggagcacggggaagtgattgactgcgttcaggagctgagccactctgtacacaagctctttggcctggcatctgcagctgttgacagatgtgctagattcaccaatggcctggggacctgtggactgctgacagccctgaaatccctctttgccaagtatgtgtctcatttcaccaatgctctccagtcagttcgaaagaagtgcagactggatgatattcctcccaactccctcttccaggaagactggaccgcctttcagaactctgtcaggatcattgccacttgtggagagctcttgcgccagtgtggggacttcgagcagcagctagcaaacaggatcctgtccacagcggggaagtatctgtccgactcctacagccctcggagcctggcaggttttcaggacagcatcttgacagacaagaagagccctgccaagaacccatggcaggagtataattacctccagaaagataaccctgctgaatatgccagtttaatggaaatactttataccctcaaggagaaggggtccagtaatcacaacctgctgtctgcatcacgcacagccctgactcggctgaaccagcaggcccaccagctggctttcgactcggtcttcctgcgcatcaaacagcagctgctgctcgtctctaggatggatagctggaacacagctggtattggagaaaccctgacagatgatctgcctgccttcagcctcacacctctcgagtacatcagcaatattgggcagtacatcatgtccctgcccttgaatcttgagccatttgtgactcaagaggactccgctttagagctggccttgcatgctgggaagctgccatttcctcctgagcaaggggatgagctgcctgagttagacaatatggctgacaactggctaggctccattgccagagccaccatgcagacctattgtgatgtgatccttcagatctcagaggtgaccccacactccaccaaacagctggctacagacattgactatctgatcaatgtgatggatgctctgggcctgcagccatcacgtaccctccagaacattgtgacactcttgaaggccaagcctgaggaatacagacaggtcagcaaaggcctgccacgccgccttgcagccacagtggctaccatgcgtggtgtaaattactgaccaattctgagaagagggtccaggacagggtcagggctggtggtgtgtgtgtgtgtgtgtgtgtgtgtgtgtgtgtgtgtgagagagagagagagagagagagtaggagagcagagggagagttagaaaagacacacagagatagacagacaga

SEQ ID NO: 3099 - DNA, 1768 bp, Cricetulus griseus
gcgggaccggaggggatgaggaggaagagtggcttgtatggcggcccatgggacgtgcatgtgcacagtgatttggcaaaaggatctagatgaaaatgaagttgaaaggccagaagaagaaaatgccagtgctaatcctccagctggaattgaagaggaagctgctgaaaatggcgtgtccaaaccgaaagtgactgagactgaagatgatagtgacagtgacagtgacgatgatgaggatgatgttcatgtcactataggagacattaaaactggagcaccacagtatgggagttatggaacagcgccagtaaatcttaatatcaagacagggggaagagtgtatggaaatacaggaaccaaagtcaaaggggtagaccttgatgcacctggcagcattaatggagtgccactgttggaagtagatttggattcttttgaagataaaccatggcggaaacctggtgctgatctttctgatttatttcaattatggctttaatgaagatacttggaaagcttactgtgaaaaacaaaagaggatacgaatgggacttgaagttataccagttacttcaacaacaaataaaattacggtgcagcaagggagaactggaaattcagagaaagaagcagcacttccatctacaaaagctgagtttacttctccgccatcgttgttcaagacgggcctgccaccaagcaggagattacctggtgcaattgatgtcattggtcaaacaataaccatcagccgagtagaaggaagacggcgggcaaacgaaaacagcaatatacaggtcctttctgacagatctgccactgaagtagacaacaatttcagcaaaccacctccattttttcctccaggggctcctcctactcaccttccaccgcctccatttcttccccctcctccaactgtcagcactgccccacctctgatcccccctccaggtattccaataactgtaccacctccaggtttccctcctccacctggagctcctcctccatctcttataccaacaatagaaagtggccattcttctggttatgacagccgttctgcacgagcatttccatatggcaatgttgccttcccccatcttaccagttccgctccctcatggcctagccttgtggacactaccaaacagtgggactattacgcacgaagagagaaagaccgagacagagacagagatagagacagagaccgagagagagacagagaccgggacagagaaagagagcggacccgagagagggagcgggagcgggatcacagccccacccccagcgttttcaacagtgatgaagagcgatacagatacagggaatatgcggaaagaggctatgagcgccatagagctagtcgggaaaaagaagaacgacacagagaacgacgtcacagagagaaggaagaaaccagacacaagtcctctcgcagtaacagtagacgtcgtcatgaaagtgaagaaggggacagtcacaggagacataagcacaaaaagtctaaaagaagcaaagaaggaaaggaggctggcagtgagcccgtccctgaacaggaaagcgccgaagctgcccctgccgaataggctccaccttttatgtctgtcagtcccagaaatagatgttataaatctccttattttctggataatgttgaagaaatatacctttaatcttgttctgttagaatgaaacgtttaactttttcttttccaaaataaaaatgtgcatttttttgtagttaagttaaaaa

SEQ ID NO: 3100 - DNA, 1768 bp, Cricetulus griseus
  modified_base (128)..(128): a, c, t, g, unknown or other
gcttggcccaactgtggacacgaagaggctgaaggactctgctctcctggaccagtcagccaagtactatcacctgactcatgacgagctcattggcctgctcctgcagcgtgagcgtgagctggacncagagatcttaatctccatgtccctctagcacctggaggttctccttgaattgactgggattgagatggggatcaggctgcttgcttgtctgtgcactgtagacaaccagggcacctacacctcagccttgtgcctgtgccctaagagtagggagcctgtgtgtggggtggtggtggtggtggtggtggtattcttcagctgcttccacccctcttcagaccctctcattccatgtcccagtggtgatgggtggtggggctgggtgcagggagaatgactctttgctcccaagcctctccctacctctctaacatgagaacctccaggttgggactttgggctgctcatgttttggggatcaggcctccatgtctgtttttaccacttgtccagatgccaaaactgtgctactgtggggtcagaacttttggaaaccaattaaaatgtgcctttggtgggtgaggacaagagcctctggatgtagacctctctctggccctggtgtcccctccctcctattgagcacataaaagtggctgttagggtcctgaaaggggaaggtggaccaggctttttgcttccctgagaagcacctcagctaaggctctgaccaacctgctgctacccctaagtcttcctcccacttcctgctcctcccttgacccacatttgagcatcctgtaaactggggctaccctgcaccatattgtatctggccttgggtcccagctgtgctggaccagtgggcttgtctgggagtgggaggcttcactctgccttaggagatacctgtacttaggaaatgcctgtggctctccagctgttctgtaagctgctgtgcagcctccttgctcaccaacctcttccatgtttcctggcttggctgaagtgcattttgaagccaagtatctaccccgtggcccagcttctagtttgcttgtgaatacagcaggtctcccatggcatctgcaggggtccttggtggctgtgcattagcaaaaaatatgtgtgaaggaggtgagatgctgaaaaagatgcctttggtccagtggaaaggcaacaactgtctctgtctcttaatggcaaggtcattagttcactcagaacacctcaggagggtatgctctgtggatgatgtcagtcttctgccagcataaagtagatgaaccccacaatggggtttcccacagtgcagttatcaactgtagaccaactcagaaatgaggaaagtagccacctgttcccagattcttgaccacattggggggtgggggtcattggcctcttgaggaagtgagtccctctgctaggtagtcctctgggttttatttggttccagccctgttcttcatctttcgcccatccctgctgtttggcctccctatgtggccagggcaggggtgtcttaggagaggttctgaactgaagccagggttttgcttgtgtctgctctataccacacattgcagagtgcagcagacagagtgcagcagtgagcaggcacagtactgctctgccgtttgtcttcctagttgaaactcctgtctataaagagcttgttcttcatgttttgagcactttatgaagaataaaaagaccgtgtaccacaaaaaaaaaaaaaaaaaaaaaaaaaaaaaaa

SEQ ID NO: 3101 - DNA, 1768 bp, Cricetulus griseus
agtgcggtagtcgcgttggacgttctttttcgcaacgggtttgccgtcagaacgcaggtgttgtgaaaaccaccgctaattcaaatccaacatgggaaaggaaaagactcatatcaacatcgttgtcattggacacgtagattcaggcaagtccaccacaaccggccacctgatctacaaatgtggtggaatcgacaaacgaaccatcgaaaagtttgagaaggaggctgccgagatgggaaaaggctccttcaagtatgcctgggtcttggacaaactgaaagctgagcgtgagcgtggtatcactattgacatctccctgtggaaatttgagaccagcaaatactatgtgaccatcattgatgccccaggacacagagactttattaaaaacatgattactggcacttctcaggctgactgtgctgtcctgattgttgctgctggtgttggtgaatttgaggctggtatctccaagaatgggcagacccgtgagcatgcccttctggcttacaccctgggtgtgaaacagctaattgttggtgttaacaaaatggattccaccgagccaccttacagccagaagagatacgaggaaattgtgaaggaagtcagcacctacattaagaaaattggctacaaccctgacacagtagcatttgtgccaatttctggttggaatggtgacaacatgctggagcctagtgctaatatgccttggttcaagggatggaaagtcacccgtaaagatggcagtgccagtggtaccacactgctggaagctttggattgtatcctgccaccaactcgtcccactgacaagccactgcgactgcccctccaggatgtctataaaattggtggtattgggactgttcctgtgggccgagtagagactggtgttttaaaacctggaatggtggttacctttgctccagtcaacgttacaacagaagtaaagtctgttgaaatgcaccatgaagctttgagtgaagctcttcctggagacaatgtgggcttcaatgtaaagaacgtgtctgtcaaagatgtcagacgtggcaacgttgctggtgacagcaaaaatgacccaccaatggaagcagccggcttcactgctcaggtgattatcctgaaccatccaggccaaattagtgctggctatgctcctgtactggattgtcacacagctcacatagcatgcaagtttgctgagcttaaggagaagattgatcgccgttctggtaagaagctggaagatggccctaaattcttgaaatctggtgatgcagccatcgttgatatggttcctggcaagcccatgtgtgttgagagcttctctgactatcctccactgggtcgttttgctgttcgtgacatgaggcagacagttgctgtgggtgtcatcaaagctgtggacaagaaggctgctggagcgggcaaagtcaccaagtcggcccagaaagctcagaaggctaaatgaatattacccctaacacctgccaccccagtcttaatcagtggtggaagaacggtctcagaactgtttgtctcaattggccatttaagtttaatagtgaaagactggttaatgataacaatgcatcggaaaaccttcaggaggaaaggagaatgttttgtggaacatttttgtgtgtgtggcagttttaagttattagttttcaaaatcagtactttttaatggaaacaacttgaccaaaaatctgtcacagaattttgagacccattaaaatacaagtttaatgagaaa

SEQ ID NO: 3102 - DNA, 1768 bp, Cricetulus griseus
cccggatagagcggggcccgagccgctctgctgtggtggttccgctctcgctcgcgctctcccgccgccatgtcggccaccatcgaggaggagttcgaggaactggatgctcagtgtcgctggcagccgttatacttggaaattcgaaatgagtcccatgactatcctcatagagtggccaagtttccagaaaacagaaatcgaaacagatacagagatgtaagcccatatgatcacagtcgtgttaaactgcaaggtactgaaaatgattatattaatgccagcttagttgacatagaagaggcacaaagaagttacatcttaacacagggtccacttcctaacacatgttgccacttctggctcatggtgtggcagcagaagaccaaagcagttgtcatgttaaaccgtactgtagagaaagaatcggttaaatgtgcacaatactggccaaccgaagaccgagagatgctgtttaaggaaacaggatttagtgtgaaactcttatctgaagatgtgaagtcatattatacagtacatctactgcagttagaaaataccaatagtggtgaaaccagaactatatcgcactttcattataccacctggccagattttggagttcctgagtcaccagcttcattcctaaatttcttgtttaaagttagagagtctggctccttgaacccggagcatgggcctgcagtgatccattgcagtgcaggcattggccgctctggcaccttctccctcgtagacacctgtcttattctgatggaaaaaggagaggatgttaatgtgaaacaaatattactgaaaatgagaaagtatcgaatgggacttattcagacaccagaccagctcagattctcctatatggccataatagaaggcgcaaagtacataaaaggagattcgagtatacagaaacggtggagagaactttctaaagaagatgtatctcctgtttgtgatcactcacaaaacagaacaatgactgaaaagtacaatggaaagagaataatttcagaagaggaaaaactaacaggactttctcctaagattcaggataatgtggaagagaacaatgagagtattctgcggaaacgtattcgagaggacagaaaggccactacagctcagaaggtgcagcagatgaaacagaggctaaatgaaactgaacgaaaaagaaaaaggaagggtttgttagcaaatgcgtcataccccagaaacgttgcagtagactagacatcaaccagataagggatatttacagtcacaagcccagcatctcaggactcattattgcaggttcctctgagacccaaactgtcaatgactcaataaagacaaatgtgcttgttgaaaacttacatcttacagtttttttttttttttttttttgtatgtgaggccaagattgacagacacctaaatattcatgacttgagactattctgcagctataaattttgaacctttgatgtgcaaagcaagacctgaagcccactccggaaactaaagtgaggcttgctaaccctgtagattgcctcacaagttgtctgtttacaaagtaagctttacatccaggggatgaagaacaccaccagcagaagacttactctttaatttgatgtattgtttttaatgtgtatgaaatgtagaaagatgtaaaggaaataaaacaggagagactactttgtatagtactgccattcctaatgtatttttatactttttggcagcattaaatattttattaaataga

SEQ ID NO: 3103 - DNA, 1768 bp, Cricetulus griseus
ctgcgcatcttgggctgcgagctcatccaggccgccggcattctcctccggttgcctcaggtggcgatggcaacggggcaggtgttgttccatcggtttttctactccaagtctttcgtcaaacacagtttcgagattgttgccatggcctgtattaatcttgcatcaaaaattgaagaagcaccaagaagaataagagatgtgattaatgtattccaccaccttcgccagttaagaggaaaaaggactccaagccctctgatccttgatcagaactacattaacaccaaaaatcaagttatcaaggcagaaagaagggtgctaaaggagttgggattttgtgttcatgtcaagcatccccataagatcattgtaatgtatttacaagtcttagaatgtgaacgtaaccaaaccctggttcaaactgcctggaattacatgaatgacagtcttcgaaccaatgtcttcgttcgctttcaaccagagactatagcatgtgcttgtatctaccttgcagctagagcacttcagattccattgcctactcggccacattggtttcttctttttggtaccacagaagaggagattcaggaaatttgcatagagacccttagactttataccaggaaaaagcctaactatgaattgctggaaaaagaagtagaaaaaagaaaagtagccttacaggaagccaagttaaaagcaaagggattgaatcccgatggaactccagctctttcaacccttggtggattttctccagcttctaaaccatcctcaccaagagaagtaaaagctgaagaaaaatcgccaatctccattaatgtgaagacagtcaaaaaagaacccgaggatagacaacaggcttcgaaaagcccttataatggtgtaagaaaagacagcaagagaagcaggaacagcagaagtgctagtagatcaaggtcaagaaccagatcgcgctctagatcacacaccccaagaagacattacaataataggcgaagtcgatctggaacatacagctcaagatcaagaagcaggtcccgcagtcacagtgaaagccctcgaagacatcataatcatggttctcctcaccttaaggccaaacataccagagaagatttaaaaagctcaaatagacatggtcataaaaggaaaaaatctcggtctcgatctcagagcaagtctcgggatcactcagatgttgccaagaaacacaggcatgaaaggggacatcacagagacaggcgtgaaagatctcgctcctttgagagatcccataaaagcaagcaccatggtggcagtcgctcaggacatggcaggcataggcgttgactttcttcctctgacactgcatgatgtatggactcaatcaaaactatgaagcaaactgattaggaattgatttattaaaattgtctaggtctctagaaacactgaggacattttctttggaaaagaactatgttaaggttttttgcacattaaaatgccctagcagtatctaattgaaaaccatggtcaggttcaattgtactttattagagttgtgtattgtttattgctacaagaactggagcgtgaattctgtaaaaatgtatcttatttttatacagataaaacttgcagacactgttctatttaagtggttatttgtttaaatgatggtgaatactttcttaacactggtttgtctgcatgtgtaaagatttttacaaggaaataaaatgcaaatcttgtttttctaaaaaaaaaaaaaaaaaaa

SEQ ID NO: 3104 - DNA, 1768 bp, Cricetulus griseus
ccacagtttgtcgccagaaggaagatggcggatctggaggagcagctgtcggatgaggagaaggtacgtatagcagcaaaattcatcattcatgcccctcctggagaatttaatgaggtttttaatgatgttcgattattgcttaataatgataatcttctcagggaaggagcagcacatgcatttgcacagtataacttggaccagtttacacccgtaaaaattgaaggctatgaagatcaggtgttgataacagaacatggagacttgggaaatggaaagtttttggatccaaaaaacagaatctgtttcaaatttgatcatttaagaaaggaagcaactgatccaaggccatacgaagcagagaatgctattgaatcctggagaacttcagtagagactgcactgcgagcttatgtaaaagagcattatccgaacggggtctgcacggtgtatggcaaaaaaatagatgggcaacaaaccattattgcatgcatagaaagccatcagtttcaagcaaaaaacttttggaatggtcgttggaggtcagagtggaagtttacagtcactccttccaccacacaggtggttggcatcttgaaaattcaggttcactattatgaagatggtaatgttcagctagtgagtcataaagatatacaagattccctcacagtgtctaatgaggtgcaaacagcaaaagaatttataaagattgtagaagctgcagaaaatgaataccagactgccatcagtgagaattatcagacgatgtcagacactaccttcaaagccttacgtcgacagttgccagttacacgtactaagatcgactggaacaagatccttagctacaagattggcaaagagatgcagaatgcataaatgaaaattgcatgaccagattgttttagtgtctttgacgttaaaaaaactctgttcctccttccttacagtgaagaggtattcctctgggttatcttgaaagagttttgaaatatttcaaaagtattttatttgccagcaccctgaaattgtctttggcttatgaaaggggcaacttttgatgttagcccagttatttttagtggggtcagtaacagacactctaattaaggtggttgatggacttagccatatatgctgctaaagaaattgtctaccttttcctttcacctcttccgcttctgtaagattgagattagagggaaaacattttctataccagttatgttgaaaccttcattgtaaggttatttagctagcttagtgtctaactgaactttttaaaacaaggccaaggtctgttgctattctgagattctgaaattaaatgagaatacttatttcagaaatgcatctaatgcttttttcttgtgacagttacgcaaattagcttgaattccatatgtccctgagttatttttatcagaaagccacaagtgtattataaggcagattgtaatatatatataaccctgaactcatgaccacacctcagttgattctccctcttcttggattgaaaactgaatttcattgtgacattaaaatggcaaaatttggtatttatttgagtaaaaaactcaccagtgaatcatacactattttaaaatactttctttgtatagtgtccttcttaacaagttgtaaattagaaaatttgggagtccacatggtatgcaactgcatcttttgttctccatcttcctatgcatcataagcatgtttgtaatactttaaaatatatctactgacgccacaggaa

SEQ ID NO: 3105 - DNA, 1768 bp, Cricetulus griseus
  modified_base (963)..(963): a, c, t, g, unknown or other
  modified_base (987)..(987): a, c, t, g, unknown or other
ctactggtatacagctacatccaggagagaatagctgacagtcctgcagatattagaatcaaggaagaagaacctgaccctgaagagtggcagctcagtggtgattctacactgaataccaatgacctaacacacttaagagtacaagtggtagatgaagaaggggaccaacaacatcaaagaaggaaaaagacttcggagggttagcttgcacctgtcccaactgtaaagaaggtggtgggagaggtaccaatcttggaaagaagaagcaacacatctgtcatataccaggatgtggtaaagtctatgggaaaacctcacatttgagagctcatctacgttggcattctggggagcgcccttttatttgtaactggatgttctgtggcaaaagatttacacgaagtgatgaattacaaaggcatagaagaacacatacaggtgagaagaagtttgtttgtccagaatgttcaaaacgttttatgagaagtgatcaccttgccaaacatattaaaacacatcaaaataaaaaagttattcactctagcagtacagtgctggcatctgtggaagctggggagagatgataccttgattactgcaggaggaacaacacttatccttgcaaatattcaacaggggtctgtttcagggataggaactgtcaatacttctgccaccagcaatcaagacatccttaccaacactgaaatacctttacagcttgtcacagtttctggaaatgagacaatggagtaaatattacacaaatacttattcattgtggtttatttttatacagtagtgagaagaatattgttcctaagttcttagatatctttttattgatgtgcaaaaatttttggattgacagtaacttggttatacatgacactgaaatgccttactttgtatgatattccatagtatcttatcaatttgtcatttttgtagggctaattnttttaattaggttaactgtacaanattttaagcattactcttgtaagattttgaaactacattttaacatggaactttagggatagtcaccttttaaatcctgttgaaaagccatgtttaagatttaatttgccaaaataatgtcttgttaatattctttcaataatgaagttgggcaatataaccgatgtttttaaaaagtttaaaatgtgtaggttgaggcatttgggtggtaagaaaatgttctagtgaattaccccttttcctgaagtttggaggaccaaaaataataataataaggtttattgcatcttagcagtgaattttttttctttttctttctttctttttttaatctaatcttgtttccagaaaaacatgtctgccagggccttaaaagccattgtgtaaattaccaataaagtataacatatgcaaacataacaaaatcacttccacagtgacgatactccaaccatatggatattagtcatagaaacttagaagcttttatgatattttttaatttttgtctagatagtcagtctgcacttaaatatcaaccatttttcctttttttgcttctttcccttaaaatttatatgtatccaatacatttaattgagaaatgtatgtttttattattgcttgttattttttctttttaatttttcagttcacctatttcaagaagtttggattctgttcatttgttatctttaagaccacctcagatttaaaggctaccttattgtacgttaaaagtgtattataacagtgtggtagttaataaaacactattttt

SEQ ID NO: 3106 - DNA, 1768 bp, Cricetulus griseus
gaagtgaagcttcgggatgaccagtatacgttggagcacatgcatgcttttgggatgtataattatctgcactgtgatgcctggtatcaagacagtgtctactacattgataacctcgggagaattatgaacttaacagtgatgctggacactgccttaggaaaaccccgagaggtgttccgacttcccacagatgtgacagcgtacgacaatcgtctctgtgcgtccatccatttcacatcccctgcctgggctaccttgtcagatggcacagggagattatacgtcattggaacaggtgaccgtggaaatagtcctgaaaagtgggagattatgtttaatgaagaacttgggaatccatttattataattcacagtatctcattgccggactctgaagagcattcagtagctgtgctgcttcttcgaatagaagaaagaggaattggacctgaaaggaagcggcttccatgtgtctttggagtgggtcactgtcagtgccacattacgctgcgatcgagcctagtggaaacggcctaatgatcgtgtcctattaagtccttcacggctgtttccattgatcagagtcttgaagaaagcatggatgaagacaggccagagaagaccaaagatcctctgtattactggcaacaaactgatgatgatttgacagtgactgtaaggctccccgaaaactgtgctaaggaggatattcgagtacagtttttgccagagagcatcaatgttacactgaaggatgtccaggttctggaaggaaggctctactcatctgttgaccacgaaagcagtacatggacaatgaaagagaatgacggcttggagatttccttgattaagaagaatgagggtctgacatggccagagctgttggttggtgacaaacagggagaacttctgagagacccagcccagtgtgccgaaatagcagagcgcttgatgcacctgacctccgacgaactgaatccaaatccggataaagaaaaacctaccctgtaatgctcaggaattagaagaatgtgatcttttctttgaagagagctccagtttatgcagatttgatggcaatacattaaaacaactcatgtggtgagccttggcagcaaccagtacctgttctcagtcgtcgtggaccctaaagaaatgccttgcttctgtctgcgccacgatgtcgatgccctcctctggcagccacactgcaacaagcaggatgacatgtgggagcacatcgccaccttcaatgccctaggttacgtccaagcatcaaagagagacaagaagttctttgcctgcgcccccaattactcctatgccgccctctgcgagtgccttcgtcgcgtgttcatctatcggcagcctacccccatgtccaccgtgctgtacaacagaaaggaaggcaggcatgtggggcaggttgctaagcagcaagtagcaagcctagaaaccaacgatcctattctaggcttccaggcaacaaacgagaggttattcgttctcaccaccaaaaacctcttcttaataaaagtgaatacagagaattaatcctccagcatttggctgaacagtacccagtggtacctggaggcctgaacagttggactgtaacttgttaagtttgaatgtgttaaataaaaatatcttttatgaagttttattttaagggatattggaaattattcaagagattatgaatctgtgaacgctatgggatagaagctgtggacttagagaccattgggttctgtaaaaa

SEQ ID NO: 3107 - DNA, 1768 bp, Cricetulus griseus
  modified_base (1262)..(1262): a, c, t, g, unknown or other
ggagcacaacagagtgtgtgatgtgcttaaacaggagcatcctgagtgggacgatgagcagctattccagacgagcaggctcattctgataggagagactatcaagattgtgatagaagactatgtgcagcacctgagtggctaccacttcaaactcaagttcgacccggagctgcttttcaaccagcagttccagtatcagaaccgcattgcagctgaattcaacacactgtaccactggcaccccttgctacccgacacctttcaaatcgaggaccaggagtacaactttaaacagttcctctaacaacaactccatcctcatcgagcatggactcacccagtttgttgaatcattcaccagacagattgctggccgggttgctgggggtaggaatgttccagttgcagtaaaagcagtggccaaggcctccattgaccagagcagagagatagaaataccagtccctcaatgagtatcgcaaacgcttctccctgaagccttatacatcatttgaagaacttacaggagagaaggaaatggctgcagagttgaaagccctctacagtgacatcgatgccatggagctcgtaccctcgccctgctgggtaggaaaagcctccgtccagatgctattcgtttggggagaccatggtagaactcggagcaccattctccctgaaaggacttatgggtaattccatctgttctcctcaatactggaaaatgtgcaagatccacagcctaccaaagcagccaccatcaatgcaagtgcctcccattccagactagacgacatcaaccccacagtgctaatcaaagggcgttcaactgaactgtagaagtctattggttatatttatttatttatataaacaatttaatttaattatttaatatttataccgaatgctcttttcacttaacatcttctataacagaaggccatgtgtcctgagcaatgttagatttgtgaagattcctgtgtttgtactttgggtatgtgttgccctcaagtgaaaagagaaaaaacagctttcactcttttacataaaccagtggaaatgaattttgataatttttttacttgaatttcagctcatgtttgaaatttctaaattgagagcttgaatcccctttgaatgctctcactttcttaagctgttaatttggacccataccaataaatcagctatcataaacataaatctctaaaactagtagaaattacattatgattactaggttaaaaaaaaaactntgtcagggattttcttttctcagtaggagtggaatgctacttagaaatgtagggggtttgtgacaagaaagttgcattcttgttgtgaagcatggctttcttacaaacaaagtcagttagtgagtagttctgggcaatagtagtaaacataaaaaatactgaagataattctacatctcattatcagctgaggtactgtatattactgaatttattgaggataattatgtcttttagacattattgttataaactatgtttaagcctacaagtgtttgtttttgcattgtgtcaaaaatcaatgtaccatttttgtgattacctctctgaattacctgtgtaaacaaatacaaacaaaattatgagattcatgttcttagataaattttaagaaaactagtctgctatattgagaagtttaaagatggaatttactgacatcttaaacattttgaaggccctgtaggtgctttgttaattagttaaaacttaccttattaagaaat

SEQ ID NO: 3108 - DNA, 1767 bp, Cricetulus griseus
tataaggagataaatacctgctttcaaaaaatcccaagctaaacataattgggtcagtaagtaataaatcttagaattcactaggggatggggtagtataacaagttctttattggctcgtagttaaacctgacaccaaaatgggtatttttagtctctctgcatgtgaagtttggtgcaagatagaaccataatacatagtgtatacagagggtagatgtgctttgttcatcttaattgcaaagctgccaaaatagctgaagcttaactacttgacttgatttctaggactggggcttggagaaaaggaacagatgctcctctgagactttgattacagaagccttatatgtattgattttgtattgtaactcaatgccattgttgtctaaatctaactcttttaagttagcaagttagcagcgatatttttttccccacaaaacttaatggcatgaaggatcacatgacacactaggaaaggccagtttactgccacttgctgttcctttggccactaggaggcgctgttacccttcattaaggtttagatgagcctattgaaaaccaaatcctttaaagaaacaattttaagatgttttacttaatatctagaaggaataatactcagtttttccctacttaagaaagaaggtataatgctgttcagcttcagaacacagcttctaaccaattctacattcattttcttatttgacatactgccacaaagtagtctttgagttcattagaaaattttaacagcatagatttttttaatgtttttttttgttgttgttgttgtttgttaaaacttttcacagatattttatttacttgctgacgattcagggaattctgagaccctgagtttagaaacatctggtctacctcagttaaatgttgactgcttagaagtagagctgaaatgatcaccacagccataaaattgtttgactaagaaagatttatataatgttaacaaacctggaatcaagtgtggatcttacctgaaagttaaaagttagttacctgttagagcaagtatttaattcaggtattttcaagttttaaaacttgtttacctagtaaaattaggtatagtttttttctcacattaaaaagtccattgaaaatgtattccctaatttgcaatgttttccccataaaatttaagtgtgaaagaactgtagtttactagatatgtttggggtgggatgttgtgttaggttttctttttctctttaacccatgtaataagcttccaaaagagtataattgtttcagaacaaattattttgtaattttacttttttttccaattttctttacagtgttagatactttaaaatgaaaaattatgcactctctgactttaatttaactaatataattttcttgggaattcataagtttcaaattaccatcctctaaacctttcttatagcacagccagcatttgttctctcaccaaaccccatgccagactcatcataaagaaagctcagcctatgtagttcaaatagtgctcataattttagaggggggtgggtagcatttagtaaatattccaactggttgttttatgcacaaggctacagtcagaacataaggaaaaaaaaacattactgtgaatgaaacattgtatgttcagattttgtaaaagacatttttaaaagcccaatttacagccgtatattttcttatgatgtaatttatgaaaaagctgtctgtactaacaggtgctgtaacactactgttgttggg

SEQ ID NO: 3109 - DNA, 1766 bp, Cricetulus griseus
ggaacaggaagccccgaagggtcaaaaggaatacaaaagcaaagtctggttgctttgcttgaagccgttgttctttctctctttctttcctatttttttaagagcgagtggccttggcggcggcggcggcggtttgacttagacgccgcgggggtgagggaggctcgcctcccgcgctctggtaggtctatcacatccctgctgtacagactggacttgactaagactccttgagtacctgagattctccattaaaatctgctttggaaacaagaacagactatccattatggatggaggggatgatggtaacctcgtcatcaaaaagaggtttgtgtctgaggcagaactagatgaacggcgcaaaaggaggcaagaagagtgggagaaagtccgaaaaccagaagatccacaagaatgtccagaggaggcttatgacccccggtctctgtatgaacggctacaggaacaaaaagacaggaagcagcaggaatatgaggagcagttcaaattcaaaaacatggtaagaggtttagacgaagatgagaccaacttccttgatgaggtttctcggcagcaggaactcctagaaaagcagcgacgagaagaagagctggaggagctgaaggagtacagaagtaatctcaacaaggttggaatttctacagaaaataaggaagtcgagaagaagctggctgtgaaacccatagaaaccaagaacaagttctcccaggcaaagctgctggcaggagctgtgaagcataagagctcagagagtggcaatagtgtgaaaagactgaaaccagaccccgacccagatgacaaggctcaagaggctccatcctgcatgactcttggaagctcttctctgagcggaccctccatccattgtccgtctgctgctgtctgcatcggcatcctccctggcttgggtgcctactctgggagcagtgactccgagtccagttcagacagcgaaggcaccatcaatgctacagggaagatagtctcttccatcttccgaaccaacaccttcctcgaagcaccctagctcctgacattaccacagggagcatctccccagagggttagatgtctgtcctgcctcgacatcatctccctcaaaaaacttcatctgcttcctgtgcacatgtaacattttaacctaactcagaaatgtgccacagtccacttgtggctcaaactctgcttgatttttctgtaaactccagtgcagatgactgaacctgtcccactgatatgaggggttagggtgcaggcaagtctcagaaatgccctcagaaatgtacctgtgcaaggacaggtaccagctggcttgcaagagttcactggaccttgttgctttcttgtttttctcctttcccagtagcacaggaagcaaggacagacattatctcaatactctgttacaggggaaggggctgcttggttctaccatgttgtgtgtgggcagagagaaaggggctgactagctgatgccatgagcactgtcctagaattaacccttcctggatgttgtgtgactaaagattgcaaaccatacccacaaggctatgtgccacccacagcccttgaggtgatgcccttccatgttctcctccctccacccagcctgaggaggtaggaaggacctggtaaatgacatgtccatcttctgcccacctttttctccatggaaaaattgttttttgattttgtttttgaaataaaaaaaatagtttaagaattctaaaaaaaaaaaaaaa

SEQ ID NO: 3110 - DNA, 1766 bp, Cricetulus griseus
gctgcgccgcgccccgccccgcccagcctccgcaggtacttgtggcccacacaggcttcatgtggaaagtagaacgtgtgtgtggcaaagaaggggctctcctgtgtgccacagaatcaagaactgtctaagtgcacacattgctctgtgctttgatcctctagcattgaccatgtccatgcccactgagggcaccccaccacccctaagtggtacccccatcccagttccagcctacttccgacatgcagagcctggtttctcccttaaaaggcccaggggcctcagccggagccttccacctcggccccctgccaagggcagcattcctatcagccgcctcttccctcctcggaccccaggctggcaccagccccagccccggagggtgtcattcctgggtgaaacctcagagaccctgcagagtcctgggtatgacccaaaccggccagagtccttctttcagcagaacttccagaggcttagccgcctgggtcatggctcctatggagaggtcttcaaggtgcgctccaaggaagatggccgactctatgctgttaagcgctccatgtcgccattccgaggccccaaagaccggactcgaaagctggctgaggtaggcggccatgagaaggtggggcagcacccacactgtgtgagactggagcaggcctgggaggagggcggcatcctgtacctgcagacggagctctgtgggcccagcctgcagcaacactgtgaagcctggggggccagcctgccagaggcccaggtttggggctacttgcgggacactcttctggctctggaccacctacatagtcaaggcctagttcacctcgatgtcaagcccgccaacatcttcttggggccccgaggccgctgcaagctgggtgactttggactactggtggagctgggttcaactggcgctggtgaggcccaggagggagaccctcgctacatggccccagaactgctgcagggctcctatggaacagctgcagatgtgttcagtctgggtctcaccatcttggaagtggcctgcaacatggaactaccccatggtggggagggctggcagcagctgcgccagggatacttgccccctgagttcactgctggtctgtcttctgagctgcgttctgtcctcaccatgatgttggagcctgacccccagcttcgagccacagctgaggccttgctggccctgcccatgctgaggcagccacgtccctggaatgttctgtggtatatggctgcagaagccctgagtcgaggttgggccctgtggcaggcactgatcactctgctctgctggctctggcatggcctggctcatcctgccagttggctgcagcctccaggcccaccagctacaccacctggctctccaccttgcagccccctcctggacagcagcctctccagcagctgggatgatgacagcataggtccctcactctcccctgagaccatcctgtcccggatcactaggagaacctctacccctcgaggcaggtacacaccaagggatgccctggacctaactgacatggactcggagcctcctagaggtccctgccctacctttgagccacggaacctcctcagcctatttgaggattcgttagacccagcctgagccacaggcccagcctcagtgcttttaaacctctaaccctctttcctacctctcccctggaaatttctgtatctaataaaaagtaatgaatcttgggagcacccaaggttgttcatgtggc

SEQ ID NO: 3111 - DNA, 1766 bp, Cricetulus griseus
ggggaagggacagtcggtcgcagaccgcgctgggttgccgccgccgctgccgccatcgtgccagccccacgggtcttggtgaggtgggtgactctccaggatgggagacaagccaatttgggagcagattggatccagctttattcaacattactaccagttatttgataacgacagaacccaactaggcgcaatttacattgacgcatcatgccttacgtgggaaggacagcagttccaggggaaagctgccattgtggagaagttgtctagccttcccttccagaaaatccagcatagtatcacggcgcaggaccatcagcctacaccagatagctgtatcatcagcatggttgtaggccagctcaaggccgatgaagatcccatcatgggtttccaccagatgtttctattaaagaacatcaacgatgcttgggtttgcaccaatgacatgttcaggcttgccctgcacaacttcggctgacctccacctggccagatcctcacgctgtttcctcctccctcctcttcccaatactatctcactcctccagatgctccaaatatcatacacaaatgagcagggccgaggtgggagtaggtgcagtgcgcttctgtcaccacggtgttgtgcatgatgtttggatgctagactagttgcatctgacaggagaagtttgtgttgtaccagcgcatgccttggaaagacttaagtaatgcaaaagattgtcggtttttgtttttgttttattttttgttttattttgtttttttaatctactgacaagttgctctagtaacccaaagaagtgaaggagaaagcagctgcctcaccgcccagatattgatttgttcagatgtttcaatgcctcatgatacaataaaaccacaaaaattttcttaacagtttaaattgttttaattagttaaatagctctttgggcatcaacagttctgaccaattgtctctcatttcaccctcccatctctgcctcatgttaacaatacctgctgcaaggagcaaattgactgaagttcttgtactgaagactctaaagtgagttctgtctgacacctcctgtagcctctgctctgagtctagtagcaggatagatgattctgtagctgctagaaagaccttgaaaaatatggtttcccatgtttagattctatgggttgaagtcccggatggacctgctctattcccaaaagggtcaggatcacattcagagtgcccacattcccgagcaaagcaagagatgttgtactgcctgcttgggatatcgaccagcccccgctgagtatagagtataaattcttcaatatggaagaaatcatcgtaaaggagtctagttctcccctctcagacttttgcagggcatttacacgtcacctccttaccttccacacaccctatgcgctcttcaaatcccaggaagtcttaagtattagggcagtttctgccctgctccttagtatggtcacaggccttgcctagtacaaatctagcttttcatccttgagacctctggatgatataaagcttttcctcatactccacaggttgcctggttacaccagcatagtccaggacagcacacaggaggtatcagtgggactgatctctaagatgctgtgtattgggggatgtaggggttggggagaggtagataccatctgcctcttaatccaccctgtataaaatctgcaatacagcttccatgtatctgtgcctgaaatgtctgcaataaagaagtgtttgtaaa

SEQ ID NO: 3112 - DNA, 1766 bp, Cricetulus griseus
ctggaccactttgtggagaacatggaggacttctccaatgacctgttcagcagttttctttgatgaccctgtgctggatgagaagagccctctactggacatggaatcaagatggaggacaccacccaagatgtggaacgtggagcgtgggcactgggacacaaactgtgctccatttatggtgaagcaggagcagagcccagagctgcctgttgaccctctggctgcctcatctgccatggctgctgctggctgccgctatggccacccctaccactgctgggtgtcagccccatctccaggctgcccatccctcagagtcctcgctctctgccccccttccagccctgtccggcccatggcccgctcctccacggccatttccacatctccgctcctcactgcccctcataaactacaggggacatcggggccactgctcttgacagaagaggagaagcgaaccttgatcgctgagggttaccccatccccaccaaactccccctcaccaaggctgaggagaaggccttgaagagggtacgcaggaaaattaagaacaagatctcagcccaggagagccgtcgcaagaagaaggagtatgtggaatgcctagaaaagaaggtggagacatatacatcagagaacaatgagctgtggaagaaggtggaaaccctagagaatgccaacaggaccctgctccagcagctgcagaaactccagactctggtcaccagcaagatctccagaccttacaagatggcggccactcagactggcacttgcctcatggtggcagccttgtgcttcgttctggtgctgggctccctggtgccctgccttcctgcgttctcttctggctcaaagactgtgaaggaagatcctattgcagctgacagcgtctacacagccagtcagatgccctcccgaagcctactgttctatgatgatgggacgggtttgtgggaagatggccgaggcgccctactgcctgtggagcccccagaaggctgggagctcaaacccggggggccagtagagccaaggccccaggaccacctccgacatgactatatggacagcacccatgagaccaccaagtacttgagtgagacctggccagaagatgctaacgacaatggcaccagccccaacttctcccaccccaaggagtggttccatgacagggatctgggccccaataccaccatcaaactctcctaggcctctccgagacccaggacacaggacggacaccctggcacccagaagaggcattctcttgctcaccgacccagatccagctcctacccctgggactgctcccctgggccaaccactcttgttcccacttcttccatccgtcctctccaataaaccactcactgggcacacacacacacacgaacatatgcacacacaatcacacacccccacctcctactgtacagagatcaagaacagaaattgtttgtaaataatgaaccttattttttattattaccaatcccctaagataatgtattttacaaatctcccttccatcacctctcccttattttgtattttatgaagttagcgcgggctttgctaccccttggctgggacagagggacaccccaccctcacctggcttccccatgccgctgcccaagctgctgggcctttttaattgccaaactgctccctccaccagctcagcacatgctttaagaaaagcaaaaattaaaaaaaaaaaaaagattcagcatacaaaaaaaaaaaaaaa

SEQ ID NO: 3113 - DNA, 1766 bp, Cricetulus griseus
cagcggtggctccggggaggtgctgctactgaagaagaggcccacgggctctttcaactttactccggcccccctgaagaacctgcggtggaagccacctctcgtgcagacctcacccccacccaccacgacccagtccccagaaagcaccatggatgcctccctgaagaaggagaaaaccagccatcctggacctctacattcctcccccacccgctgttccctactctccccgggacgagaataggagctttgcctatggaggatccagtaagggtaaacagcagctgtccgggcgtaagggttcagagtctcctaactccttcctggaccaggagagccaaagacgtagatttaccatcgctgattccgatcagttgccagcttattcggtgggaaccaatgttctacccacaaagatgagaaagaagacaccatcctatggcaaaccccggcctctgtccatgcctgcagatgggaactggatggggattgtggacccatttgccagacctcgaggccctgggaggaaaggggacgatgccctatgccggtacttcagtaatgagcggattacacccatcattgaagaaagtgcatctcctgtgtaccgattctccagacccacaactgagcggcacctggttcgaggcgcggactacatccgagggagcaggtgttatctcaactctgatttacacagcagcgccaccattcccttccaggaggaagggcccaagaagaagtcagccacttcttctgccaaggcatcttctggggagccttcactgctggttagctggctgacgcgcctcaagctattgactcactgaggctgctctgctagcctcctgcctgtctcctgctagcaagtgccttcttcctcagtggatagcttcttcagactccatctgcagtgctccatggcgaccttacttcattccatttttttaaaggttgtatactgctgttcctggaattctgaagtcattggagggcatctaatctagaggatcttaggtgctgtttgtggaggcagaaggaaggacagacacatggcatggcctgcttggttttgcctccccaatgtgggaacatggagacatactttgtaaattgtgtgttggccagacaacttgatgtcaggaattggcaactttgtacacttttgttttcttgggcagcagggactaaggttgatggcttttgtcacatatatgtgttggtttgtggtccaacttctgtatctgaaaaagccgaaggagaaaacttttgatttgggagagaagctatgagatttactgagagccaaaagcatccctcaggaaaatgaagcaacaagatttagggttatgggacattggtcagtttatgttattgacctgtttttgatgtctctcttttaggaaaaaaaaaaaagcctacagtctttcccagttgtacacattttgctaactagaaatatcttggaaagcctcatggtcactgattttcaactagcatcaggtattttgaaaatgtgtgtctgcatattaactcttgtttaaaccgaatgtacaatattttgctagaatgaaaagaagtcctatcttgttaatttaagtgttttaaatagagtttgtatatttttcttactcttagtcacatgtaattgaaatatttctgttttgcgttcatacgtgaaacccaaggaaaggacattcaaagtgttttcagatttacaagtgaccactctggtcattgccagcacgggcactaatattaaa

SEQ ID NO: 3114 - DNA, 1766 bp, Cricetulus griseus
ctgagacggcgggtactcggaaagggagcatgagcaatgggcacggcagcccgggagaaaaggcaggcagtgcccgaagttttagtcccaagagtccccttgaacttggagagaagctgtcaccgcttcctggaggacctggagcaggggatccccggatctggccgggccagagtactccagaatctgacgttggagcaggcggagaagaggaggctgggtcaccccctttctccccacctgcatcgggaggagtccccgaggggactggggcggtggggatggctgccggtgggactgggggtggtccagaccgcctggaaccggaaatggtacggatggtggtagagagtgtggagaggatcttccggagtttccccaggggtgatgctggagaggtcacatccctgctgaagctgaataagaagctggcgcggagtgtgggccacatctttgagatggatgacaacgacagccagaaagaagaggagatccggaagtacagcatcatctatggccgcctggactccaagcggcgggagggcaagcagctcagcttgcatgagctgaccatcaacgaggctgctgcccagttctgcatgagggacaacacacttttacttcgaagggtagaactcttctcattgtcccgccaagtagcccgagagagcacctatctttcctccttgaagggatccaggcttcactctgaagagttaggaggcccaccactgaagaaactgaaacaagaggttggggaacagagtcataccgaaatccagcagcctcccccaggccccgagtcctatgcacccccataccgccccagcctagaggaggacagcgccagtctgtctggggagagcctagatggccacttgcaggaattcgaggaaggcttgctggaccgatgcccggccccaggacctcatcccgctctggtggagggtcgtaggagcagtgtgaaagtggaggccgaagccagccggcagtgagagtggggatgtctcaggcccaggacccagacttctggctcactcagacccccatattctccatccttgaactctagtcaccaccctagaaggatccttctgctgcccttctgccacccatctgccccatgggcacaggactatggggcttcaagcaataacaagcaggggcctggccagaggacactaggagggtgcaaggtgcgccctcacccggctcaggggcatggactttgcctacagcctgctggggctctccctacacacacacagacacacacacacagacacacacacacacacacacactctctctctctctccaatcggcggccaccagtggtatgaacaggctgggatcagcttggatgtgggggaaagaacttcctgagaaggtctagcagttgaaaatggctctgttcgccctgatactggggtctcctggaaaactggatctccccatccccatttttttttttgtgcttctagtctgtttcttttaatttaacaagtgctgcggtttgcccacccatcctcatcccccccctcccagcagttcgttcttgtactgtgtgtgagggctccccacagttccctccaccagcctcttagaggcctgggttagaccctgggtctcctcagtccagcaggaggactgcagcacctgtcaaactcttagagtgtctttcttttcagattgtgtacagtagattatttattttgttattttggaataaaatttattttatggcttaggaaaaaaaaaaaaaa

SEQ ID NO: 3115 - DNA, 1765 bp, Cricetulus griseus
tggagccaagataaccaacaacctcttccagttcgaattcaaggataagacgtggacgcgcatccctactgagcacctgctccggggctccccaccaccgccacagcggcgctatggacacaccatggtggcctttgaccgacatctctatgtgtttgggggtgcggcagacaatacactgcccaatgagctgcattgctatgatgtggacttccagacctgggaggtcgtccagcccagctctgacagtgaggttggtggggctgaggtgcctgagcgagcttcctcttctgaagaggcatcaatcctaacctcagaggagcggagcagctttaagaagtccagagatgtgtttggcttagactttggcaccacctcagccaagcagcctgtccacctggcatcagagctgcccagtgggaggctcttccatgcagccgctgtcatctatgtacatctttgggggcactgtggacaacaacattcgcagtggagaaatgtacaggttccagttttcttgctaccctaagtgcacactgcatgaagactatgggcgcctatgggagggccgccagttctgtgatgtggagtttgtgcttggtgagaaggaagagtgtgtgcagggccatgttgccattgtcactgcacgaagccgctggcttcgtaggaagatcttgcaggctcaagagtggctggctcaggaagctggaggaggatggggccctagctcccagggaggcccctggttcagctgtgggcagggcacggccacccctgttacgtgtagccattcgtgaggctgaggcccggccattcgaggtgctcagtttctctacacagacaagatcaaatgtagaggacgtgctactcatcatggatgtatacaagttggcgctgagcttccagctgtgtcgccttgagcagttgtgtcggcagtacattgaagcctctgtggatctgcaaaatgtactggttgtatgtgagagcgctgccaggctacaactgggccaactcaaggagcactgcctgaacttcatagtgaaggagtcccacttcaatcaggtgatcatgatgaaggaatttgagcgcctctcatcccctctgattgtagagatcgttcgtcggaagcagcagccgccccctcgagcaccctcggatcaacctgtggacattggcacatctttgatccaggacatgaaggcatacctggagggggcaggctcggatttctgtgacatcacattgctgctagatggccacccacgaccagcccacaaagccatcctagctgcccgttctagctattttgaggccatgttccgttcattcatgccagaagatgggcaggtgaacatctctattggggagatggtgcccagcagacaggcatttgagtccatgctacgttacatctactatggcgaggtcaacatgccgcctgaggactcactctacctgtttgcagccccctactactacggcttctacaacaaccgactgcaggcatactgtaagcagaacctggagatgaatgtaacggtgcagaatgtgctacagattctggaggcggctgacaagacacaggcactggacatgaagcggcactgcttgcacatcattgtgcaccagttcaccaaggtctctaagctgcccacactgcggttgctgagccagcagctgctgctggacatcatagactccctggcctcccacatttctgacaagcagtgtgcagagctgggtgccgacatctgaggatctttgt

SEQ ID NO: 3116 - DNA, 1765 bp, Cricetulus griseus
ccattttgggcatttattttgttgtgttttgttttggctggtatgctgtgcatctctttgtgctggtgttgatgtgttatggagtcatggtcactgcaagtatatccaatattcacaggtattcctttctcgtagcaatgggctatcttacgatatgccacatcagccgaatttacatcttccactatggaattctcactacagatttttcagggcctttgatgattgtcactcagaagatcacaaccttggctttccaaattcatgatggattaggtcgaaaagctgaagacctttctgccgagcaacaccgacttgctgtgaaagtgaagccctcacttttggaatacttaagctaccatctcaactttatgagtatcatagctggcccttgtaacaacttcaaggattatgcagccttcattgaagggagacatatacatatgaagttgctagaagtgaactggaagcaaagaggcttccacagtttgccagaaccttctccctctgctgctgtgatacagaagttgtgcatgaccttgatgtctctcctgttgtttttgacactctcaaagtcctttcctgtcaccttccttattgatgactggtttgtacataaggccaactttctaagtcgactctggtacttatatgtcgtcatgcaagccgcaaagcccaagtattactttgcatggacattagcggatgcggtacacaacgcagctggctttgggttcagcggtgtggatgcggatgggcatttctgttgggatctgctctctaacctgaacatctggaagattgagactgctacgagtttcaaaatgtacttagaaaactggaatattcagacatctgcttggctgaaatgtgtgtgctatgaacgggttccctggtaccctaccgtgttcaccttcgtcctgtctgctctgtggcatggtgtttaccctggatactactttacgttcttaactggagtccctgtcacattggcagctagagcggtgaggaacaactacagacatcacttcctttcttccaaagctcgaaaggttgcttatgacgtagttacctgggccgccactcagttggccatctcttacacggcagcaccctttgtcttgttggcagttgagccaaccatcagtttatacaagtctatgttctttttcttacacatcgtaagtctgctgataatctttttcctgccaatcaaaccacgtcagcctcaaaggcagcctcaaagtgcaaattctgtaaagaagaaggtagactgatacctacagagagaagcagaacaacagaattgcaggacattgggaagacacaatggacaggcttgagggtcctccagtgacttggaggagatgtttacatatgttctttttttcactgcagggaatatttttatttagttccttttttttgtacagttaaaaatcaccatgtctagctttgtcttcatactttacagagcctttcagtgatacagtgtagaacaggccactgggtcagctcttctgaaatcatttccatctattgaaatctggatgcgtggatccaggcattgcctccagtacttatgaggtgtcttctgagacgacttgtcctagatttctggaattagaacattcccaggcatgattttccctggcaactctggacccttggatgtgtgacttacctggttgtggacacaactcctatgtccagaagccctcaaagggaagtgattacagagggatgtttttagggtattgaaaaa

SEQ ID NO: 3117 - DNA, 1765 bp, Cricetulus griseus
agcgcggcctgcgccccgccactgcgcagccgcgggaagacggtaccacggcgcctgcgacatgggggggcgcggaggagacgccggaagtcgcggtggtacgggtcggcccgaggggtactctgcgcccgcagcctccacccgcgcggcggctgatgataaccatctcccaccccagaccaaaaggagcagtaggaaccccatcttccaggattcctgggacacagagtcctccagcagtgacagcggtgggagcagcagtagcagcagcagcatcaacagcccggacagggccagtggaccagagagcagcttgagccacatcatccctggatcctgccccagcaccccccagccggtgcccgagcagtctgcactgtgccaaggcccttacttccttatcaatcagaccctgaaggaggcccactttcacagcttacagcaccgaggtcggcctctgacatgatgctccggcagtttcttgccttctgtgaagggacagcactgtgcagattggatatttcaacttaatgatttgtttttaaaaagttgtcacacagaaaaaaaaaaaaaatgcctgttggctttcagtctatatttgagtccctgccctgctatggggccacattccatcagaaccaggaagactggtggtgtaggaacacaacagaggcacctctagtcaaaacggtgcactagtatttaatagagagccgggacattgtttccatgctactttgtcatactagagagccaggcaagcttgaataaggaaggcgcaggtgagtcgtcttcctcgccggcgagctgtctgaacaaggagccaggatgcgtctggtcacctactctggagagtgcctgggagccaacctgccattagatgaagaggaagtgccttaagcgtcaccctcagcctcctgcctgctccccctccacggcatcccactcagaggccacacagcacaggcagcagcactgaggagcagggatgactagtaagaagggtctggagggacttgttggaccagagcgggttacactttgatacagctacagtctgaaggaggcccatgccaggaggagtgaacatgcgggccttccatggcctgctcctctgggggccgcagcacggaaaggccagctgtgtgatatggaaactagtgtcatgaagcccgcagttcagaaagaaagtttttttcttttaggactttttccagattttaaaatcagatgtttgccaaaacttggatcttactggatttgctggcagggaatgtgggaaaggatacttgactggaattctgtgtaacaggcaaacagaactataagagaagctgtcaagcacacatgtacacaacacaacccagaaatacccaggagggctccggcaggcttatggatggcgtcctaccaaaacaaaacatgtattaataaaacaatgctcaaggaagcccggttcttcctatttcccacccaactaaaggcacagatgaaaccatccgcaagacaaagggtcttctccccatgctgatccaagtgctgaaatgccagccaacagtctctttaccctacaaaatgcaagaaaccatctctatcccatgctgtgtgttcttaacggtctgggtctgggtccctttctgctttaaggctatttgctcgagctgatgaaaatctttcttataagctcaagctaagtgaaaccttgtattctgttgcgccgccattaaaagcagccttagtgcattgaccaaataaaaaaaaaaaa

SEQ ID NO: 3118 - DNA, 1765 bp, Cricetulus griseus
cgtccggctccgtgtggctctccgctcccgccatgacctcgctcacccagaaccggtacttccagaagctgcaggattggcaccgcgataacagtgccgacatcaacctgcggagccttttcgatgccgacccggagcgcttcaacaatttcagcttgaacctcaacaccacccatggacatattctggtggattactccaagaaccttgtgaacaaggaggtgatgcagatgcttgtggacctggctaggtccaggggcgtggagactatgcgggacaacatgttcagtggtgtgaagataaactacaccgaggatcgggcagtgctgcatgtggccctccggaaccggtccaactcacccattgtggtggacagcagagacgtgatgccagaggtcaacagggttctggagaagatgaggtccttctgccagcgggtccggagcggcgaatggaaaggttactcgggcaaacccatcacggacatcgtcaacattggtatcggaggctctgacctgggacccctcatggtgactgaggctctcaagccctacgcttcaggaggtccccgcatctggtttgtctccaacatcgatggaacccacattgccaaaacattggccaacctgacgcccgagtcttccctgtttatagtcgcctccaagaccttcaccacccaggagaccatcaccaatgccgagacagcaaaggagtggttccttggcgcgtccagggatccgtctacagttgcaaagcactttatcgccctgtctacgaacacgtccaaagtgaaggagtttggaattgaccctcaaaacatgttcgagttctgggattgggtaggtggccgctactcgctgtggtcagccattggactttccattgctctgcacatcggttttgacaacttcgagcagctgctctccggggctcactggatggaccagcacttccgcaagaccccgctggagaagaacgccccggtcctgctggctctgctggggatctggtacattaacttctatggctgcgagacccacgccctgctaccctatgatcagtacatgcaccgctttgccgcctacttccagcagggcgacatggagtccaacggcaagtccatcaccaggtccggtacccgggtggaccaccacacaggccccattgtgtggggggagccagggaccaatggccaacatgcattctaccagcttattcaccaaggcaccaagatgataccctgtgatttcctcatccctgtgcagacccagcaccccatacggaaaggtctgcaccacaagatccttctggccaacttcttggcccagacagaggccctgatgaaggggaagtcaaacgaagaggctaagaaggaactccaagctgccggaaagagcccggaggacctggagaaactcctgccacacaaggtctttgaaggaaatcgcccaaccaactccatcgtgttcaccaagctcacaccattcattctgggagccttgattgccttgtatgaacacaagatcttcgttcagggcgtcatctgggacatcaacagcttcgaccagtggggagtggagctggggaagcagctggcgaagaatatcgagcctgagctggacggcagcgctcccgtgacctcacacgactcctccactaatgggctcatcaagttcatcaagcagcagcgggacatcagaatagaataagtcagccgtcctgcccctccctgcccagagcacacctcccggcatgggcttggact

SEQ ID NO: 3119 - DNA, 1765 bp, Cricetulus griseus
caacttcgaaggagaatatgactacgtgaccaatgagggaacagtgttcacatttaagacgaaccgcaattctcctaattatcgtctgatcaacatcgacttcacggaccctgacgagtctaagtggaaagtgcttgtcccagagcacgagaaagacgtcttagagtgggtagcttgcgtcaggtccagcttcctggtcttgtgctacctccacgatgtgaagaacattctgcagcttcacgacctcaccacaggtgctctcctcaagaccttccctctggacgtgggcagcgtggtggggtacagtgggcgcaagaaggactccgagatcttctaccagttcacgtcctttctgtccccaggtgtcatttaccactgtgatcttaccaaagaggaactggaacccacggttttcagagaggtgacagtgaagggaatcgatgcttctgattaccagacaatccaggttttttaccctagcaaggacggcaccaagattccaatgtttattgtgcataaaaaaggcataaagttggacggctcacaccctgctttcttatatggctatggtggcttcaacatctccatcacacccaactacagtgtgtccaggctgatttttgtgagacacatgggtggcgtcctcgcagtggctaacatcagaggtggtggtgaatatggagagacgtggcataaaggtggtatcttggccaacaaacaaaactgctttgatgactttcaatgtgctgctgagtatctcatcaaagaaggctacacgtcttccaagaggcttaccatcaatggaggctccaacgggggcctcttagtggctgcttgtgcaaatcagcgtccagacctctttggttgtgtgattgcccaggttggagtgatggacatgttgaagttccacaagtttaccattggtcatgcctggaccactgattacgggtgctcggacagcaagcagcactttgaatggcttctcaggtactcacctctgcacaatgtgaagcttccagaggcagatggcatccagtacccttccatgcttctcctcactgctgaccacgacgaccgggtggtaccactgcactccctcaaattcatcgccacgctccagtacatcgtgggccgcagccggaagcaaagcaaccccttactcatccacgtggacaccaaggctggccatggggccgggaagcccactgctaaagtgatagaagaagtttcagatatgtttgcattcatagcacggtgcctgaacatcgagtggattccttaaatgggttcccagcgcctccaacagtcacagaaaccctcaagggctttcacaccaccttgaccaagacaccactgggcagagtgctgcccgtgtgagcactgtgcctccgctcacagacagcaactgagcagagctgcgtggggattttaatcttttctaggcttctcctttgtagcaagcccttgatgttttgtcttttattttcttcccactctatcaaggcacatagttttaaaagggggaaaggggggcatgtttggataagaaactaaatgacagtgaacataatgtgactattagattcctggattgagtaagggggtcatagttgggcatacacatatataataactcaatgaagttgcttctctaaccataacatatatccataaataaatgggagacctcaagggagactccactgcagtgctaataaatgctatcgaagaaaaaaaaaaaaaaaaaaaaaaaaaaaaaaaaaaa

SEQ ID NO: 3120 - DNA, 1764 bp, Cricetulus griseus
tcccagtctctcaagtcgattcctgagaagtttgtggttgacaaatctaccgcaggggctctggacaaaaaggaaggtgagcaggcaaaggccttgtttgagaaggtgaagaagttccggctacacgtggaagaaggtgatattctgtacgccatgtacgtccgccagaccgtgctcaaggttatcaagttcctaatcatcattgcatacaacagcgctctggtttccgaggtccagtttacagtggactgtgacatagacatccaggacatgacgggctataaaaaacttctcttgcaatcacaccatggcccatctgttctctaaactctccttctgttacctgtgcttcgtaagcatctatggcttgacgtgcctttacaccttatactggctgttctaccgttctctccaagaggtttgcggtgttcctgtctgaagtcagtgagaacaaattaaagcagctcaatttaaataacgagtggacccctgacaaactgaggcagaagctgcagatgaacgcccataaccgcctggagctgcctctgatcatgctgtcaggccttccggacaccgtgtttgaaatcacggagttacagtctctgaaactagagatcattaagaatgtcatgattcccgccaccattgcccagctggacaaccttcaggaactctctctgcaccagtgttctgtcaaaatccacagtgcagcactctctttcctgaaggaaaacctcaaggtcttgagcgtcaagtttgatgacattcgggagctgcccccctggatgtacaacctccgcaatctggaagagctctatctggtcggctctctgagtcatgacatctccaaaaatgtcaccctggagtccctgcgggatctcaaaagccttaaaaatcctctccatcaaaagcaacatctccaaaatccctcaggctgtggtggacgtgtccagccacctccagaagatgtgcatccataacgacggcaccaagctggtgatgctgaacaacctgaagaagatgaccaatctgacagagctggaactggtacgatgcgatctggagcgcattccccatgctgtgttcagcctgctcagcctccaggaactggacctgaaggaaaacaacctgaaatcgatagaagagatcatgagcttccagcacttgagaaaactaaccgtgctcaaactgtggtataacagcatcacctacatcccagagcacatcaagaaactgactagcctggaacgactgtttttcagccacaataaggtagaggtgttgccttcccacctcttcctatgcaacaaaatccgatacctggacttgtcctataatgacattcgcttcatcccacccgaaataggagttctgcaaagtttacactacttttccatcacttgtaacaaggttgaaagccttccagatgaactctacttttgcaagaaacttaaaactttgaagattggtaaaaacagcctctctgtgctttcaccaaaaattggaaatttactatttctttcctacttagacatcaaaggtaatcactttgaagtcctcccccctgagctgggagattgtcgggctctgaagcgagctggattggtcgtggaagatgctctgtttgagactctgccctcagatgtccgggagcaaatgaaagcagagtagcttatttttacatcaaaacatgattgaaacacgcttctaccaaatacaatataaagaattaggtagtcttaatgcctttccaatattatgttt

SEQ ID NO: 3121 - DNA, 1764 bp, Cricetulus griseus
ctttgagctcttggcttgtctttcccaacatgggctagagcgggagaagctgctggaattcagctctgccagaggtcaggaagagctctgggagtactgtaatcggccccgcaggaccatcttggaggtgctatgtgacttcccacacacggcggctgccatccctccagactaccttttggaccttatccctcggatccgtccacgggccttctccatcgcctcctccctgctggctcatcccaggaggctacagatccttgtggctgtggtacagtaccagactcgtctcaaggagccccgtcgtggcctctgctcctcctggctagcatccttgaatcctgagcaaggacttgtccgggtgcctctatgggtgcgacctgggagcctagtgttcccagagacaccaaatacccccattattatggtgggcctggaactggtgtggccccctttcgagcagccattcaagagcgagtggcccatggccaaactggaaacttcttgttctttggctgccgccagcgggatcaggacttctactggcagactgagtggcaggaactagagaagaagggctgcctgaccctggttacagccttctctcgggagcaggagcagaaggtatacgtgcagcaccggctccgagaactagggccacttgtctgggagctgctggatcgccgcggtgcctacttctatctagcgggcaatgcaaagtatatgcctacggacgttgcggaagccttgacatccatttttcaagaaataggacaactctccaacccagatgcagctgtctaccttgccagactccagcagacactgcgcttccagactgagacctgggcctgaggagctacttgctagctcactcccacataacagctgcactggcactgtgccttagctaccatcagatgaagaggataatctcatgccccctcagggtgccaggagtccagacagtaagcctgaactgggagccagagactcaactggtgcttgggccctgtcaactatggaggagcaggaagagggtgaggggcaggcagaggaggaatgccccatctgcactgagccttatgggcctgatgaacacctacccagccctgctgaactgtggtcacagcctgtgtgtgggctgcctgcaccagctgttagggatgacccccagagctgacctgggccgtgtgtgctgtccactgtgtcgtcagaagacacccatgctagagtgggagatctgtcagctgcaggaggaactgcttcgagctgatggaccccagcgcccagcgctcactgcatccaccatacccctccgtcctgaccctgggccctggggatccttagagcaccgctaccagctgcgttttctggcagggcctgtgggaggccgaagctgtctccccttcctaccctgcccacccagcctaggtacctggctgtgggcacttcgggaacgtggcccctgtgcccgccgcctctcactgctaagccttctagcattagaactgctggggctggtgctcatcttcatgccactcatgttactaggagtgctcttcatgctcctagaccgttccggccgctaagcaaagcccagaaccaggcagtggtggcgcacacctttaaccccagcacttgggaggcagaagcaggctgatctctgtgagttcaagaccagcatggtctataagagttagttccaggacagcatccgaagccacagagaaaccctgtctaaacaaaaaaaaaaaaaaagtt

SEQ ID NO: 3122 - DNA, 1764 bp, Cricetulus griseus
atctctgaggtgtctgaactgctgggcacctatgagaaagccaaacagaaagaccagctgaccatccagaagctgaaggagcggattctgcagctggacctggaaaacaaaacactggccctcgcggcctctagccggtcccctctcgacagccatggggatgaatccagtctggatatcaacgtcttgaaggataagatggaaaagctcaagaggctactgcaggttgcagctaggaaaagccaggtgaccctggatgtggagaagctctgtgaccctgaagataatgcccagctcagaggctgctgatggggaaaaggctactgcactctactaccaacaggagctgaagcagctgaaggaagagtttgagcgctacaagatgagagcccaggtcgtgctcaagaacaagaataccaaagatgggagcctggcgaaggagctggaggcagcacaggaacagcttgctgagctgaaggagaagtatatctccctgcggctgtcctgtgaggagcttgaaagccagcaccagcaggaggctgaggactggaagcaggagctggcccggctgcagcagctccatcggcaggaactggagcatagccagctggacttcagggaccgcacactgaaactggaggaggagctgcataagcagcgggaccgggccctggccgtgcttgccgagaaggacttggagctggagcaattgcgttccgtggccttgtcctctgggttgccagggcggcaggagccctgtgggtggagtgggtggtggaggtcttggggaccctgctgacacagcctcctcacatagcctgacccaagccttgcagctcgctgcagccaatgagcccaccttcttcctttatgctgagcagttggcccgaaaggaggtggagatcacctcactgaggaagcagaaacacaggctggagatggaggcccaccagctgcaggacagggaaggagccaacctggagtatctcaaaaacatcatctaccgcttcctgaccttgccggacagcctgggccgccagcagacgctcacagccatcctgactatcttacacttcagtcccgaggagaagcaagtgataatgcccaactcctgagatctctgtgcctcttttatgtgggaagggcaggctcagatttttacgcctcgtctctcacattctcacttatttcttcactgtgttgaactcacagcagttcaaagtaggatggggttttctgccaagtgccattaatgcaaccctattcttgggctctagggatactgcaggtgttgagacagcatcttctgggggtgtgtatgtggagcagagtagggagagaggctggggctaagaagtgcaagttagggaagtggtgagagtctttaggaataagatgttttattatgctcctagctcggagttaggagtaatgtcactcccagaggagctcatctgactttggaacatacacaataactatgtgtgtatttcttgtcagagtctggtctacttttgtcctaatttttctggggacataaaatcaagctagaaagagaccaggaagttagaaatagtaaaggtttgtccaaagggctgtggcatggtagagttcatcccagaacttggaaccttggttccagggaccagcccaccattcgtgaccatcctagagagggtcctgagcaccgatgtgacctcagagatttcccaagtgatctgatatgggccaggacgggattaaaaagaacctcttttgctcaag

SEQ ID NO: 3123 - DNA, 1764 bp, Cricetulus griseus
ggggatctgacgtcaggtcgcgaggtgctttccagccgcgagctgtcaggcgggtgtcagacccggcaggtacgaggcgcgctccccggcgcccccgcccggccggccgtcccgcaccccaccgaggccgcgtgggccggaagccgccggggaaggcttcctagaggtccagcctagcccccaggcaccatgtcggacagcgatctaggtgaggatgaaggccttctgtcactggctggcaagaggaagcgcagggggaacctggccccaaggagtcggtgaagatcctccgggactggctgtatctgcaccgctacaacgcctacccctcagagcaggagaagctaagtctctcagggcagaccaacctctcagtactacagatatgtaactggttcatcaacgccggcgtcgccttctccctgatccatgccgctccactcgagccaaggtgaaaagccaggtagtccccgttcccgcaggtggagctggaatcccctaaggccctggtgacccctggaagcacactcactctgctgactagggctgaggctggaagccccacaggtggactcttcaatacaccgccacccacacccccagagcaggacaaggaagacttcagtagcttccagttgctggtggaggtggcgctgcagagagctgctgagatggagcttcagaagcagcagaatccagcaccccgttatacacacttccctcctctggtctcggaaatgaccaagtaggcacctgctaccaggctgcttgaggctgcactgttatgggggcctgtactctgctgactacattccttcaaacttcctctctgaggagaccaacgcaccagagccaggcatggtgttgctgctgcttctccagagagccctgggacacctgcactccagcctgctttcctaggcaggctcaggaaacctgccaagttcagacttgagctaggtccaagctgccctaagctgtgcctcttttggtcaagccaggtgtgcacattccaacctactcaaaggacaaaggaaaagacccagcagacatcacagaaccgactccagttgaatgtttaggtttttgctaaattgttttccttttgctgtggtttgcattgatggcagtaagtagcccggaagcatgggtgtgggggagagagcaccttatacgatggagctttataaacggggtgatctaccactgcattggggatgattgtataagggaccagcaggatctctgcagccgtgctgaattccacctggaagtggttgtttgagtcttggtttggactactctattgtaaaagagaaggaaaatacctacaggtgttggattatttgcaccagacagtgagccatctgctggtcaggaggcccttcaaacatgccactggttccacagaggtagctggaaccttcctggcttcatagagtttgctgattgcctatttctgccccaactgtctgtgatcctagatcccaggattgctgcaggatacctatggtagggggtgatactggggtgggtgggagttttctccccccacagtgcactgagcaggggaggagggagggagccatgctgctgacatattctggcattcccccctcctgaaataaaatgggccatctgagggatggggcagtctctgccttgtgttgtttataagaaatctggagaagcatggttgtcccattgaacaatatttgagcagaaaactactgtaaataactggtttttttgtcttttgtcaaa

SEQ ID NO: 3124 - DNA, 1764 bp, Cricetulus griseus
aaggagtcggccaaggaaaagcaactgaaggaagaagaaaagattttggagagtgtggcggaaggccgagccttgatgtcagtgaaggaaatggccaaaggcatcacatatgacgatccaatcaaaaccagttggacccccccacgctatgtcctgaacatgtctgaagagcggcatgagcgagttcggaagaggtaccacatcctggtagagggagatggtatcccaccgcccatcaagagtttcaaggagatgaagtttcctgccgccatccttcgaggtctgaaaaaaagggcattctccacccaacacccattcagatccagggcatccctaccattctgtccggccgggacatgattggcattgccttcaccgggtcaggcaagacactggtattcacactgcctgtcatcatgttctgcctggaacaagagaagcggttgcctttctccaagcgtgaagggccttatggcctcatcatctgcccctcgcgagagctggcccggcagacccatggcatcctggaatattactgccgtctgctgcaggaggacagctcacccttgctgcgctgtgctctctgcatcgggggaatgtcagtaaaagagcagatggagaccatccgacatggtgtgcacatgatggtagccacacctggacgcctcatggatttgctgcaaaagaaaatggttagtctggacatctgtcgctacctggccctggatgaggctgaccgaatgatcgacatgggctttgagggcgacatccgtaccatcttctcctacttcaagggccagcggcagactcttctcttcagtgccaccatgccgaagaagattcagaattttgctaagagcgccctggtaaagcccgtcaccatcaacgtgggacgtgctggagcagccagcctggatgtcatccaggaggtggaatacgtgaaggaggaagccaagatggtgtacctgctcgagtgcttgcagaagacacccccacctgtgctcatctttgcagagaagaaagcagatgtggatgccattcacgaataccttctgctcaagggggttgaggctgtggccattcatgggggcaaagaccaggaagagcggaccaaagccattgaggcatttcgggaaggcaagaaggatgtcttagtggccacagatgtggcctccaaaggcctggactttcctgccatccagcatgtcatcaattatgacatgcctgaagaaatcgagaactatgtgcaccgaattggccgcaccgggcgttcaggaaacacggggattgctaccaccttcatcaacaaggcctgtgatgagtcagtgctcatggacctcaaagccttattgctggaggccaagcagaaggtaccgcctgttctccaagtgctgcactgtggggatgagtccatgctggacattggaggagaacgtggctgtgccttctgtggaggccttggccatcggatcactgactgccccaaacttgaagctatgcagacaaagcaggtcagcaacattggccgcaaggactacctggcccacagctccatggacttctgagccgtctgtcttccctcttctccccaagaggcatcagttgcaggactccagccgtgcatacaccagccctcaagacaagaagccagcccccttggcccagctggcctgggcagtcccagtgcccccagaattactatttttgttcttcccctgctgtcattaaagcacaatcccttctcttaaaaaaaaaaaaaaaaaa

SEQ ID NO: 3125 - DNA, 1764 bp, Cricetulus griseus
  modified_base (1605)..(1605): a, c, t, g, unknown or other
ctccagtacaagcagtttctgtgttctgtgatcaatgtcactcacaggaacttaagtaacaaacgaaatgagcctggggcgtggaaaatatgacttttatatcggtcttggggttggctatgacctccagcattttcattggagggagtttcaattttaaaaaaaaaaaggtcttttacgactagccagaaaaggctccatgagagcaggtcaaggtggccatgcatatcttaaagaatggttgtggtgggctggactgctgtcaatgggagctggtgaagtggccaactttgctgcgtatgcgtttgctccagctacactggtgactccgctaggcgctctcagcgttcttgtaagtgccattctgtcttcatacttcctaaatgaaagacttaatcttcatgggaaaattgggtgtttgctaagtattctagggtctacagttatggtcattcatgctccaaaggaggaggagattgagaccttaagtgaaatgtcacataagttaggtgatccaggttttgttgtctttgcaacatttgtggtcattgtggccttcatattcatctttgtggtaggacctcgacatggacagacaaacattcttgtgtatataacaatctgctctatgattggagcattttcagtctcctgtgtgaagggtttgggcatcactatcaaggagctgttggctggaaagcctgttctgcagcatcccctggcctggattctgctgcttagccttgtggtctgtgtgagtacacagattaattacctaaaccgggctctggatattttcaacacttccattgtgactccaatatattatgtgttctttacaacttcagttctggcttgttcagctattctttttaaagaatggcaagatatgcctgttgatgatgtcattgggactttgagtggcttcttcacaatcattgtggggatatttttgttgcatgcctttaaagatgtcagttttagtctagcaagtctgcctgtatcttttcgaaaagatgaaaaagcagtgaatggcagtctttctagtatgtatgaagttcttaataataacgaagaaggtttaccctgtgggattgaacacactactggtgataccatctcccgtagaaatggaaatctgacatctttttaaggatatgattgaaaacctataattgttaagtgatttttgagtatcagaatgtatctgggaaaaaaaaaactgtcctcaaataatgtcctctgaagacaatcttttttaagttttcactaatttggatcaagaaattacttttcttatatttaaacaatggtagctcactaaaatgacctcagtacatggctaatttctagtaacattgtattattataaaggtattttacatttttattcattctccagaaatctaaatgcactaatgacaattttaagcctataaaaatgttttatttttttccattggtgatgaacattaaaatagttacattttgtgattcctattccatcaatccctcaccatactaaggttttttgattataaatatatgtgtgtgtgtggttccaagaaaataattctcaggtggtgatttgtcacccaaacatcnggtttcccactcgaatttgatggcctccttttggaaagcaccagtgtccatagtgactagaggtacttcctgtgtccatagtgactagaggtcatctcatgtgagctcttggacatttcggtatatgttcatgatggactgtgttgtcattcagccctt

SEQ ID NO: 3126 - DNA, 1764 bp, Cricetulus griseus
cgagtgggccgcgacgaggtgcgggccgaggccatgggcgaccgcggaggcgcgggcggctctcggcgtcggaggactggctcgcgggtccccgttcagggtggcggcgggcccacggccgccgaagaggaggtgcgagacgcggctgtgggccctgacttgggcgctgggggtgacgcgccagctccggctccagctccagtccctaccccggacaaagacagacacaccaacgtgggcgacggtcattgggagctgaggtgccatcgtctgcaagaatctttgttcagctcagacagtggtttcagcaattaccgtggcatcctgaattggtgtgtggtgatgctgatcctgagtaatgccaggttatttttagagaacctcatcaagtatggcatcctggtagatcccatccaagtggtatctctgtttctgaaggacccctacagctggcctgccccatgtctgattattgcatccaacatctttcctgtggctgcatttcagattgagaagcgcctcgcagtgggtgccctgacagagcagatggggctgctgctacatgtggttaacctggccaccatcctctgcttcccagcagctgtggccttgctggttgagtccatcactccagtgggttccgtgtttgctctggcatcatactccattatcttcctcaagctcttttcctatcgggatgtcaacctgtggtgccgccagcgaagggtcaaggccaaagctgtttctgcaggaaagaaagtcagtggggctgctgctcagcaaactgtgagctatccagacaacctgaactaccgagatctctactacttcatttttgctccgactttgtgttatgaactcaactttcctcggtccccccgaatacgaaagcgctttctgctacgacgagttcttgagatgctctttttcacccagcttcaagtggggctgatccaacagtggatggtccctactatccagaactccatgaaacccttcaaggacatggactattcacgtattattgagcgtctcttgaagctggcggttcccaaccatctgatctggctaatcttcttctactggcttttccactcctgcctgaatgctgtggcagagctcatgcagtttggagaccgcgagttttaccgggactggtggaatgctgagtctgtcacctacttttggcagaactggaatatccctgtgcataagtggtgcagcagacacttctataagcctttgctccgactgggcagcaacagatggttggccaggactggggtatttctggcctcagccttcttccatgagtacctagtgagcattcccctgcgtatgttccgcctctgggcattcacagccatgatggctcagatcccactggcctggattgtgggccgcttcttccaagggaactatggcaatgcagctgtgtgggtgacactcatcattgggcaaccagtggctgtgctcatgtatgttcacgactactacgtgctcaactatgatcccccagcaggggcctgagatactgccaagggccagccctccctaacctgggccaggagttctggaggggttcctggctacctgcacactcctcctagtctgggaggcctgtctgcccctatggggcccactcctgctcttggggatggcacctaagtccagctggtgtataagccagtgctgggagtctgtgctgaccaggggctgagggcatcaataaagtgctgtctaaaaccttaaaaaaaaaaaaaa

SEQ ID NO: 3127 - DNA, 1763 bp, Cricetulus griseus
  modified_base (1732)..(1732): a, c, t, g, unknown or other
gttcggcgctttcttacagcatcccagagaacgacaaacctggaccctgctcactcctgaacgcagtccctaaaggcatttgtgctctgccattggctggcaaggctgaagatatctttgagacctgaagttgaaaactatctcaaacagagctttttgaacaaggaggttgtgtctgcttcaagcaaacaggaagcagaaaggaagtttgaagctctgctgattcgcctggcacaccctccatcattcacaactgtcagagtgaatacacatttagcatcagttgaatatgtccgagatctgctgcttgaggagcttcagaagcagttcagaggattacgagttcctgttccttcagcatccaaacctcccagacgtcttactcatccctgtgactggaccgagaaggaatatagaaagacggcagtgtgaagtgattgttggagcacagtgtggcaatgcagtattgagaggggcccatgtctacgttccaggaattgtgtcagcctcaaaatttatgaaagctggagatgttatttccgtatattctgatattaaagggaaatgtaagaaaggagccaaagaatttgatggaactaaagtatttcttggaaatggaatttctgaactaagccgtaaagatatcttcaatgggatacccgatctgaaaggtataggcataagaatgacagaacccatatatctcagcccctcatttgataatgttctacccagttacttatttttgcagaatttgccatctgctgttgtagctcatgttctgaatcctcaacctggagagaagattctagatttgtgtgcagcacctgggggcaaaactacacatattgcagccctaatgcaggaccagggagaagtaatagcactggacaaagtattgaataaagtggaaaaattaaagcagaatgcttcattattagggcttcattctatcagggcattttgcttcgacgcaacaaaggcacttaaacttggtgtgattgatggcacagaagggacacctccattcttaccagaatcttttgaccgaattctccttgatgcaccttgcagtgggatgggacaaaggccaaatatggcttgtacttggaccttgaaggaagtgacatcatatcagccactgcagcgaaaactccttaatgtggcagttcggctgctgaagccaggaggagtgctggtttatagcacatgtacagtgactctggcagagaatgaagagcaagttgcctgggccctcacaacattcccctgtcttcagcttcaaccccaggaaccacaaattggaggagaaggaatgatgggagctggcctggcaccggaacaactgaaactgctgcagcgatttgatccatctgttgtgccgctgcaggacatggacactgattgtcttagcgatgccaaaaaagaagacatgatctggctggccaacaaggattgtataggcttctttattgcaaagtttataaaatataaaagcacagaagagaaagtttcttggaaatgagaatttggaatattgcatgttgctttttcttacgccaaagtgttgtcaggccaatggagtgatgacatgtttaccctgtaaacaggaagatgctaacagttttccggggatcagagacacagtgtgcatatgtggccctggagaagttggggggtgggggcgtgggaatggcataatctgccttacaaaggaaaggaagaattcccngtggggtctggaatatactgtcagttttaac

SEQ ID NO: 3128 - DNA, 1763 bp, Cricetulus griseus
ggtctcgggcatggcggggttcgctgagctcgggctctcatcgtggctcgtggaacaatgtcggcagctggggctgaagcagcccacgccggtgcagctcggttgcatcccagccattctgcagggtcgggattgtttgggctgtgcaaagacaggaagtggcaagacagctgcctttgtacttcccatcctgcagaagctgtctgaggacccatacggcatcttctgcctggtcctgacacccaccagggagctggcctaccagattgctgagcagttccgggtgctgggaaagcccctgggcctgaaggactgcattatcgttggcggcatggacatggtggcacaggcactggagctctctcggaagccacacgtagtgatcgccactcctgggcgcctggctgaccacctgcgcagctccaacactttgaacatgaaaaagatccgattcctggtgatggatgaggccgaccgattgctggagcaaggttgcaccgatttcactgcagacctggagaccatcctggcagccattccagtgcgcaggcagacgctgctgttcagtgccacgctgaccgacacactcaaagagctgcagggcctggccaccaaccagcccttcttctgggaggctcaggccccggttcggacagtggagcagcttgaccagcgctacctgctggtgccggagaaggtgaaggatgcctacctggtgcacttggtccagaccttccaaaaccagctggaggactgctccatcatcatcttcaccaacacctgcaagacctgtcaagtcctttgtatgatgctgcggaagttgagcttccccacggtggcactgcactccatgatgaagcagaaagagcgctttgcagccctggccaagttcaagtccagtgtgtaccggattcttattgccactgatgtggcctcaaggggcctggacatccccactgtgcaagttgtcatcaaccacaacacccccgggctccccaagatctacatccaccgagttggtcgaacagcccgtgcagggcggcagggacaggccatcacactggtgacacagtatgacatccaccttttgcatgctgtcgaggagcagatcaagaaacagctggaggaactggtggtggaggaggccgaggtcctgaacatcctcacgcaggtcaacgtggttcgcagagagtgcgagatcaaactggaggcttcccattttgatgaaaagaaggagatcaacaagcggaagcagctgatcctggaggggaaggaccccgacctggaggccaagcgcaaggcggagctggccaagatcaagcaacagaacaagcgcttcaaggagaaggtggggcagacccttcgtcgacagaaactggggagtgcgggccagggggctcgtcctcccagacctcggcctccagcacagacccaggccgaggcgcagacctgagtgtgaacctgttgctgctagtcccctgtctacacagtgcaaagctcagaggcagaggtggtccccagccagggcacctgggatgccacagacccacctgggccaactatggtgcggcctctgccaggcgtgccaggccctcacgcaactcactcagctcgaacagccgcacatccagcagctgcgcggccctgcccacttccacccgtgcacgctcccgctcggcccgcgcctcctccaggctgcattccatggttcgcagctgctgctccaactccgcattccgagtctccagatcctacagggggaa

SEQ ID NO: 3129 - DNA, 1763 bp, Cricetulus griseus
ggtcccgctatggctgtgtggagcagtttgctcagcctaccctctgtatggtggtagtgcaagggaggaggacaccggtatggagcttcttcagaaatacttagaaaactactacggccttgcaaaagatgtgaagcagttcactgagaaaaagaacaatagtcctgttgtcaaaaaaatccaagaaatgcagaagttcctcgggctggagatgacagggaggctggactccagcactatggatgtgatgctcaagcccaggtgtggcgtccccgatgtcggtgatttcagcacctttccaggttcaccaaagtggagggaaacccacctcacctataggattgtgaattatacaccagatttaccgaaagagagtgtggactctgccattgagaaagcactgaaagtctgggaagaggtgaccccactcacgttctccaagcgctctgaaggagaggctgacataatgatctcctttgcagctggagaacatggagacttcatcccttttgatgggcctggagcagtcttggctcatgcgtatgcacctgggctggggattaatggagacgctcactttgatgatgatgaacagtggactgaggacacgacaggtaccaacttattcctggttgctgctcatgaacttggccactcactgggcctctttcactcagccaagcctgaagcattgatgtacccagtctacaagtcctccggagacctggcccgcttccgtctctctcaagatgatgtggatggcattcagtccctctacggacctcccccagcatcccctgatgtccccgtggtacccaccaaacctaactctctggaacctgaatcatcgctgatgtgcagtcctgctttgtcctttgatgcagtcagcacccttcggggagaattcttgttttttaaagacaggcatttttggcgaaaatctttgaggacccctgaggctggcttttatttgatttcttcattttggccctccctcccttccagcatggatgccgcatatgaggttactaacagagacactgttttcatatttaaaggggatcagttctgggctgtccgagggcacgaggagcaagcaggctaccctaaaagcatccacactttgggtctccctgcaactgttgggaagattgatgccgccgtttctgacaaggagaagaagaagacgtacttctttgtagaggacaaatactggagatttgacgagaagaaacaatccatggagcccggatatcccaggaagatagctgcagacttcccaggcgtggactcgaaggtggatgctgtctttgaggcatttggatttttctatttcttcagtggatcttcacagttggagtttgacccaaatgcaaagaaagtgacacatgtattgaagagtaacagttggtttaattgttagaagagatttgaggaaggcttggcatattttaactgaagatcgacagttcttcgtctttgtgaactgaggtggttcatttcccccagtatgtgctatggcagaaacagatggaagccatggatttcaccagcaagcccaagttatcacagggcattgtgaagcactgcttagcttgtccattgtcacatggagaaaatgaggtgactcctgggcaataaacaagtaactgtatctatgtaaatggtttgcctttatttaataaagatgatgtgtcatttattaaaaaaaaaaaaaaaaaaaaaaaaaaaaaaaaaaaaaaaaaaaaaaaaaaaaaaaaaaa

SEQ ID NO: 3130 - DNA, 1762 bp, Cricetulus griseus
ggcccgggcggatctcacggttccgaacagctcaaggtcccagcaactggggtttcccctcagcccttgagtggccatgtccaatcccactgccccacctccctatgaggaccgaaatcctctgtaccctggtcctccacctcctgggggctacgggcagccatctgtcctgccaggtggataccctgcctaccctgcctaccctcaaccaggttacggtcaccctgctggctatccacagccgatgcctcccatccatccaatgcccatgagctacggccatgactctgcagaggagagccccgtaagtgacagctttagttctggagaatgggatgaccggaaagtccgacataccttcatccgaaaggtctattccatcatttccgtccagctgctgatcaccgtggccatcattgctatctttatctttgtggaaccactcagtgacttcgtgaggaaaaatgtggctgtgtactacgtgtcctatgctgtcttcatcatcacctacttgatccttgcctgctgccagggacccagacgccggttcccatggaatatcatcctgttgattatctatactctggccttgggctttatgacgggcaccatttccagcacgtaccaaaccaaagctgtcatcatagcaatgatcatcactgctgtggtatccatttgtgtcaccatcttcagctttcagactaaggtggacttcacctcgtgtacaggcctcttctgtgtcatgggaattgtgttgatggtgactgggattgttactggcattgtgctgtcattcaaatatatttactggctccacatggtctatgctgctctgggggccatctgcttcaccctgttcctggcttacgatacacagctgatcctggggaacaggaaacacaccatcagcccagaggactacatcttaggtgccctgcagatctacactgatatagtctacatcttcacctatgtactacagctcatggggagtcgagactgagagactgagcgttatccccttcactggcctgggactcatcctttcctattgggctgggccctaggtccgtgtgtgggggaggagttgggagcctgtgaacacaggcgcttcaaggtgaagaggctcccgtcccgccttggccatagggttctaggctagggagctggagctgttcccctcctggatccaataaagccagatgtcttgccctcctctccagtactcacaggccacttaccctgtcagaactctttaggcttggcatctcttagctctgaaagctacatctgtgccctactgtctccctgttccaaccccctcctccagtaacatgtatagattatttatctgggttaggggaaagacagtgagcaaagttcattcagtatggtgggttaagtctggggaagagatgggtggggacagggaaagtgccttgggttcctctctggtctaagaaacactgaagcccactctggtacctagtgatcttcccttctaacacaagttcggtctgctgggaggttttagacgagaactcctctccaagctagctactgctttctgtataatccaagtacctccagctggtaccaggagacagaagccagttttatcaggtggggtgggacaccttattagcccaaggacatgattagacctattctgtccagtccttgcttctgaatatatcacaaagggacacaaccagaaacgtaataaaattttatgttggcaattagaaaaaaaaaaaaaaaa

SEQ ID NO: 3131 - DNA, 1762 bp, Cricetulus griseus
tgcatggtggtggctggtgccatcgccgctgtcttccacaccctgatagcctacagtgatttaggctactatatcatcaacaagctgcaccatgtggatgagtccgtggggagtaaaacacgcagggccttcctgtatctcgctgccttccctttcatggatgctatggcatggacccatgctggcattctcttaaaacacaaatacagtttcctggtgggatgtgcctcaatctcagatgtcatagctcaggttgttttcgtagccatttttgcttcacagtcacctggaatgccgagagccactgctcatccccatcctgtctctgtacatgggagcgcttgtgcgctgtaccacactgtgcctgggctactaccggaacatccatgacatcatccctgacaggagcggtccagagcgtgggggcgagtgcaaccataagaagatgcacagaaataccgtgctgtctatcctcgctttggtacaagaataacccaaaacgcaataaactggcaaacacgagcaacacggtcacctcagcccacatcaaaaagttcacctttgtctgcatggcactgtcattgacgctctgttttgtaatgttctggacccccaacgtctctgagaagattttgatagacatcattggagtggacttcgcctttgcagaactctgtgtcattcctcttcgtatcttctccttcttcccggtaccagtgactgtgagggctcatctcactggatggttgatgtctaccatggttgccattgcaggcatgctatgtctatcggaaacagaaaaagaagatggagaatgagtcagccaccgagggggaagactcagcaatgaccgacatgcctccaacagaggaggtgacagacatcgtagaaatgagggaggaaaatgagtaagcacaggcgccaggggcactgcagggacagtcaagacaacagcatcatctctttcctctcctcccatcaagttattttctgattcttaattttatttttttggtttatgaaaggaggccttgatttaaaggtttcgtataaattctctagcatactgggtatgctctgacttgatcgtcagcatctcatgctgtttcctggtttcactcagttgctgcccccacagtgtatatacatgagctgactttgcagagtcttcacacaagtaccactccagatgtcagcacccttcagcatgactttccccgaaggcttgcttttcacttgccttccctgaagatggcactagagcgagagaagtggagcggtctaactgtcctattttctgcaggacaggtaactgtactatggtactcccctcctcaccataaagcaagacattttatacacaagtatcagagtcactatgtgatacccctgaaataatacattggaaatccattttagtgcagttatatttttctaagttttggaaagcgggtttttttcctttaaaattatggatacagttcactaaattcctgatttagacaaaataactagactgaaataacctaaacaaaacaaatattttaaagatataaatatatgctgtatatgttatgtaatttattttaggctataatacatttcctattttcgcattttcaataaaatgtctctaatacaattcagtgattgcctacgtgctccacatacctacagctcactcatgtaccaatgaccgttgtatgttacagcagttttacccagtcctttgtgtatgagtgtaagggcctgaagatgccaa

SEQ ID NO: 3132 - DNA, 1762 bp, Cricetulus griseus
cagaaatcatagtccgttaatgagttttggagccagctttgtcagctttttgaatgccatgatgacattcgaggaagagaaaatgcagttggcatgtgatgacctaaaaactacagaaaagctgtgtgaaagtgaagaggctggagtcatcgaaacaatcaaagaataaaattaagaagagtgttgatgcccgaaatctgccccctcgatggttgatcgacttcagataagtgctatgtggacatcaatgccttcaggaactgtatcagaagaagctaacggaagagcccttgtcttctgatgctgcaaatgataatcacatagtggctgaaggggtgactgaggagtccctaaacagactgaaaggtgctgttagctttggatatggcctttttcacctttgcatatccatggtgcccccaaacctgctcaaaatcatcaacctgctggggtttcctggagaccgcctacagggcctttcttcactgacgtatgcaagcgaaagtaaggacatgaaggcccctttagctacgttagctctgctgtggtaccacactgtggtccgcccattttttgcgttggatggcagtgatagtaaagcaggcctggatgaagctaaggaaattcttctcaaaaaggaagctgcttatccgaactcatccctcttcatgtttttcaagggacggatccagcgactagagtgtcaaatcaacagtgccttgacttccttccacactgctttggaacttgccatagatcagagggagatccagcatgtctgtctgtatgaaatcggctggtgcagcatgatagaactcaactttaaggatgcatttgactcctttgagaggctgaaaaatgagtccagatggtcgcagtgctattatgcgtatttaactgcagtttgtcagggagccaccggtgacatggatggggcacaacttgtctttaaagaagtccagaagttgttcaagaggaaaaacaaccagattgagcagttctcagtaaaaaaggctgagagattccggaagcaaaccccaaccagagcactttgtgtgctggcatccatcgaagttctgtacttgtggaaagcccttcccaactgctctttccccaacctgcagaggatgagtcaagcttgccatgaagtggatgatccatctgtcactgggttgaagcatttgctccttggtgccatacacaaatgtctaggaaactcagaagatgctgttcagttcttccagcgtgctgctaaagatgagctatgtcgtcagaataacttgtatgtccagccgtatgcatgctacgaacttggctgtctcctactaggcaggccagagactgtaggaagaggcagaactctactccttcaggcaaaggaggatttttctggctacgactttgaaaacagattgcatgtccgcatccacgctgctctggcctccctgagggaactggtccctcaatgagaaactctgagtgactactctgtcccctccacccagggtcagtactttgaaagcagaggcgaaagaccctgtgaagaccagcgtttcttctgaggaccacctgtgccaaggatgggtttcctggtgtcatcgctgacgtattaaagatccctcttttaaacatgtagctctggggtaataaagatgtcgaaaatgataaaaaataataacctacctgggagagggctaagtgaccttgttcaaacattttagttttgtgatttattatttttaaaataaaatcagactaaata

SEQ ID NO: 3133 - DNA, 1762 bp, Cricetulus griseus
ggcggaggaagaccccagatagcgacctcgccttccacggtgtctctgtcagacctcggtcacattccggggtccgggggacttgtgcacagcggctatgggtggcgtcggggagcccggcgggggaccggggccgcgggaggggcccgcaccgctgggggcgcccctgcccatcttccgctgggagcagatccgccagcacgacctaccaggcgacaagtggctggtcatcgagcgccgtgtctacgacatcagccgctgggcacagcggcacccagggggcagccgcctcatcggccaccacggcgcggaggacgccacggatgctttccacgccttccaccaggatctccattatgtgcgaaagttcctgaagcccctgctgattggagagctagccccagaggagcccagccaggatggggctcagaatacccagctgattgaggatttccgagccttgcgccaggcagctgaagacatgaagctatttgaagctgaccgtactttctttgcactcctgctgggccacatcctggctatggagttgctggcctggcttatcatctacctcttcggcccaggctgggtgtccagcatccttgctgctctcattctggccatctctcaggcccagtgctggtgtctgcaacatgatctaggccatgcctccatcttcactaagtccaggtggaaccatgtggcccagcagttcgtgatggggcagttgaaaggcttctctgcccattggtggaatttccgccacttccagcaccatgccaagcccaacatcttccacaaggacccggatgtgactgtggcacctgtcttcctcctgggggagtcatctgtggagtatggcaagaagaaacgcagatatctgccttacaaccatcaacatctgtacttcttcctcattggcccgccactgctcaccttggtgaactttgaagtggaaaatctggcatacatgctggtgtgcctgcagtggacggacttgctgtgggctgccagtttctactcccgtttcttcttgtcctacgctcccttctatggtgcaactgggacactgcttctctttgttgctgtcagggtcctggagagccactggtttgtgtggatcacacagatgaaccacatccccaaggagattggccatgaaaagcaccgagactgggccagctctcagctggcagccacctgcaatgtggaaccttcgctgttcattgactggttcagtgggcacctcaatttccagattgagcaccacctctttcccacaatgccaaggcacaactaccgcagggtggcccccctggtcaaggcgttctgcaccaagcatggcctacactatgaggtgaaacccttcctcaccgccctggtggatatcattgggtccctgaagaagtctggtgacatctggctggatgcatacctccatcaatgaagacagcaccctcatgggtggtgaagggggtaaaggtacagactccagcagtcaccaagaccaagacactggacaagagcgacagccctcctcaccccctgccagggcagcctgtctgcctgcctggtcctgtgggctttcctcagtcctcagcattttctgttcaagagccctatggccgtggcacctgcccaacaggaccagggtggaagaaacacacttaaagctacatggtgagcatagcatgttttcctagaacaagaattggaggaaaacttgttatttttatataaaaagcaacccagacacatagga

SEQ ID NO: 3134 - DNA, 1761 bp, Cricetulus griseus
gatgccaacaggaggacaggaagagactcgcaaagctgctggtctccttactggagcagggcttgtcaccgtcacaccgtgtcacctggctgcagactatcccgaatcctaacccgagaccgcagctgcctggactcatttgccagccgccagagcctccatgcactagcctgctatgctgacatcaccatctcagaggagcccatcccacagcccccagacatggatgtcttactcgagtctctcaaatgcctgtgcaatctcgtgctcagcagccccgcagcgcagatgctagcagcagaggctcgcctggtggtgaggctagtggagcgtgtgggactgtaccgcaaaaggagctatccccacgaagtccagttctttgacctgaggctccttttcctgctaactgcccttcgcactgatgtgcgccagcaactgtttcaggagctgcacggtgtgcgcctgctgactgaggcgctggaactgacgctgggggtgggccccaaagaaaacccccggtggtacttccggcccaagagacagagcgggccatggagatcctcaaagtgctctttaacatcacctttgactctgtcaagagggaggtggatgaggaagatgctgccctttaccggtacctggggacccttctgcggcactgtgtgatggttgctgctgctggagaccgcacagaggagttccacggccacacggtgaatctcctgggaaacttgcccctcaaatgtttggatgtccttctcgccctggagctacacgaaggatccttagagtttatgggagtcaatatggaagtgatcagtgcccttcttgccttcctagagaagcgtctgcaccagacccacaggctgaaggagtgtgtggcacctgtgctcagcgtattgacggaatgtgcccgcatgcaccgtcctgccaggaagttcctcaaggcccaggttctgccccctctaagagatgtgaggactcggcctgaggtgggggacctgcttcgaaacaagcttgtccgcctcatgacacacctggatacagatgtgaagagggtagctgccgaattcctctttgtcttatgctctgagagtgtgccccgattcatcaagtacacaggctacggaaatgctgccggcctcctggctgccaggggccttatggctgggggccggcccgagggccagtactcagaggatgaggacaccgacacagaggagtacagggaagctaaggccagcatcaaccctgtgactggaagggtggaggagaagccgcccaatcctatggaaggcatgacagaggagcagaaggaacatgaggccatgaagctagtgaacatgtttgacaaactctccaggcacagagtcatccaacccatggggatgagtccccggggtcacctcacttctctgcaagatgcaatgtgtgagactatggaggggcagctctcctcagaccctgactccgaccctgactgaagatggcagcggctttgctccccttcagaactggtgctgcttccagacgtgtccttggggtgctgcctagagaagccacactcctctccagcaggggagcctttctctttactccccacactatccatgatttgcctttggtccagtttctcgtgtttaggactgtggtagtcttactctctgtgaagactgggaaaccatccttaatttccacaagcaaagttgtttctttgatgtttctgaggcacagaaaataaagagtttgggacaagactgt

SEQ ID NO: 3135 - DNA, 1761 bp, Cricetulus griseus
cgaggaattcgtgatcatttgccagcagacttccaggactctgaagaaacagttacaagcaggatgcttttccccacctctgcgcaagaatctccccgtggcctcccagatgcaaatggcttgtgccttggcctgcaatcactcagtctgactggctgggaccgaccctggagcactcaggactcagactcctcagcccagagcagcacacagtcggtattaagcatgctccaaaatccactgggaaatgtcctaggaaaaacccccttgagcttcctgtctctggatccccttgggtctgatttggacaagttcccagcaccctcagttagaggatctcgcctggacacccggcccatcctggagacacgagtggcttcagctctggatcagatcatctctcagatttgatttcaagcctttcgaattttccccctcctctgccccttcctttctatgacgggaaatggtccccagagacccctctaaagtgccttgcacgggatgctcaatgctgaggctctggctgccatcttgaatgacctatttggtggagtggtgtatgctgggattgacacagataagcacaagtaccccattgggtctggtcgagtgactttcaataaccaacgtagttacctgaaagcagtcagcgctgcttttgtggagatcaaaaccaccaagtttaccaagaaggttcagattgacccctatctagaagattctctgtgtcttatctgcagttcacagcctggccctttcttctgtcgagatcaggtctgtttcaagtatttttgccgaagctgctggcactggcgacacagcatggaaggcctgcgccaccacagccccctgatgaggaaccagaagaactgagattccagttagagaagctggccttgcccagtggcctgtactgcccaaggctggcaagtcaggcctataccctgcactggcacccaaggagctagctttctgcagacaagggaaaattgtagtcacctttgtacttgctaaatctgtctttgtttctgcactaattaatgcacaatgagttttgtcaggttttgtttcagggggtgtgccagagcaaggaccctcaggctcaccctcaagcaaatgtagttttcccagattctagttcctcattttgcaaatgaaaagaaaaacaacaaactatgtgtccagaaggtattgacaggatgcctacacctgagtttatttatgaaagcgctttttacattccttgcaatactgacggtggtgatgcgcgggtttcattggttcatccttgcagttgccatacagtgcctttccatttatttaacccccacctgaacggcataaattgagtgttcagctggtgtttttactgtaaacaaacaaggagactttgctcttcatttaaaccaaatcatatttcatagtttacgctggagggtttttactggttcctttttacactccttaaaacagtttttaagtcatttggaacaatagatttttttttcttttctggcagcttttaacattatagcaaatttgtgtctggggaactgctggtcacagttgcaaatcaaagtatttgtaaccaagggaaaattattttatttaaaactggacgtctgagcagctgctgtatatagttttaaatggtttgttgcaccttcttatgttgcacttatgtgggggggagggttgatagaagtttttaatcacagtcacaggacttttttcttttgtaactgagcttaaaaatta

SEQ ID NO: 3136 - DNA, 1761 bp, Cricetulus griseus
  modified_base (1095)..(1095): a, c, t, g, unknown or other
ctaatgtgtaggttatgagagcctaggcctgccttgacctcatggtcctttcctggcttgtcctggattgtccccttccaagatgacctggcatagctaaggataaggacccaaattaagttggcaaaaattttgagggagcccttttgcccccaagaaaacaggccccagtctggaggctcctaagttccctgaacacctgggagtctggttcccgtgtgcatttggactaagggcactcatgtaagttctaacttacatgagaaccacatccagtaccacctgtaagaactctgaggttgccgtactgcacacacaaccccaggaacagtgcaccaagtcagggttagggttagagtgagggtcaggcccagccgaacatctggcagtttctcctcagagagaagtgggcaatggataacttggagtctagatttcccgttggatgttttaaagtctcttagaaatacatttgaaacagtgtgtttgtttttcccttctagttaagggactatttatatgtgtataggaatgctatctctttggttttgtttctcttttggtgaggtccaaagaaagatgcaaaaagaatgctgcctttccccagccccatcccataatatcacctcagactcacctacatgcccagcatttccactggggcatcttggagtcgttatttatcgagttcttgaaaaatgcagagagacaagtatcccatccgttgtctatatgttttagactacctttcctctttcttgatgcccagctagccctagtgcgtgaacaccaccccccatcccctaccaaacaggcaatagtgggtaaaccatactaaccagggacaaaactggaaccaggtggtaccacctcaggcagctccattcaaagcatttttccgcagctgaagaaattttcaataacctgttcgatgctaattaaaatggagcctgcaggaagcagggatgaagtggccttcaatgatgctgtcctgttgactttcctttttaaataaatccaaactagactgctggaaagctagccacttaggggtttgtttgtttgtttgttttgtagttggtgtgtgtgtgtatntgtgtgtgtgtgtgtgtgtgtgtgtgtatcccagtgagtcagcgttgctctcctccctttaatggtgggtccctgcttctttttggtgctctgaaagttgtctggaggaaaggattctaattttaattaattgtgcagggagctaatctcatgagcttttctgcttcaaggcattttaggaaaaacaaatggttttagtagataaagggagcctattaatgttttgttttgttttttccaaacaaacacagggacatttttactatagatttggtttttaatggctttaagaaaaataatagtagtaatagtaaataagatagcaaagctctgggatttgagggttcccacccccttttttcttaagataccaagtaagtggctagcaatattttttaaattcattccagctgggatttttttaaatactatattgcctaattttacaccagccagaaaaaaaatgatatccactgtgtcttctccagtgagatgagcacttcgttttggcactacactagactcactgtgattggaaactcactgcctgacttaactgcctcttccttggaattgacaatgtttttgaaatgcaactaagctgttaataaatagtgtgcgatattcaaaattaatgtaaactggaaggttttatgtggttgtctt

SEQ ID NO: 3137 - DNA, 1761 bp, Cricetulus griseus
ctgctcgtctccttgctggaacacttgagccatgtgcatgagccaaaccccctcatggggctgctgtcttcatttacctgcagtgatgagtttagctcactgagactacaccacaacagagccatcactcatttaatgaggtctgccaaagagagagtccatcaggatccttgtgaagataattcttacatgcagaaaatcagatccagggagatagcttttgaagcacaaacctcacgatacttaaatgaatttgaagagcttgacatcttaggaaaaggaggatatggaagagtatacaaggtccggaataaattagatggtcagcattatgcaattaagaaaatcctgattaacagtgcaactaaaacagactgtatgaaggtgctccgagaagtaaaggttctggcaggtctccaacatcccaacattgtcggctatcacactgcatggatagaacatgttcatgtggttcggccacaagacagagttcccattcaactgccctctcttgaagtgctgtcagagcatgaagggaacagagatcaaggtggtgttaaagataatgagagcagctcctccattatatttgctgaactcacctcagaagaagaaaaagctcttggcaaacctgacattaaaaatgagaataacaacctggtgagctacactgctgacttagtgatcaggaacagcagtgaatttgagtcgtccgttgaactccaagaaaatggcctgactgatttgtctatcagaccagttgtcaagcatcagctgccacttgggcataactcggacttggaaggaaattttacatcctcggatgagtcttctgaaggcattctgaacttgctggaacagacagaggttcggtaccacctgatgttgcacatccagatgcagctgtgtgagctctccctgtgggactggataagtgagaggaacaagcggagccaggagtacgtggatgaagctgcttgtccctacgttatggccagtgttgcaacgaaaatttttcaagaattggtggagggtgtcttttacatacataacatgggcatagtccacagagatctgaagcctagaaatatttttcttcatggccctgatcagcaagtaaaaataggagactttggtctggcctgtgcagacatcatacaaaagagctcagactggaccagcagaaatgggaagggaacaccgacacacacgtccagagtggggacttgtctgtatgcatcgcctgaacagttggaaggatctgagtatgatgccaagtcagatatgtatagcttgggtgtgatcctgctggagctttttcagccattcaggacagaaatggagcgagcaacagtcttaacaggcataaggactggtcggatacccgaatccctcagtaaaaggtgtccggtacaagctaagtatatccagctcctaactgggaggaacgcgtcacagaggccatctgctcttcagctgctgcagagtgaacttttccagacaactggaaatgttaacttcacattgcagatgaagataatagagcaagagaaggaaatcgaagaactaaagaagcaactaagcctcctttcccaggacaaagggctgaagggatgagagggaaaatggggacctacctgtatggtctaaactatgttgtctaccatgggaaagtggacttacactcttaaaaagtcaataggaatgtaaactttcaacccttagctggggacagctgcctctggctggctgccttctcag

SEQ ID NO: 3138 - DNA, 1760 bp, Cricetulus griseus
ccaagacctcactatctccctacctgccctcaagcctagagagaatgatctagactcctgggacctagagaaagaatccccagcagcagcatggagcagttcagccttacaggaaccagatggggacgaactgtcagagagctccttgagtgcgtttggagcttggagccaataagaagcataaagaaggaattctaaggaaaagcgccaagctcttcttccgccggcgacaccagcagaaagacccaggcatgagccagtcacataatgatctagtcttcctgcagcagccagaggggaagctgaagaagggggcaaccctcagccggctcttgaacaagaagctgcttcctaggcacagaggcaaacacgccatgaatggagtacccagagagccctacacacatatatatatatatatatatatatatatggttcttgccaaatacagccaacaggtaaaacaaagaactttagggcaactgaggaaactattctgtatcccgggtgccaattggtctcaggcatagaagtttcataacaatgggccaaacttgtaggaattcttttcatgggatcttcagaattctactgtgaacagggacttctggacacattttggggtatcctggttttggtttactgtgggaaaattacaaagttggcacctgagttcagtgtccccctgtatccataaggtgctgtcctcttctgtgttcccggcactgtagattcactaggtctcacagccctccagagtcaattccccagagactatggtgtgtcagagattatgattcagatgctgtattttcagttggtgcagtagccctcatctaacatgcttagggccagaggtgtttcagacacattttggatcttggaatatcttgataagtctttaccatctgagcatctctgaatcccaaatataaaattttcagaaacatgaaactctttgaatactgtggtacagacagagttttgggtttcagacttttgggttaggaaatgctcagcttatacaggttttgttggtttggggccttccttgtgctatgaagtcttttctccaagctgtttatctacttctgtttcttcatggtatagggtaattatgttgaaatgaacatcattaagattatgcaccaggtgccaacagtgtgcatgtgtaagtcacctctgttttactatctgcattcttttgtggcttcagtttctgtcttgaggttttggcagagtgatagttttaaagcaatttctcatgaacactaattcaggtatctatgaatctagaagatctcaggttggctggagtgagctgaccacatttcctctacccttcatgcagggactaaatagagctgtttgtgtgtgtgtgaggatggtgtagcagtaacaagactagggctcccttgctctcgttgcaaacctactgtgagcaagaggatttagacaaagcactttattttaaattttaagttcaaagccagccctacttcctgactgtggaaggaagcaggcgatttactgttgaccagttccaaatcagatttttgctggccacatttacagaaaagggttgcaaatgttcttctcaagcagaaagggaaagattaatttacattgctgccacccagagtggtgttttttggttaataagctcagggctgtcaatgttcaactttcaaagtacagtctgatagatggtggaaggtaaaacatgtctctgtcacacagaaacaggtgtgggtactgac

SEQ ID NO: 3139 - DNA, 1760 bp, Cricetulus griseus
tccatattgcggggaaagcgggccgggcggtgacgctgctccctccttcagaatgtcatacccaggctatccccctacaggctacccacctttccctggatatcctcctgcaggtcaggagtcatcctttccccctccgggtcagtatccctatcccagtggctttccaccaatgggaggaggtgcttacccaccagcaccaagtgtcggctaccccggggctggaggctatgctacacctggaggttatccagcccctgggggctatcctgttagcccaagtccagggggtgttccagtctatccgggaggacaaggctttggagccccacctggtggagcaggcttttctggctatccacagccacctgcacagtcttatggtggtggaccagcccaggttccagtaccaggtggctttcctggaggacagatgccttctcagtaccctggaggacatgctccttaccctagccagcctgctgcgatgactcagggcacccaagggacaatccgagcagcctccaactttgatgctatgagagatgcagaaattctccgcaaagcaatgaagggatttgggacagatgagcaagcaattgtggatgttgtgtccagccgttccaatgaccagaggcaacaaattaaaacagcttttaagaccatgtatggcaaggatttaattaaagatctcaagtcagagttgagtggaaatatggaagaattgatccttgccctgttcatgccttctacatactatgatgcctggagtttaaggaaagcaatgcagggagcaggaactcaagaacgtgtattgatagagattttatgcacaagaacaaatcaagaaattcgagacattgttagatgttatcaatcagagtttggacgagaccttgagaaggacattaagtcagatacctcaggacattttgaacgtctcctcgtgtccatgtgccagggaaaccgtgatgagaaccagagtgtaaaccaccagatggctcaggatgatgcccagcgcctctatcaggctggtgaggggaagctagggacagatgagtcctgcttcaacatgatccttgccaccagaagcttccctcagctgaaagccaccatggaggcttattccaggatggctaatcgagatttgttaagcagtgtaagccgagagttctctggatatattgaaagtggtttgaagaccatcttgcagtgcgccctaaaccgccccgccttctttgctgagcgactctactactccatgaaaggtgctggcacagatgactccactctggtcaggattgtggtcactcgaagtgagattgaccttgttcagataaagcagatgttcacccagatgtatcagaagaccctgagcacaatgattgctagtgataccagtggagactacagaaagctgcttctggccatcgttggccagtgagagggatctttgtctggttttctttaacaaatgaagctcttcagagcccttgcaagcaacaagatctgcatgcagcaatgtcaacaccacctaaccagaatagctttttactaaggactatgtcagggtaatgtgcttggtttgcacatgttgttactgccttaattctaatgttattcttttttctttctgtatccagtcaatgtaaaaaccatatcaatgatgtagtaattttgcaccatttgtaaagcttcattctcactgcttttattttaatcaggacttcaaattgaataaaaatcacgacaatctctaa

SEQ ID NO: 3140 - DNA, 1760 bp, Cricetulus griseus
  modified_base (209)..(209): a, c, t, g, unknown or other
gtcatagcaaatgacagaagtcctttggtgggtaaaatccactgggagaaaatggtaaaaaaggtgtcaagatttggaatacggacaggcactttcaactgttccagtgatcccaggtactggccagggagaagaggctgggtacgttccacactcattatgtctgtcccacaaacaagtacatctaaagggaaagtcatgcttaaagngtatagtggacgcaagattgaagtagagtaaatgatctgttgttttgagtttggttctagttaatcttatggcttggatggacttatttatcacacaaggagcaaccatcaagagatttgtggttctcataagcactttagggacgtacaattccctcttaattatttcctggctacctgtgttgggctttctacagctcccttacttagatagcttttatgaatatagcttaagattgttgcgctactccaatacaaccacactggcttcatgggtcagggcagactggatgttttactcttcacacccagccctgtttctcagtacatacctgggacatggcttgctaattgattactttgagaagaagagacggcgcagcaacaatgatgaagttaatgcgaataatttggaatggttatcaagtctgtgggactggtacaccagctacctcttccacccgattgcttctcttcagaacttccctgtagaatctgactgggacgaagaccctgacttattcttggaacggttagctttccctgacctttggcttcaccctctgataccaactgattatattaaaaacttaccaatgtggcggtttaaatgtcttggggtgcagtctgaagaagaaatgtcagagagttctcaagacactgaaaatgactcagatagtgacaacatggacacttttagtagtaaggatgtatttgaagataaacaaagcatagttcacagttctctaggaagaacaagccactgcgatgctggggcttgttcatgtgccaataaatattgccagaccagcccccgtgaaaggaagggcaggtcatatggatcacataacactaatgaagatatggagccggactggttaacttggcctgctggtacactgcactgtactgaatgtgttgtttgcctcgagaattttgaaaatggatgtttgctaatggggctaccttgtggtcatgtgtttcaccagaattgcattgttatgtggttggctggaggccgacactgttgccctgtttgccgttggccttcatataagaaaaagcagccatttgcacaacaacagctattgtcaaatgatgtcccatcttaaccatgagcaatttgtccttaataagctttgagtatcttacagcttgcctttctaatgttagtcacaatgtttttgtggtttgaagtttagtttaatgttagtgcagtgacaggaaatacacattatgctgatgttgatgacaatttatttggttgccttgtatgtcaattgaatgcatactaaactgtaaaaaaaaattatttactgcattggaaattcagaagttaatgttttttgtaagcacaaaagaagaatagtagaaatttatcctagtaagactttacaaggcagggtcaaatctagtgggactgaactggtttcttatcctaaatgttttctccctttttacaatttctgtccagcacctcttggttaaataatgtatgctctgagacatgaaattaaaacagatctatgaaataaattattttaaaaccag

SEQ ID NO: 3141 - DNA, 1760 bp, Cricetulus griseus
  modified_base (345)..(345): a, c, t, g, unknown or other
  modified_base (845)..(845): a, c, t, g, unknown or other
cagcagtcctaacctctgggccgacgccaccatgcctgagccccacaccacagggcagctagcaggagggggcttcctgacacactgcccacagtataggaacgagtggatcttacagcagcgaggtcaggacttggctcccagcccctcagaactccatcacattgttcctttaccacatctgaactcagcgagacaccttctccttcagtggtgggctcagatttagatgtgggtgttctgaagaggcagagttccagtattctaggtgaccgagagatgttgctcctaactggcacctattttgaccttggcgaaggcccgacagttcccaagagatgggcncgggacgtggtcgggcagaactgctttggtatcctctgaacactatgaaactagtgacttgaaagcccaggctgtggccctcctgtgccagatcctggttctgatggtatgtgcctaccagcagagaagcccagactgagtgtccagatcacgtctactcctgtggcacctggggtccccagcctgcagccagagatccaggagggcatctactctggaagctgctaccaccgagatggcttacgactgagtatacagtttgaagtgaagcgtgtgcagctccagagctctgcaaccctgttctgctgctggctggtgaaggacctcttacatagccaccgggactcagccacccggacccgcctgatccttgccagcctgcctagctctacccactccatgcctgagctctctcgatccagctttggagagatgctcagagccaagccttggtttgaagagtccccaactttgtgtggactgcagtggagaaggagcanacaaagaggtggtggtgaagtttattaagaaggagaaggttttggtaagattgttggattgaggatcccaaacttggaaaagttactttggagattgcaattctgtccaaggtggaacatgccaacataatcaaggttctggatatatttgaaaaccaagggttcttccagctagtgatggaaaagcatggctctggcctggacctctttgctttcattgaccgccatccctgcttggatgagcccctggcgagttacatctttcgacaactggtgtctgctgtaggctacctgcgctccaaaggcatcatccacagggacatcaaggatgagaacatcgtgattgctgaggacttcacaattaagttgatagatttcggctcagctgcctacctagaaagaggcagactattctatactttctgtggaacaattgagtactgcgcacccgaagttctcatgggaaacccctacagagggccagagctggagatgtggtctttgggagtcacactctatacacttatctttgaggagaatcccttctgtgaggtggaggagaccatggaggcagtcattcaccccccattcctggtttccccagaacttatgaatcttctaactgggcttgctgcagccttgccctgagcagcggaccactctagagaagctgatcacagacccctgggtgacacagcctgtgaaccttgcaaactacacctgggaagaggtgtgtcggaccaaccagccagaaagtggcttgttatcagctgcaagtttggagcttgggagcaagagtccaagcgaagtggctcacacaaagggtttcgatgggctgccttctcccagggaggctcctggtgatcagcactgcctgcatcttgaaggacccctctctgccagtcagctgaacaa

SEQ ID NO: 3142 - DNA, 1759 bp, Cricetulus griseus
atggcggccccggcgggcggcggggcctccgcggtgtcggtgctggccccaaaacgggcggcgccacacggtgaaggtgacgccgagcaccgtactgctgcaggtactggaggacacatgccggcggcaggacttcaaccccagtgaatacgatctgaagtttcagaggaccgtgcttgacctgtctctccagtggagatttgccaacctgcctaacaatgccaagctggagatggtgcctgtgtcccggagccgagagggacccgagaacatggttcgaattgcattacaactggatgatggctccaggttgcaggacactttttgttcccgccagaccctctgggagcttctcagccattttgtacagaccagggagcgtctgcagcatctgggtgagaggacccctgtttgtgtgtacatgagggatgaggtgactggtagaactgccttgcagaatacaacgcttcagtcactgggcctaacaggcggtagtgccaccatcaggtttgtcataaagcagtgtgacaccgtgggcaaacaggagcccattgcagtcaggagcaaggccccaggaagtccaatctcctccatgtcagctgaccaggcatctagcagccccttgcttcctttgaactctggggagttcagcaggggagacctgaaccatcagggtgatgcaaacacctcagaggccagccttgggagtggcccaaagccagcagatgctcagacaaagcaaagcacaaaggagtctgcatctgcccctttcgttcccttctctggtgggggccagcggctggggggcccttctgggtccttgagatctctgacatcacattcagccaagtctctcaagtcttcctctggctctggaggcccttctaagcccaagaagtcaaagcctggtgaggagccccagcaggagcctgaaccgcccgttgatcgagaccctgtagtgtgccaccctgatctggaggacttgctacagccctggccagcagaggtgcctgacgagttctttgaagtgaccgtggatgatgtgaggagacgcctggcccagctcaagagtgagcggaagcgcctggaagaagcccccttagtgaccaaggccttcagggaagcacagatgaaagaaaaactggaacgctacccaaaggtggcgctgagggtcctcttccctgaccgttacatcctgcagggcttcttccgccctagtgagacagtgggggaccttcgagactttgttaggagccacctggggaatcctgagctctccttttacctgttcatcgctcctcccaaaatggtcctggatgaccacacactgactctctttcaggcaaacctcttccctgctgcccttgtacactttggagctgaagaaccagcaggtctctacctggaacctggactgctagaacacaccgtctccccatctgcagctgatgtgctggtggccaggtgtatgtcccgggccgccggatccccaccactgctgccagcccccgactctgtgtccctggagtctgagccgatcactgaggagggggcactggggcccccagagcccattcaaggggcagcccagcctgtgaggagaagcctgggcaaagtgcccaagtggctgaagttgccagccggcaagaggtgagagctaccagcctggagatgcccatcgtcagccacaggaccccacccccacccaccccgagcaggaataaagactcgcgcttctctcaaaaaaaaaaaaaaaaaa

SEQ ID NO: 3143 - DNA, 1759 bp, Cricetulus griseus
aggtaggaagccccagctacaggagctgctgaagctgcccgccttcatgcgggtaacactccacaggcaatatgctcagcccatggtgggccactaccattcctgggcatgaacactgtgcagctatacatgaaggtccctggcagccgaacgccaggccaccaagagaataacaatttctgctctgtcaacatcaacattggccccggggactgtgagtggtttgaagtgcatgagcactactgggagactatcagcgccttctgcgatcggcatggtgtggactacttgactggttcctggtggccaatcttggatgacctctatgcgtccaatattcctgtttaccgcttcgtgcagcgccctggagaccttgtgtggattaatgcagggactgtgcactgggtgcaggctactggctggtgcaacaacattgcctggaacgtggggcccctcactgcttatcagtaccagctagccctagagcgatacgaatggaacgaggtgaagaacgtcaaatccatcgtgcccatgattcatgtgtcctggaacgtagctcgaacggtcaaaatcagcgatcctgacttgttcaagatgatcaagttctgcctcctgcagtcaatgaagcactgccaggtgcaacgggagagcctggtgcgggcagggaagaaaatcgcctaccaaggccgcgtcaaggacgaacctgcctactactgcaacgaatgtgatgtggaggtgttcaacatcctgttcgttacgagtgagaacggcagccgaaacacgtacctggtgcactgcgagggctgtgcgcgccgccgcagcgcgggcctacagggcgtggtggtgctagagcagtaccgcaccgaggagctggcgcaggcctacgatgccttcacgctggctcccgccagcacgtcgcgatgaggccggacgccccgctcgcccgcccacgcagggcgcggcggggccaccagcacacgcctgggctgggacctaggtcccgcctctggccgggaagggggtcgggcacagcccttccacccttattggcagctcccctcacttaatttattaagaaaacctttttttttttttttttttttttttttttacttccaatttttttggggaaacccgacctcctgcacccccaagccatccctcctgcctctgggaggcccgctcctgggctctccttgcgccccagtatatgtccgggcttggcccgtccgtctccgcccgcccgcggctccagccgggctctcatggtgctcaaacccgctcccctcccctacgtcctgcactttcttggaccagtacccccactcccaacccgaccccaaccccacctgagggtgagcgactcctgtactgtaggggaagaagtgggaactgaaatggtattttgtaaaaaataaataaataaaataaaaaataaaagttttaaagaaagaactatgaggaaaaggaaccctgtcctccccagcctcggccaatttaaaaagcgttggacacctctaccctcacaccccccttttttaaaggcgtgaaacagcccagggcagggcctcgatgggggcaggggacaccctgggggtgagtttctcgtggggcttttattttcattttcttacttcagttcgttttctcctgctggggctgcggaggggtgggggggtttgcagtcccgccccctcgcactgcactgtctctctgccccaggggcagagaggtcttcccaaccctaccctattttcgg

SEQ ID NO: 3144 - DNA, 1759 bp, Cricetulus griseus
gagcccctcgccattgcatgcagtccatcagggacccttcctggccacgcagaactgaagcgtcatcttgctcctcccatgcccgtcccaggctcaccatcctccacctccttcccttccttagttacattgccaaacacacagtgagcagtgcactttctctgcgggcccctcatgcctgtggggggagggtccacagcttcccacacttcatgtgtgggcctagctcatgctcttggattcccagaagccaaagagctgggcagaggtggccaggttgcaccatgcgtgatttcttttcctttcacagtatgcattagaaactaaagcccgcttgctcgcttgctggaacacaggggccttttaagttgagcgtgcgcactgcaagggaaatagcggccctggaggatgttagacttgctccctctccaagacagcagcagcctgcaccaggccctgtgtgtgcagtcgcctctcctcaccccagccaaggacccaggcactgcaggcagggaggggcacatcccacagtttcctcagctctaggctgttctgtagcatatctgccccccccccaactttgtgggacagagatgggcaggggcttgggttttcttggatccccacctgttcccataccctagattctaagccctggttctgagtcacttagggcaggagctagggcctttgcccagacagcagaatatggggcaggcaagctgcacttaaactcctagagtcctcattaggaagggtggaagtcctggaggtgtggctcagccatgctgcaccctatcgcagtctatggacaggcaaggggcctggcctggcctgggtcttgcccttccactgtccagggagccctgctttcctccttacccatactcttgcccatgcctcgtaaagtgacctctgtctgagcgcctcctagcaatatggggaggtccccaggcctggactgcagggcgcagggccagatacaatggcccctctggtggggttgttagctctcaggccgagagccttatttacctagtgcaaaaactgtaaaagtgtacagactctccacagatttttatcttaattgcaagtctgccgtatttttggttgatgggggcacatgccccagttgggccagtaaagcattctcctgcccacagccttggggctgagctctacctacagcaagggctggaatcgccagaggccctgctctgggaagaccctggccactgacacccaggctctgctggagagagctgccccttccccaccaacacagacaactgacctttttgttcaacttgtatgttcaggattaaggaaactgccaaacttccttggaccggagacttctgactgcccaggagtgggggtggggaccagggccagagctccccatgtaccccagcacctgtccgagggacaccactctctcatacccatatgtctgggagccagactgtccagggaaccagcccctcttttctatatactcagccacaaggctgcccttgtcccccactgtgtccagccccccttttgtaacgtatgtgaaaaggaaaaatgcaaacgtcagaagtcggctggagcatctcccttcagccaggactttgaaccatgtaataatgtacagagaacttgttggtgttcaaaaactctgtgtggctgtgcaatttctgtacatttgcaattagaaatattaaaaatttatttagctattttaaaaaaaaaaaaaaaaaaaaaaaaaaaaaaa

SEQ ID NO: 3145 - DNA, 1758 bp, Cricetulus griseus
ggatggagctgctgtgttgcgagggcacccggcacgcgccccgggccgggcccgacccgaggctgctgggggaccagcgtgtcctgcagagcttgctccgcctggaggagcgctacgtgccgcgagcctcctacttccagtgcgtgcaaaaggagatcaagccgcacatgcggaagatgctggcgtactggatgctggaggtgtgtgaggagcagcgctgcgaggaggatgtcttccctctggccatgaactacctggatcgctacctgtcttgcgtccccacccgaaaggcgcaattgcagctcctcggtactgtttgcctgttgctggcctctaagctgcgcgaaaccacgcccctgactattgagaagctttgcatctatacggaccaagctgtggctccttggcagttgcgggaatgggaggtgctggtcctggggaagctcaagtgggacctggctgctgtgattgcacacgatttcctggctctgattctgcaccgcctttctctgcccagtgaccgacagtccttggtcaaaaagcatgcccagacctttttggccctctgtgctacagattacacctttgcaatgtaccctccatccatgatcgctacaggcagcattggggctgcagttcaaggcctaggagccagctctatgtctgcagatgagcttacagagttgctggcaggaatcacaggcacggaagtggactgcctgcgagcctgtcaggagcagatcgaagctgccctccgggagagcctcagggaagctgcccagactgcccccagcccagtgcccaaagccccccggggctctagcagccaggggcccagtcagaccagcactcccacagatgtcacagccatccacctgtagcttgggacaggccccctcaggtggccaccaagcagaggaggggccactgccaccccttcccttcctctaggaacaatccatgctatatcggaagcccgatggggggtcctccttcccctcacaaagcccaaggggccaggtcctgcctatccccacagttgtgcactaaggtgctggttggccatgagggctctgcatggccagtcagctcctcctccttcccacctgaccagctcagctgttctgggccatgctggtcagagaaatccaaacaggtaaagtccatgcaccagcattccttgtgagtccctcctctctggggctctaattttctcaattgccaaaacgccccagttccttccaaaggtgttgccccttagatggctgctgtgtaatccatgctcccagctgctcttggagggaacagcctaggccttggtcagaggggcaagaacctaccaattcttgctttgcttcctgcttagcttctgtgattgagggctctttgaggggtgctgatggtcattttaatttattgctttgaatacaactgtaagagggtacagtgaggcctgtaccccacaagcggtggtaaccctggtggttgctgtttccctcccttcccctctgctaccgctttgtggtccaggagctgctacagcctgggatgggggccgtgccttcctctcctgaggccctgtacctcgtcttccagcagagggtttgagtaaggatggatgctgtggaggacagagcctatctggagaggtccaagccctattgacacaggtctttccttaggccacaaggtttgggctggtggcccatttctatcatgctgccttaataaagattccggaataaaaaaaaaaaaaaa

SEQ ID NO: 3146 - DNA, 1758 bp, Cricetulus griseus
ttttacttgagcctgcctttgtaccctttttaacttaaagaacagagccacaccggtattatatgtgtatagttatattgcgtttgcagactaaattgtcatgttgtgaaagtttgtgtgttaagtttttccctttttttttttccttttttaaattattctttttattggtttgtgtgagagaggttgaaaaggtttggtttacactgagtatatgttgtcaagtggcaaaagtccacatagctctcctgttttctgtatacgttcacagcctcaaaaaaaataataataattgaaatggctttaaaaccaaacaaaacacctccatcctgtgacaagtacctcgaatggattcagctttactcctttgtaactcatcttcacattttcagcatatttaacaaactaacaaaacgaaataccagtagtgagaaggctgacccacgtggctttgcagtgctgttcgtccagaagcatggcacacaatgcttgtgcatgtggaaacttagcgactgtcaacatacattctcagggatttataccaaaaaaaataaaaaaaaaaagaatgagagcatttattgtactgtatatatattatagtatatgtctgaatattgaaaatataacattaactaatttataaaaatattctatgtaatgcaaaatacttgaagctgcagtagcttggttttaaacaaaaacaaaaatggagagaaaaacctatcagaaggactaaaagtacgcctcgcttcggggttggctcaggcagtgaacttcatgctgggcatctgcagagccaccttcggactgcgcagctggactgagatctgtcgggaagattccatacgtatatatgtctatacagcttttgtatacatgtatatatgtatacacacagacaccaacaaccactacaccacacatgcttataacaggcactcgactaaagagggacaacacacagcaagccttagcattaagaatatacagtatgccagaactggggttcgtgcctcctagcctacgaaacttaaaatatccttttgacacaaaacacaaaatgttttccaaaacaattgacatgatccattacgcctttgcagtgagctaataagctaacgtttgtgcacagataacattatatatattatatatctattctgcataggtattttgactttgtgcaggacagaaagttgtgtaggtatgactgttcaacttttcagttctctttttttttaatatattttattttctctagacttacttcaaacaaaagcagccttctatcttgccttgtcttaatgctttaaaataaccaaactggagatgtgactaccaaactgttgattatattattaaaataccaaccttggttacagtgtagtgtctttactttagctgacggttctgtaacctagtgcttcttaaagcaactatgttttggtgcaaaagttgtcccgtgtctcttgtcccttcattagagaacatgctagaggtatgtttgtaggtatttttgtttagaagaactatttcatgcgctccattttatttattataatagataaaaagaaaaaaaaggttgtacttcatcactcatgtaaacatgctcatgaagttgaaagtaattaagatttgatacactgatatcaatttatttatgtaactaaatcactgttttataaacttgttaatgatcaacaatttttgttttgattaaaattagttttttgaaaagttgaaaaaaaaaaaaaaaaa

SEQ ID NO: 3147 - DNA, 1758 bp, Cricetulus griseus
tatatatgccgatgcctgtttaaggctgaccagttgatgttttgctttgcattttgttcggggtatgcatcctgaactttttcaagaaaatgaatgggatacgtttacaggtgtgattgttggagacatgctgagaaaagctgactctcaacaaagaattcgtgatcagcttccatcttggatagatcaggaaagaagctgggccatggcaacactcaaggtcactctccccagtctctaccagaccctctgttttgaagacatggcactctggcgcacttactaccaccactcaatgtgtgagcaggagtttccatcagttcttgcaaagaagtttccttatttcagcaggttcttgttgttcaggctctacgtccagatagattgcagagcgccatggctctgtttgcctgtaaggccctgggactgaagggtgccttggctctcagttctggagaaggaattgaattctcttcaacctaaagatacctttcgtttgtggctcactgcggaagttcatcccagcttcaccccgtgtcgataactgttttgacctcagggttcttcagtcatacctgaagcagttttttaattcttcagtaattgatgtactaaacgaaaggaacaagaaaagcatttttccatattccatctctctccccaactcctgcagcattttggactatcgcgctgtcattgggaagctcccagaggatgacaaacctagcttcttcgggctgcctgccaacatcgcccgctcatctcagcgcatgaccagttctcaggttatctcccagctcaggatcttgggaagatcggtctcagctggttgcaaatttgatagagaaatctggtctaatgaactttctccatcctcaatctgcttagtacagagtgtccatcagtctcttgctgctctcagcaaagtcatcagaggaactactttactgagctcagaagtacaaaaactggcaagtgctttattaaaccaaaagtgtcctctcacctggcagagcaaatgggaaggccccgaggatcccctccagtaccttcgaggtcttgtagcccgtgcccttgcaattcagaaccagggtcgataaagactgaaaagcaagctcttctctctgatacacttgacctgtctgaactcttccatccagacacattccttaatgctcttcgccaggaaactgcaagggcaatgggctgctccgtggatagccttaaatttgtagcatcctggaaaggccgacttccagaagcaaagctgcagattaagatcagtggtttgttactggaaggttgcagctttgatggcaatcgcctttcagaaaaccagcacgattctcccagcgtgtcatcagttctcccttgctttatgggctggactccacagagtacatatggcccttactcccctgacgaatgcatctctttgcctgtttacacaagtgccgagagggatcgtgtggtgaccaacattgatgttccctgtgggggcaaccaggaccagtggatccagtgtggggcagcactgtttcttaaaaatcaataaatctgaggcaacacaggacaacttagcaaagtgacagttgctgcaaagttttacacagaatatatagttagtctgaaatgttagttcagaaggtctgttttagtcttccttgttgttgagctccttgggttcttattttaatacatgtgtaacacccatgctgtgtaccttcaagaatttcataataaagtgggggtatttgg

SEQ ID NO: 3148 - DNA, 1758 bp, Cricetulus griseus
tgcggctgctgctgctgtttctgctcctgatgctgctagcgctggtggcccccggcgcgcagggggctcggggccgcggaactgcggacaagaacagccaccggcgcgcggccagcaccttctcgcagagcgtgaacagcctgttcggagaggacaacgtgcgcgcggctcagaagttactgtccaggctgactgagcgcttcgtgcagggagtggacatgttcatggagactatatggaaagtttggatggagctcttggaagtccttggacttgacgtgtccaacctgtcacagtacttcagcccagcctctgtgtccaacaatcccacccgggccctggtgctggttggtgtggtcctcctggcctactggttcttatctctgacattgggtttcaccttcagcttcctgcacctggtgtttggccgcttcttctggctcgtacgagtcatcctgttctccatgtcatgcgtgtatatcctgcataagtatgagggtgagcctgagcacaccgtgctaccgctctgcctcgtggtggccatctacttcatgacagggcccatgggctactggcgaggcagccctggtggccttggcagccccagtgtggaggagaagctggaacacctggagaaccaggtgagattgctcaacatccgtctcaacagggtgctggagaacctcgaccgctccaaggacaagtgaaggccaggtgcctggccacccaagggtgccacctgcagtaacgtcagaagacaagggaagaagaaaacagctggcagccccaacaaaccctacccctcccaataaactgaacaagaatgccacacctggtatttcccactgtgtgtcgaccttaaggcccactggaggagaaagaacttatgtagatcagccgggcgttggtggcacacgcctttaatcccagcactctggaggcagaggcaggcggatctctgtgagttcgagatcagcctggtctaaagagcgagttccaggacagcctccaaagcgacacagagaaaccctgtactcgaaaaaaaaaacaacaaaaaagtgctgatttcaaagtcattggcatcagtaaacttcagcccactgcatccttctgtgttttgttctttggtgatccctccatagctaggacagacaaggagaacccatttttctgacctggtggcacaagaagcacatcgtttgcattgtcacctggatggctatggcagctgatggcataattgactctctgccctgatgtctctgcaaatttcaagcttttaccgttgtgtcagtttcctgtctgcatctgtgataaatctctgaatatcctacaattaaattaatttcttgtgacagtgtctaatgtgcagttaaatccctcatgaagtaattatttccctggtcttagctgcaagtcatattcttttttaccaatgatatcttcatggttgagttattgtgttgtgcctcagcttaagaaattttatatagtatttagttcaacacaatagaaagccattctgtgaacataggggggggtgtgcacgcatgcacgtgcatataccttagttgggaagctaattctacgaatatcttatataggaaaaaaaagcaccaggcttattatttttttgcaaagtgatggatacattcctcttatttattaatcactggctttgatgttagaggtctttgtagatcgacttgaactggattaaaacattgtgaacattacagcttaataaatgtttactgt

SEQ ID NO: 3149 - DNA, 1757 bp, Cricetulus griseus
agatagagactacactgtgtctgccgtgccttccagaatatcatgcgttgttacaggactcagccacaggcccgaagccaggtatacagaagtgttttgataaaagggaaaagaagaaattctggcaacagtgacagcagaagccaccagaattctccaacagaactaaataaagacagagccagtagagattccagtccagtaatgaggtcaaacagcaccttaccagttccacagcccagcagtgcccctcctacaccaactcgactcacaggagccaacagtgacattgaagaggaggaaagaggagacctcattcagttctacaataacatctacataaaacaaatccaaacatttgccatgaagtactcgcaggccaatcaaatggacactcctcctctctctccctatccatttgtaagaacaggctcccctcgtcgagtacagttatctcaaaatcatcctatctacatttccccacacaaaaatgaagcaacgctttctcctcgagagaagattttttactacttcagcaacagcccatcaaagagactgagagaaattaacagtatgatacggacaggagagactccaactaaaaagagagggattctcctagacgatggaagcgagtcacctgcaaaaagaatttgcccagaaaatcattctgccctgttacgtcgtctccaagatgtagctaatgaccgaggttcacactgaggttagtctccggtatggaaactgtcttcacatgaactgcttagcagttaatgcatgcaggattatgggagcttgctccttaatccagcagttattagagcctggcagaaaagggaagctctccgactgggtatagcggtatatacctgttatcccagcacacaagaggtagaaggagaagaggaaccaggagtttaaggctatcctgggctacatagcatgtctaaggccaaacttgggctatatgtaaccctgactcaaaaacaaaactttcatatggtttggcccaaccatgtgttgtaggacagaacatctgagacattcacattcatgaaacagaacagaagggatggcccagacctggacatctccaggcactcttgcctaaggctcctgttccctttgagtactacgatcccttccccagtagatatggttcattgtgaaaggtgtgcagtgtctgaatgaacctgtgtaattggtggcactttagggctgtaaaatgcatggcactgtaacccagattttgctgtatatttatgatggcactttctataatgtggacttcagtaagtacaagacttctaggctatacagccaatgttttctttaatgcttttcttaaaggacttaatgtacacattctgggcatgtgtaaaacactccagtgtgtggtagtggtgttacataggtatcatctggctaagtaaagatttttaaatcaagctgaattgagaatctgaaaaattatgaccagttccttttggaggtagctatccaaaggaaagtatctttgaggtaattcctggaagttaaaagaataggttggagaatttaggtttttattagtaggtagtaccatttatacaaattagaaaattatttaacagctattgattatctacacatatctttattaatcattattgttccagttgtttttaagttggattaataatcctaaggagaaaattcaattgtaaattggatcatataagcaaagttactaggtaacttcatactgctctaaagca

SEQ ID NO: 3150 - DNA, 1757 bp, Cricetulus griseus
acacgcgcggtctggacgggcctctccatggcttgggcgtcggttcccggctgagccattttctttgcggctgacggcccctcaggcttgcagatgggtcaaggactctggagagtggccagaaaccagcatctccaacaggaagcctacagtgagccaggctacctcagcagagagcagagcaggagagtgacttcaagcaacatttctcactccagccaccggaaacaagcccagggaggcattgatctgtatcaccttctgaaagcaaggaagtctaaagagcaggaagggttcattaacttggaaatgctgcctcctgagcttagcttcaccatcttgtcctacctaaatgcaactgacctctgcttagcgtcatgtgtttggcaagaccttgctaatgatgaacttctctggcaagggttgtgtaaatccacttggggtcactgttctatatacaataagaacccacctttaggattttcttttagaaaactgtatatgcagctagatgaaggaagcctcacttttaatgccaacccagaggagggagtgagctactttatgtccaagggtatcctagatgattcgccaaaggagatagcaaaatttatcttctgtacaagaacactaaattggaaaaaactgagaatctaccttgatgaaaggagagatgtcttggatgaccttgtaaccttgcataattttaggaatcagttcttgccaaatgcattgagagaattttttcgtcacattcatgctccggaagaacgtggggagtaccttgaaactctcataacaaagttctcacataggttctgtgcttgtaatcctgacctaatgcgagaacttggccttagtcctgatgctgtctatgtcctgtgctactctttgattctactttccattgacctcactagtcctcatgtgaagaataaaatgtcaaaaagagaatttattcgaaatacccgccgcgctgctcagaacattagtgaagattttgtaggacacctttatgacaacatctaccttattggccacgtggctgcataaaagcacaactgttgggacttcaactttttactccagactaaagctatccacaaaaggacttagcagaaatggggttgcatcaatgctggtctctccagcctctgtatacagtcaagcttgagtacacagcctcttttggtttcactgttttttagtttagaaatttcagaactaactaactaattttgatgaacttttcttaattttgctcatcatgtttgcacaaaacagccactgtataacacagctatagagaatgttaaactgacatatactctaagatggagtgtttgtgcattagatttgtctgaaaactatccatttccatcctttaaaaaataccatgtaatgtatgcatatttaactaaagagatttataatcataattattttattgtaaagattttaactaaaggttttccttttctcttgaaccgagtttggaaatttatttgactctgatctaagtgtattgttggctttgtcaaagttggatctggccccagaaaccaataccagcttcccatttctttgaactttgaaaagagtgttgatttgttactattttaatatactatgcaaaactggccttatttgtataacatatatcatttgattcatttttaaaacttctgggttaataaagtttcgatacatccttcaaacgtttagaatattaaaagtgtcagaatttaaaaagtcac

SEQ ID NO: 3151 - DNA, 1757 bp, Cricetulus griseus
agggacattactatgatccattgcaggttccagggaccaatctatacccatggcgacagccctgccccacctgcctccacagggcatgatccccatcagtcaccagcacctcttgccaatccgggtctctacccaccaccagtgtccatgtctccaggacaaccaccaccccagcagttgctcgctcctacttacttttctgctccaggtgtcatgaattttggtaaccccagttacccttatgctccaggagcattacctcctcctccacctcctcatctgtatcctaacacacaggctccatcacaggtgtatgggggagtgacctactataaccctgcccagcagcaggtgcagccaaaaccctccccaccccggaggactccccagccagtgtccatcaacgccccctcacctgactgttgtttactttctccccggagatccaagtgtcttctgctcccagggaagttccttcctgcttatttgtttgaatgttcatttttaaagcctaacttacccttcttaaactaatattcttagtttttctccttttccctgctctatcccctgactttacatgaaacaagttcattctagtttactaccctttctggagtcccttttgactcctccccaactcccacgtaattgagagtgtatcaaccaagtgtaaaaatagctggccttttccttgtgattggtctttattagtcccttaacttctctagctctatggaagctatctgcacgaagtgtcccactgtagaggaggggtcagagtgggtgagtaggagcccttgttggaggtgtgggtctcacaaatctgagcctccttcagtacctctattccgatgggcttcatgcctccaagggggcagaatctctactgtggagagagagaacaaactgaatgcttttgtgagaagggagggtggagtgaaatcctctgcgagtcctcagggctgtctttgaggtaagtgtaattagtgggccctgcttcttttctttacatccctcctactacacccccttcccagttgctgtggaccaatgcatctctagagacaaatactatccagcagtctgtctgccttgtcttttgcagttcttctccatgccttccctgctacaagtgtttttagatgttctaccttactttccccaaattctgctcctgtacttgtaaacagaaagtaactgtatctggacttaaatcctaaggaagcaagtcgccttctgggcaaaggctctccctcttatcattcctcttcatggcaccaaaccacatccctgtgcctctgtggaagtccattactgcagcactatgcctgccagggttcttacagaacctgagggaaaaagtggtggctgtccctccccagtaatgtcactgtttttattcttccctcctacagctggcctaaccactcttgagtcgggggtgggggtaacccccaaggaggaaataactaagaggttattcctgggatagctggtggttgtgccttttataggcttccctttgccttaaacctgaagatgtttcctcaagcctgtgggcagcatgcccagatccccagaccttaagacactgtgacagttgtctgttggtccactgtgtttagttgcaaagatttcaccatgtgtgttgtttttgttactgttttaaagggtgcatatttgtgatcagcattgtgacttggagataataaaatatagactatagacttgaaaaaaaaaaaaaaaaaaaaaaa

SEQ ID NO: 3152 - DNA, 1756 bp, Cricetulus griseus
  modified_base (769)..(769): a, c, t, g, unknown or other
cagaaaatccggctattacaacaaaggaaagttgcagatgtctcacaattcaaagatctcccagatgaaattcctctacccctggttattggaaccaaagttacagcacgattgcgtggtgttcacgatggcctgttcactggccagatagacgctgtgggtaaaatttctggctctgacacggagacattaggaggctttccagtggaattccttatccaggtgactaaattatcaaaaattctcatgattaaaaaagaacatatcaagaaattaagggaaatgaacacagaagcagaaaaactgaaatcatattccatgcccattagtattgaatttcaacggagatacgcaacaattgttctagagcttgagcagttgaacaaagaccaaacaaagttttgcataaagttcagcagtactgctatgagcttgcaccagaccagggactccagcctgctgatcagccaacagacttgagacgaaggtgtgaggaagaagccaggaagacctgaattcctttgaattcaaatcactcacagattcattaaatgacatcaagaatacaatagatgcttctaatatcagttgttttcagaataatgtagaaatccatgttgcacatatccagagtggcctaagccagatgggaaacttacatgcctttgcggccaacaacaccaacagagactgagcacaggagacctggtacccaactgcacaagaccttggtctgaggagtccttctcattaatctaagtttccaacnccagttaacctttttattacatgcatgaattactgctcagcacatagcaaacaaactcctgtgacagagaacacaaagaagcattggtctttccacccatgcgtgacggaatccatctgaaaaatcaccggtccagtggatttcgttgatcattatatctcaggcttcaaaatttacatcgtgagtgtgggaagtcgtcctggtgttaaggaagccactggaagatggatgggaaacagagacttaagtatatgttgcatatactgacagtatgacatggttctatagatcaatttataataataactattttaatttatcataatttataaaacgtgtttatcagtagaagaaaatgaaggagtgggaagaactgtattgtaggccgctggatttcagcgagtggacttggcatgcctttccatgattcagggcgaaaagtgctattgttagatttattttaagaaaaaagactgataacacactattttcatattttttgtttatttgcacaactttaaaccatacagagggaggttttgttttagtttttcttgtttggttttgttttttcttttttttttttaagtaaaaaacctgccgaaaataatcttgtaaaaagtatgtattttaaaattttgttttaatatagattattataaagccaaaatataattgttttcagatttggagtttaaaatataactatagaggtgaatctgattctttgacgtctcataaaatgagactttttgtaaattaatgtataataaaactagaaataaagattatttccatttgaaattttgtatagtttaaaagacgcttccgtgttctttgttggtattgggccactgcagatctttagtgcagagtttatatttagctaaactgttatgttaattaagaaatgcataaatcttttattcttaatatttgtaattctaaataaataaatcaatgaaaatttaaaaaaaaaaaaaaaaa

SEQ ID NO: 3153 - DNA, 1756 bp, Cricetulus griseus
cactccacatgtgctgtgcagaaaggctgagctggatgttcctctgttgtctcctgtgttttctcttgctcttctatatgatatttctggttctttcggccattcatgtcctggtatgcacctcatccgagagctcatgctacctctgcagcctcccatggctggcagcaggaggtgtgatggtacttgtttctgtgctgctctgtgcaattttgtctgctcttatcaggatggttatcgatggcactctgctgaagaagagagcagctcatcccggctcagggtggtcagaggtggacctccttcttcttctgggcacagtgggccatgttctgagcctgggagccagcagctttgtggaggaagaacatcagacctggtactttcttgttaacactctgtgcctggctctgagccaggaaacctgcaggagttaccttgtgggagatgactgtgagcctcagcatcacttccaagtggaggaacaaggatgttcggacatacttgccagcacccttttggacagtacgagctataatacccctgagcctgtcagaactggtaaaggggcctccctttctgaagcacaaggaagctgcaaatggtggacagtgctggcaagtccatggctggtgctgatctgctgccggctactgaggtccttgaaccagacaggggtgcagggagcccacaggcctgacctcagccactggcttaccagctctgaccacaaagtacaactctcaggcctggctgccctttctctgattgtgatcttcatgttggttcagaagggatgctcccctgtatccaaggcagccttagcactggggctgctgggggtcttctgctacagggcagccattgggattgtgctgttcccatggcaatcagacaacaaagtcatttcaaagggtattattgaagctcgttttgtttatgtatttgtccttggcattctgttcacgggtaccaaagatttacttaaagcacaagtcattgcaacagactacaaaaccaggacaataggtttgtgggagatacatagtggattagtccttctggcagccttgcttttgagaccacataatcttccagtgttagcatttagtctcttgattcagactgtaatgactaagttcatctggaagcccctgagacacgatgcagccgagatcactgtaatgcattattggtttggtcaagcattcttctattttcagggtaactcaaacaacattgccaccattgacatttcagcaggctttgtgggcttagacacctacttggaagttccagccactttcctcactgtgtttggaacatatgtcgggcctgtgctctgggccagccaccttatgcacttcctgagctcagaagcaagcaatggtccagctctgagccgtgcttgcttctgctatgcactgattggctctgttccagttgccacatacattgttttggtgacatcccttcgttatcacttgttcatatggagtgtattttctccaaagcttctctatgaagggatgcatctgctcatcacggctgccctgtgtgcagtattcaccgccacagaccagacacgccacacaagggcttagtggagacagatgcttggagctggtgcagttttcagtcactgtttgtatcatggatttgaacattgaagctgcctccattcaagatcattctgaggttgagggaaagatgggaagcctatgaagttagtgcataacttaattttactatttaa

SEQ ID NO: 3154 - DNA, 1756 bp, Cricetulus griseus
  modified_base (412)..(412): a, c, t, g, unknown or other
caggtgcagtgccaagcagtggtcttgccagctgccgtgtgggcgcaagctgctctgtggacaacataggtgtgaaaatccttgtcatgcaggaacctgtcagccttgtccaagagttagtagacaaaaatgtgtatgtggcaaaaaagaagcagaaagaagttgtgcgagcccagtgtggcactgtgatcaagtatgtggaaagacactgccatgtggtaaccatacatgtgagcaagtttgtcatgttggtgcttgtggagcgtgtcctcgctccgggaagaggtcctgtccatgtcagaaatcaaagttttctttgccttgtacagaagatgtaccaacttgtggagacagctgtgacaaagtgcttgagtgtggaatccataggtgttcacagcgttaggctggcccngaatgcctccagtgtgaagaaggatgctctaagccacggcctctgggttgtcctcacccttcgtgttatgccttgtcaccctggaaaatgtcctccttgtgttcagatgcttagattaaaatagtcactgcaagattacaagcctctatgtggaatgtagaaaaataaccacagctgatataaatgaaaagaacctcctcagttgttgcaaaaaccagtgccccaaagagcttccttgtggccacagatgcaaagaggtgtgtcatcctggtgaatgcccctttaattgtaaccagaaggtaaaacttagatgcccttgtaaaagaataaaacgggaattgccatgcaataaaatacgtgaaaatcaggtttcagtggaatgtgatgcaacatgcaaagaaatgaagcggaaagcatctgagattaaagaagcagaagccaacgctgctctggaagaagaaaaacgaaggcagcaggctgaactggaagcttttgaaaacagactgaagggtcgcaggaagaagaacaagaaaagagatgaggtggcagtggagctgtctgtttggcagaagtataagtcctacctccttcccgtgtttggagttatggtggcagtgcttgtatggtacattgcctatggtgtggactaatgattctttcaacctttccatatacctcagactggagttaaatgaatgttctgtttaagatattagaaaacatgcattgtagaacgtgatacatgttcacagtttttctgtgttcttgtgtggctatagaaactgagccatatgtgcagcaacagggatatttctctggtcacttactgggtactttttcttgatcatgtaactttgtacttttttaaagaagtgattctgtaaaagaaacttaaattctaacatgaggctttataattagattccagattagtttattagagaggaattttattggtccttgaagcaaattttacactatattcctcagaaaatataaacatataccagattaggttctttataggaggctgttttgtttttgcaagaagctttaactgaagttggcatgttttgtaaaacttgttgtatgtatctttctttatgataataataaaaaaaagaaaacgaatatttctgagcaatatgtgccgagcacagggcttgtgagatttatgtacttgatttcatttctctttactgcagttctttgatataagtatagctgggaacaatctaattttatagaaatcaaactgataataataagccaaattacatagtatttgtaagtcatttaaagtggttttgctatttaattttgttattattttcaatttaaaaa

SEQ ID NO: 3155 - DNA, 1756 bp, Cricetulus griseus
tgttcagtgacatgactgtaggggaaggagagatggtctgtgttgagctggtggccagtgacaaaaccaacacgttccagggtgtcatctttcagggctccatccgttacgaggctctcaagaaggtgtatgacaaccgcgtgagtgtggcggctcgaatggcccagaagatgtcatttggcttctacaagtacaacaacatggagtttgtgcgcatgaaggggcctcaaggcaagggccatgctgagatggcagtcagccgtgtgtctactggtgacacgtccccctgtgggactgaagaagactccagcccagcttcgcccatgcatgagagggtgacctcctttagcaccccgcccaccccggagcgaaacaaccggccctccttcttctccccatccctcaagaggaaggtagcctcggaaccgcattgcagagatgaagaagtcacactcggccaatgacagtgaagagttcttccgagaggacgacagtggagccgacctgcacaatgccaccaacctgcggtctcgctccctgtctggcacaggacggtccctggttgggtcctggctgaagctgaacagagctgacggaaacttccttctctatgcacacttgacctatgtcaccttgccactgcatcggatcttaacagacatcctggaagttcgacagaaacccatcttgatgacctagtgtgtggagcctgcacagagccccggccctgcctggccctggaatgctgccaagtgcctacctgtcaccgccacgggggtcttctgtgacaagccagtgccggagctacagccaggcagggccactcgactcctggggccagggccgactccatgaacaccagcccaaactgaagtgcctcgtcctcttcccttgctggctctgctcccaccctgtcccgcactcggccccctcagcccatctctggagagccttctgctcccaaagagggccaaagccaccaagaggtcatagagagtgtgaggggctgccagcttccagaatgttcttagacctcctgacctccactcccatccccctgctggggctctgtgccaggctactgtccacacatcctatacaaagccagttgaagattttgtaatgcagtactgacgaacttcagctcatgagtcagtcctgacttgttctcccatagttactacttgttgcagtgggttccagctgcgagtcaggggatatgaactgtttgtcggctgggaatacctcgccccatgcccagctcagaatgggtgtcagactccagctgggcagacaggccctgatcccccagaatggcctttgcttccatccaaagaacaccgccaacacacacctccaacccgagatgtcctgtgtcagtctcggctggagggacgcagaattcagttgtgaaggaattgggaggggagggaatgtctgatgggggccggggttgaaatcccaggaaggttttaggcagaaccaccctgaggccagagctcagagtgaggctggtgctgtcccctctgcccccatgctttggttagcatgctggtcttgtcctcagcctggcttcctaggcagagagcagactaggctgcttgtgagcccacattgtccttggtgggtgcaggtgaccaggggtcaccagcccaaggctcactctggcagtgtgctctagctgagacctcctctacccaactggaataaactggaagctgggcctcctgttgctgctgggtttagtgtcccagat

SEQ ID NO: 3156 - DNA, 1756 bp, Cricetulus griseus
gtgacgtgctgtcccggacctgtgtacccacgtgtggcgcgaacgggagacaccggtgagctgccgatcggcttccgcggttccggagagcgagtgcctgctccgtcatgcctcacagaaagaaaaaagccctttatagagaagaagaaagctgtctctttccacttggtccaccggagccagcgcgatcctttagcagcagatgaaactgccccccagagggtactgttgcccacccagaaggtcaatgatgaagaaagacgagcagaacagaggaagtatggggtgttcttcgacgatgactatgactacctgcagcacctgaaggagccatctgggcccgcagagctcattcccagtaccgccttagaaagaagaaaccttagtatgttcaagcactggaattaagttgccttcatcggtgtttgcgtcagagtttgaggaggatgttggattgttaaacaaagcagctccagtttcaggaccgcgactggatttggatcctgacattattgctgctctcgatgatgattttgactttgacgacccagataacctccttgaagatgacttcattctccgggcaaataagccgacaggagaagaggcaatgggtttgccggaatctgagagtgaagatgacaatgagtgggaagacatggacattgaggaagggagcagtgatggctgtagctctgcaggcccactgtcagatggaggtgacagatctgcccctgagtcacctcaagacgacatcaaaagacacctgttttgggaagaggaaaccaaaagccgtttcacagagtattccatgacctcctcaatcatgaggagaaatgaacagctgactctacatgatgagcggtttgagaagttttatgaacaatatgatgatgatgaaattggagctctggataatgcagaactggaaggttccattcaagtagacagcaatcggttgcaggaagttttgaatgactactataaggagaaagcagagaattgtgtcaaattgaatactcttgagccttttgaggatccagatctgccaacaaatgagcttgatgagtctgagaaggaagacatggtcaccatggtccttcaggaagccaaagagaagtgggattgcgagtccatctgcagtacatactccaatttgtacaaccacccacagctcatcagatgtgaaccaaagcccaaacagatccacctgtcttctaaaacgggaatacctctcaatgtcttacctaaaaaaggactcaccgcaaagcaggtcgaacggatgcagatgatcaatagcagtgatctacccaaggtgtcaacccagccacggcccaaaagtgagagcaaagaggataaaagagccagaaagcaagccataaaagaggagcggaaggaacgaagagttgaaaagaaagctaacaagctagcatttaaactggagaaaagacggcaagaaaaggagctgctgaacttgaagaacattgagggtctaaagctgtaggtgtggagcattcagtataagttgtgtttctcttttagtaatcttcattgtgctccataatttaccaagatcttaagagaggtgaacttgtccctgtcatttttatatgggaatagctgagataagtaaagtatttgtagttttatacaagtaaggttctcttgtcagctaccttgtaaatattacaatgttttgactttaatattataagcttatattccctctgaaataaatgacttcatgaaagtaaaa

SEQ ID NO: 3157 - DNA, 1756 bp, Cricetulus griseus
ctgtgacaaggatggacagacagacagtgccgcagaagagagcagcagccaggagacaagcaaaggcctgggtcccaacatgtcctcaacccccgcacatgaggtgggcaggagaacctcagttctgttctccaaaaagaacccgaagacagctggaccgcccaagaggccgggccggccccccaaaaaccgggagagccagatgacccccagccacggaggcagtcctgtggggcccccccagctccccatcatgggctccctgcgtcagcgcaagaggggtaggagcccccggcccagttcgagttcagacagcgacagtgataagtccacagaagacccccaatggacttaccagctaatggcttcagcagtgggaaccagccagtgaagaagagtttcttggtgtaccgtaatgactgcaaccttccccgaagcagctcagactctgagtccagcagcagcagcagcagtagtgccgcctcagaccggaccagcacaacaccctcaaaacaaggccggggcaagccctccttctctagggggacattcccagaggacagcagtgaagatacctcaggcactgagaatgaggcctactccgtggggcactggccgcggcgtgggccacggcagtaagtaccctcacccaaagtcaggggtgctgggaaccccagtttcaaggccttgccagctccccagctgatgatccgccccctctttcccattcctgtgaagtggtaagaaagagtctgggtcgaggagctggctggctgtcagaagatgaggactccccattggatgctctggaccttgtgtgggccaaatgccgaggttatccatcgtatccagctctgatcattgatccaaagatgccccgagaaggtatgttccaccatggggttcccatccctgtaccaccactagaggttctaaaacttggggaacagatgacacaggaagcccgagagcatctctacctcgttctcttctttgacaacaaacgaacctggcagtggctgcccaggactaaactcgttcctctgggtgtgaaccaggatctagacaaagagaagatgctggagggccgcaagtccaacatccgcaagtcagtgcagattgcctatcacagggctctgcagcaccgaagcaaggtgcagggtgagcagagcagcgagaccagcgatagtgactgatactgtcagagcccaactacagtgctctgtgaccgatctccttccctttgctcactgtcctggagttgtgccgccctctgcactgattaattcctggtcttggggccagtctcaggggaagttgggtgggggaggtccctcctgccctgagtgcagctggactgtacaaaacactccaagggcccatggccactcagtgcaaggagaggagaggtcccacaggtcaaaaagagcttaagacctcatggtgttgtagggcaggatggtgggtcatggtaaaaatactgcataaaacatgccataccaccacccttacctgcttgtgccaggggaatccataactgcctagaggcctgaggcccttgcaggtggtaaggtaagccagcattatcccagcctagcagtggaattgatgtctgtctagcctggaagaggggcactaggtgacccctcccctgctgttgtaaatactgtaattttttgagaatttaaattattctcatttgtaactgcgtttccgggtcgcgccagagtcatttggtactaaaaaaaaaaaaaaa

SEQ ID NO: 3158 - DNA, 1756 bp, Cricetulus griseus
ctagacatcagaatcagatggtgggcattgagttcaaagagaagcttctggtctgcggagcgagctgtcactgggtataacgaccctgaaacaggaaacatcatctctttgttccaagcaatgaacaaagagctcatcgagaagggccacggcattcgtctgctggaagcacagatcgcaaccggcggcatcatcgatccaaaggagagccatcgtttgccggttgacatggcgtataagaggggatactttaatgaggagcttagcgagatcctctcagacccaagtgatgacaccaaaggcttttttgatccaaacacggaggaaaaccttacctatctgcaactgaaggaaagatgcatcaaggatgaggaaacagggctctgccctctgcctctgaaagaaaagaagaaacaggtgcagacgtcgcaaaagaataccctccggaagcggcgagtggtcatagttgacccgatgatctccttgaaaacggcgttggcaacagcagcggcttgggcggcggtgtcaacgacgtatgtttttagcagctcccggcacgaatccgtaagcaagatttctaccatatccagcgttagaaatttaaccatccgaagcagctctctgtctgaccccctggaggagtcgagccccattgcagccatctttgacacagaaaacctggagaaaatctccatcacagaaggtatagagaggggcattgtggatagcatcactgggcagaggcttctggaggctcaggcctgcactggtggcatcatccaccctaccacgggtcagaagctgtctcttcaagatgccgtctcccagggcctcattgaccaagatatggccaccaggctgaagcctgcccagaaggccttcattggctttgaaggtgtaaaaggaaagaagaagatgtctgcagcagaggcagtgaaggaaaagtggcttccctatgaggcaggccagcgcttcctggagttccagtacctcaccggaggcctggttgacccagaagtgcatgggaggatcagcaccgaagaagccatccgaaagggtttcatcgacggccgtgcggctcagaggttgcaagatatcagcagctatgccaaaatcctcacctgccccaaaaccaaattaaaaatctcctaacaacggaaacctggtgcttgcagtatagcggtagaacattcgatgcttgagacgtagccgcaataaaattccagtagtaaaggctcatttggcttctctagcttttggctcaactaatgtagtgtgcttccacgtagtgaatgtgaagtggcaatcatttgtaaggatggggcaaattgaatttagaatgtatttcttcccttctgttttgatcaattttctgtaacttttttgggcctagaaggtccaatttctgggcttggagatagagattaaacggattgctggtgtcttagtcctcgttttgttatttctaacctaaatagttacactttctatattaggagaaaactgcccctccccgcctccaagcattttgtcccaagtttcccttagtttgagaacatagattgtattacccatatactcttacatgcacttgtttggtttggtattactttgactatgtccacaatagcagcaaactttgctctttgttagtcaagggtttcctgtttatttggcttgtcattttctatgtgctttaaaaaaggtgtctttgtgaagtttgctgttctgacaataaacttttagactttaggaa

SEQ ID NO: 3159 - DNA, 1755 bp, Cricetulus griseus
  modified_base (732)..(732): a, c, t, g, unknown or other
gccaccattgcctggacttgacctaaaagggttctgagagtccagaaatgggcccagaagtaaccccagcaacctcgggatgaactggtagaggcagcctgcgccctgacttgtgactgggcagagcggatcctgaaacggtccttcagttccattgttcaggtggcccgctacctactgcagcagcacctcatctctgcccgatctgcacatgctcatgtgcttaaggctggggccttgctgaagaagatgaaagagcccctcgagaacggtcatcatgtaaatccaagaatggtgtagagaacctggaaggtggccggccctaagaagcctgagagacctgccctaccgtaagtgaagcgaaaaggaagcggggacgccctcgaaaaaagaccaggtgggagtggggagagacacactactccagagaaggctgcagctgcagctgctgtgaactctccccgaactccaaggttactctgggagacatggggctacaaaaggggaaaaaaacatagttgggagaccagagagactagggccagtgggtgaagctgagcaggaagcagtgcctactcaaggtcagagagactgtgctgtttccaaaggagaaaggagcctgagttcccagcaagccaaagaagcagaagataaaattcctctcatcacctcaaaagtgagtgttatcaagggcagaattcaaagggagacttacttccaattggtaaaggngagaggctggcactgcaacacagggtaacaaagggttaaaggggcatgtacttcaaagttccctaacctatgagcataaagaccccaaagcaacgcccccattaggttaaggatattctggtttctaatcatagaaaatttagaagtcacacttaagattaaagccatttattggcttctgaaattgggaagtcaagaggcggtgctggctccaggtgagacttgatcagttgctcagtatgtttctcactgcttcacctaatgtacaatcatccttagtttggaccacttcacagctgccagcactcctaggattgtgtgtgaccattatatctaagcagaaagaaagggtattacagtgccaggaatcctagcaaaaagcccaaaagattcactatgaatttaaaaacccagaccctgggtcaggtctatccttgaccaactagtgtggctacaaatatgtttatgcctactctgtcctctccacaggatggcttcttgtcagggaatcttggtttttttcccccaagaaatacagattttctttcagggaggtatcacccattactccacttatttccacaagagcagattttttaaaaaaaattatagtatttgatatctataaagaaatatgtactataaattatgaaatgtaatgagtacctatgacccatcattcaatttatacattaaaaatactattaggtttatgccccccttccctgcctctgcttagaggtaaccactgtctttaattttcttagccattcacctattgaataacattgggctgtttccagtttttgttattatacacaatgctgctatgaacattcttgtatatgagtgcctttgtttttagtaagaggtttctaagaaagatggtcctaaacagtccttttggtctatgtaccctctgagttggggactgttgcctattgtcttactttatgaaagagtttacatcatattgaaatgaactgttcttgaatgtttgataaaactcacttataaagacca

SEQ ID NO: 3160 - DNA, 1755 bp, Cricetulus griseus
aaagctaagaagtgcacggtgattggaggctctgggttcctggggcagcacatggtggagcagttgctggcacgaggctatgctgtcaatgtatttgatattcgccaagggtttgataatccacaggtgcagttctttataggtgatctctgcagccaacaggacctgtacccagctctgaaaggtgtaagcacagttttccactgtgcatcaccaccaccatccagtaacaacaaggaactcttttatagagtgaatttcattggcaccaagaatgtcattgaaacctgcaaaaaggctggggttcagaaactcattttaaccagcagtgccagtgtcgtctttgagggtgttgacataaaaaatggaactgaagacctcccttatgccatgaagcccattgactactacacagagaccaagatcttacaggagagagaagtactggatgccaacaaccctgacaagaatttcttaaccacagccattcgtcctcatggcattttcggcccaagggacccccagttagtccctatcctaattgatgcagctagaaagggcaaaatgaagtttatgattggaaatgggaagaacctagtggacttcacctttgtggagaatgtggttcatggacatatcttggcagctgagcacctatcccaagatgcagcgctgggtgggaaggcatttcacattaccaacgatgagccaatccctttctggacgttcctgtcccgcatgctgacaggcctcaattatgaggcccccaagtaccacatcccctactgggtagcctactaccttgctttcctgttctctctactggtgatggtggtcagtcctctcatccaaattcagccaacttttacaccaatgcgtgtggcactggccggtacgttccactactacagttgtgagaaagcaaaaaagctcttcgggtaccggccactggtcaccatggatgatgccgtggaaaggacagtgcagagttttcaccacctgcggaagggcaagtgacgtgccccaagccctcaccaataagttttcttctctcttctgatgaaccaatatccttacttgcatttcttctgagctatgtgccccttgctggttagatggtagcatgcctgactccctccatgaggaggtgacaacaacaggaggcatttttcccaggatagcattggccttaaagcaggcaggtgcataatctactgctttggtctttctctctcctaacccctacttctctctccaatccccaatccctaagaataaatccactcctggttccttgctgccttgcatactttcagcgtctcttttaaaaaatggttgcagtgtctgcctgcattgtttttccataaaacatttcccttcatccacagaatctagtggtggtctttagttgtcagtagtgatacagtgagtgctaatattgtactttgtgtgctgtgttgactggtcagctccttataacacaggagataataggctggtttgcagtaagctggaggttggccttctgcctgatgtttgagtagaaactccttaatgagatgatgcttaatgggcttcagacatccttgcagctcacctcacagaacaacattatcaggccatcttccaaagagtacagcccatctaacaatctagtgttttctgttctctgaactcattaaaatgtattcctgaagaattctaagttcttcttcatcattgttcaaaggtaggaaggcaattgggagaaaataa

SEQ ID NO: 3161 - DNA, 1755 bp, Cricetulus griseus
tggaagagcagtcaagtgaacccaggaagaaagtgaaagtaaagctagcaagatctgggcactacaaaccactggcccctctggaccctgcagggaacactgagctggagctgcctgcaccctccctcatccagcccctgggggtggtccccctcatccctagcccattgtcatctgcagtgcctgtgatcctacctcaggccccctcgggccaatcctatgccatctacctgcaacccgcccaagcccaaatgctgacaccaccccatggcctgagtccaacagtctgccccacccactcctctaatgctactggatccaaagaccctacagatgcccccactgagaggaccaccccagatgccgcagttctgtgaagaagcctaaagaggacctgaaagcccttgagaatgtcccaacgactctgttcccatcagggtacctaatccctctcacccagtgctcatccctgggggcagaatcggtgttgtctggcacagaaaactcaggtacactttcccaaaccacaggatctacggctccccaattgcaggtgttatccccgtggcatcatctgaactcactgctgtgaattttccctcttttcatgtgacacctttgaaacttatggtctccccaacctctgtggcagccgtacctgttgggaacagcccggctctcaactcaagccaccctgttcctgcccagaacccaagctcagccattgtaaactttaccctgcagcacttgggactcatctcccccagtgtgcagatgtctgccagccctgggcctggagctggcacagtccctgtgtccccacatgttgaagcagataacttgagctctcgacaagggagggccaccagccatgactcgccagtcctgggccagagccaactaaatggacaatcagttgctgggacaggaccacaacagcctgttcctgtgacacctaaaggttcccagttggtggctgaaagtttcttccgtaccccaggtggaccaaccaagcctaccagctcaccctacatggatttcgatggtgctaacaaaacctcctttggaaccctctttgtcccacagcgtaaactggaagtctcaactgaggatgtccactgattgacagaagatggtggtttaatttaattttctaaagagctatttaatgagatgatgtagacatacatattgagaggataccacctttgaaaatactgtaaatactttggggttttactcaatatcaccgcaaatattttgtcatgcctacgcatgtgcacacacacacacacacacacacacacacacacacacacacacactcacacacacacacacatttgtacaaggccaaattcagccttcaatactataaaagtaaaatgttgaactaaggtacattaatttctaagggggaagatttcttttttttctacctgtgcctgtattattatgcaaagtaactttattaaagtttacttccctttcagtaaatgttttgacttacctaacacagcacctgctcaaactcttttgcacaaaggaaatgctgtgtgatgtataatgtatttttacatagggaggcgatagctctatttttttgtaatttcttttaatccttttgctgttgcagtctgtctttttgtagagtttacaaccctcctcaatcaagtctatggaaaaaaattatttataaaatgtatttttaatcataagttgttgaaattaaaactcttctcaaatgtaaaaaaa

SEQ ID NO: 3162 - DNA, 1754 bp, Cricetulus griseus
tggaatgaaggatggcagcgcgccgtgcattaaaagctgttttggtagatctcaatggcacacttcacattgaagatgcagctgtgccaggcgcacagggaagctcttaaaaggttacgggctgcttctgtggtgattaggtttgtgaccaacacaaccaaagagagcaagcaagacctattggaaaggctgaagaagctggagtttgacatctcagaagatgaaatcttcacctctctgacagcagcccgaaacttagtagagcagaaacaagtcaggcccatgctgttggttgatgaccgtgcactacctgatttcacaggagtacaaacaagtgaccccaacgctgtggtcatcggcctggcaccagaacattttcattaccagcttctgaatcaggcttttcggttactcctggatggagcccctctgatagctatccacaaggccaggtattacaagagaaaagatggcttagccctgggaccaggaccatttgtaaccgctttagaatatgccacagacatgaaagccatagtcgtggggaaaccagagaagacattctttctggaagcattgagggacactggctgtgcaccagaggaggccatcatgataggagatgattgcagggatgatgttggtggggctcagaacactggcatgctgggcatcttagtcaaaactgggaaataccgaactgcagatgaagaaaaaattaatccacctccctacttaacttgcgagagcttccctcacgctgtggaccacattctgcagcatctcctgtgaactcacatgtggtggcatcagcagacagcgccatccagtgccaaccctgttgaaccttcattcattgtgcattaattagaaagaggggtattgaattacagccagcactgagctggctaatctcttttgtttagttttgtaaaagaagatgagacctgaagaaagggagagccgagatttttgtgccattcctgttaaaatattcatcaggttcactgggctgggaggagacgctcctgcgggagtggagtagcagaggttctcacttctctttgctgggaatgagaggatgctcagtgagatgcccagttcaactgtgaaacccagcacaagagccaagtagaatgcaagacagaagtagcatggcaagtccttctgctgatattcaatgaagctgctgtaacagatgtggaaagccaaaccttccactgtattcccagcacagatgacttctttttctcttcattagccagagatgactaatttaaatttagaacccgaatttaatttaaaataatatttccattaataacctattcattgcagatacctattatactgtgtaacagttgttttggaaattttatagttaaaaatttaaaactatcagtattttacagatgttttaattagacattgttattaacaggaacttttatgtacttcttactacagttgtaaaatgagatctcgtctcggcgcctggattattcttcttatgttaaacccacccaaatgaaggagactaagtaggtaatgattttcctggtgcatttgcatgctgtgctaatccgaggccgtggcaattgctttacagggctcttgggcattgaattattagaatgtaattgtgcatcattgcagtgctcaccttattgaggcacacactaatgttaatgagcttcaggctctgatgcttgtttagagatcagctccgtcttggaggggagggaacaaagcta

SEQ ID NO: 3163 - DNA, 1754 bp, Cricetulus griseus
  modified_base (1700)..(1700): a, c, t, g, unknown or other
gcagcagcagcaggactctgaagagaaggatcgagagctgggccacctcaaacagctgctggcccgggcccaccccctggactccttggagaagcaaaatggaaaaggactcatgaagactcagagaagctccgggaaattgtggtacccatggagcaggagattgcagagctgaaagtgaagctgctgagggccctcgcctccgctggaacctttggaggagccaggtggagacccaggctcagctgcagaggcctttgcccacaactgcgacgacagtgcctccatctcttccttctccctcggtggggcagccagtagtgcctccctagccctgagcaggaagagacggcttctctggtgtccactggcactctggtccctgagggcatctacctaccccctcctgggtaccagcttattccagataaccagtgggagcagcttcaggtagaggggcggcagctgcagaaggacctggaaagtgtcagccgtgagcgggatgagctgcaagagggactgagacggagcaatgaggactgtgccaagcaaatgcaggtgctcctagcccaggtccagaactcagagcagctacttcgaactctacaagggactttgagccaggcgcaagaacgtgtgcagatgcagatggcagaactggccacttctcacaaatgcctgcacaacgaggttaaaagactaaatgaagaaaatcaagggctccgggctgagcagctgccatcctccaccctccagggcccggagcagtgggagaatgagggtgaggccctgccctgctccatacaggagctacatttgctggtgcggcacacccggcagcaggcaagggccaggcaacagacacaggagcatgaggctgagcgcctgcgcattgaaatcgtgaagctgcgggaggcactcgaggaggagacagcagccagggccagcctggagggacagctgagggtgcaacgagaagagacagatgtgctagaggcctccctgtgcagtctgaggatagagacagagcgggtccagcaagagcaacgcaaggcccagctcacagacctcctctctgaacagagggccaaagcactgcgactgcaggctgagctggagaccagtgaacaggtgcagagggactttgtacggctgtcccaggccctacaggtacgcctggagcggattcgccaagcagagactctggagcaagtgcgtagcatcctggatgaggcacccctcagggacatcaaggacatcaaggactcctgaggggccagacaagaagcttcccttctggggaagcttcccctttctctaccagaactgtgagacacggactgcaggtctcagaatggagcccacccactccaagcctggacagtagtgtcaccaagccactacttccaccaaggatggctgggcctgctctcagggatgatacctggatgagggtcccagccgccttccaaaaccaaagtacaggccgagccctgtagctttcaggctgccatgctgccccatggatcctgtcctcccaccctgccagctctagctaacagcgagtccggctccaaggcgcatccagcttgtggctagaagctgttggtgtcagtggatgcctcacacataggccctgggacatgcggctgctttctggactgtatgacactaaagtatttgtccacaggcaccagacntaggcctcaagatatatagaagcaaggccggacttttctgtcatttattttcaa

SEQ ID NO: 3164 - DNA, 1753 bp, Cricetulus griseus
ggtatggccacttcacacgtacttgggaaatggctagctctgacacaaatagcaaaccctacgtgcctcgggtagcgccagtgccgattccgtttatccagaattaaccagcgcttagatatgatgccgcacttggagacagacatgatacaaggaggtgtgtacggctcaggtggagaaagatatgactcctatgaggcctgtgactcaagggccatcctgagtgaacgagacctctacaggtcgggctatgactatggcgagcttgatcctgagatggaaatggcctatgagggccaatatgatgcctaccgtgaccagtttcgaatgcgtggaggagatacatttggtccaagggctcagggctgggcccgggatgcccggagtggacggccaatggcctcgggctatgggcgcatgtgggaagaccccatgggggcccggggccagtgcatgcctggtgcctcccggctgccctccctcttctcccagaacatcatccccgagtatggcatgttccagggcatgcgtggtgggggtgccttctctggtggctcccgatttggcttcggatttggcaatggcatgaagcagatgaggcggacctggaagacttggaccacagctgacttccggaccaaaaagaagaagagaaagcagggtggcagtcctgatgagccagacagcaaagctaccagaacagactgctcagacaacagtgactcagacaatgatgaaggcactgagggggaaaccgcagagggtactgaaagtgctgaggctatggagaaaggctcccgagcagaaggagaggacgaggagggaaaagaggatgggagagaagacggcaaagaagattcagagaaagggcccctgactgcccaggatgagagcacccaggccaagcgcaagttgcaggcaagcaagaagagccaagataagcagaagaagcgacagcgagatcgcatggtggaaaggatccagtttgtgtgttctctctgcaaataccgcaccttctacgaggatgagatgggtagccaccttgacagcaagttccacaaggaacacttcaaatatgtaggcaccaagcttcccaagcagactgctgacttcctgcaggaatatgtcaccaacaagaccaagaagacagaggagctgcgaaaaactgtggaggaccttgatggtctgatccagcaaatctacagagaccaagatctgacccaagaaattgctatggagcattttgtaaagaaggtggaggcagcccattgtgcagcctgtgacctcttcatccccatgcagtttggaatcatccaaaagcatctcaagactatggatcacaaccggaaccgcaggctcatgatggagcagtccaagaagtcctctctcatggtggcccgcagtattctcaacaacaagctcattagcaagaagttggagcgctatctgaagggtgagaatcctttcaccgacagcccagaggaggagaaggagcaagacgaggtggaggcgggcgctctggatgaggggacaccaggagaagcgacagggctcgcagagggcgtgccggcacagcccccggtgcccctggagcccgccccagagactgcgataccgccacctccaccgcctccagaggaggagggcgcagtacccctgctgggcgggcgctgcagtgccggatccgagggatcccgggcctcgacgtggaagacgacgaggagggcggtgggggtgctccataacccatacc

SEQ ID NO: 3165 - DNA, 1753 bp, Cricetulus griseus
gtggcctcggcggttcctgctggccctgttaatgtcagggcccggcccggggaggatggcgccctagagcccggcctcgctggcgcagggccgggaggggccggggcgggggccggccatgtcggaggtgacccggagtctgctgcagcgctggggcgccagtctcaggagaggcgccgacttcgactcttggggccagctggtggaggcgatagacgagtatcagatattagcaagacacctacagaaggaggcccaagctcaacacaatgattctgaattcacagaagagcaaaaagaaaaccataaggcaaaatcgccacatgtttagaattgagaagtgcagcattacagtccacacagtcccaagaagaatttaaactggaggacctgaagaagctagagccaatcctgaagaatattcttacatataacaaagaattcccatttgatgttcagcccatcccattaagacggattttagcacctggtgaagaagagaatttggaatttgaagaagatgaagaaggtggagctggggcaggacctcctgattctttttctgctcgagttcctgggactctattgccacggttgccgtcggagccaggaatgacgttactcactatcagaattgagaaaatcggtctgaaggacgctgggcagtgcatcgacccctacattacagtcagcgtgaaggatttgaatggcatagatttaactcctgtacaagatactcctgtggcttcaagaaaagaagatacatatgttcattttaatatggacattgagctccagaagcatgttgaaaaattaaccaaaggtgcagccatcttctttgaattcaaacattacaagcctaaaaagaggttcaccagcaccaagtgttttgccttcatggagatggatgaaattaaacctgggccaattgtaatagaattatacaagaaacccactgactttaaagaaaaaattacaattattgaccaagaaaccactttatcttcatctacatcaaactttgcacaaggaatgatcctgatacaaataacctggaacctatgtgaattttaccactcagaaaccatcatagctctgtgtagcatatcactcttcaacaggcaggaaatgagtccttcccctggatgacaagactggcttcctgacatgaacacatgtatagccaaggggttatctgttcttctctgtcacactgctattcttcctggtagattctggggttaacgctggaaccatctcagagtaactccaggttttaaatgtgtttacagtatcttttaaattgcatcatttaggaagagttgagtcagatgttaaaatactgcggataactgctgcttcctgacaacccattgtgagaccttaagaccgcatacctctccttagtatgcaaaatatgaaaagatagtttatttttttaatataggtagatagaattgccatttatttcctatttagatatacagtcatgcattcctttggaaaatatgcaggtcattagttattttaaattgactatttacctttgatgtaacgaggcataaataaaactttcacatagcacatgatggctagttgttacacagaacattgagattgaggggctttctgtgggttagacatgtggtgcacatctttaatcccagcacttgggaggcagaggcaggcagatctctgtgagttcgaggccagcctggtctacagagtgagttccagaacagccagggataca

SEQ ID NO: 3166 - DNA, 1753 bp, Cricetulus griseus
accgtgccgccgacagcccgaggctccgtcgacgtgaatctcgtggtggtagtccatggtggcggagccagcaacatctcagccgaccggaaagagcgggtgcgcgaggtcatggccaaagcagccaccgagggctacaacatcctcaaggccggagggagcgccgttgatgctgtggaaggagccgtggttatcctggaaaacgacccggagttcaatgcaggttgtgggtctgtcctgaatgaaaaaggtgacattgagatggatgctagtatcatggatgggaaggacctgtcttcaggagcagtgtctgctgtgcgctgtatcgaaaatcccgttaaacttgcacggcttgttatggaaaagacacctcattgctttctgactgcccatggtgcagagaaatttgcagcagacgtggggatgccacagattcctgtagaaaaactgataacggagagaagcaagaagcacctggagaaagagaagcttgataaggggggccaaaaacctgactgccctaaaaacatgggaacagtgggtgctgttgccttggactgcaaaggaaacttggcttatgcgacctctactggggggattgtcaataaaatggttggccgagttggagactcaccttgcataggagctggaggttacgcagacaatgaccttggagccgtttcaaccacaggacatggagaaagtatcctgaaagtgaatctggccagactggccctcttccatgtagaacaaggaaagactgtagatgaggctgctgagttggcattgaattacatgaagtcaaagctcaaaggtctaggtggcctcatcttggtcaacaaaaccggagactgggtagcaaagtggacctctacctccatgccctgggcggcagtgaagaatggcaagctgcaggccggcattgatctttgtgaaaccaggaccagtgacctcttgctagcctcgaggtgaagctgaactgcctggtgtggagacctagcctaatcaattagactagacatggaaaacttacgcagtctgtccctccttttgttgccttagtcaataagtcaatgaatgtttggttgagggttgggttctggagcgatgagagatgcctgtggtaagaccagtgaagatggaagccttagggagcccttctttcccagtctccattgcacaggctataagggagctgctagattttgatcacagaactgcctctgggctggtaatgccttgtggactgggagaacagcaatttgcagaggttaggctgggaaggtgtgggaggaaggtctgaagaaaggtgtctgagagaaagacccaggtccaggtgatgctcaaaatgttacagagttcattctgagtcacaaacacctggcaaggtgtgcagggaggatcttcatcagtgaggggaaacggatctttccagaaagctcacacttctccaacacatgtctaggtatttgaagagtctcgctcccaaaagccagcccctcctgaccccagcccctgttgtcttcacatgggcttgcttgggctcatgacctttccagcctctccagcagtgggttggcagacggctggagaggtgatactgactcactgaaggagtagactgccagtgctttgggacagtcccacacacactgaatcgaacgttcaaggtagcgagcatgacgcagaatgcaggctcctcagtggagagcgtcctgtgcacctgccgtcaccctggaaatgacgtgtctgc

SEQ ID NO: 3167 - DNA, 1753 bp, Cricetulus griseus
ggaggccgcctcggtgaagttctccgccatgaacctgaggggcctctttcaggacttcaacccgagtaaattcctcatctatgcctgtctgttgctgttctctgtgctactggcccttcgtttggatggcatcattcagtggagctactgggctgtctttgctccaatatggttgtggaagttaatggttattgttggagcatcagttggaacgtggagtttgggcacggaatcctcaatatcgagcagaaggagaaacatgtgtggagtttaaaggccatgttgattgctgtgggcattcatttgctcctgctcatgtttgaagttctggtctgtgacagaattgagagaggaagccatttctggcttctggtcttcaatgccattgttctttgtttctccggtgtctgttgcagcatgtgtctggggctttcgacatgacaggtcactagaggttgtgtgtgtccctctgtggatcctcatgtccttcttgtgcctggtggtcctctattacatcgtctggtctgttctgttcctgcgctctatggatgtgattgcagaacaacgcaggacacatataactatggcactaagctggatgaccattgttgttgcctcttcttacttttgtagatcctgcttgttcacaaattggatggccacaatgctttctcctgtattccaatatttgttcccctgtggctctcattgattacactgatggcaacaacatttggacagaaaggaggaaaccactggtggtttggtattcgaaaagatttctgccagtttctgcttgaaatattcccatttttgagagaatatggaaacatttcatatgatctccaccatgaagataatgaggaaacagaagaaactcccattccagaacctcctaaaattgcacccatgtttcgcaagaaggccagggtggtcatcacccaaagccctggcaaatatgttctccctccacccaaattaaatattgaaatgccagactaaagcgcaccaccagggctggagtgtgagtccactgaaacacatactcctacttcccttgtccccgacccaggcctggaactgtggacctccatctgaaacctcatttgcatccagtgccaaccagccactcataacagaacataggtggccagaactaaggatatctaccagtgtggatgccagtaacacatcagagaagagcccacttctttctgtatgggtacttgaagtgtgttctccttcctgtggtacccacccagggatgacttctgcctaggcctgcagaaagtacatctgtggtcttggcagattttctagtgctaaattcctataaaagtattggaagatgtggttcttatgggaccacttccatttgtggctcaactgtattgctataggtagccagtggggactgtaagtaggtctggacacacctgttgtgttcagatacagtccagccgtgctttccctgtccctgctgtacagaaatttcgctttagacagaatgacagcaggtttgcagggctttatcagtgagcccttccaatggcatgattacatgcctgtatagtatttatacagctattttagcattgtaatatacagtgtcaaatcctagttctgtacagcatattctctgttaaagtatttttttacaagtttgtgctggagatggatgggttaagccatggtaaaagtcgatggctcaaatgttttaacccagacagatgccccacctttacttaccatg

SEQ ID NO: 3168 - DNA, 1753 bp, Cricetulus griseus
gtcggattaaattgcaccaggaggataatgactacatcaatgccagtttgataaaaatggaggaagcccagaggagctatattctcacccagggtcctttgccaaacacatgtgggcacttctgggagatggtgtgggagcagaagagccggggtgtggtcatgctcaaccgcatcatggagaaaggctcgttaaaatgtgcccagtattggccacaaaaagaagagaaagagatggtctttgatgacacaaatttgaaattgacactgatctctgaagatgtcaagtcatattacacagtgcgacagctggagttggaaaacttggcgacccaggagtctcgggagatcctgcatttccactacaccacatggcctgactttggagtccctgaatcacctgcctccttcctcaatttccttttcaaagtccgagagtcaggctcactcagctcggagcatggccccatcgtggtacactgcagtgctggcatcggcaggtcggggaccttctgtctggctgacacctgcctcttgctgatggacaagaggaaagacccctcttctgtggatatcaaaaaagtgcttctggagatgcgcaggttccgcatggggctcatccagacagccgaccagctgcgcttctcctacctggctgtgatcgagggagcgaagtttatcatgggcgactcctcagtgcaggatcagtggaaggagctctcccacgaggatctggagcccccacctgagcatgtccccccgcctccccggccaccgaaacgtatcctggagcctcacaatgggaaatgcaaggaactcttctccaaccaccagtgggtgagcgaggagacgtgtgagagtgaagacagcctggccagagaggaaggcagaggcccctcaagtgccatgcacagcacggacagcatgagtcaagacactgaagttagaaaacggatggtgggcgggggtcatcaaggtgcccaggcatctgttcccaccaaggaagagctgtccacaacggaggaggaacaaaaggcacactggccaactcactggaagcccttcctggtcaatgtgtgcatggccacggtcctggcgaccggtgcatacctctgctaccgggtatgttttcactgacggactgtcacagctcattccctggacacttaggcaagcagggcccttccacctctggaatcagtccctccattccaagtgcacactcttctggagcaagccaggattgaaagacggcagcttgtgggaagcactctcctgggaacagcctgggtggcagtccttagaatcagcctgctgtcatcactggcccaggtcaccttgcccagaggtgtgccactcttgagcctggcagagactgacgatggtgcttatgactcttcctgtgagagtacttaagacctccacattgggtggcttttttaaaataagaagcgaaggcagctggaactccaactgcctcttgccagcatttcacattttgcctttcacccggagaagccagcacagagccactggtgggaaggaatggtggtggccttgcccgcagagcctgggaaggtggcacagccagggtccaggctgggagcagttagctgtgggctgtgtctgtagtagtggggtgtgtacagtagccttctaggtgggtgtcctggagaacaggcactctccgccccgttgcctgtgttggaggtagcaagctgctgtatgccttaagccaatatttactcagcagg

SEQ ID NO: 3169 - DNA, 1752 bp, Cricetulus griseus
ccgggccggaatggctgcagcggcggccgggacggggacttgggcggcccaagaaaagcagttcccgcccgcgctgttgagcttcttcatctacaacccacgcttcgggccgcgcgagggagaggaagaaaataaaattttgttttatcatccaaatgaagtagaaaagaatgaaaaaattagaaatgttggattatgtgaagcaattgtacagtttacaaggacttttagcccatcaaaacctgcaaaatctttacatacacagaagaatagacagttcttcaatgaaccagaagaaaatttctggatgatcatggttgttcggaatcctatcatcgaaaagcaaagtaaagatggcaagccaattgtggaataccaagaggaggaactgttggacaaggtgtacagttcagtgctgcagcagtgctatagcatgtataagctttttaatgggacgtttctgaaagccatggaagatggaggtgtcaagcttctaaaagaaagattacagaagttcttccatcggtatttgcagaccctacatttgcagtcatgtgacctacttgatatttttggtggaatcagcttcttcccattggataaaatgacttacttgaaaatccagtcctttattaacagaatggaagaaagcctaagtgtagtcaaatataccgcgttcctctacaacgaccaactcatctggagtggattagaacaagatgacatgaggattttgtacaaatatctcaccacttcactgttccccaggcacatggaacctgagttggcaggaagggattccccaataagggcagaaatgccaggtaatcttcaacactatggaagatttcttactggacccttgaaccttaatgatccagaagcaaaatgcagattccccaaaatttttgtaaatacagatgacacttatgaagagctccatttaattgtttataaggccatgagtgcagctgtgtgctttatgattgatgcctccacgcagctgacgctggatttttgccgaagattggacagcatcgttgggccccagcttacagtgctggcatctgacatctgtgagcagtttaatatcaacaagagaatatctgggtctgaaaaagaaccccagtttaagttcatctacttcaaccacatgaatttagcagagaaaagtacaattcacatgaggaaaacacccagtgtgtcactcacatctgtccatccagatctaatgaagattctaggtgacatcaacagtgactttaccagagcggatgaagatgaagaaatcattgtgaaagccatgagcgattactgggttgttgggaagaagtctgatcagcgggagctgtatgtgattctgaatcaaaaaaatgcaaacctgatcgaagtcaatgaagaggtgaaaaaactctgcgccacacagttcaataatatcttcttcttggattgactccaatggctctccagaacctcttttaaaacctcagcaaactttttgtttaccattacaacttaactggtcatgacattgactggattagtgacaatagtaaagcaatacctgctttgaaaaaatcaaatttctacttggtctgatgagtccctgaggtttttagatgctaaatatttatgtggaattaaaggtagtcagcttaatatcattccattcttctgacattatgtgggtattttactgggaaataagactaataaattgttaaagtttttaagaaaaaaaaaaaaaaaaaa

SEQ ID NO: 3170 - DNA, 1752 bp, Cricetulus griseus
aaccaagtacagaccattcagtattcaaatagcgaagacaaagacaggaaaggaatgctacaactcaaaattgctggcgcccctgagcctctgacagtgacggcaccatccctaaccattgcggagaacatggctgatctgatcgacggatactgccggctggtaaatggagcgacacaatccttcattatcagaccacagaaagaaggcgaacgggcattgccatcaataccaaagttggccaacagtgaaaaacaaggcattcggacacatgcagtctctgtgtcagagacagatgactacgctgagatcatcgatgaggaagacacatacaccatgccctcgaccagggattatgagattcagagagaaagaatagaacttggacgctgcattggagaaggtcagtttggagacgtacgtttgaccatcctcacatcgtgaagctgattggagtcattacagagaaccccgtctggataatcatggagttgtgcacgcttggagagctgaggtcatttttgcaagtaaggaaatacagcttggatctggcatctttgatcctatatgcctatcagcttagtacagcactcgcgtatctggaaagcaaaagatttgttcacagggacattgctgctcggaatgttctggtgtcatcaaatgattgtgtaaaattaggagactttggattatcccgatatatggaagacagtacttactataaagcttccaaaggaaaattgcctattaaatggatggctccagagtcaatcaactttcgacgttttacctcagctagtgacgtgtggatgtttggtgtgtgtatgtgggagatactgatgcatggtgtgaagccttttcaaggagtgaagaacaatgatgtgatcggtcgaattgaaaatggggaaagattaccaatgcctccaaattgtcctcccaccctctacagccttatgacgaaatgctgggcctatgaccccagcaggcggcccaggtttactgaacttaaagctcagctcagcacaatcttggaggaagagaaggtgcagcaagaagaacggatgaggatggagtccagaagacaggcgaccgtatcctgggactctggagggtctgatgaagcaccacccaagcccagcagacctggttatcctagcccaagatccagtgaaggattttatcccagcccacagcacatggtccagaccaatcactaccaggtctctggctacccgggttcccatggaatcccatccatggcaggcagcatttacccaggtcaggcatctcttctggaccagacagaattgtggaatcacagaccccaggaggtgtccgcgtggcagcctggtgtggaggactcagcagctttggaccttcgaggaatgggacaggtgcttccccctcatctgatggaagagcggctaatccgacagcagcaggaaatggaagaggaccagcgctggctggagaaggaagagcgatttctgaaacctgacgtgaggctctctcgaggcagcatcgacagggaggatgggagttttcagggtccgactggaaatcaacacatctatcagcctgtgggaaaaacagatcctgcagctccaccaaagaaaccaccacgccctggagcacctggccacctaagcaacctggcaaccatcagcagctctggggacagctacaatgagggtgtcaaggtgggcatctaagcctgtgcagcatagtctgttccgatcatgctggagcctt

SEQ ID NO: 3171 - DNA, 1752 bp, Cricetulus griseus
ctttgctggcggactcgggaggatgaaggtgatcacgtgtgaaatcgcctggcacaacaaggagccggtgtacagcctggacttccagcatgcggcggcctggaagagccacaggctggcgtccgccggcgtggacaccgccgtcaggatctggaaggtggagaaggggccggacgggaaagccgttgtggaattcctctccaatcttgctcggcacaccagagctgtcaatgttgtgcgtttttctccatctggggagatcttagcatctggaggtgatgatgctgtcgttctcttgtggaggatgaatgataacaaggagccagagccgatcacctttcaggacgaggatgaggctcagttgaacaaggagaactggactgtgataaaaaccctgaggggccacttagaagatgtgtgcgatatttgctgggcaaatgatgggactctgatggcctctgcctctgtggataacacagttatcatatgggatgccagcaaaggacagaaaatttccattttcaacgagcataaaagctacgtacaaggagttacctgggaccctttgggtcaatatattgcgaccctgagttgcgacagagtgcttcgggtctatagcacccagaagaagcgtgtggctttcaacatttcaaagatgctatctggaccagggtctgaaggagaggcaagaagtttccggatgtttcacgatgacagcatgaagtcattcttccgtagactcagttttacaccagatggatctttgcttctcactccagctggatgtgtggaatctggtgaaaatgtgacaaacacaacgtatgtgttctccagaaaacacctgaaaaggccgattgcccacctaccgtgtcccgggaaagcaaccctggctgtccgctgctgtcccgtctactttgagttgaggccagtgccagaaacagagagagcatcagaggagcccagccccgagctggtgagcctgccctaccgtatggtgtttgccgtggcctccgaagactctgtggtgctgtatgacacacagcagcctttcccatttggctatgtgtctaacatccattaccataccctgagtgacatctcctggtccagtgacggaaccttcctgggcatctcctccacggatggttattgctcctttgtgacctttgagaagggtgaacttggcatacctctgaaagagaagccggttttgaacataagaacccctgatacagcaaagaaaaccaagagccagacacaccaggggtcttcgccaggacccagatccgccgaaggaacccccacctgcagacttcaagaccccagcagtcccagcaccaccccctcaccaacaacacagtctccagctccatctgccattaaggacagtccctcagccacccctgctggcaaaagccccttgccacggcctcctgaggagaagaccctgcagcctgctagtcaaaacacaaaagctccccaaccccagagggtgacactcaacacgctacagttctggggcaagacacccccccggagaataaacttaacgccgttaaaggcagacactgcgccaagtcccctgcccaccggtggaaccaccaccccctccacagaagagacggagccagtgatgcctggaaagccccagggggagcctcccgaactgaagaggccccgacttcaggaccaggaaggaggcgcccaaaccctgggctctgatgaggcctccaagtctgcttgaggcctgct

SEQ ID NO: 3172 - DNA, 1752 bp, Cricetulus griseus
gagctagagaagcgcatgaggaatgggaccgctacccacgaattggtgacatccttcagaagttggcaccctttctcaagatgtatggcgagtatgtgaaaaacttcgaccgggctgtagagctggttaacacatggacagagcgttctacccagtttaaagtcatcatccatgaagtgcagaaggaggaagcctgtggcaacctgaccttgcagcaccacatgctggagcccgtgcagcgtatcccccgctatgagcttcttctcaaggactatctgttaaagctgcctcatggctccccggacagcaaagatgcccagaagtctttggagctgatagccacagcagcagagcattctaatgctgccatccgaaaaatggaacgaatgcacaagctgctgaaggtctatgagctgctagggggtgaggaggacattgtcagtcccaccaaagagctcataaaagaaggccatatccttaagttgtcagcaaagaatgggaccactcaagatcgatacctcatattattcaatgaccgcctcctttactgcgtgcccaggctgcggctccttggccagaagtttagcgtgcgggcacgcattgatgtagatggcatggagctaaaggagagctccaacctcaacatgcctcgaaccttcctggtgtcaggaaagcagcgctctctggaactccaggccaggactgaagaagagaagaaagactgggtccaggccatcaactccaccctcctgaagcatgaacagaccctggagaccttcaaactgttgaactcaacaaacagagatgatgaagatactccccctaactctccaaacgtggatcttgggaagagggcacctacgcctatccgggaaaaggaagtcaccatgtgcatgcgctgccaggagcccttcaattccatcaccaaacgcaggcaccactgcaaggcctgtgggcatgtggtttgtgggaaatgctctgagttccgggcccgcctcatctatgacaacaaccgttccaaccgtgtatgcactgattgctatgtggccttgcatggagcacctgggagcagtccagcctgtagccagcatacaccccaacgcaggaggtccatcctagagaaacaggcctcagtggctgctgagaacagcgtcatctgcagcttcctgcactacatggagaagggtgggaaaggatggcacaaggcatggtttgtggttcctgagaatgaacccttggtgctgtacatctatggagcccctcaggatgtgaaagcccagcgcagcctgcccctcatcggctttgaggtggggcctcctgaggcaggggagcggcctgacaggaggcatgtcttcaagatcacccagagccacctaagctggtacttcagcccagagacagaagaactccagcggcgctggatggctgtgcttggcagggcgggccgtggggacacgttctgcccagggcccacactgtctgaggacagggagatggaggagacaccagtggcagccgcaggagccactgccgaacctcctgaagcctcccagacccgagacaagacctagagggtttggggggaactggaaactcctgccccacactccatctgcccatgttcaattgggggccctagcccactcccaatgcagtcaatacttgaattcccaccacgggcactttcaatcccgaatgctgggtcttgggttttttaattcatcttttcacaaaatgtgggctttttaaaaa

SEQ ID NO: 3173 - DNA, 1752 bp, Cricetulus griseus
  modified_base (235)..(235): a, c, t, g, unknown or other
aaaattggcaagaaaagaaaaaggaaagacaatgaaaaaagtgctcaacgaactaagaaaactattggtgatgggactagagacccgtgtcagccacgttcgtgggtctctcctaccacagggattgtcatcagtgatttgacaatggagatgaataggttccggctgattggtcccctttcccactgtatcctgacctcggcactgagggctgctcctctgcacacaggggaanaggatgcagaggagacaccccatcactggtggactgacacttccaagagctctgatgggtagttttccttcattcaaaagacaagaagcagtgtttcagttgttgggaggctgggattgactagttagggatccgagagtcaatttgcctccacagcggtccagagcttttgccacatctggaaagataccaagatgatgagcaagtcagacagctgctccaggagggtgtgcccttggagtgtacgcatagctttatctggaaccaggaaatactgtagcagtgtcacagagaataaaatacccggagtcaggatttaaaccggatgagaagtgaattgctggtgccagggtcacagcttgttttagggcctcgtgaatccaagatacctatccttttgatccagcagccaggaaaagtgaactggcaaagatcgcctgggctggggaagtggctgggacgtcctgcttcccaagggttggggcatggctttttggatcccattcatcttccgaggtgctcaatgcctggtgcccaggacgacccaagacgactcgaagtgcctagtgtccccggagagacctgtcagccatctaacgaggcaggcatatctgaaaaccaacccacgaagccagaagtcacaggctgtgaggcacacacagggactgaagtagtcctggggcagggtgccagtgagaaccacgctgctgccaccggtagccagctctgtgttcttaggaataggaaattactgaggcagctttctgcttggtgtgggccgggttctgaggccaggcgggctccctgcagaggccagcaagaagaattgaccagaaaggcctgcttgtccattctggacgaattccccagagccctggtgtgggtcagcctgtccctgctcaggaagggcagcccggagcctcaaaccatgatctgtgtcccatccgaggaggacctgctccagctcagtcaggatcagggttatcatggaccccgggaatctaaacacagcgacccatttaagagcctgatactgaaacagaaagaaaagaagaaaatggagaagcggaggaaccgagagctcacagcccccgagggcctggcagcaggggctcctacagctggacaaaaagctctgaccaaggggctgtggtcagggcccctcccaggactgacctcacactgctcccgactcctcctgggctttgtcacgcagggggacttctctatgtctgttggctgtggagaagccctagggtttgttagtgtgaccggcttgctggaaatgctgtccagccagtcggcagccacgagaggactggtgctgctgcgacctcctgcctctctgcagtatcggtttgcaagacttgccatcgaggtgtgaattcggggtcacagcatggttggacatagatgatagctattttttgccaagtcccatatagtgtgctggttgtctttgccgtctgttttaagactacagtgtgaaactgcttagaaacaagaattaaaattat

SEQ ID NO: 3174 - DNA, 1751 bp, Cricetulus griseus
atctgatgacagctcctgactccaagtgactgacatacacctgttgtttcttgggtaacataccaggggctgcgatggacctggttctcaatgttgccgatcactacttctttactccatatgtgtatccagccacgtggccagaggacaacatcgtccgacaaactattagtctcctgattgtcacgaacctgggtgcttatatcctctacttcttctgtgcaaccctgagctattattttgtctatgatcattcattaatgaagcatcctcagtttttaaagaatcaagtctctcgagagatcatgttcacggttaagtctttgccctggataagtatccctaccatttcattgttcctgctggagttgagaggctacagtaagctctatgatgacataggagactttccaagtggctggattcatctcatcgttagtgtagtatcgttcctgtttttcacagacatgctgatctactggattcacagaggcctgcaccatagactgttctacaagcgcatacataagccgcatcatatttggaagatccccactccatttgcaagtcatgcttttcaccctgtggatggcttcctccagagtctcccttaccatatatacccctttgtctttccactacacaaggttgtctacttaggtttatatgtcttggttaatgtctggaccatttctattcacgacggtgattttcgtgtcccccagatgttaaggccatatattaatgggtcagctcatcacacagaccaccacatgttttttgactataactatggacagtatttcacattgtgggatagaattggaggctcttttaaaaatccttcttcctttgaagggaaaggcccactcagttatgtgaggaagatggcagaaggagaattcaacagcctagcagaaaatggctgtaaaaatgaaaaattgtgcaatggagagtttacaaagactaagtagattattgcccaattattaaatattttaaataaggaaataatctacacacagccaagatacatagcaactaagtggtgtcatttgaatgtcagcattgtgtgtcatgctgaagagtagtcctgacgataaactgagggaaaatgctgggagcaccaagattgtaatctcatggctaatgtgtcagacattggtccagggacaacttgtatacttgcaaccagcagatctgcagcctgtacactttaaataagatagaagataagctatggaagaagctggtctgtgtccttttgccttaatccactcatattcattaaggggaaaaaaatccattgtgcttaacaatactgagactagccaagaaatactaatatgaagatggctcctttctgggagtggctggctctgcaatagtggtggaggacttgcaggactttgttcaactaggaacatcagcctgaacaatctaatacatgagtggctatgtatatgatttacataatggctggttaataaaactatattatcttcttatacataggcgccttactctctggggcattatcaggttttaataatgaataaataaatgataatttttaaatgtcagctcttcatattcaatccagaatatgagattgtttaaagattcttgatgcgtgtcattttttttttttttttctttttttggttttctaagacagggtttctttgtgtagccctagctgtcctggaactttgtagatcaggttggcttcaaactcagagatctgcctg

SEQ ID NO: 3175 - DNA, 1751 bp, Cricetulus griseus
tgtcctggtgggcctggagatctggaacagggacaagttctacatcagccgctcaatgttacactggagaacttattgaactggagggaacagaacttgctaggccggcacccacatgacaacgtgcaacttatcacgggggtcgatttcattgggaccactgttggactggctaaggtgtctgccctgtgttcccggcactcaggagctgtgaaccaggaccacactagaagccccattggtgtagcatccaccatggcccatgagctgggccacaacctgggcatgagccatgatgagaatatccaaggatgctactgtcctgtcccacgtgagaatggcggctgcatcatgacccaaagcttgggctctgcgttccccaagaaattcagcagatgtagccaggtcgacctagaggcattcgtggtgaagccccatacagactgcctgaccaatttcccagatgtcaaccggttcgtgggtggccctgtgtgtggaaacaaatttgtagagcgtggagagcagtgtgactgcggtacacctcaggactgcacgaacccctgctgcaatgccaccacctgccagctggtcaagggggcagaatgtgcctatggtgcctgctgtcataggtgcaaggtgaagcaagctggtgagctgtgtcgccccagaaaggacggatgtgacctggaggagttctgtgatggccagaagccaacatgtcctgaagatgctttccaacagaatggcacaccctgcccagggggctactgctttgatgggagctgccccacactggcgcagcagtgccagaggctgtgggggccaggtgctcgggttgcatcagactcttgctttacctttagcatccctcggggctgcagtggcaagatgtatcctggcaggatgaaccgatgtgggatactgtactgtgagggaggccagaagccccttgaacgttcctcctgcactttctcctcctactacggagtctgccaagctctcaacacagacagcaacaatggtgcctatgagatggtactccagggtaccaagtgcgaggaggggaaggtttgcatgaatggatactgccaggacctccgtgtgtatagatctgagaactgctctgctaagtgcaacaaccatggggtatgcaatcacaaggataagtgccagtgccatgcaggctgggccccaccccactgtgcacagcggctagcaaatgtaccagataagcgagcaggcaggtgtcatcatctaccgaaaggccccaaggcgcatccagaggaggagtgtggcacccaagcctaccacaggactctccaaccccttattctacatgggggacaacagcctgacagataagaacagacttccaggccctccagaagtggtttctaccaacaagcccccaagacccacagtgacaccaaagaggccaccccctgcacctacagctgctacatccagcccaccactccctgttccagtttatacccagcaggtaccaaatctgcttagacctgttccacccaacaagcccctccaaaaactgaaccccaagcaggtcaagccaaattttgcacccccgacaccaccggttaagcctgggtctggagggaccgtgcctggagtgactcagagagctggtggtccaacggatgctctgaaggttcctttccagaagaggtgaccagctagggcacccaggggccatcgtaggcttgtggaagtttggagttaccagtgctcct

SEQ ID NO: 3176 - DNA, 1751 bp, Cricetulus griseus
ctctgaaggagactctcagggggccagacctggacttccctatgggctgagtgacgacgagtctgggggcggccgggcgctaagtgctgagagtgaagttgaggagccagccaggggtccaggggaggccagggggtgagaggccaggcccagcctgtcagctgtgtggggggccggcaggtgaggggccgtgttgtggggcaggagggccgggtggggggcccccgctgcccccacggctactgtactcatgccgcctctgcgccttcgtgtcccactactcgagccacctcaagcggcacatgcagacacacagcggggagaagccgttccgctgtggccgctgcccctacgcctcagcccagctcgtcaacctgacgcgacatacccgcacccatactggcgagaagccctaccgctgtccccactgcccctttgcctgcagcagcctgggcaacctgaggcggcatcagcgcacacacacagggcctcccactcctccctgcccgacctgtggcttccgatgctgtgctccacgaccaacccggcctcccagtcccacagagcaggaggggacaatgccccggcgatcagaagatgctctgctcctatgtgccaccaggtggtgccagtttcctgccagactgtgggcagctgcgggatgaaggggagggtttgtgtggatctggatcagaaccactgccagagctacttttcccttggacctgccggggttgtggacaagaactggaggagggtgagggcagtcggttgggaactgccatgtgtgggcgctgcatgcgaggagaggctggagggggtgccagcgggggaccccagggccccagtgacaaaggctttgcctgtagtctctgcccttttgccactcactatcccaaccacctggctcggcacatgaagactcacagtggtgagaaaccctttcgttgtgcccgctgtccgtacgcctctgctcatctggacaacctgaaacggcaccagcgcgtccacacaggagagaagccctacaagtgcccgctctgtccgtatgcctgtggcaacctggccaacctcaagcgtcacggtcgcatccactcgggtgacaaaccttttcggtgtagcctttgcaactacagctgcaatcagagtatgaacctcaaacgtcatatgctgcgacatacgggcgagaagcccttccgctgtgccacctgcgcctacaccacaggccactgggacaactacaagcgccatcagaaggtgcatggccatggtggggcaggaggacctggtctctctgctcctgagggctgggccccacctcacagcccaccctctgttttgaacactcggggtccagcagccctgggtgctactggtagcagggctctccatacagactcaccttgaactaggttcttttacctgggtccttaggaattagccctgcctctcctgcattttatacaaatggactagaaaccacttcccctttctcccccgctggccaggggctccacactaacctaggcactatatggaccagcctaaatcccatgggcaggggggcatatggactgggggggcctggtcttggctcatgtacttaatgagctcagtgattaggcccttggattcaccaccactgctcccaggggccatggatgaactggaaaggaaaaaactaacagaaaaaaaaaaaaaaaaaaaaaaaaaaaaaaaaaaaaaaaaaaaaaaaaaaaaaaaaaaaaaaa

SEQ ID NO: 3177 - DNA, 1750 bp, Cricetulus griseus
tggtgcttcggaaactggacttggtgaaagaggccattgatgtgtttgtggaggctactcatgttttgcctttgcactggggagcttggttggagctgtgtaacctgatcacagacaaagagatgctcaagttcctgtctttgcctgacacctggatgaaagaattcttcctggctcatatatacacagaattgcagctgatagaggaggccctgcagaagtaccaacatctcattgatgtgggcttttccaagagctcatacattgtttcccagattgcagttgcctatcacaatatcagagatatcgacaaagccctttctatttttaatgagctgagaaaacaagacccttacaggattgaaaatatggacacattctccaatcttctttatgtcaggagcatgaagtctgaattgagttatctggcgcataacctctgtgaaattgataaataccgagtagaaacgtgctgtgtaattggaaattattatagcttacgctcccagcatgagaaagcagccttatatttccagagagccctaaagttgaatcctaggtatcttggggcctggacattgatggggcatgagtacatggaaatgaaaaacacatctgctgctatccaagcttaccgacatgccattgaggtcaataaaagagactacagagcttggtatggacttgggcagacttatgaaatccttaagatgccattttattgcctttattattatagacgggcccaccagcttcgtcccaatgattcacgtatgctggttgccttaggagaatgttatgagaaactcaatcaactagtggaagccaaaaagtgttattggagagcatatgctgtgggagatgtggagaaaatggctctcgtgaagctggcaaagcttcatgaacagttgactgagtcagagcaggctgcccagtgttacatcaaatacatccaagatatctattcctgtggggaagtagtggagcacttagaggagagcacagccttccgctatctggcccagtactattttaagtgcaagctgtgggatgaagcttcaacttgtgcccagaagtgttgtgcattcaatgatacccgggaagaaggtaaggccttgctccgtcagatcctacagttgcggaaccaaggggagacgcccagcggtgacacgcctggtacctttttcctccctgcctcactgtctgccaacaacactccaacacgcagagtttctccactcaacctgtcttcagtcacaccgtagttgacaactctcaagtcagcacattgctagaccagtattaagccttacctccagtaaagaacagccacatctgttctcccaaggacctatatgctgaagcttaagagacaagctgagcagctgaccaatctcagagcatcaagcatgcattttcatctccacaactttagaattttttgccaaaaggagatctgagcaaaggagagtgccgtgagcgcaagatccgtgtataagggccactgtctgtcgaactttggcaggtgggtgttcggggaagtaagtttcgaaggaatggtttctttcctgggggttgatgatttggttgctggttttcctggtttgttcccagccgctttttagaagaagaagcctggttttggagctttagcacagtgtgatactgctcagcaatgcaggctgcctttttccgaaggtccagtttcactagcatcatgttattttgtagctcagccagggtctggttc

SEQ ID NO: 3178 - DNA, 1750 bp, Cricetulus griseus
tggtcacctcgccctcacctcagggaacagggatcaggtcagagtggactgggggagcagcctgcctcccaggatgtgaaaagccacctcaaggagccaacagacttggacgagggggaagttttcaggactctaagcctggcccctgaggatcaggagttcagagacagtcagcagccccagctcaaccccctgctcagagcagcccctccttcctctgtgggaaactcaagcaggctctgaagccttgtccgtcagaggacaaagtatctgaggactgcaaagggcctcagaggcccttcgaggctagaggtgccccattgcagggcgagagtaacgagtgggaagtagtggttcaaggttgaggacgacggggagagcccgagactgtgctgaccaggcggaagtcaaaagtaatgggaaagccctgtgctgcagagccagccctgggtgcggggtccctggcagcggagcccacggagggaaggaaaggtgctgcagtgccggttgaatgtcccacatgtcataaaaagttcctcagcaaatactacctaaaagtccacaacaggaaacacaccggggagaaaccctttgagtgtcccaaatgtgggaagtgttactttcgcaaggagaacctcttggagcatgaagcccggaattgcatgaaccgctcagaacaggtcttcacatgctccgtgtgccgggagaccttccgcaggaggatggagctgcgggtgcacatggtgtctcacacgggggaaatgccctacaagtgctcctcctgctcccagcagttcatgcagaagaaggacttgcagagtcacatgatcaagctgcacggagcccccaagccccatgcatgccccacgtgtgccaagtgcttcctgtccaggacagaactgcagctgcacgaggcttttaagcaccgtggagaaaagctgtttgtgtgtgaagagtgtgggcaccgggcctcaagccgcaacggtctgcagatgcacatcaaggccaagcacaggaatgaaagaccttatgtctgcgagttctgcagccatgcttttacccagaaggcaaatctcaacatgcaccttcgcacacacacaggcgagaagcctttccagtgccacctctgtggcaagaccttccgcacccaagccagtctggacaagcacaaccgcacccacacgggggagaggcctttcaggtgtgagttctgcgagcagcgcttcactgagaagggcccgcttctgaggcatgtggccagtcgccaccaggagggcaggcctcacttctgccagatttgtggcaagaccttcaaagccgtggaacagctacgtgtgcacgtcagacgacacaagggtgtgaggaagtttgaatgcaccgaatgtggctacaagttcactcggcaggctcacctgcggaggcacatggagatccacgatagagtggaaaactacaacccacggcagcgcaagctccggaacctggtcattgaggatgagaagatggtggtggtggcactccagccgcctgcagacctggagatgggctctgcagaggtcatcgtagagtccctgacccagggcggcctggcctcccagctccctagccagagactctgtgcggaggagagctttgccagccccagcgtcctggagccttcactcatcatcacagctgctgttcctgaggactgtgactcatacgaccccctgcccaagttagtcccatccaccaataaacaggtgtactt

SEQ ID NO: 3179 - DNA, 1750 bp, Cricetulus griseus
tggcagcgcccggtccctgccacgcagacttccgtctggctgggagagcaggtgccggtggcgggtcgtgtcggaggtgaggtccgtgacattcggcgtggagcttcagcacaggcaccatgtcggaaggaaacgcagcgggcgagcccagcaaccctggagggccgcgaccccttctctctgggggtcgggggctgatcggccggcggcctgcacccccgcttactccgggccgccttccctccattcgctcccgggacctcacccttggcggagtcaagaagaaaaccttcaccccaaacatcatcagtcggaagatcaaagaagaaccaaaggaagaagtaaccatgaagaaggaaaagcgtgagcgggatagagaccgccagcgtgagggtcatggacggggacgtggccgcccagaagtgatccagtcccattctatcttcgagcagggccctgcagaaatgatgaaaaaaaaagggaactgggataagacagtggatatgtcggacatgggaccttctcatatcatcaacatcaaaaaagagaagagagaaacagatgaagaaaccaagcagatcctgcgtatgctggagaaggatgatttcatcgatgacccagggctaaagaatgacacacggaacatgccggtacagctgccactggctcactcagggtggctttttaaggaggagagtgaagagccagatgttaagcctttttcggctggccctaaggaagaagacatggaagtggacgtgccttctgtaaaagtgaaagaggagccgcgggatgaggaagaggaggccaaggtgaaggcccctcccaaagcagccaggaagactcctggtctcccaaaggatgtgtctgttgcagagctgctcagggagttgagcctttcgaaggatgaagaactgctgttccttcagctgcctgataccctccctgggcagccacccactcaggacatcaagcctatcaagacagaggtgcagggcgaggatggacagatggtagttataaagcaggaaaaagaccgggaagcccgtttggcagagaacgcttgtaccttggctgacctgacagagggtcaagtgggcaagctgctcatccgaaaatcggggaaggtacagctcctcctgggcaaggtgaccctggatgtgaccatgggaacaacctgctctttcctgcaggaactggtgtctgtgggccttggagacagcaggacaggggagatgacagtcctgggacatgtgaagcacaaacttgtatgttctcctgattttgaatccctcttggatcacaaacaccggtgaaataaacagatggaggaggacggtgactgcccacgacgaccttcccacagcatgagtatggaagatacatcctcagtgctggctgggaacttgaccctgttaatttatttttatttatgtcttaatccccattactaactgcatcctcccaaggtaggatgggacaggcttcttgttggggaaccatgggctacatggataggaaggggcagtgttcaagcagataggaaagaataagggtagagtttgagacttaagactcagtcccagttcactggttctgtgtttttaaacaaactactctaaactttctgagcctcatattcctcatccaacaaacacgagaataatacctacctcacagggttggtgtgaggatcaaatggaatattgtagctgggaattccttgcacaagaccagcatccattatata

SEQ ID NO: 3180 - DNA, 1749 bp, Cricetulus griseus
cagaaatggcagtgagcgagaggagggggctcggcggcgggagcccagcgcaatgcagatggggatgcttgtcgctgctggtgctgatgctgggcggctgctcaggccgcatccaccgtctggcgctcacaggggagaagcgagctgacatccaactgaacagcttcggattctacaccaatggttccctggaagtggagctgagcctacttcgcctgggccaccaagagacagaagagaagcagcggaaggtgggattcagcttgagtcgagttcgatcgggcagtatccattcctactcgagccggaactcccaggaatgccctctggagaggaatagcagcaacttcctggtccttttcctcattgatatcaaggacctgcaggttcaagtccgaaagtatggggagcagaggaagttgttcatctcccctggcctcctccctgatcgcccctgcccagtcacctcctcccgaagcccagaccctgaaggcacccccaagcccactcgggaccccagcgggaaagaagaggaaatggtgttggggctgggccacctcaacaactcatacaacttcagttttcacgtggtgatcggctccagggctgaggaaggccagtacagcctgaacttccacaactgttacaactcggatcccggcaaggagaggccatttgacctcactgtgatgatccgagagaagaatccagaaggcttcctgtcagcggcagaaatccccctcttcaagctctacctgaccatgtctgcctgctttctggctgcaggcatcttctgggtgtccgtgctctgcaagaatacatacagtgtctttaagatccactggctcatggccgccctggcattcaccaagagcatctccctgcttttccacagcatcaactactacttcatcaacagccaaggccaccccatcgaaggcctcgccgtcatgcactatatcacacacttgttgaaaggcgcccttctcttcatcactattgccttgatcggctcaggctgggccttcgtgaagtatatgctgtcagacaaggagaagaagatttttggaattgtgatccccctgcaggtcctgtctaatgtggcatacattgtcattgaatcccgtgaggagggtgccagtgactatggactctggaaggagatcttgttcctggtggatcttatctgctgtggtgccatcctcttcccagttgtgtggtccatccggcatctgcaggacgcatctggcactgatgggaaggtggcagtgaacctggccaagctgaagctgttccgacattactacatcatggtcatctgctacatctacttcactcgcatcatcgccatcctgctgcgtgtggcagtgcccttccagtggcagtggctgtaccagctcttggtggagagttccacactggccttctttgtgctcaccggctacaagttccagccagctggggacaacccttacctgcagctgcctcaggaggatgaggaagatgtgcagatggagcaagtgatgacggactctgggttccgggaaggcctgtccaaagtcaacaagacagccagtggccgggaactgttgtgacttcccagtgtccagccagccacccctcagaccttctgcactcgcacacctacacttgtcccaaagtgtgcagagagtcctagggaccccgtgccaacaaggcaccgaggatgtgggtccccaaggagcctttcagaaaaagatgcccttctcc

SEQ ID NO: 3181 - DNA, 1749 bp, Cricetulus griseus
gaccaactggaacttacaagcagcaattggcgcttactatgactttgaaagcccaaatatcagtgtgccctctatgtccttcgttgaagacgtcaccataggagaaggggaatctatacctcctgatactcagtttataaaaacatggcggatccagaattctggggcagaggcctggcctccaggggtttgtcttaagtatgtcgggggagaccagtttggacatgtgaacatggtgatggtgagatcgctagagccccaagagattgcagatgtcagcgtccagatgtgcagccccagcagagcagggatgtatcagggacagtggcggatgtgcactgctacaggactctactatggagatgtcatctgggtgattctcagtgtggaggtgggtggacttttaggagtaacgcaacagctgtcatcctttgaaacggaattcaacacacagccacatcgcaaggtagaaggaaacttgttcgactcgatcagcaaaaatacatgggctcctgctcctgaccaaaccgagcaagatcaggatagactgtcacagaactctgtaaatctgtcccccagcagtcacgcaaacaacttatcagtagtgacttacagtaaggggctccacgggccttaccccttcggccagtcttaaacgggtgtcagcaagaaggaaaattaacaaaagacagaaggcctgactttggggggagagggcaaggggttcctctggattgcagaccacatggcacggacccctcctcagacccccacccacccccaatcacggaagaagaggaagaaagactggttttgagtgaactcagtatgcacgtgtgaatgcagaactgcagggatggtgtggaggctaccgagaagaagtccacgcagccaccttgcgttttggtgatgacgtcggtctaatgagttgttaggtcacgtcggggaaaggggaagaaacagctgcagtgcaagcatttgctccctgggcaggtgcagtgcccactagtatcccatggactccaagcaggttgaaatatggatgtctccatgggaatcttaaaccaggctagaacagctgtctgccaaagatacaagatatatgcaagtccctcctcttacccctctttccctaagtcagtggcttgagagccggggatatggatttggtgtgactgaaggtcccctgcctgcctccagcccccttgtgctccagggttgtgagcagagcagggagaccagggtatgagtggctgtaagaggcttctctggtgcccttacttcctctgcacacttggacccttgagccagaggcagcccctaacaggtgcccaagccacaagttaagggggcttttgtctgaaggtcttcttagggccagactctgaggacactgccaccctagagcacatgcatgcccagccatcgtccctgtttcctggccttggagcagcgtgccttcagctgcccttggaatcatgagagacttcaatcctgcctcactggcttccccatctgtcccctactaggtacgctcaggtaccctggcttccttcccagaaacaagtcctgtctgtgcgtccttgaaaaggtagctcattcagaaggtgctgcctctccccacctggacagtggtgggtgtctggtggagccttgtggtgcctaggaagagatgaagatgaggtttttcctttaccatgtaaatgaatatttgtatgattaaattaacacacacacacaacaaaaaaa

SEQ ID NO: 3182 - DNA, 1749 bp, Cricetulus griseus
tggtcttttcaggccaacggtctccaagtagcagggaaaaggagtgagcctgcatgccaatcctaagctcttccggatcaaatgtcgttcgtcctgtccagaatggcagcctgtggaggcacctgcaagaacaaagtgactgtctccaagcctgtgtgggacttcctgagcaaggagaccccagcccggctggcccggcttcgggaggagcaccgagtgtccatcctcatagatggggagacttctgacatctacgtgctccagctctccccacagggtcctcccccacgcccctcccaactgggctctacctggcccgcaaggctctcaaggggttactgaaagaggctgagaaggagctgaagaaagctcagaggcagggggagctcatgggctgcctggctctggggggtggtggggagcaccctgagctgcaccgcccaggtccgcctcctcttcgagcagccccactcctgcctccaggggccaagacgggctcccccctcctcctccccccctgccccctccacttcctcctcgtctgagggaggaggctgaagaacaggaaagcacctgccccatctgcctgggggagatccagaatgccaagacattggagaagtgccggcactcattctgcgagggctgcatcacacgggccctgcaggtgaaaaaagcctgccccatgtgtggccgattctatgggcagcttgtgggcaaccagccccagaacggacggatgctggtctccaaggatgccaccctcctgctacccagctatgagaagtacggcaccattgtcatccagtatgtcttcccgcccggtgtccagggggctgaacacccgaacccaggagttcggtatcctggtaccacacgggtggcctacctcccggactgccccgagggcaacaaggtgctgaccctgttccggaaggcttttgaccaacgtctcaccttcaccatcggcacgtccatgactacagggagacccaatgtcatcacgtggaacgacattcaccacaagaccagctgcacagggggaccccagctgtttgggtatccggaccccacctacctgactagggtgcaagaggaactgagagccaagggtatcacagatgactgaaggacaccatcccctttgccaaggcccctgctgtcctcttctactgggatccaacagaagcctctgttctctctttctctgcccccacaccacccacgaggggatttgtctgactggggtgggagttcagtggggaaggggacagtcccttcccctgcccccctttggccaagtgctccagcccctgcccctccagtgtctgtggcttttcctggtatgtactgtgctccagtcactgagctgggaaaggatctgggtagggacgatggaggtctcttcaactccagcccctgaatacggtactggttcaccttggactgatatgagctgcctcccgctcccccagccagctgtgtgttaagataacagtagtcctaccttaacggatcctttctctcctgtgtctgtctgtcagtctttctctcgctcttctctgcccctataaggagcctcctcaccccctgttctggaattgctgccagactgtagcttttaaattaataaaaaataaaataaagtaaatagacaactctaaaaaaaaaaaaaaaaaaaaaaaaaaaaaaaaaaaaaaaaaaaaaaaaaaaaaaaaaaaaaaaaaaaaaaaaaaaaaaaaaaaaaaa

SEQ ID NO: 3183 - DNA, 1749 bp, Cricetulus griseus
aagaaggagcgagaagatccttgcctgacctcttacagtatgttcggatgcccctgctgaccccaggtacattacagatgtgatagatgctgagcctttcatccgctgtagtttacagtgcagagatctagttgatgaagcaaagaaatttcacctgaggcctgaacttcgaagtcaaatgcaaggacctaggacaagagcccgtctaggagccaatgaagtgcttctggtggttgggggcttcggaagccagcagtctcctattgatgtggtggagaaatatgaccccaaaacacaggagtggagctttttgccaagtatcactcggaaaagacgatatgtggcttcagtttccttacatgatcggatctatgtaattggtgggtatgatggccgttcccgcctcagttcagtggaatgtctagattacacagcagatgaagatggagtctggtattctgtggcccctatgaatgtgcgacgaggccttgctggagctaccacactgggagatatgatttacgtctctggaggctttgatggcagcaggcgtcatacaagtatggagcggtatgacccaaacattgatcagtggagcatgctgggagatatgcagacagctcgagagggtgcaggactagtagtggccagcggaatatctactgtctaggaggatatgatggcttgaagcttacaacattcgcactgattcctggacaactgtcacgagtatgaccactccacgatgctacgtaggggccacagtgcttcgggggagactctatgcaattgcaggatatgatgggaattctctgctgagtagcattgaatgctatgaccctatcatcgacagctgggaagtagtggcctccatgggaacccagcgttgtgatgctggtgtatgtgttctccgagaaaagtaactgttatttgagcaccagctggagctaatgactactctaaggcagagtttgtgggagaatcaaggatcctttccagaatgtctatttctcactgtgtgcacagggtgattacaggcaccagtgctgtgatgattgtacttatttgatacacacgctccttcatactggtaatgttgctcagagggtggcaacaggtactcatgagaagaggatgcacatttggatgtgagaaaccagatcatctttcttactatttctaacttaccatgttcttgggagagaacgtatgtatccctgaagtgtaaactggaaggctggagaaaacatattatttgaccccaggtctttctaatgcggaatgttgtaccatcttggcactggagactgggagattaacagtgggggaaaaattagaataagagatggtgtaaatgtgcagagttcaacctacctgtggtaaacagaagtacctgtgactttacaatcgtcttggtccctgccgggctcatgtagccatggcagtgttcatctttgagtgggtgaagaccaactttctggtgaatcaagttctactacattactacacttccacactatttatttggggatggggtgggggtggctgcagcctagtagttcaggtacctgattactgccctgttgttttaagggcacactttgctaagaagtgcttaatactgctgtgtatggtacattcagctctcttcctgctacattttctgtgcctgtctttagcgtgtattctattcatcctggaacaaaataatcaaggacaactgaaaatcttttgttggttcccatacct

SEQ ID NO: 3184 - DNA, 1749 bp, Cricetulus griseus
aagaagaataacaagactgttatagaatcagtagcccgggcgctgcatccgagcctgtggtgggcacccctgacgacaaactagacgccgactacatcaaaagatacttgggtgacctgacccccctgcaggagagctgtctcatcagactgcgccagtggctccaggaaacacacaagggcaaaatcccaaaggatgagcatattctccggtttctgcgcgcccgagactttaatattgacaaagctagagagatcatgtgccagtctctaacttggcggaaacagcaccaggtggattacatcctggacacctggactccaccccaggtcctgcaggattattacgctggaggctggcatcaccatgacaaagatgggcggcccctgtatgtgctcaggctgggacagatggacaccaaaggcttggtgcgagctcttggagaggaagccctgctacgatacgttctttccataaacgaagaaggcctaagacgatgcgaagaaaataccaaagtctttggccgaccaatcagctcgtggacctgcctggtggacctggaaggactgaacatgcgccatctgtggagacctggggtcaaggccttgctgcgtatcatcgaggtggtggaggccaactacccggagacgctgggccgcctcctcatcctccgagcccccagggtcttccctgtcctctggacactggttagtccatttattgatgacaacaccagaagaaagttccttatttatgcaggaaatgactaccagggtcctggaggcctgctggattatatcgataaagagataattccagatttcctgagcggggagtgcatgtgtgatgtgccagagggtggcctggtccccaaatctctgtacagaactgcagaggagctggagaatgaagatctgaagctctggacggagaccatctaccagtccgccagcgtgttcaagggaggatcacctgggattttgacgtgtgcaaagggacatcgtttttaacatttatcactctaagaggtctccccagcctcccaaaaaggactcgctgggcgcccacagcatcgcgtctccaggtgggaacaacgtgcagctcatagagaaagtgtggcagctgggccgtgactacagcacggtggagtcgccgctgatctgcagagagggggagagtgtgcagggctcccatgtgaccaggtggccgggcttctacatcctgcagtggaagttccactaggcatgccagcatgcgctgccaccaacctaccccgagtggacgacgtgctggcgtccctgcaggtctcctcccacaagtgcaaagtgatgtactacacggaagtgatcggctctgaggatttcagaggctccatgaccagcctggagtcgagccacagcgggttctcacagctgagcgctgccaccacctcctccagccaatcacactccagctccatgatttccagatggcgattttgctgacagcctccaagaaaacgcttcactcaacagtccacatgtgcccagagatgtttgtagaactgtttgagtcgcagccatgtctcaggctgaagatctgtcccccttaagtccattcagaagtggcactgttcagccctcagcgctgagcgcatctttaaaagctcaaagcacgtgggtgtacagtcacaggccttcagcttccccacgccacagggcactggttgccttgtgaggggtgactgggtgtgacgtgagtgtgtggctc

SEQ ID NO: 3185 - DNA, 1749 bp, Cricetulus griseus
acggctgagtggcagcccgagcccggtgctcccgcctcggttctcggcctgctcctgcagaagctgcgagacgacggctgccaggcctactacctccaaggtgggtttctaacaagttccagacggaatactcagagcattgtgagactaatgtggacagctcgtcctctccgagtggctcaccacccacctccgtgctgggcctggggggcctgcgcatcagctctgactgctctgatggcgagtcagaccgagagctgcccagcagtgccactgagtcggatggcagccctgtgccgtccagccagccagccttcccagtccagatcctgccctacctctacctcggctgtgccaaggactctaccaacctggatgtacttggcaagtatggcatcaaatatatcctcaatgtcacacccaacctgcccaatgcctttgagcatggtggcgagttcacctacaagcagatccccatctctgaccattggagcccagaacctctctcagttcttcccggaggccatcagcttcatcgatgaagcccgatccaagaagtgcggtgtcttggtgcactgccttgcaggcatcagccgttcagtgacagttactgtagcctacctgatgcaaaagatgaacctgtccctcaacgacgcctacgacttcgttaagaggaaaaagtctaacatctcacccaatttcaacttcatggggcagctgctggactttgagcggacgctggggctcagcagcccgtgcgacaaccacgcacccagtgaacagctctacttctccactcccaccaaccacaacctgttccccatcaacaccctcgagtccacgtgaggcctgacacactaatgggcgcagcaccagggtccccctgccttccacagggcccgatgggggggccctagcctgctgctcccctggcctgaagaatgcacagatgttacctgtgtccagaggaccgggctgagcagtcactgagctcccacgttgtcctgggcagggtgtggtagcacttgctgttgtggcttcagctttccagacatgtgttgctgaagtgagcattggtctcaactttcagactggtggcttggggggccagtggggccttgtgtctgccccaggacatccattctgctgatagcccagccattgtgactgtttttaaagacatatccacagacctgagtttactacttctggcaggtaatccaagcctccctggagcacagagtgttcaagctcttcttgtattttcttttcttttctttctttcttttttttgagagagagagagagtgttttgttttcaatggaaaagacaaaccacatgttcttgaccaaatgcattttgcacatgtgtgaagcctctcttttcccagcaggccattcttgggagggggtgggttgctgctttccaggcatcaggacccctggttataccatctctaacctgtggcccagccgagttcagtgctgcatttgcactgatgagttgctgtgagttgtgcttggtgggcactggtggtctttgcattgtctgtcctcctagccaccttctgagaatcctgcaggcctctctgtctcatttttaaaagaaagcccagaaagatggatcagagtgtaaatgagtgtataccagagagggtggccagttttgctttatgatcttatgaaggaaaatttgtgaccctacacacacacacatacacacacacacacacacatacacatatatat

SEQ ID NO: 3186 - DNA, 1749 bp, Cricetulus griseus
  modified_base (14)..(14): a, c, t, g, unknown or other
tcggccaacggccnctgcgagcgcccgcccgagcgccccggagccggcgggcggcggccctctccagggaccctccagcggggcccagggggacaaaagtggctctcaatctagcacatgtgcattggagcaatttaaggatttaatatgaagtacagaagcagatagtgccaaatagcaagcccgttgtttcatatttggtgagtggggcagcatttccttctcccactgcttctgagatggcagaaatcagccgaattcagtatgaaatggaatacaccgaaggtattagtcagcgaatgagggtcccggaaaaattaaaagtagcaccgccaagtgctgacctggaccaagggttccaagaaggagttccaaatgccagtgtaataatgcaagtcccagagaggatcgttgtcacaggaaataatgaagacatttcattttcaagaccagcagatcttgaccttatccagtccactccctttaaacctctggcactgaaaacaccaccacgggtgctcaccctgagtgagagaccactagattttctggatttagaaagaccacctccaactcctcaaaacgaagaaatccgagcagttggcaggctaaaaagagagcgttccatgagtgaaaatgctgttcgccagaatggacagttggtcaggaatgattccgttgtgacaccatcgccaccacaggctcctcgggtctgtcctccccatatgctacctgaagatggagctagtctttcctctgcccgtggcattttgtcgcttatccagtcttccacccgtagggcttaccagcagatcttggatgtgctggatgaaaatcgcagacctgtgttgcgtggtgggtcagctgccgccacttctaatcctcatcatgacaacgtcaggtatggcatttcaaacatagatgcagccattgaaggagcatcagatgacatgactgtggtggatgcagcttcgctaagacgtcagattatcaaattaaatagacgtctgcaacttctagaagaggagaataaagaacgtgctaaaagagaaatggtcatgtattcaattactgtagcattctggctgcttaatagttggctgtggtttcgacgctagaggtaacctcagcattcacatatattgtctcaacacctggaaatataaaggatttgcaaactccattgtttctgtctttgcatggcctgttctgttactgatctgcattcagccagttttgcagtggcacctacactctcgccttttgcatgttttgtaaataggctgtaggtttgtttgtttgtttttaaagaaaatcattttttgggcctcatcagtctgtacagctaattctctaaaaagaaatgacagtcgtaaagaatgagtttagaaaactatctgtaaaagaaaaacagtttgtttctcagatgattaacccatttctttgacagatgctttttgtatctgcatcacaatattaatgcttttgaagtcatagtctggtgcatcacttaagaaaaaaaaaccaacccaactaacttcttcattacatacctacacagagaacgggtaaaaactcctaatgattcagcaggttatctgtgtgcaatatgttgttctgattttcttcttaaagttttctaataaaatatgtttttaccaagtccatgtgtgaatgaatttaaaaacaaccaaaaaaaaaaaaaaaaaaaaaaaaaaaaaaaaaaaaaaaaaaaaaaaaaaaaaaaaa

SEQ ID NO: 3187 - DNA, 1749 bp, Cricetulus griseus
  modified_base (1517)..(1517): a, c, t, g, unknown or other
cagcaactctccctcctccagctcaagtccaagctttcagagacacgcagacctctgtctcccttacctgggagcctgtggagggtggcacggaactcctgggttattacatctactcccgggaagcagggacatcagagtggcaaacggtgaacaacaagcccatcctggacaccaagttcacggttccagggctgaggactgggaaggagtatgaattttgcatcaggtcggtcagcgaggctggcgttggcgaaagctcggctgcgacacagcccatcagagtcaagcaggctctggctacccctcggccccatatgactttgcactcctatcctgtggaaagaaaggtgaccaacaccaagaaggagactcgctttcagtggctcttccagaagaaagaagctcccagcgggcagtatgacccgcagacgggagccgggctgttctgcattgactcgttctccaaagaagaccaggggatctacagagcagtggtttctgatgacagaggggaagacgacacaatcctggacctcacaggtgaaggcctggatgctgtcctcactgagctgggcaggattggtgctctctccgcaaccccactgaagatccaggggactgaagaggggatccggctcttcagcaaggttaaatactaccatgtggagtacatgaagaccatttggttccacaaagacaaacgtctggagagtggtgaccgggtgagggcaggtaccaccctagatgagatctggctgcacatcctggaccccaaggactctgataagggcaaatacaccctggagataactgccgggaaggaagtccggcagctctcagcagatctgtctgggcaagcttttgatgatgccttggcagagcaccagagactgaaggccttggccatcattgagaagaatcgagccaaggtggtgaggggcctgccagacgtggccaccatcatggaagacaagaccctgtgcctgacctgcgtcatctcaggagacccatcccctgaaatctcttggctaaagaatgaccagcctgtctccttccttgaccgataccacatggaggtgaagggtactgaggtcaccatcaccattgataaggtcaccagtgaagacagcgggcgctatggaatctttgtcaagaacaagtatggctcagaaacgggccaggtcaccatcagcgtgttcaaacacggggaggagcccaaggagctgaagaagatgtaattggaatgtccagggtcagcctgagatccaccctacatggaccatcagtccagccagtgggtcataacttcgcacatgccatggggtgggacagggcaaggcaagggacaaggacataacagagctgaatccaatacaccaaagaagcgaagcaaaggttttgctggggtcctcacaggactccagggtgtggggtaagcactggccttagaaatcagaagctggggtacaggactcagtttccacagaagctcttcacctgggtgacctgggatnccgggcatgccgttgatgaccttcagggcttcttccaacatggagcctgtacagccaataacagacactttggctggccttactcagtggatctcagtacacagctggacatttccctaccttccaattccccgcccctgaaagcaagatgtgaggaggggttataaaattatagctgtttgttgccaaatctagataattttggaaattataaaggaggaaaattaaaaaa

SEQ ID NO: 3188 - DNA, 1749 bp, Cricetulus griseus
gatggcggctaccgcggagtgcgatgtggtaatggcggggaccgagcctgaactgctagaggacgaagaagcaaagagggaggcagaatccttcaaggaacaagggaacgcatactatgctaagaaggactacaatgaagcttataactattacacaaaggccatagatatgtgtcctaaaaatgctagctattatggtaatcgagcagccacactgatgatgcttggacggttccgggaagctcttggagatgcgcagcagtcagtgagactggatgacagttttgtccggggtcacctccgtgaaggcaaatgccacctctcacttgggaatgcaatggcagcatgccggagtttccaaagagccctagaactggatcataaaaatgcccaggcacagcaggagttcaagaacgccaatgccgtcatggagtatgagaaaatagcagaatcggattttgaaaaacgagatttccggaaggttgttttctgcatggaccgtgccctagaatttgcccctgcctgccatcgcttcaaaatcctcaaagcagaatgtttagcaatgctgggtcgatacccagaggcacagtttgtggccagtgacattttacgaatggattccaccaatgctgatgctctgtatgtccggggtctttgcctttattatgaagattgtattgagaaggcagttcagttttttgtgcaggctctcaggatggctcctgaccacgagaaggcttgtgttgcttgtagaaatgccaaagcccttaaagccaagaaagaagatgggaataaagcatttaaggaaggaaattacaagctagcatatgaactgtacacagaagccttggggatagaccctaacaacataaaaacaaatgctaaactctactgtaatcggggtacggttaattccaagcttagaaaactagatgatgccatagatgactgtacaaatgcggtgaagctagatgacacctacataaaagcctacttgagaagagctcagtgttacatggacacagagcagtatgaagaagctgtgcgggactatgaaaaagtgtatcagacggagaaaacaaaagaacacaaacagctcctcaagaacgcacagctggaactgaagaagagcaagaggaaagattactacaagatcctgggagttgacaagaatgcctctgaggatgagatcaagaaagcttaccggaagcgggccttgatgcaccatccagatcggcacagtggggccagtgccgaggtccagaaggaggaggagaagaagttcaaggaagtgggcgaggcctttaccatcctctctgaccccaagaaaaagactcgttatgacagtgggcaggacctggatgaggagggcatgaatatgggcgattttgatgcaaacaacatcttcaaggcattcttcggtggccctgggggcttcagctttgaagcatctggcccagggaatttcttctttcagtttggctaatgaagggcaactactcagaacccagaaaatgcagacttgctcagtttaaccatgagtgtggacggttcacctcctccatcatgtccccgtgtacttagagcagtttcgttttctcagttgggtgccctgtgtctgtatgagtggggtgaaggaaagggagccagcgctgaggactggggaggggagggaagccgaggggtagacgagggagaggcagcttgtgaatttttgttgtattgtttaactttattaaaaaagaaaaa

SEQ ID NO: 3189 - DNA, 1749 bp, Cricetulus griseus
gtgattgcaaagaccaacattattacctttctggggacaaaatcaatgatgtcatctgccttcctgtggaaaggttatctcgaatgatgccggtgttggcctgccaggacagggtgctccgagttttacagggatctgatgtgatgtatgaaattgaagtacctggtccacccaccgtcttagctctacataatggagatggcggtgactccggagaaggtcttctgtttggcacatcggatggaaagctcgggcttattcaaatcaccatatccaagccaatacacaaatgggaaattcgaaatgacaaaaagcgggaggtatcttgtgtattgacagctttgatatcatagatttgcttgttgggagagatgatggaatggtggaagtgtatagtttttgagaatgcaaatgaacctgtgctgcgatttgatcagatgttgtctgaaagcattacatcgctccagggcggttgtgtaggaaaagatggttatgatgaaattgtgctggccacgtattcaggctggattacagggctgacaacagagcccactcataaggaaagtggaccaggagaagagctaaaacttaatcaggaaatgcagaataaaatttcctctttacggagtgagttagaacatctgcagtttaaggtactgcaggaaagagaaaactaccaacagtcttcacaatcgagcaaagcaaagtcaacagttccttcatttagtataaatgacaagtttacattgaataaagatgatgccagctacagccttgtcttagaggtgcagactgcaatagataatgtcttaatacagagtgatgtcccaatagatctacttgatgtggataaaaattctgctgttgtgagctttagcagctgtgacacagagtcaaatgacaactttcttcttgccacttatcggtgccaagcaaataccaccaggctggagctcaagattcgctcaattgaaggccagtatggcacacttcaggcatatgtgactccgaggattcagccaaaaacctgtcaggttcgccagtaccacatcaaacctctatccctccatcagagaacgcactttattgaccacgacagacccatgaatacattgactctaataggccagttcagctttgctgaagttcactcctgggtggtgttctgcctgcctgaagttcctgaaaagcctccagcaggagaatctgcaacattttactttcagaatacctttctggatacacaactcgaatgcgtatacagaaaaggagaaggagtttttaaatctgacaatatttctacaatatctatcctaaaagatgtgctttctaaagaagctaccaaaaggaaaattaatctcaacatatcatacgagataaacgaagtgtcagtcaagcatactttaaagctaatccacccaaagctggagtatcagttgcttctggctaagaaagtgcagttaattgatgccttgaaggaattgcaggttcacgagggaaatacgaactttctgattccagaataccgctgtattctagaagaggcagatcatctacaagaagagtacaagaagcagcctgcacatcttgaaaggctctatggtatgattactgatcttttcatagataaattcaagttcaaaggcactaatgtaaaaaccaaagtacccattctactggagattcttgacagctatgaccagaacacattgatttctttctttgatgcagcatgaaagataaacaagg

SEQ ID NO: 3190 - DNA, 1749 bp, Cricetulus griseus
atcctgggtaggacagtgtccacaggcatcatgctgtattttgagctctataaatacacctggatgtgcaggatccctgtgttgccctctgtacacagatgagcagctgtgtacccagcatcgaaaattctttttctcagattttttgcatctgcttgatgtcaagggcttccggcaaagtttggatgctgttgatggtcaggtcatgatcagtcagtttcagtggactgctcctctgatttctcagcctccaactgggcctcttattgatccaaatgaaagtcaggtgtgagacttggatactaaaacaaaaatattaattcccatttgaatttggtaggaagccctggaccttgtctacaagaagttaagaaccacctgtttcccagaggtccagcattttctcatctgtctggcttggccatgttcctgtcactgctccactgcctatctggtgcagctcatgattccaggtgctgcttgccacgaaaataacaaaaaaaaaaaaaaaacagtgtcatgcctaagtaattcacttacataggactgccttgctagtctatgcccctgctttgtcctgagttctttcttcccattgctgcttggatattgcctcttaggacttagagcagaaccatgaatgctggtgtacacaaggatggagttcgttctgctccactctcaaaccctactgtggacatgtctcccttttcccgggctctgtctgaactggatggactgatttgggttactgactcaagagttaaggaaaccatagtgattgggccttgagtctgactatctgttgccttctcagagttttccagctcagggttggggcctagttacagtttgatggatccttagtccacgaattatgagaacttagaaaagaatgaaaccttggccagaaactaaagatacttttaaagatcccttgctacttgagttgtttcagcaccttcagtgaattcaaggaaaagcatccttaaaaactcctgtttatttaaagtccttggaaacaggatgaaagggagaaaggccacggcccacccactcttgccttcagatagggagctcaaatgtgacttaaatattttctttctgctcttttctggctagaacaagaagtgggtggtagtttggggtaatggtttgctcatattacttcgcttttttgtttttgttttctgtctccatcatttccattagggccatagctccccaccctgtgtagatataaggtgggctcagttcagctattactgccctgagggaacaactacttttttggaagctaatgttctccaccatatagttgacagtggttaggaactgtcccttccttccctgcttttcctgtaacagcagaattctatccttcctcttcaattaattgtattgaccactctgtaatcctattatgtatctgagtgtgtgtatagggtaaaggggttctttaaaatttctgtggtttgtgtttttttcttccataaattagttaccaccaccgcatgcccaggggccactacctggcattatcgcatgctgggatcattgggggagggtagtgtgaaatttaccactgtcctttgttttggagattcttattttttaataagtaatccatcctatacaaatagctaattaactgtgtgttccccctgcccatatggctgctggtgtaaataaattgcattttcccattgctaaacagtaataaataaaaattaaaaaaataaaaaaaaa

SEQ ID NO: 3191 - DNA, 1748 bp, Cricetulus griseus
tcaggctgtgctgcagagcctgtcccacaccattgagtgtctgcagcagggaggccatgaggaagggctggtgcatgagaaggcccggcagttgcgacggtctatggagaacattgaactgggactgagtgaggcccaggtgatgctggctctggccagccacctgagcacagtagagtcggaaaagcagaagctgcgggctcaagtgcggcggctatgccaggagaaccagtggcttcgagatgagctagcgggcactcagcagcgcttacagcgtagtgaacaggctgtggcccagctggaggaagaaaagaaacacctggagttcctgaggcagctgcgccagtatgatgaggatgggcacagcatggaggagaaggaaggagatgtcaccaaggattccctggatgacctcttccccagcgaggaggaggaagattccagcaatggcttgtcccgtggccagggtgctgcagcagcccagcaggccggatatgagatcccagcaaggttgcggaccctgcacaacctggtcatccagtatgcagctcagggtcgctatgaggtggctgtgccactctgtaagcaggcactagaggacctggagcgcacctctggccgaggtcaccctgatgtggctactatgctcaacatcctggctttggtgtatagggaccagaataagtacaaggaggctgcccatctgctgaatgatgccctcagaatccgggagagcaccctgggccgggaccacccagccgtggctgccacactcaacaatctggctgtgctgtatggcaaaaggggtaaatacaaggaggcggagccattgtgccagcgggcactggagatccgagaaaaggtcttgggcaccaaccacccagatgtggcgaagcagctgaacaacttggccctcctgtgtcaaaaccagggcaagtatgaggcagtggaacgttattaccagcgggcgctagccatctatgagagccagctagggccagacaaccctaatgtagctcggaccaagaacaacctggcttcctgttacctaaagcagggcaagtactcagaggctgagactctgtacaaagaaatcctgacccgtgcccatgtacaggagtttgggtctgtggatgaggaccacaagcctatctggatgcatgctgaggagcgggagaaaatgagcagaagccgtcaccgtgagagcggcacaccctatgcagagtacggagggtggtacaaggcctgcaaagtgagcagccccacagtgaacactactctgagaaacctaggggctctgtaccggcgccagggaaagcgggaggcagctgagaccttggaggaatgtgccctgcgttccaggaagcaggggactgaccccatcagtcagaccaaggtggcagagctgcttggggaaggtgatggcagaaggatttcccaggagggccctggggacagtgtaaaattcgagggaggtgacgatgcatcagtggctgtggagtggtcaggggatggcagtggcacgctgcagaggagtggctctctgggcaagatccgggatgtgcttcgtagaagcagtgagctcctggtaaggaagctccaagggactgagcctcggccttccagcagcaacatgaagcgggccgcctcgctgaactacctgaatcaacccagtgcagccccactccaggcttcctggggcctcagtgccagcacgatggacctctcttcaagcagctgacattcaa

SEQ ID NO: 3192 - DNA, 1748 bp, Cricetulus griseus
cctttgatactgtcagtgacagcctcacacccaaggacacagttccccaggaggttccccagctggggagaataacgaggctggctctgatgaacacagcagtgaggctcttgtgtctgtggttgtcactgacactgaagataaggaccctgggcccgtgttatatgtctcggataccacagactggctcactgactctggactattcagagggaactgactccagaccaggaggagaagagcaagaggaagaaagagaagggggtggcgtcagtgtcctctggggctggagagacaggcagtagccagatctccaaccctgcttctagtcccccctggggagttgggccttgctcccaactccagtaagagtgagcccagctgccagggtggccttccaaaggaccgatccagcaaagggaaggatagccatagcaccaaagagaaattccctcaaagaggcatcaccgggggcctcaaagcctgccagtgtccggcgcagccaaggggcagcacccaagcctgtgagaaccttgaactcctctgagaatgaacacatgcgcaaggtggtgcccatctccaaatccagcagaggagcagggccctggaagcgtcctgagctgacatccagggcttcccctcgggagacacccagcagcacagacacactgctatcacgaaggagctctgtgcgggggacctccgacacttcacccaagaggccccacgtgactggacctggggcagaggagcccaggctgccccgctcgagtggcagcataagtgggcggccagggaaggaagccccggtgcagcctagggcttcattcaggaagcccagtgccaagcccctcagaaacattcccagacagaaacccgaagaaaacaaggtcagcagccccaactcggaagaccccgagagctccaaggaagagcccaaggttcctcaaactcccggtgtctctcgagcccttcccccggtcccaagctttgctagaaatacagtggcctcctcatctcggtgcatgcgaacggatgctccaccggcatccagagcccctggcatcaccaggacagtctcgcagcggcagcttagggtcaaaggtggccctgaggattctgcctccaaggacagtggcactttgaagagggccagcagcgccagggcctccaagaagtgtcctgaatcttctgggggtacgagtgccaatgcagagactccactgaagggtagagggacttcagaaagagcctctctcaaactgaaggattcagggcgggccaccatagggaggatcctccatcccctacagaagtgatggggcctgtctacatctctgtcttctgggattttacctgccaggactggctgctggggtgaggacaacaagaggccaatctttaatgtcttgttacacattaagcaactcacaggtgccacctgctaaaggtcacgtcactaaaggtacatggagatctatagcctgctgtgcagacttctgctttgaaattaaggctgagagtgttctattctgcacagtgctctatctatgcgcaagccccagcacctcctgtcattcatactcaggaccctaactctaactcctaccccaagacaaagatccggtgatagtctggacatgtaagatgacaattcttatgtaacaagtaaaaaacaatttctggccagtttttatatatcaaagacttatttttaatattataaaaataaaaatgatgttttagtt

SEQ ID NO: 3193 - DNA, 1748 bp, Cricetulus griseus
cgcctggaagatgggcaggagaatgggaagacagaggtggcagctgagtcccccgagcaacaacaggtgcccaagagggcccgtggccagacaaaagccggcctcatgtgaaaccatcgcagtatgacaaggagaggctctgcccttccctcctccaggagtcagccacgtgtgcatttggtgaccggtgccgattccttcatgatgtggggcgctacctggagacaaaaccagcagacctgggcccccgctgtgtgctgtttgacaccttcggccgatgtccttacagcgtgacctgtcgcgtttgcgggggcacgacctggggcctgagggtcagaacctggtgcaggaagaggtggtagctcgctgtgtgcaactccctctagtgcgcaatggcctgaacagggccctgcagcagcagctgcgtaagcgccaagtgtgctttgaacgagctgagcaggccctgcgccgcctgacccagggccccatgcccgttgttgtccctgaggccactgtagccacggttaccccagaccagaacagctgccatgcccagttggacactgcgggaggggccagcaccccgagtggcagccctatttccacctgtggccccttgacggacgaggacattattcggctacggccctgtgagaagaagcggctggacatcagtggaaagctataccttgctccgctcaccacgtgcgggaacctaccctttcgccgcatctgcaagcgcttcggtgcggatgtgacgtgcggtgagatggccgtgtgcacgaacctgctgcagggacagatgtctgagtgggccttgctcaagcgccacccctgcgaggacatctttggggtgcaactagagggcgccttccctgacaccatgaccaaatgcgctgagctcctgaaccgcaccatcgacgtggactttgtggacattaatgtgggctgccccatcgaccttgtctacaagaagggtggcggctgcgcactcatgaatcgctcagccaagttccagcagattgtaaggggcgtgaatgaggtgctggatgtgccattgactgtgaagatgcgcacgggtgttcaggagcgtgtgagcctggcacaccgcctgctgcctgagctgcgggactggggtgtcgcactggtcacactccatggccgttcccgggaacagcgctacaccaggctggctgactggccctacatcgagcagtgcgccaaggtagccagccccatgcccctgttcggaaacggggacatcctttcgtttgaggatgccaactgtgccatgcagacaggtgtcgcaggggtcatgatcgcccgtggtgccttgctcaagccctggctgttcacagagatcaaggaacagagacactgggacatctcgtcctctgagcgcctggacatcctgagggatttcacacactacggcctggaacactggggctctgacacgcagggtgtggagcggacccggcgcttccttctcgagtggctctcctttctttgcaggtatgtgcccgtgggcctgcttgagcgactcccacagaggatcaatgaaagaccaccctactacctaggccgagaccacctggagacgctcatggccagccagcaggccgcagactggattcgcatcagtgagatgctgcttggaccagtcccacccggctttgccttcctgcccaagcacaaagccaatgcctacaagtagacaacggagacaattaaattttattcttcta

SEQ ID NO: 3194 - DNA, 1747 bp, Cricetulus griseus
cggtatggcgggcggggcccgcgaggtgctcacgctgcagttgggacatttctcgggtttcgtcggggcgcactggtggaaccagcaggatgctgcgctgggacggacgaccgagggcgaagagtcgccgggggaactgtgccccgacgtcttgttcagaaccggccgaacgctgcatggccaggaaacctatacgccgcgactcatcctcatggatctgaaaggcagtctgaattcactaaaggaagaaggtggcctctacaaggaccgacatccagacactacagtagcatggcaagggaagctcaccacacacagagaagaagcttacccaaagaaccctaacctccaggaccttctgagtgcagagggagtgctgagtactgatggtgtctggagggccaaactatcgaaaatggcaaagagaacatcatcagagtctggtcagacttcctcagagtgcacctccaccctcggagcatctgtgtgattcagaagtacaaccatgatggtgaaacgggtcggctcgaagcttttggccaaggggagagtgtccttaaggagcccaggtacctggaggagctggaggacagactgcatttctatgtggaagagtgtgactatttgcagggcttccagatcctgtgtgacctacatgatggcttctctggtgtaggtgctaaaactgcagaattactacaagatgagtattcaggccggggagtaataacatggggtttgctccctggtccctgcaatcttggggagccccagaaaaatatctatcgtctcctaaacacagcatttggtctggtgcacctgactgggtacagctctttggtctgtcccttatctctgggaggcaacctgggccttcgacccaagccacctgtcaacttccctaacctacattatgatgccactctgccattccactgtagcgccatcctggctacagccctggacacggtaactgctccctatcgcctgtgttcctccatggttcccatggctcatttggctgatctgctaagtttctctgggaaaaaggtggtgacagcagaagcaatcatccccttcccactggttccaggccagtcccttcctgataccctggtgcagcttgaaggagacactccatggaccccactgtctgcttgtggggattctgctggaagtcaatgctttgcccagtcagtggtgctgaggggtatagacagagcaagccataccagtaacctcaacccagggacacccttgccttctggtctccatacatgcgcctctggagaagaagtcttggcccagtacttacaacatcagcatcctagagtcttaagttcttcacatctgttgcggacgccctgcagagtggctcctccttacccacacctcttctcaagctgcagttacaagggaatggccctggactgtcccccaaagtgtgcagcagtgcaaagcatccccgtgtttggggccttgcgttcatcttcatccttgcaccagaccctgggagacttggctgaagagctcaacagacttgacctgcggcgctgggctagcttcatggatgctggagtggagcaggatgacatggaggagctgctgcaggacttatacaacctggcccagtgttaccaggagggtgtcagcctttcaaactgatgttccagggaagggtattggggagataatttataataaaaagctgccgtgtacaggagcccagtgtgtttggacctgctac

SEQ ID NO: 3195 - DNA, 1747 bp, Cricetulus griseus
ctaaatgaagacattgaaaaatacagtgtttttctttttatcttttatttacttgggaatgtaagatgttccagtttcacaccagcatggtagtattgagatagctatttgtgtctctgtacatgctgatgtttagaagtaatcttcagatgtgaaattttctttttgtttctgctttttgcacataaattggatatttcatctggagtggataagtacagtgacaaatacatggaatagtaaagaagaccttgctcttgaatccaaggaacttggctaattctggatatagccatatgaaaaacttcaaaaacaaatatgggtagctgacttcaaataactctatgtcaaatagtcataggttaagtatcttcaaagaacttggatatttcagaggataacaaaaataaaaaaaacaaactaggaaaagacaaaagagaacgcagacagttgaggggatttccatctttaaatcctgaatatgagagagaaccaaatcagaataaatctttagctgcaggtgtatgggaataccccccgaatcctaaatctagagctccaagaatgctggtcattaagaaaggtaatacaaaagacttacagctatctggattcccagtagcaggaaaccttcagacacagccagttaagaatggaactggtcccagtgtttataaaggcttaatccccaaacctgctgttccacctacaaaacctacacaatggaaaagccaaactaaagaaaacaaagttgggacttcttttcctcatgagtctacatatggtgttggcaactttaatacctttaagtcaacagccaagagtattagtccatcaacaaattcagtgaaggagtgtaatcgttcaaattcttcctcgcctgttgacaaacttaatcagcagcctcgtttaactaaactgacgagaatgcgcagtgataagaagagtgaatttttaaaagcattgaaaagggacagagtagaagaagaacatgaagatgaaagccatgctggctcagagaaggacgacgactcatttaatttgcataacagcaatagtactcaccaagaaagagatataaacagaaactttgatgaaaatgaaattccacaagagaacggcaatgcttcggtgatttctcaacagattattcgatcgtcaacctttccacaaactgatgttctttccagttcactagaggcagaacacagactattaaaggagatgggctggcaggaagacagtgaaaatgatgaaacatgtgctcccttaactgaggatgaaatgagagaattccaagttattagtgaacagttacagaagaatgggctgaggaaaaatggtattttgaaaaatggcctgatctgtgacttcaagtttggaccttggaaaaacagcactttcaaacccacaattgagaatgatgacacagagacaagtagcagtgacacatcagatgacgacgatgtgtgaaggatttcctaacagctttagaaattttagtgtgatacatctctcagtttgggtgaattgtaaaaatgaagaactataatttatgtagtgaactaccccattagaagatgattttattgggggacttcaatatagaagaaaaccaagaatgttgtgttgggctgtgttgaacattatttctttgtaatgaatgttgtagaatgaggactttggttgatccaacattgactttcttctatcactgcagcatttctctgactagcaatgtgacgat

SEQ ID NO: 3196 - DNA, 1747 bp, Cricetulus griseus
  modified_base (1733)..(1733): a, c, t, g, unknown or other
gagcttcattcagatgtaactgagtatgcgaagcagaagctggatgtcttcatcagaacaagtgacagttttgacaaatttgacttctgtgaaccttcctttgtaactggcaattgcttggagattgctccagattgttgtcagtatgatcgtgtgtattgtggagctggagtgcagaaagaacatgaagagtacatgaagaatcttctcaaagttggagggatccttgtcatgcccttggaagagaagttgaccaagataacacgcataggcccttctgcttgggaaacaaaaagattctggctgtttccttcgcccctctggtccaaccctgccgttcggagtcaggacagcccagacttgtccagctaccaccactggccgtgcgcagcctgcaggacctggcccgtcttgctatccgtggcagcatcaagagggcgcctcccattgcctgaccccctgaagtactatctgctgtattacagggaaaagtgagcggtgggagagtgggaccaggatacccagagcaaactgctggccaggtacacgtctcgtttccttgtattggttcctgactattctctaaaactttcatgcaatggtgtgatttatttaagcacaatctaacaagaaacttcatagaattattttcctcagtagtggggggtggggtggggtgcacatcttgttggctctactgtaatttgaactcattgggaactgcatgatgtctgctccttgtgcagacaaaacttatacatttgaggctggaactgaattgtattggatcctgttgaagcaagggggcacgggtctgtaaaggtatgacattctgtgatcatattagagtaccaattcattagatttttatcttttataattctggagaaaaattgttagttttgtaaattttcttaagaacagatgtatgtattttactagctccattgcattagagcagtttaactcagtgacttgtgaaatttattatctccaggccattggtgttgagaactatcgcaaccttttctggctgtcagagggcaggatttgaagttacattgctgattccaaaagctggctcttaaaaaaatttttttaacccaaagaaaagaatagtgtaaattgttaatattaaactcaaattagagtgttaatttaggattaagtactgaaattttatgatttattttcaggttagcctcacatgacttgcagggagaggtttggtctgtgatttctctagtttaaatggacattttacatcttttttttctctgtctttttaaagttagttgaatcactttaccacacagtatagtctgcatgtatagctggcaaaaacatacattgccctacattataaatataatgtacacttccattactttaaattgatgttaactctaattgttaggtagacttttatgttacctggaaaatttttggacataaaattaaataaataaaatttgtgaagtctgtatattaggtggcttgactgaatttttttcttgtgattgaacataggctgcattttttgaaaagccacatttgcctttatgctggatttttaaaaattacaatgcataagacatttttcctttatatgttaaacttttcttagcattttgtatttatatgttatgactttgtgattttaaaccataattcagttaaatatagttataacatgtgagaaatagattggtctttacattcaaaaaaaaaanaaaaaaaaaaaaaa

SEQ ID NO: 3197 - DNA, 1747 bp, Cricetulus griseus
  modified_base (119)..(119): a, c, t, g, unknown or other
gttgtgactgtgtactccatctttggacgaggaccgacttggtgtcagttgtttttgttctttatctcctgctatgggtagttttgttttctttcatcctgtctcactgggaaaaagtntaacacaggcattcttttcctaccctggggctatgacattagccaagtgactatttcttttgtctacatagtgactgcattggtgggagttgaggcctggtatgaacctttcctgtttaatttcttatatagagacctattcactgcaatgattattggttgtgcattatgtgtgactcttccgatgagtttattaaacttttttagaagttataaaagcaacaccctgaaacacaattctatttatgaagctatggtccccttcttctctccgtgtttgctcttcactctgtctacagtgtggatcctccggtctccttcagatattttagaaatacaccctagaatattctacttcatggttggaacagcttttgccaatatcacatgtcagctaattgtttgccaaatgagcagcacacggtgcccgactttgaactggttgctgcttcctctcttcctggttgtggcagcagtgaccataggtgcagcagcctcacacctcgagagtcttctcctctacgctcttacagcagccttcactctggctcacatccattacggagtacaagtggtgaagcagctgagcagccattttcagatttacccattttcattgaggaaaccaaactcagattgactaggaatggaagagaagaatgtcggcctgtaatcttcaggaagtactgtaaatagatgcttgtaaatatctcatccatcaccattgaactaaactggtctgcttgacagatatgggatcgatcacagtgtgtggctcgtggatggcaggaatgaacgtgatctcagcttgtggaactttggactttctaactaccaacttcctttcgctgtattgtggttatctcataaatctcacttttttatgaatgtggatgttttctttctttggactttgcctttagtttggtggtggtgaaatttacttgctgattttattttccactgaatgaggtttgtgcttaaatgaagagtgtgtcttaaacccctttttttatttttgggcaggttgcacttggataagataggcaccactatgttgatatgtaattaaattcataactgttaaaaaatagtaatagttcacaggttttagagcactagagagacttcgaagtaaaaatataaccattcttccttggcatttcaatgttatggttgacatacttttagttccaattttgaaaagaaaacgttgaacatagtttaggatattatagtaccattgccaatactgccatttgttctctcctgaggcactggggagggaggtgtatgtctggggctagcacaggctaacatctcagaccttcagaaagccccctaagtatatcactttccacatcttttcaccagggaacttgtgggccagaaagactggtttcaagagtgctggctgctatcttcagggttgaggtttctgggtctgctgggccctttttggctaagaggcagctttgggagcagtgtgcctatggactccatcagggagatacttgctttgccaaagcagagctctgcagcttgtttaactttactggaatgttctaagtcttgtggtttgatgtatagtagagtactccaaggcatttgaatgtgatttttgcatt

SEQ ID NO: 3198 - DNA, 1747 bp, Cricetulus griseus
atgacatcactcgccatgtcaacagctgccaccaaggtaccccatcctttccatgctctcagtgtgaggcccagtttagctcagaaacagcactgaagcagcatgctctgcgccgacacccagaacctacacacccatcccctggatgtcctgtagaggccactgagggccccttgcactgttcccaatgtggcctgctctgccccagtcctgccagcctacgaggacatatccgtaaacagcacccaaggctggagtgtggggcctgccaggagaccttccctagcaggccagcactggatgagcatcggagacagcaccatttcagccaccgttgccagctccgtaactttgctgcccgagagcgagtgggcctggtaaagcactacttggaacagcatgaagagacttcagcagcccccactttgcatgtcggtatcagttagtactggaccaccatgtaaagggacatggaggcacccggctctacaagtgtactgactgtgcctatagcaccaaaaatcggcagaagatcacctggcacagccgcattcacactggggaaaagccttaccgctgtcacctctgctcctatgcctgtgctgacccttctcgcctcaagtaccacatgcggatccataaagaggaacgaaagtacctgtgccctgagtgtggatacaagtgcaagtgggtcaaccaactcaaatatcacatgaccaagcacacaggactgaagccataccagtgtcccgagtgtgagtactgcaccaaccgagctgatgcacttcgtgtacaccgggagacacggcaccgagaggcccgggctttcatgtgtgagcagtgtggcaaggcattcaagacacgcttcctgcttcgcacccacctacgcaagcacagtgaggccaaaccctatgtttgcaatgtttgccaccgtgctttccgctgggctgctggcctgcgacatcatgcccttacccataccgaccgacaccccttcttctgccgcctctgcagctacaaagccaagcaaaagttccaggtcgtcaagcatgtgcgcagacaccaccctgaccaggccgaccccaaccagggtgtaggcaaagaccccaccactcccacagtgcacctacatgatgtgaagctggaagatcccagcccttctgctcctcctgcctccccccactggacctgaaggctgacgcccttaccccacctctggcttaggaattacatataatccaagatatgcacactgggactgtagctagcctgaggagcttagggcctgaaggaggactggctttgggatatcagtgtggctggaacacactccccacccttggactctggcctttgaaattaacagctatataaaagataggcttggactaaaacaatttcttcttgagtatcactatggttttaacctgtgactgaatctccagtgtctaccattgttggtcaggcatccttccccaaccttttcctgggagccttgatccttgattgatcctttcgttggctctggattctgagggacttgttggttggaggggataatgcttctgtagttttctctgcttcgagtccctccccgtgtttcaagtcagagatgataggagagattaacagaagatctgaggatgggactaagcctagggtaagaataaggagggaactccttcacaaagtgcacaacaggagagggcaggaaagtctagatgaaagacaagagtccaaggtttgt

SEQ ID NO: 3199 - DNA, 1747 bp, Cricetulus griseus
cagctgcagcagcccagcccaccttcgaaaccatgtccaccaggtccgtgtcctcgtcctcttaccgcaggatgttcggtggtcccggcacctcgagccggccgagctccaatcggagctatgtgaccacgtccacccgcacctacagcctgggcagcgcgctgcgccccagcaccagtcgcagcctctattcctcatcccccggtggcgcctatgtgacccgatcctctgcggtgcgcctgcggagcagcatgccgggcgtgcggctgctgcaggattcggtggacttctcgctggcggacgccattaacaccgagttcaagaacacccgcaccaacgaaaaggtagaactgcaggagctgaatgaccgcttcgccaactacatcgacaaggtgcgctttctggagcagcagaacaaaatcctgctagccgagctcgagcagctcaagggccagggcaagtcgcgcctgggcgacctctatgaggaggagatgcgggagctgcgccggcaggtggatcagctcaccaatgacaaggcacgcgtcgaggtggagcgtgacaatctggcagaggacatcatgcggctgcgagagaaattgcaggaggagatgctccagagagaggaagccgagagcaccctgcagtccttcagacaggatgttgacaatgcctctctggcacgtcttgaccttgaacgtaaagtggaatccttgcaagaagagattgcctttttgaagaaactgcatgatgaagagatccaggagctacaggcccagattcaggagcagcatgtccagattgatgtggatgtttctaagcctgacctcactgctgccctgcgcgatgtccgccagcagtatgaaagtgtggctgccaagaacctccaggaggcagaggaatggtacaagtccaagtttgctgacctctctgaggctgccaaccggaacaatgatgctctgcgccaggcaaagcaggagtcaaatgagtaccggagacaggtgcagtcacttacctgcgaagtggatgcacttaaaggaactaatgagtccctggaacgccagatgcgtgagatggaagagaattttgcccttgaagctgctaactaccaggacactattggccgcctgcaggatgagattcagaacatgaaggaagagatggctcgtcaccttcgtgaataccaagacctgctcaatgttaagatggctcttgacattgagattgccacctacaggaagctgctggaaggcgaggagagcaggatttctctgcctcttcccaacttttcttcactgaacctgagagagactaatctggagtcactccctctggttgacacccactcaaaaagaacactcctgattaagacggtggaaaccagagatggacaggtgatcaatgaaacctctcagcatcacgatgaccttgaataaaaattgcacacactccgtgcaacaacgcagtaccagcaagaagaaaaaaaaaattgtatcttaaggaaacagctttcaagtgcctttactgcagtttttcaggagcgcaagatagatttgggatagaaataagctctagtttctaacaactgacaccctaaaagatttagaaaaggtttacaacacaatctagtttacgaagaaatcttgtgctagaatactttttaaagtatttttgaataccattaaaactgctttttttccagtaaatacctgaccaacttgttactgcttcaataaatcttcagaaatac

SEQ ID NO: 3200 - DNA, 1747 bp, Cricetulus griseus
caacattgcaggtggctttctggtaactcagagaatgctggacatgtttaagcgacccacagatcccccacgaataacaattaatctgtatctgctccctcggtggtgctttgtgggttgggatagtctagctgccctctacagtggttataacattggagagatcatgtacttgggctcaggcttgtgctgtgttggtgccctgggcggcctttctactcagggaacagctcgactcggcaatgccttgggcatgattggagttgcaggaggcctggcagccacacttggaggcctgaaaccagatccacagctgttagctcagatgtccggagcaatggctatgggtggcaccattggcttggcaattgcgaagcgcatccagatttctgacttgcctcagctggtcgctgctttccacagtttagtgggtttggcagcagtgcttacttgcatggctgagtacattgtagaatacccacattttgcaatggatgcaacatcaaaggataatcccatttatgatcgaccccagctttaccactggcattacctgtctgggctccgtggctgcactctctactctcatgggtgtgactttgacagctgctattgggggtgctgacatgcctgttgtcatcactgtgctgaacagctactcaggctgggccctgtgtgccgagggcttccttctcaacaacaacctgctgaccattgtgggtgcgctcatcggctcctctggtgcaatcttgtcatacatcatgtgtgtggcaatgaatcgctccctggctaatgtgattcttggaggctatggtacaacttcaacagccggtggtaaaccaatggaaatctctggcacacatacagaaatcaaccttgacaatgcagttgagatgatccgggaagccaacagcattgttattactccaggttacggcctctgtgcagccaaagctcagtaccccattgccgatttggtgaagatgcttaccgagcaaggcaaaaagtcaggtttggaattcacccagttgcgggccgaatgcctggtcagcttaacgtgcttctggctgaggcaggagtgccctatgatattgtgctagaaatggatgagatcaaccatgatttcccagacacggatttggttcttgtcattggtgctaacgacactgtgaattcagccgctcaagaggaccccaactctattattgcaggcatgccagtccttgaggtctggaagtctaaacaggtcattgtcatgaagagatccctgggtgttggttatgccgccgtggacaatccaatcttctacaaacccaacacagccatgcttctaggggatgccaagaagacgtgtgatgctctgcaggccaaagttcgagagtcctatcagaagtgaatgttaaagatcaagctggtgtcttcagttacagaaacagagaaataaagtatgagtggatgagcaaaggctctcaaggccccaaagaagccccacaaaccaacagagagtgtcaagatctgcaacccctgatcttcaaaaaacattgcaaagtctcaacatctacctatttatagttttcattgctaaaaggcaaaaatattttgtagacagtgaaagagtagcctcattttgatgcaactctattggacttttaaattctctttcagtacctaaaaatgagttcagaagttgaatgtggagaattttaggatgtattttggtctgaaaaatattagacagtgtgaacat

SEQ ID NO: 3201 - DNA, 1747 bp, Cricetulus griseus
ttttgaaactgcagaagttcagacccctgcagctggaaactgtcaatgtcaccatggctagaaaggacatctttctggtcatgcccacaggaggtgggaagagcctgtgctaccagctgccggcactgtgctcagatggttttacacttgtgatttgcccatcatctctcttatggaagaaaatgggttcatgctgaaatggtgaataaaaactcccaattaaaagctggtttatgtgactccagagaaaattgcaaaaagcaagatgttcatgtccagactagagaaagcgtatgaagctggaagactgactcggatagccgtggatgaagtgcattgctgcagtcagtggggacatgatttctaggcctgattataaggcactcggcatcttgaagcgccagtttcccaacacctcgctgattgggctgactgcaacagcaactaaccatgttttgaaggatgcacagaaaatcctgtgtgtggaaaagtgtttgacttttacagcatctttcaaccgaccaaatctttattatgaggttcggcaaaagcccccaaatgctgaagactttattgaggacattgtaaagctcattaatggacgatacaaagggcgatcaggaatcatttactgtttttctcagaaagactctgaacaagttaccattagtttacaaaaactgggaattcgtgcaggcacttaccatgccaatatggaaccagaagataagaccagggttcatacacagtggtcagccaatgaacttcaggtggttgtagctacagttgcatttggcatgggaattgataagccagatgtgaggtttgtcatccatcattcaatgagcaaatccatggagaattactatcaagagagtgggcgtgcaggtcgcgatgactcgagagcagactgcattctgtactacggctttggagacatattcaggatcagctcgatggtggtcatggagaacgtagggcagcagaagttgtatgagatggtgtcgtactgccagaatataagcaagtgtcgtcgtgtgttgatcgcacaacattttgatgaagtgtggaatgcagacgcctgtaacaaaatgtgtgacaactgctgtaaagaccttttgttggagaagaagaatataacccagcactgcagagacctggtcaagattctgaagcaggcagaggaactgaatgaaaagctcactccactgaagctgatggatgcttggatggggaagggagcccccaagttgagagtggctggtgtcgtcgccccggtccttccccgagaagacctggagaaaatcattgcacatgctctcctgcagcagtatctcaaagaagactacagcttcacagcttacgctaccatctcgtatctgaaggttggatccagagctagtcttctgagcaacgaagcccatgctgtcactttgcaggtgacgaggtccacacagagcggcagcagggctgcatcatctgaggcttgccattcggaacacgcagatgcaaaaggggaagagaaaagctcaggaaacttccagaagtctacaaaaaggcttcagccatctggttctaagaacacaggagccaagaaaagaaaacttgatgatgcctgagtgttacctaatcttgcacaaaataactgtttacgtatgttcgtgtctggatcacttttatagttaattgtttaatttttgaaacaattttgtatcttacacatataaagctatattttcagagctta

SEQ ID NO: 3202 - DNA, 1747 bp, Cricetulus griseus
cgagcgcgtgagcggttgattgcgggccggccatggcgcttcacgtccccaaggccccgggctttgcccagatgctcaaggacggagcgaaacatttttcaggattagaagaggctgtgtatagaaatatacaagcttgcaaggagctttctcagactacccgtacagcatatggaccaaatggaatgaataaaatggtcatcaatcgcctggagaagttgtttgtgacaaatgacgcagcaactattttaagagagctggaagtacaacatcctgctgcaaaaatgatcgtgatggcctctcatatgcaagaacaagaggttggcgatggcacaaactttgttctggtgtttgctggagctcttttggagctcgctgaggaacttctgagaatcggcctgtcagtttcagaggtaatatcaggatatgaaatagcttgcaaaaaagctcatgagattcttcccgatttggtatgttgttctgcaaaaaaccttcgagatgttgatgaagtgtcatctctgattagaacctctgtaatgagtaagcagtatggtaatgaagcctttctggccaagctcattgctcaggcatgtgtatctatttttcctgattcgggaaatttcaatgttgataacatcagagtatgtaagattctgggctctggtatctattcatcttcagtattgcatggcatggtttttaagaaggaaaccgaaggtgatgtaacatctgtcaaagatgcaaaaatagcagtgtactcctgtccctttgatggcatgataacagagactaaggggacggtgctgataaagactgctgaagagctgatgaacttcagtaagggagaggagagtctcatggacgcacaagtgaaagctattgccagcacgggtgcaaatgtcatagtaaccgggggcaaagtggcagacatggctcttcattatgctaacaagtacaatatcatgttggttaggctgaactcaaagtgggatctcagaagactctgtaaaactgttggtgccacagctcttcctagattgactcctcctgtccttgaagaaatgggacattgtgatagtgtttacctctcagaagttggagacacacaggtggttgtttttaagcatgaaaaagaagatggtgccatttctactatagttcttcgaggttctacagataatctgatggatgatatagaaagggcggtcgatgatggagttaacactttcaaagttctcacaagggataagcgtcttgtccctggaggtggagcaacagaaattgaattggccaaacagatcacatcatatggagagacgtgtcctggacttgaacagtatgctattaagaagtttgctgaggcatttgaagctattccacgggcactggcagagaattctggtgtgaaggccaatgaagttatctctaaactttatgcagtgcaccaagaaggaaacaaaaatgtggggttggatattgaggctgaagttccggctgtaaaggacatgttagaagccagtatcttagatacatacttgggaaaatactgggctattaaattagccactaatgctgcagtcactgtacttagagtggatcagatcatcatggcaaaaccagctggtgggcccaaacctccaagtgggaagaaagactgggatgatgaccaaaatgactgaagaactttttgttgtaggtgaagagtttgtttgtagagcagaacttccctgatcttttcttattctta

SEQ ID NO: 3203 - DNA, 1746 bp, Cricetulus griseus
atccagaaaatgaagaaattaaagactctccttcaagaaacaagttgaatgcattgtctaacgacataagaaaactcctgcttgatcctgaattcactctcttgcagaggtgcctgcttgttttccaaggctctatggtgatgagtcagagctgcacttcttggacagtggcggaggaaggtgctccacaggacaagctgaacaacccactggatatctgctatgatgtgctctgtgaaaacgcctacttccagaaatttcaactagaaagagttaatctacaggaagtaaaaaggtcaacttatgatcatacaaggaaatgcacagaccagctactactcttgggtcagacagacagagccgtgcagctgctgttggaaacaagtgcagataaccagcactattattgtgactcgctgaaagcttgtttggtcaccactgtcacctcctcaggcccttctcagagcaccattaagctggtggcaaccaatatgatcgccaatggcaagttggcagagggcgttcagttactctgcctgatagacaaggctgcagatgcctgccgctacctgcagacatatggcgagtggaatcgggcagcatggcttgcaaaggttcggttaaattccgaagaatgtgcagatgttctgaagcggtgggttgatcacctttgttctccacaagtcaatcagaagtccaaggccctcctggtcctcctctctctgggttgctttgtcagtgtggcagagacgcttcacagcatgaggtacttcgatagagctgccttgtttgtggaagcctgtctcaagtatggtgcatttgaagtcagtgaggacacagagaagctcatcactgccatctatgcagactatgcccgaagcctgaagagccttggtttcaaacagggagcagtacattttgcttcaaaagctggagcggctggcaaagatttattgaatgagcttggatcccccaaggaagaactaacagaagggtgacatgttctgtgcaggaactaccatgttggaagcaaggtgtgagagggactgacctgaccatgctcacagtcgctgtcgtggtctggtcagactgatgtgaaggcctggcccttgttagttgtgttaccaccttcttaaggccgcaggttgcagcatggacacatttacactaggagccagttctgtgtctcatgtgagctcagatcagtggggacacacagtgggaaagtgtgtagtgtttatgcatttggaaagtgcttttaggatccctgtgactactcttcaatatttgtaacctaaaactcaagagactggattgtttttctttctcacttgttaatttaaagatgtttaagaaatccataacaagagattgtacatctgctggcttctcagatacatgccatgtgtgcctgtgttgataggcagttgtttagaacacaacagggcagaacatttgagtggattccctgctttaggcattgctgcattttgtaattgggcctcatagtcttcatgggacacgtctaagctttatgttagtgttagtgggcttggatggtctgaattttaactcctaggacacattccagtaacatcatttctgaaatctcttttgtacattttctgcctttgttttcttccactagatgtaattattataaattattgctcagaatttaaacaactgtgactataccaatgataaataaaggaaaatctcagccaagaaaaaaaaaaaaaaaaa

SEQ ID NO: 3204 - DNA, 1745 bp, Cricetulus griseus
gggccaaatttgaatccctcttcaggacgtatgacaaggacatcactttccagtattttaagagcttcaaacgtgtccgaataaacttcagcaaccccttatccgcagctgacgccaggctgcagctgcataagacggagttcctggggaaggaaatgaagctgtactttgctcagacgttacacataggaagctcacacctggctccgcccaatccagacaagcagttcctcatctctcctcccgcctctccaccagttggttggaagcaagtagaagacgctaccccagtcataaattacgatcttttatatgctatctccaagctggggccaggtgagaagtatgagctgcatgcagcaacagacaccactcccagtgtggtagtccacgtgtgtgaaagcgaccaagagaatgaagaggaggaggagatggagagaatgaagagacccaagccaaaaattatccagacgaggaggccagagtacacgcctatccacctcagctgagctggctcacagatggagacggcacattctaaaccccactcatggggagggatcttttactgtgcaggtggctggtcatagctttggaggtgacagccgtgaccactgtggcagaaattccagttcatgttgctcagaagagaatcaaggctttgtctccttgttctgatactgcacctcagtccatgtccgtggcacccaggaatgtcttgggccattcactgagttggtggtaatcacacaaggatatctggggacatctccagaaaactgataatggtagtgtcttgtactcactcttttctaggttctgtttttgccaaggacaggttgactggtggcccggggaaaagatttctgtttccaaccagcattcagggtccaggccccactggtaggcagaggcaccccacaaagccaccaagtgtccagtgcagaaaggttatgggacaaccccagtgccatgtggaaattgtacgtctcatttttcccctcgtgttctaacgttcacgcatgtatgactgggttccaagactaacctttgctcgtgtatgaatacactgttgttttccgccttgggaagcccacacgtcaccctgtccagcgcaccatgtcacctgtgctttcttgcacaagttgatcttgagttcctgtgtagaatgtagcttatacgatggcagacaccagttttgctgtcaggtgccagtgggtgggaagttgtaggttaggtgtttgggttcagacatcagtttctattgtttctttcatggagtggtttatatgtgaatttcagccaaaaacctctttgggaactgttgattgagacagtttttcaccccattgaaacatgaagataaacttgtaaataaagccaagagcatatcttaatgcctgtggtgtacctgggtgagaacagagggtagaaggagtctcgagctccctgtgacttgcgtgtggtagaaattactgtcatgtgtttaacgggatgactttggagcatgtggagtcatagctgtgtgttgctagagggacacagtgcctttctttcccctttcatcccagatggaccgtgaccatttgggactttctccttttgtagtcaccacgtgtgtgtctggtaaataggtattctgttttggtctcacagcaccattacaagtctgtcactctgaaataacctaatgccaattaacagtgcatgctttgggagttgggaaggcagcttcccctggggag

SEQ ID NO: 3205 - DNA, 1745 bp, Cricetulus griseus
acacgtggacttgttgcgtatagaaatgtgcgcaacagaaaaagaaactctctggttctctagatgaaggaaggtgtccaaaatgggcacattctgctcagtaatcaagtttgaaaatcttcaggaaattaaagagactgtgtcaccgggggtcccataatagccccttggtgttatagcgatatgttctacaatggccatgatcgactctgtgttgtggtattggcccttacatacaacaggaggcagtgtgaacttcatcatgttgataaattggactgtcatgattgtctacaattatttcaatgccatgtttactggccctggctttgtccctcggggatggaaaccggaaaatcctcaggatagcatgtatctccagtattgtaaagtctgccaagcatacaaggccgttcacaccattgcaggaagtgtaacagatgcataatgaagatggatcaccactgtccctggatcaacaactgctgtggtcaccagaaccatgcttcgttcacgctgttcctcctgctagtgcctctgggctgcattcatgctgcttttatttttgtgatgactatgtacacccagctttataatcggctctcctttgggtggaacaccgtcaagattgacatgagtgcagcccggagagatcctctcccaatcattccattcggattggctgcatttgctgcaaccttgtttgccttgggattagcactggggacaaccatagctgttgggatgttgtttttcatacagataaaaattattctcagaaacaaaacttccattgaatcatggattgaagagaaggctaaagatcgaattcaatattaccaactagatgaagtcttcgtttttccttatgatttgggaagtaaatggaagaattttaagcaggtatttacatggtcaggagtccctgaaggagatggactggagtggccaacaagaaaagactgccacccatatagcctaacaagagaacagttgaaacaaaaggcagacaagagagtcagaagtgttcgctataaagtcatagaagactatagtggtgcctgttgtcctctgaatagaggaattaaaaccttcttcacaagcccctgcacagaggagcctcggatacagctgcagaaaggggagctcattttagcaacaagagggttacgatactggttgtatggagacaaaattctcgatgattccttcgtagaaggtacttccagaataagagggtggttccctagaaactgtgtggaaaagtgtccctgtgatggcgaatcagatccaaccccagagggtgagaagaagaacagatagccactgttacaatgaaatcattaaatcttcattacttgaaaatcacacattacccaagaattatgcaacgagcctactctgcttaaggtctccttttcctcaaagatgctccagtgccatgatttaaggagtgtgattaccatgtgaaacagaagccattctgcatatgcctttgaatttctgtgtgcagcacacctgacctcacctgcagatctagttcccccttggccaggagtatctgcgtgtggttattctgtttcttcctcagttgacatttcttcataatctagagactataatacttgtcaggttcaatataaactcaaattttgttacttttaataatgcagattttgtcaaatccaatgaaggtcaatgggtgttatataaaaattaaagttttcactcaaaaaaaaaaaaaa

SEQ ID NO: 3206 - DNA, 1744 bp, Cricetulus griseus
  modified_base (288)..(288): a, c, t, g, unknown or other
  modified_base (308)..(308): a, c, t, g, unknown or other
  modified_base (444)..(444): a, c, t, g, unknown or other
tggtaatagcaaagatgatgaccctaaatgaagactggtgtgctgtctgccagaatggaggggatcttttatgctgtgaaaatgtccaaaggtctttcatcttacttgccatgttccgacacttctcagctttccaagtggggactggatatgcacattttgcagagatattgggaagccagaagttgaatacgattgtgataatatgcagcacagtaagaaggggaagactgcacagggattaagccccgtggaccaaaggaaatgtgaacgtctcctgctttaccnctattgccatgaattaagtnttgaattccaagaacctgttcctgtttcgataccaaactactataaaattataaagaaaccaatggattatcaacagtgaaaaagaagcttacaagaaaaaacattcccagcattaccaatcccggatgattttgngctgatgtccgtttgatcttcaagctccttactaattatctgctgaaggtgattaagatttttaaaggtgtattgcagtttgattgtacaccttacctggattaacttcttccagttaatgcttccttgataaagcaataatgctgctttgagtctgttgcctaatagcatgtcataatcctctcctggatggtgatttaatataggaaagtttgtatgcatatcacccaatctatcttttaaagaattaaaaaatttaaatgtatgctggaagtaatgacaatatatcgtggcattttattttaaaaaattggggaaaagttgcatatttttttaaaagtagctgtttgaagtaaaaaaaaaactgaaggtactttttaaggaaaaaaactttatatgccacagtttacatagacatttccaatgtcagcatttactcttgggtataacagtttctttacttggctaaatgcatgtttaacttgatcagaagtgcatctatcccatcttagttactttccgtttctttacatggtcctttatatatttttattgtatctagaaactaaattatcttcaaaagtaagttgggtatatttgttaaactacagaatgtatacaatcaaggttagcccttttctagcaagtgttatttagaaactgaaaatgaccattgtgtttcgttcaaattcctatgaaggcaacaaaatgatttttaagtgccacaatactccattcagctgtggcctaaaatttcattcttacgaatgtctgctcctgatctgagaaatgtaggcattttattgtgttttaaagcggtgaaacatggggtataagcctaataacacaaggtgtgcgcaattggaaagcctgttaatttttctatgtagacatatgcacacactaaagggttaaagtcacagccttactaattccttgcttccagtatttcaactggtctcctcctcgttactactactattatttttgcacatagttaactacccttcagaatgattcttaaaaagtgctgtttctgtggtattctctaaatgatcatatttaattttttaaacaaggtaacaatttctaattgttctgttcctgtgttttttgctgccgtgtaataaaagcaagctttttcttttcctggttatttaatacattagctgcctgtaaataattcctgttacaatgctctggaatgtgttgtagatgttgtattagattagtttgaagccttgtttaaaaaccacattgttttggttatttctattaaattagaaaattgcaaaaagtt

SEQ ID NO: 3207 - DNA, 1744 bp, Cricetulus griseus
ctgactggcagcttgagtgcaagtggaagtcacatggaccgaataggcaccatgagagacaacctgagtgagacagccagcaccatggccttagctggagctagcataacgggaagtctgtcaggaagcgccatggtgaactgtttcaacaggctggagattcaagcagatgttcagaaagaacggtgcagtctcagtggagagtccggcaccgtgagcttgggaacagtgagtgataatgccagcaccaaagccatggccggatccattctcaactcctgcatccctctggacagagaagggaacagcagtggaagtgcaagtggacatttggatgcccagctgctggagcagcagagcaccaactcaagcgagtttgaggccccgtccctcagtgacagtatgccgtctgtagccgattcccactccagtcacttttctgagtttagctgctcggacttagagagcatgagaacgtcgtgtagtcatggctccagtgattgtcacacccgctttgcgactgtgaacacccttcctgaggtagaaaatgaccgtctggagaattcaccacatcagtgtagcagttctctgctttccaaacctgcttccggttctggagttccgcagcccagtcctgctgcagaggatcacggcaccagcaggagtggggtgaaggtgacgcattaaaagaagcaaataataaccaaccacatcagactgtggacttgaaagtttctattcagactgaaatttaggcccatgatgctgcagagtaataacactcaacagccttgtttggagctggatgagccatgtgcgactgttaagtttaagttaccagcaaaagccaggttcataatcacaatgcatatacattctgtatgtttagccgagcattgtttcttgtagacgttaatcaccaaattatgaaacggaggctttaagagtgcatcatcatgagaacgataacttaagaaaaaatcgagttttgtgttcttatcacagaacactgcttggtgcacacacctgtgtatttagatagaaatgtggcttaatttatactcatatgatactaacgctgtgctaccacactcttaaggaaaaccgtggcttggagagaagtggttagtgacattttattgaaaccactaagggatgtatagaaaaatacaggaaatagataaacatgaatgtgattattaactatactgaaaaagtattcgcctaccaaagacacactcaggctttagtaaatttaatgttacataacctcagtttttaacctatcttttcaaaccatgaaatcaaagcaatgcagagcttgcaccaagcttatacaaaaggtctgtgtggctttgtttccttttccttttgtttatggaggatattcagctgacacaagcagaagttggccccaatactgcctgtactattaatttcccacgtaactctcctggcagactaacctcatggccgtcagataccccaccttcgggtttctttcaagtgttaccattatggtgctactgagctattttcttttgataaaggaaaatgtccccggctgcagtctcctaacctcctcaatttcctcactgcgtccattaatttgcttatataacactagtgccagttattttatttgataatggttattatgatatttgtacatttgtttgcattccagttgtgttcagtaatgagtgtgtaaacagcatacatgaaataaatgtaaataactaat

SEQ ID NO: 3208 - DNA, 1744 bp, Cricetulus griseus
gcgggtggcaccccgggcggccctggcggcggtggcgcgcctccgcgctacgctaccctggagcaccctttccactgtccccgcgtcctcaaggtgccgtcctatctcagctataagtttctaggtgagcgcgattgtgcagcgccctgcgagcccgcacggcccgacggctccatgttcttctcccaggaggagacgcgttttgccccgtctctggatcctcacccggtcggtgctgtgctgcgcttccacgttcttcacggtcaccacctacttagtggacatgcagcgctttcggtacccagagcggcccatcatctttctgtccggctgctacaccatggtgtcggtggcctacatcgccggcttcgtgctccaggagcgcgtggtgtgcaacgagcgcttctccgaggacggctaccgcacggtggtgcagggcaccaagaaagagggctgcactatcctcttcatgatgctgtacttctttagcatggccagctccatctggtgggtggattctgtccctcacctggttcctggcagccgggagtgaaatggggccacgaggccatcgaggccaattcgcagtacttccacctggccgcctgggccgtgccggccgtcaaaaccatcaccatcctggccatgggccagatcgacggcgacctgctgagcggcgtgtgcttcgtgggcctcaacagcctggacccgctgcggggcttcgtgctggcgccgctcttcgtgtacctgttcatcggcacgtcattcctgctggccggcttcgtgtctctcttccgcatccgcaccatcatgaagcacgatggcaccaagacggagaagctggagaggctcatggtgcgcatcggcgtcttctcggtgctctacaccgtgccggccaccatcgtcatcgcctgctacttctacgagcaggccttccgcgagcactgggagcgctcgtgggtaagccagcactgcaagagcctggccatcccgtgcccggcccactacacgccgcgcatgtcgcccgatttcacagtctacatgatcaaatacctcatgacgctcatcgtgggcatcacgtcgggcttctggatctggtccggcaagacgctgcactcgtggaggaagttttacacgcgtctcaccaacagccggcatggcgagaccaccgtgtgaagcggcctggcctgcctgacgggcgccccctcccccagggccgcccccgcccctcccccgcacgctgccttccttcactcgggaaggggtgcgccctatggactcctattttattttttaaataaagaacaaacaaaaaaaaaattttagttttcttttgacaaaagactggcctttaaaaaaaataaaaaataaaaagctgcccaggaaaacagcagcaacaaacaaaaaaactgggttaagtttgctttagaaggcctctctgggcagcctctttgtggctgtgggggtggggtcgagtgtttacatgacattctatatcacaagattgatagaatgtttctaacatgtttcctcccccctgtacaacacaaaaaaaagtaaagatttttctcaagttagctgcctgagagatgatatacaaagttatctttgccggtatgagaattccagttgctaacacacatcagttccctctactatttggagtattttagaattggaaggctaaagaaggagctgaagaccagtgtgccagaactctgctgtcaccatctctcctgtttct

SEQ ID NO: 3209 - DNA, 1744 bp, Cricetulus griseus
gagagaaacatgtatcgtttccgctcgcagctcttcacggggatttctgctgccgccgccgccgccgcctctcacccgcgccgctcctcgcctctcttgttagcccgagactcgcctctcagccgcccgccgcacagacgcacgagtagacagtgcagctccatcggctgatcctcgctgagctccgagtgtaggcggcaccgggcggcccacgatgccgaagaacaagaggcgcaacgcccccaccgcagtggcgggggtggcggcggctccggggcagcaacgtcggcggccacggcaggtggccagcatcggactgttcaacctttcagtgatgaagacgcatccattgaaacaatgagtcactgcagtggctatagcgatccttccagttttgccgaggatggaccagaagtcctcgatgaggaaggaactcaagaagacttagagtacaaattgaagggattaattgacctaacccttgataagagtgcgaagacaagacaggcagctcttgaaggtgtaaaaaatgcactgtcttcaaaagtgctgtatgagtttgttctagagagaagaatgactttaactgatagcattgagcgctgtctgaaaaaaggaaagagtgatgagcagcgtgcagctgcagcgttagcatctgttctttgtattcagttgggccctggatttgaaagtgaagagattttaaagactcttggaccaatcctaaaaaaataatttgtgatggaacagctagtatccaggctaggcaaacttgtgcaacttgctttggagtgtgctgttttattgccacagatgacatcactgagctgtattcagctttggaatgcttggaaaatctcttcagcaagtcctatcttaaagagaaagacagtagcgtcatctgcagcacccctaatacagtgcttcacatcagctcccttcttgcgtggacattgttactgaccatatgcccaatcagtgaagtgaagaaaaagctggaactgcatttccataaacttcccagcctcctttcttgtgatgatgtaaacatgagaattgctgctggcgaatctttggcacttctgtttgaattggccagaggaatggagagtgactttttttatgaagacatggattctttgacccagatgctccgggctctggcaacagatggaaataagcaccgtgccaaagtggacaagagaaagcagcggtccgtctttagagatgtcctgagggccgtggaggaacgagattttccaacagaaactgttaagtttggccctgaacgcatgtatattgatagctgggtcaaaaaacatacctatgacacctttaaggaagttcttggatcagggatgcagtaccacttgcagacaaatgaattccttcgcaatgtatttgagcttgggccccctgtgatgcttgatgctgcaacacttaagaccatgaagatttctcgttttgaaaggcatttatataactctgcagctttcaaagctcgaacaaaagctcgaagcaaatgccgagataagagagcagatgttggagaattcttctagacgtctgcatttgatggctgttttctaatttcttcctttattattatttttgctacttctaatgtatataagcttttagagacagttttttatcttgaggtaaatttagataatttttgatgtaggggtggattatattttaatttaatgtacagtgttacaaattaatgaattctgttatt

SEQ ID NO: 3210 - DNA, 1743 bp, Cricetulus griseus
gcagaagcggaggaagattgtcattctgatgctgtcagagtgggtgatgatgaaaatagagagtcccgctgagagagacctgcaggcacagcttcagatgttcagagctcagtggatgtttgaacttgccccaggcgtaggttccagcaatttagaaactcggccttgcagagcaggaagaggctccatactgaaagcagctgcagacaccaaaggaaggcaggaactggcaaaagaagaaaaggctcgagaactctttctgaaagcagtagaagaagagcaaaacggagctctctatgaagccatcaagttctaccgtagggctatgcaacttgtacctgatattgagttcaagattacttatacccggtctccagatggtgatggcgttggaaacagctacattgaagacaatgatgatgacagcaagatggcagatctcttgtcatacttccagcagcagctcacatttcaggagtctgtgctcaaactgtgtcagcctgagcttgagaccagtcagactcacatatcagttctgcctatggaggtcctgatgtatatcttccgatgggtggtatcaagtgacttggacctcagatcgttagagcagttgtcactggtgtgcagaggattctatatctgtgccagagaccctgaaatatggcgtctggcttgcttgaaagtgtggggtagaagctgtatgaaactcgtcccatactcatcgtggagagagatgtttttagaacggcctcgtgttcgctttgatggtgtgtacatcagtaaaactacatatatccgccagggagagcagtcactggatggtttctatagagcctggcaccaagtggaatactacaggtacataagattctttcctgacggccatgtgatgatgttgacaacccccgaggagccccagtccattgtgccccgtttaagaactaggaacaccagaacggatgcaattctgctgggtcattatcgcttgacacaagatgcagacaatcagaccaaagtatttgctgtaataactaagaaaaaagaagacaaaccacttgactataaatatagatattttcgtcgtgttcctgtacaagaagcagatcacagttttcatgtggggctgcagctgtgttccagtggccaccagaggttcaacaaactcatctggatccaccattcctgtcacatcacttacaaatcaactggtgagactgcagtcagtgcttttgagattgacaagatgtacacccccttgttgttcgccagagtgaggagctacactgcattctctgagaggcccctgtagagcctcaccagcatatcactgctgcatgagcagaagcctggagcgccagcatacctaagttatatgtacataatatgtacatacatggagttggaacttattttaagttgttggaattcctttaagaagagtataattatttttatttaaaggggtagttgattcttggggtaatttgttttgaaattagaagttgttaagtacatttatgttataataaaccttaatgtggggtttaaatcatgttttcaagcaggtttttgagcagatctgtcacgtacgctgccttgtgcttgaacaccctcatactcacctttgtcagggagcacactggatagtatttattcccgcatgacttagcgtctttgcatcagactccattgtgaaacctgttctggatttgtttgagctgtttaataaagatcataaacaaa

SEQ ID NO: 3211 - DNA, 1742 bp, Cricetulus griseus
ccaacagcttcatactctagagatggaaaaatacaatgagattcgaatccgggaacaagacattcaacacctacatcaaagtctgcatctcaaagagcaactgcttcaggaacttcaggagctcctacaatatagagataacccagacaaaactctagaaacaaatgaggtgttggttgagaaaatgcagcaacaaatacaagaccgagctgttgatctggagcgggctatagatgaaaagttctccgctctggaagaaaaggacaaggaattacagcagcttcatcgtgcagtgagagagcgagatcatgatttagagagacttcgtagtgtcctgtctgccaatgagactaccatgcaaagtatggagagtctcctgagggccaaaggcctggaactggaacagttaactgccacctgtcaaaacctccagtggctgaaggcagaattggaaaccaaatctggtcattggcagaaggaacaagaaagcatccttcagcagttgcagacatccctgcaaaacaaggacaaggaagtggaggatctcagggcaacattcctcagcaaactgggacccggtcagagtgaagtggctgaggagctgtgccagcgcctgaagcagaaagagggcatgctgcaggaccttctgagcgatctgaataaacaaactgtggagcatgagatggagatccaggggctgcttcagtcgatgagcaccagggagcaggccaacaagctgctgcagaaaaatggtacaagccttcctggaaagaaacacagaattacatgccctgcgccagtacttaggagagagagacctaatcgactctcgggcactcctcttaaaccaacaagttaaagtgacttccatcggtccccaccttggagagcagactgatcaaagctctgtgcaggtgccctctagagacggtaacacttcactgactgctagagaagatgccagcatgcccaggtccacattaggagactcagacacagttgcagggctggagaaagagctgagtaatgccaaggaggaactcgagctcatggctaaaaaagaaagagaaagccagatagagctgtctgctctacagtccatgatggctgtacaggaggatgagctgcaggtgcaggccgctgacttggagtcactgaccaggaacatacagataaaagaagatctcataaaggacctgcaaatgcaactggtcgaccctgaagacataccagctatggaacgcctgacccaagaggtcttactccttcgggaaaaagttgcttcagtagaatctcagggtcaggaagtttcagggaaccggagacaacagctgctgctgatgctagagggactagtagatgaacggagtcggctcaacgaggctctgcaagcggagaggcagctatacagcagtctggtcaagttccacgcccatccagagaactctgagagagaccgaactctgcaggtggaactggaaggggcccaggcattacgaggtcgcctagaagaagttcttggaagaagcctggagcgcttaagcaggctggagaccatggccgccattggaggtgctgcggcaggcgatgacactgaagatgcaagcacagagttcacagacagcatcgaggaggaggctgcacacaacagccaccagcaaattaaagaaacactgtgtataaaaaaaaaaaaaaaaaaaaaaaaaaaaaaaaaaaaaaaaaaaaaaaaaaaaaaaaaaaaa

SEQ ID NO: 3212 - DNA, 1742 bp, Cricetulus griseus
tacaggctgctgtccaagctctgccttctaactacaactttgagatccccaagaccatctggaggatacagcaagcccaggccaagaaggtggctttacaaatgccagaaggcctcctcctctttgcctgcaccattgtggatatcttggaaaggttcacaaaggccgaagtgatggtgatgggtgatgtgacctacggggcttgctgcgtagatgactttactgctagggccttgggagtcgactttctggtgcactatggtcacagctgtctagtccccatggacacgtcagtccaagacttccgtgtattatatgtctttgtggatatccggatagatactgcccaccttctggactcagtccgcctcacctttgccccaggcagctcactcgctctggtcagcaccattcagtttgtgtcaactttgcaggcagctgcacaggagctgaaagctgaatatcatgtcagtgtcccacagtgcaagcccctgtcccctggggagatcctaggctgcacatcccctcgactacccaaggaagtggaagctgttgtgtatcttggagatggccgcttccacctggagtctgtcatgattgccaaccctaatgtccctgcttaccggtacgacccgtatagcaaagtcctatccagagagcactacgaccatcagcgcatgcaggccactcggcaggaagccattgctgctgcacgctcagccaagacctggggccttattctgggaactttgggccgccagggtagtcccaagatcctggagcacttggaatctcggctcaaaggcttggggcttcccttcgtgagacttctgctctctgagatcttccccagcaagctcagtctacttcccatggtggatgtgtgggtgcaggtggcatgcccacgcctctccattgactggggttcagcctttcccaagccactgctgacaccttacgaggcggccgtggccctgaaggacatttcctggcagcagccctaccccatggacttctacgccggcaactccttagggccatggacagtgaatcacggtcgggaccctggaccccggggtctcggccagccggcgtcgggcaaggtacagcagggtttcagaggccagtctccagccccggcctgtgagggttgtagctgcgcagacctgaaggctgcactgccggcttcctgagacgtctcgagtcgcagggcccggtgctccggaggagcaacctcgaggctggtggttttctgaacaggaagcagatgttttctacgcgctggaagagcctacagcatgcaggggtttggagaaggccctggaaactgtggcacaggccctggacacgctgggacctttttgacggactccttggcttcagccagggggctgcactagcagcttttgtgtgtgccctgggtcaggcaggcgatctccgcttccccgtgccgcgttttctcatacttgtgtcggggttctggccccgaggccttggctttaaggaatccatcctgcagagccccttgtcactgccttcgcttcatgtttttggggacactgatcgcatcatccctcctcaggagagtatgcagttggctagccaattccttggcgctgtcaccctcacccactctggtggtcacttcattccagcagctgcgacccaacgccaagcctatctcaaattcttggaccagtttgcagagtgaatcaacatatgtctctgaactgctcccactt

SEQ ID NO: 3213 - DNA, 1742 bp, Cricetulus griseus
ccggctcaaggttcatcggggtgtgagccgaaatgaggacttgttggaagagagatccaggcctggccaagcctaccaggtgcctcggtttgtacgtgtgaacacgctcaagacctgccctgaggatgcgatagattatttcaagagacaaggtttctcctaccagggtcgggcttccagcctggaggacttgcgaaccctcaaggggcaacattttcttttggatcccttgttgtctgagcttcttgtgttccccgcacagacagatctgcatgaccatccgctctaccgcgctggccatctcatcctgcaggataaggccagctgcctcccagccatgctgctgtctcccccgccaggttcccatgtcattgatgcctgtgctgcccctggcaacaagaccagttacattgcggcccttctcaagaaccaggggaagatctttgcattcgaccaggatgctaagcgactggcagccatggctacactgctggctcgagctggggtctcttgctgcgagttagctgagaaggacttcctgacagtctctccctctgaccagcgttacagccaggtccagtacatcttgctggatccttcttgtagtggctctggtatgttgagccggcagttggaggagcatggaggaggtacacctagcaaggaacgcctgcaggccttggcagggttccagcaacgggctctgtgccacgcactcaccttcccctctctgcaacgcctggtctactccacgtgttccctttgccaagaagagaatgaagatgtggtccaagtggctctacagcagaactcgggggtcttcagattggctcctgtcctacccacgtggcctcaccgaggtctgagtacctttccagggtctgaacactgcctccgggcttcccctgagaccacactcactggtggcttcttcattgctgtgtttgaacgggcagaagtggtgcccggcccagctccacaggacaaagcagtggctccagaacctctcagcaaagctccaaagagaaagagaagacgcaaagcagcagctggtgccagcgtagagccaagcacatagaaataaagggcagactcaggtctatgacagatcacagttttatttttaatgacataagcaagaacaatctcacattcatactaaaaatctcagctacgctcacaggaactcagtctgtctgtagtgggaagccctagcctccctgtccctgtccagcgtgagcacggacaaatgtgctcacacaccgaggctatgccaggacgcctcttcaggggccctggatgcaggcctgctgtggagctgaggtaattagctcagactgaattgcagggaggccccttccttacctgaggcacaagtagaggcttcctgtgaagatccccaccacctatccccatccctacaggcatttgggacttgaggtccagctctccccagctccatacaacccagtctaacccctgccaccagtcacaaaggtaagggaccagttatagctacatcacattgtttataaagtaagactcacacttatacaacatgtccagaaggagctctgcccccttagcagagctgctggggacagccatgagcccctccttcacacaggcataactatacagctaattcctactattcaatagcatttatacttaaccacctcagtgaaccaagcttgaaggaatttaaaaggcaatttagcttaaatataaaaataaatttt

SEQ ID NO: 3214 - DNA, 1742 bp, Cricetulus griseus
gcagaagaatccaaacaagttcttaatcagtttttggagcaggaagctcctctcttcagttctatcactagccatctactgactgcacagccatggatggatgatctcggggccatgatcacccagatagaagagattgagcagcatctcacataccttaaatgggtttcacagatcgaagagttaagtgataacattcagcaatacctgatgaccaataacgtgcctgaggcagcctctatcctggtgactatgacagaacttgacatcaagcttcaggagtcctcttgtactcatcttcttagtttcgtgagagccacagttaaattctggcataaaattctgaaggacaagcttaccagtgattttgaggaaattctggcacagcttcattggccattcatcacacacacccagtctcaagctgttggcataaactggcctgctggtgcccctgagatatatggtaccctggagacactgttttgtcagctgttgaagctacaagcctcagatggaagctggcttctgatataccttgcctgctctatgatgacaaccttttctgtcatttggtggatgaggtgctgttgtttgaaagggagctgcacagtgttcatggctatcctagcacttttgccagttgtatgcatattctgtcagaggaaacctgttttcagagatggttaactgtggagagaaaatttgctcttcaaaaaatggactcaatgctctcatcagaggctgtttgggtatcccaatataaagacatcactgatgtggatgaaatgaaggttccagactgtgcagaagtttttatgactttacttttggttataactgacaggtataagaatcttcccacagccccccgaaagctgcagttcctggagttacagaaggacctagtagatgactttaggatacgattgacccaggtgatgaaagaagagaccagggctccacttgacttccgatactgtgcaattcttaatgccgtgaactacatctcaacagtcctggcagactgggctgacaatgttttctttctgcagctgcaacaggcagcactggaggtctttgcagagaataatgccctcagtaagttgcagctgggacaactagcctccatggagagctctgtctttgatgacatgataaacctcttagagcgtttaaagcttgatatgttgactcgccaagtagaccatgtttttagagaagtgaaagacgctgcaaaattgtataagaaagaaagatggctgtccctgccgtctcagtgtgagcaggcagtgatgtccctgtccagctcagcttgcccactcttactgaccttacgggaccgtctgcttcagctggagcagcagctttgtttctccttattcagagttttctggcaaatgcttgtagagaagctggacatgtacatctatcaggagataatcctggctaaccatttcaatgaaggaggagcagcccagttacagtttgatatgacacggaatcttttccctttgttttctcactattgcaagagaccggaaaactatttcaaacatgtaaaagaagcctgcatcattctgaatttgaacattggttctgcactactcctaaaagatgtcctacagtcagcttctgagcatctttctgctacagcagccttaaatgaagttggaatttacaaactggctcagcaagatgttgaaattctgctcaatttgaggacaaactggcctaacact

SEQ ID NO: 3215 - DNA, 1742 bp, Cricetulus griseus
ggcaagctctacgtctcctcggagagccgcttcaacactctggctgagttagttcaccaccattccacggtggctgatgggctcatcaccacgctccactacccagctcctaagcgcaacaagccaaccatctacggcgtgtccccccaactatgacaagtgggaaatggagcgcaccgacatcaccatgaagcacaagttgggtggaggccagtatggggaggtgtacgaaggtgtgtggaagaagtacagcctgactgtggctgtgaagaccttgaaggaggacaccatggaagtggaagagttcctggaaaggaggctgcagtgatgaaggcagccatggagtacctggagaagaagaacttcattcacagagaccttgctgctcgaaactgcctggttggggaaaaccatttggtgaaggtggctgattttggcctaagcaggttgatgacaggggacacctatacggcccatgctggagccaaattccccatcaagtggaccgcgcccgagagcctggcctacaacaagttctctatcaagtcagacgtctgggcatttggagtattgctctgggaaattgctacctatggcatgtcaccttacccaggaattgacctgtcacaggtttatgagctgctggaaaaagactaccgtatggagcgccctgaaggctgcccggagaaggtctatgaactcatgcgagcatgttggcagtggaatccctctgacccggccctcctttgctgaaatccaccaagcctttgaaaccatgttccaggacgtccagtatctcagatgaagtggagaaggagctggggaagcggggcacggagaggagctgctggcagcatgctgcacggccccagagctgcccacaagaccaggacctgccggagagctgcagagctgtgaaggagatcagcgacatcgtacagaggtagcagcagccattgcatgccagcccaaagatctgaatttctgagcagttgtcttcccctctcctgctcctgaagtcaggctcatcctctctggtccttgccttgataatggggtccggttttctggtggttttgagcattttaaagctctgcacagaaaggagcaaccactaggcacagacagctaggaaggctcacttgagccctggctgctcctcagagctgctgcttaaccaccaagggcagtgcttagcccagtgccccgggaggcactgcagcacaggctggggcagggtcgactttgcaggcttagccaggccatgtcctcccatgtcctccttccccagcagccaggaccagagctgagaagagacaggcgtgggcggctccttgactctggtagagatgatttcctctggattgttcttccatagtcctcatagcacaatcccctcccttgcctccagcggctgttctacagcccgagggaggcagtaccacactcgccagcggccttgaaaagccaaacacccccgtgccctgacaccgtgttcacaaggtaccgactggtctgttgttgctgacatgatgtgccactatattttgcattatactttggtattacacttttttttaatagacttgctctccaaaaaatgacatgtaaatagttcaccactgtgcccactctggcacacggtcggcatttccctttttctcagtccagtacattttgttctgtatatgactctgtgtgtttttgaattccaaatctctctgtagtatttttaaataaat

SEQ ID NO: 3216 - DNA, 1742 bp, Cricetulus griseus
gctgagtgggctttcggatcatgtctggtggctccgcggattacaacagagaacatggcggcccagagggaatggaccccgatggtgtcatcgagagcaactggaatgaaattgttgataactttgatgatatgaatttaaaggagtctcttcttcgaggcatctatgcttacggttttgagaagccttcagctattcagcagagagctattattccttgtattaaagatccaaaaggtaattttggctcttggagattatatgggagcaacttgtcatgcttgcattggaggaacaaatgtccggaatgagatgcagaagttgcaggctgaagctcctcatattgttgtgggtacaccaggaagagtgtttgatatgctaaacagaagatacctttctccaaaatggatcaaaatgtttgttttggatgaagcagatgaaatgttgagccgagggtttaaggatcaaatctatgagatttttcaaaaattaaatacaagcattcaggttgtgctgctttctgccacaatgccaactgatgtgttagaagtgaccaaaaaattcatgagagatccaattcgaattctggtgaagaaggaagaattgacccttgaaggaatcaaacagttttatattaatgttgaaagagaggagtggaagttggacactctatgtgacttgtatgagacattgactatcacacaagcggttatttttctcaatacaaggcgcaaggtggactggctcacagagaaaatgcatgccagggacttcacagtttctgctctgcatggtgacatggaccagaaggaaagagatgtcatcatgagagaattccggtcagggtcaagccgtgttctgatcactactgacttattggctcgtgggattgatgtgcaacaagtgtccttggttataaactatgacctacctaccaatcgtgaaaactatattcacagaattggcagagggggtcgatttgggaggaaaggtgtggctataaactttgttactgaagaagacaagaggattcttcgtgacattgagactttctacaatactacagtggaggaaatgcccatgaatgtggctgaccttatttaattcctgggatgagatagtttgaatgcagtgctcgctgttgctgaataggcgatcacaacgtgcattgtgcttctttgagaatatttgaatcttgtctcaatgctcataacggatcacaaatacagattctgatagcaaagcgactttagtcctgagctcttgtgaggaaaggcattggctttatcctctttagagttagactgttggggtgggtataaaaagatggggtctgtaaaatcttttttcttagaaattcatttactagttatgtagaaatggttgtattagatgttctctatcatttaataatatacttgtggactaaaaggtataagtgctgtataaaatcagccaattatgttaaactagcatatttgcctttattgtgtttctcattagcctgattagaaaggccgttaaaagtgattttcttttttttagaaaacatttggatgcattttgtttggtattgtatttattcaataaagtatttaattagtgctaagtgtgaactggaccctgttgctaagcctcagcaagcaatcatatcctaggtagggttaaacccccagtaaaattgccatattgcacatgtcttaatgaagtttgaatgttaaataaattgtatattcacttta

SEQ ID NO: 3217 - DNA, 1742 bp, Cricetulus griseus
gtctccaggcgctcagggaacccccatttgcggctcagcatggtggtggatccccctaaggccgacaccaagggggtgacggcggtggatggcaccgccaacggtgccctggcgctgctgggctccggggaggaccaaggcgcgaaagcgggtggctgctgcggttcctgggagcaggcgcgccgctgccttcgcgccaacctgctggtgctgctcacggtggcggccgtggtggccggcgtggtgatagggctgggggtctcggcggcgggcggtgccgaagcgctgggccccgcgcgcctggccgccttcggcttcccgggcgagctgctgctgcgtctgctaaagatgatcatcctgccgctggtggtgtgcagcctgatcggaggcgccgccagcctggaccccagcgcgctgggccgcgtgggcgcctgggcgctgctcttcttcctggtcaccacgctgctcgcgtccgcgctcggcgtgggtttggctttggcgctgaagccgggcgtcgccgttagcgccatcaccaaggaggtgctggattccttcctggatctcatgaggaatattttcccctccaatctggtgtctgctgcattccgctcttattctacttcatacgaactcagaacatctgagaaacagctgactactgactgtgcacacagagagaccaacgccaccctggtccaggtgggaggtgaggtcgagggcatgaacatcctgggcctggtggtgttcgctatcgtctttggtgtggctctcaggaagctggggcctgagggcgaactgctcatccgtttcttcaactccttcaatgatgccaccatggtcctggtctcctggattatgtggtacgcccctgtgggcatcctgttcctggtggccagcaagattgtggagatggaagacatccgccagctgttcatcagactgggcaagtacgtcctgtgctgtctcctgggccatgccatccacgggctcctggttctgcccctcatctacttcgtcttcacccgccaaaacccctatcgattcctgtggggtatcatgacgccactggccacggcttttgggacctcttctagctctgccacgctgcccctgatgatgaaatgtgtagaggagaagaacggggtggccaaacacatcagccggttcatcctgcccatcggcgccaccgtcaacatggatggggcggcgctgttccagtgtgtggcggccgtgttcattgctcagctgaatggggtgtccctggacttcgtgaagatcattaccatcctggtcacagctaccgcatccagcgtgggcgccgcaggcatccctgccggcggggtcctcacgcttgccatcatcttggaagccgtcagcctccctgtcaaagacatctccttgatcttggctgtggactggctagtggacaggtcctgtaccatcatcaatgtggaaggtgacgccttcggggccggactgcttcaaagttatgtggatcgaaccaagacgccgagctcggagcctgaactgatccaggtgaagaacgaaacgtctctgaatccactgcccctggccccagaggaggggaacccccttctcaagcagtaccgaggacccgccggggacgctgccgcgtgtgaaaaggagtctgtcatgtgaatagcaggaggggctttctgtgccctggtggcgtctcattggaagttgctggggtacagtgcttatatatgattgtctccaca

SEQ ID NO: 3218 - DNA, 1742 bp, Cricetulus griseus
cccagatgactcggagtaacagtagtctcagagagcctgacgaatatgactactctgtgtctgagattaaccgctccttccggtcacagcaagaaataatgtgagcaactcaacatcaatcacatgatccaaaggatcttcctcattactctggacaacagtgatccaaacttgaaaggcgggaatggcatccccagccgttgtgtgtatttggaagaaatggcagtagagctggaagatcaagactggcttgatatgagcaatgttgagcaggccatctttgctcgattattgcttcaagatccaggaaaccacttgatcagcatgacttcttctacaacgttaaatctctctgctgatcgagatgccggggagaggcacatcttttgttacctttattcctgcttccaaagagccaaggaagagattaccaaagttccagaaaacctgctcccctttgcagtgcagtctttctgaatccatctcgttcgagtcctcaggagatctaggcaatgagggctcacagccattagagctaagttttcctttgccagatggctacagctctttggcttatgtgccagaattttttgcagataacctgggtgatttcctcatttttctccggcgatttgctgaggacatcttggagacgtcagcagattccctggagcatgtccttcactttatcaccattttcactggaagcatagaaagaatgaagaatccccacctaagggccaaactagcagaggtgttagaagccgtgatgcctcacttggatcagaccacaaatcccttggtagatcaggtcactgttcgtgcaccccttcctggctgagcgcattatctccatgctgaactacttcctgcagcacctggttggccccaagatggggtgctctcaaagtcaaggacttcagcgagtttgacttcaaacctcagcaacttgtatcagacatctgcactatctacttaaatcttggggatgaggagaatttctgtgccactgtgcccaaggatggacgttcctattcccctactctctttgcgcagacagtccgagtcctgaagaaaatcaataagcctgggaatatgatcgtggctttcagtaatttggcagagagaatcaagtctcttgcagacctccagcaacaggaagaggagacatatgcagatgcctgtgacgagttcctggatcccatcatgagcacactgatgtctgaccctgtggtgcttccgtcttccagagtcactgtggacaggtccaccattgccaggcatttactcagtgaccaaacagatcctttaaccgtagtccccttaccatggaccagatccggccaaacacagaactcaaagaaaaaataccaagcggtggctcgcatgaaaaagaggaaaatcagagtttgcaggtgaaaactggaggaaaatgggtacaaacctccaaagatggctgttccagcagctttctagctaatgacctctatgctgcctctagtgtccatctgtattctacttctgaactgaaccttcagattgtaagccttttttggcgagtttgtgttttgttttgtttttaagctcttctgatacttttctatgaatggctgtgcaccactgatgctgctgaacccttttatcacaaaagcaagtgtgtagattaaggccactattggtgaggaaaccaagtgtcccctgtgccttctttctttctgtgaactaattaaagacatccagaa

SEQ ID NO: 3219 - DNA, 1742 bp, Cricetulus griseus
ctgctgaggagtttgtaatacgagttcctgtggtggatgtacaaagtgacaacttcaaggagatatggccatcgctttactggccttaaagacagctagctttgtggctgtggacacggagctgagtgggcttggggataggaagagtttgctgaaccagtgcatcgaggaacgttacaaggccgtgtgtcatgctgccaggacccgttctgttctgtccctgggcctcgcctgcttcaagcagcagccagataagggagaaaattcttatttgacccaagtgttcaatctcaccctactgtgcatggaggagtatgttatagaaccaaagtctgtgcagttcctggtacagcatggcttcaacttcaaccggcagtatgctcagggaatcccctaccataagggcaacgacaagggagatgaaagccagagccagtcagtacggacactgttccttgaactaattcgagcccgtcggcccctggtgctacataatggccttatagacctggtgttcctgtaccagaacttctacgcacacttgcctgagaccttgggaaccttcactgctgacctgtgtgagatgttcccagcaggcatttatgacaccaaatatgctgcagagtttcatgcccgatttgtagcttcctacttagaatatgctttccggaaatgtgagcgggaaaatgggaagcagcgggcagctggcaccccacatcttgccctggagttctgcagctatccatctagcatgagaggccatattgactaccgatgctgtatgtcccctgtaacgtaccgtcgttctcacaccaccggcatctgcgacaagttctcggcctatggctggtgccctctaggacctcagtgtcctcagtcacatgatattgatcttatcattgacactgatgaggctgtagcagaggacaagcggcgtcggcggcgacgtaaggacaaacggaagagggctttgctgagccagccagagacacagacctttgagaagctgaagatggccctcccacaaagcaggtctgtgaagacagccttaagacagaagaaatggagcaaagagtgacagagggtgaaactagagatgaacttggttccaagcaagctcacaaaagtggcttagaaatggagcataaagcaacaagttctgaaacagttgatgtggctaccacagaactgcctgtgagtcaagccagtcctaaccctgtgcctggggatggactgcatcgggctggttttgatgcctttatgacaggttatgtgatggcctatgtgggactgagccagggacctcaactctgcagttccagaccttggcttcctgagtgtcacaacaaggtatatctaagtggcaaaactgtaccccttacagtggccaagagtcagttttctcattcttctaaagcccacaaccagaaaatgaagctggcttggggcagcagctgacccaaaaatctgcctggccctaggcctaggagagaagctaatagtaggagagagatgtttggcagtgtgtagtggctcatgtttgtcatcccagtacccgaaggctgaggtaggactgctataatttcatggcctacatatcaaattccaagtcagccagagccatatagcaaaaccctatttacaaaaaaaaagaagtcaatttgagttaataacctactaggtcacctttaagtactaaagagtttgttgagcaggtccttgcagagacagtgagtacttca

SEQ ID NO: 3220 - DNA, 1741 bp, Cricetulus griseus
  modified_base (199)..(199): a, c, t, g, unknown or other
  modified_base (285)..(285): a, c, t, g, unknown or other
  modified_base (698)..(698): a, c, t, g, unknown or other
  modified_base (953)..(953): a, c, t, g, unknown or other
ctgcaacacagccagccccgggacctgagcagcatcgtgcaccagatcaaccagttttgccagacgagggcaggcatcagcactacctcagtgtgtgagggccagatcgccaaccccagccccattagtcgtagtctgctcatcaatgcaagcacccgggtgtcgacccacagcgtccccacaccaatgccttcatgtntggtcaatcccatggagcacacccatgcggccacagccgcactgcctgctgcaggtcctgtcaacctgcccacaggcatctctagngcccccactggctacccagcgacctcaagccagttacttggaaccagcaccagctggcccacctacaacagatgtgcagcgaggcgcctggttttgtgggcaaggcccctgcctacccacaggaactctgcctggcacagtccttccatctgaagccttcccctggagaagccgaccccatccccacctgtcaacggcctaccagccccactggcctatcccaatggtcactacttccaacccctgtggaacaacatcctaccaactcccaatagcgacagctcggggtctcaggaccttgcgatgccattccatggtgggcagcccacaggtgcacccctcgactgtgcggcggctcctgggggcccactaccgagcgggaactgggggtgggccagtggcaggccaaaacngcttgatgcaaacagtggattacctgagtggggatttccagcaggcctgcttccgagaacagagcctggccatgttgagcaaggcccaccgagcccctggccacccggagcccccgatccccacagatagtcgaaatcttcatacctcaaggcttggttctaagtttacgttgctcccaagccactacactcatccttgccaaagccttgagtctcagagagaaaacctttctgttggcatcttggttcttgacnccccttccagagaaatgcagtggccatctggcattctcaagacctgtcactgctgcttctctccaaactaaactactgcccttatccctgcctcccctcctccttaagaagaagaaagcaaaacaaaaactaccttacttgaagaattagttataggtaaaggatgatcacattagagtttggaattaaaaacaccaaaaaagtttaaaaaaagaaaagttaaaatgcatttgattctctacactggctaagaattattggtccacactgtaagttttaaatgtcatgtttctgtatgaatgtgtgggtttgaggagcattttgtatgagtggccccagggtacatacatttcgcagcccttcagtttaatgaagaacaaaaggaaaaacacaaagccttaagctctttgaattcttcctctaccaaatgagcatggtaccgctgtagaggggctcacattggaaagggcccctcttgcccattgcccattcttagagcatcttccacctgttccaggaccaatgtgtctcattcccaagtgacaattaattgtctagaaattcaacacttctctgtaactttagattgttttgttgttaaaaattttgcacctgtcttctgttgcacagttgggctttaaaaaataatagggttgccactgtaaggaaactggaccagacactaactgggggctttcacacctcactcccacctctagtctgcatggaaaacgtactgtgattcccttaccctacaaatgactgccctcaacttcggtgtaagatgt

SEQ ID NO: 3221 - DNA, 1741 bp, Cricetulus griseus
gctgtttgggttttttttcggtgccgggcccctgtcttcccggcttctccggagtagcggagcgaggccgcgcccgcctcgtcgctccagcacccggctaccgcctcctccccgcggggagcgcgctcgccgcgccgcctttcaagccaggccaggggcccaggcggtggcgggaggcgaccgggccctcgcctcctctctcggtggcactagggcgccctgctggccctcggcttcagtgcgggcggagaaccgaaagcagaccgggcttggctgggacaccgcctctccccgagcccccacccagcagagggactggtgggggcctccgccgccctcaccgcgcacttgggctccgtgcacccgcacgcctccttccaagctgccaccagatccccgctacgtcccaccccggtggtggcgccttcagaagtcccggctggctttcctcagcggctgtccccgctctcggctgcctatcaccaacatctcccgcagcaacaaccaacgcagccccaacaacagtcgcagcaacagcctccgcctccacctcgggcgggctccctgcagccaccggcttcagggacgcgggtggtccccccaccatagcggctccgcccctgccccctccagcaaagacctcaaatttggaatcgaccgaattttgtcttcagagtttgacccgaaagtcaaggaaggcaacactctgagagatctcacctcgctgctaaccggtgggcgtcctgcaggggtgcacctggctggcctgcagccttcgactggacagttcttcgcgtctctagagcccattagcgaggcgtctgctatcctcagccccttaagctccaacccaagaagttctgttcagcatcaattccaagacacatttccaggtccctatgctgtgctcaccaaggacaccatgccgcagacatacaagaggaagcgctcatggtcccgagcggtcttttccaatctccaaaggaagggcctggagaagaggtttgagatccagaagtatgtgacgaagccagacagaaagcagctggcagcgatgctgggactcaccgatgcacaggtgaaggtgtggttccagaaccgcagaatgaagtggcgacactctaaggaggcgcaggcgcagaaggacaaggacaaggaagccagcgaaaagccttcaggaggagcgcccgccgagggcgaactggaagagagaagtcccagccgttccgagggcgaggccgagagtgagagcagtgactcggagtccctggacatggcccccagcgacacagaacggactgagggaactgagcggtccctgcaccaaactacggtcatcaaggcctccgccgcgggcgccctcatcacagccagcggcagtgcgagcggtggcagcttcagcttcagcagcgccagcagcctgggtagcggcaacgcgggcgcgggtagtgccaacagccttggcggcagctgctctgagctgctccccgcgcaccagccctcagtcaccagcaatccccagagcccggagcctgcccaagccccgcttgcaggtttatagacaggacctagggaaagaattcaactgttctccctaccgaagcagctcacactgtgaagtgtttgacggaactgttcctccgagcaccaggggtcgttggcataaggacacgctgcacttaggagtcctttaacttgtaaataaaatagtttacttacggtttgtaaaaaaaaaaaaaaa

SEQ ID NO: 3222 - DNA, 1741 bp, Cricetulus griseus
gctgctatgctctgacccagagttacttgaggagattgctctcaaggtttttggaggcccggcaagaagaggcgctggccgagtttctacagcggaaactggctggcttgaagccaactgagcgtacccaggccacactgctgaccacttggctgacggagctctaccttagccggcttggtgccctgcagggtgacccagatgctctgaatctctaccgggatacacgggagtgcttccgtacctttctcagtagccctcggcacaaggagtggctctttgccagcagggcctcgatccatgagctgctcgccagtcatggggacacagagcatatggtgtactttgccgtgatcatgcaggactacgaacgggtggtgacgtaccactgccagcacgaggcctacgaggaggccctggctgtacttgcccgccaccgtgacccccagctcttctacaaattctcccccatccttatccgacatatccctcgccagctagtagatgcctggattgagatgggcagccgactggatgctcggcagctcatccctgccctggtgaactatagccagggtggcgaggcacagcaggtgagccaggccatccgctatatggaattctgtgtgaatgtgcttggcgagaccgagcaggccattcacaactacctgctgtcactgtatgcccggggccagccaggctcactgctggcctacctggagcaagctggggccagccctcaccgcgtgcattatgacctcaaatacgcacttcgactctgtgctgagcacggtcaccaccgagcttgtgtccacgtctacaaggtgttggagctgtatgaggaagctgtggacctggccctgcaggtagatgtggacctggccaagcagtgtgcagacttgccagaagaggatgaggagctgcgcaagaaactatggctcaagatcgctcggcacgtggtgcaggaggaggaggacgtgcagacagctatggcctgcttggccagctgccccttgctcaagattgaggacgtgctgcctttctttcctgactttgtcacaatcgaccacttcaaggaggccatctgcagttcacttaaggcctacaaccaccacatccaagagctgcagcgggagatggaagaagccacagccagtgcccagcgtatccggcgagacctgcaggaacttcggggacgctatggcactgtggaacctcaggacaaatgctccacctgtgacttccctctgctcaaccgacccttttacctgttcctctgtggccacatgtttcacgctgactgtctcctgcaggctgtgaggcctggccttcctgcctataagcaggccaggcttgaggagctgcagcgcaagcttggggctgcgcctcctcccaccaaaggctctgggaaggccaaagaggccgaagctggggcttcagctggggggcccagccgggaacagctcaaggctgacctagatgaactggtggctgctgagtgtgtgtactgtggggagctgatgatccgctctattgaccggcccttcattgacccccagcactatgaggaggaacacctcagctggctgtaggagggctgtccccttgggtggacgggcagggatgtagctaccagaccctcctgagaaggccatactgtggttggtgttccgtctttggggttgctgggcctgtgattgtgttaaattaaattaaataaaataaaaaaaaaaaaaaaagt

SEQ ID NO: 3223 - DNA, 1741 bp, Cricetulus griseus
tgcgccctcgggaggcgaccctggccgacgcccgtccccggggcagaagtgaggagcctccgctactgctggtgtcttggtgctgtggaagggactggatgatgtaaccagctctggggaaagatgcacatgaaagtcctttgctgagcaagacctcccagaccctgtgtcatttcagagccacttgaagaaaaaaaaataatgtgacggttcttatcaatagggccttttttgaaagtgtgggatactcgtgcagaaggtcgtctttcccctgtctgtgaaatacacattcttatatttccacaatgccagccaagaccccaatttacctgaaagcagccaacaacaagaagggaaagaaatataaactgagggacattctgtcccctgatatgatcagtcctcccttgggggactttcgtcacaccattcacatcggcaaagagggccagcatgatgtctttggagatatttccttccttcaagggaactatgagctcttgcctggaaaccaagaaaaagcacactcgggccagttccctggacataatgacttcttccgggccaacagcacctcggactcaatgttcatagaaacaccctcccctgtgctcaaaaatgccatctccctccctaccattggaggatcccaggctctcatgctgcccttattgtcaccagtaacattcaattccaagcaggagtccttggggcgtcctaagttgccaaggctcagctgtgagcctgtcatggaagagaaagttcaggagaaaagtagtctgttggagaacgggacggtccaccagggagatacctcgtggggctccagtggttctgcttctcagtccagccagggcagggacagccactcctccagcctgtctgaacagtactccgactggcctgcggaggacatgtttgagcaccctgcctcctgtgagctcatgaagtcgaagactaaatcagaggactccctctctgacctgacaggctccctgctctcattgcagctggatcttgggccctcacttttggatgaggtcctgaacgtcatggataaaaataagtaacctggagtcagctcttttcctttggagtaagaggtaccaaaataagcagaaaacaaaaaactcaacaaaccacaactgatggaaagaactgccctggctggatgatttttgcagcagtgtgatgcattttctaaaataacgttcctgttcctacaaaatatttttttaaccgccgtgccctgtttgcaaaaacaatgttgaaaacaataatttttaaaaattaaaaaaaaaaaaacaaaaagaaaaagagagagggagtgagtcagagctcattttcagcaggcattgctgatgttcggctcaattttgtttgtttgtttgccgccaggcagaaatccaggctgtctgaagagggctgggtcaatgggtctttccaaggcgctttacagcatgttgtgaaaagaaatcaaaacttgcttaacacctaagccttttctttcctagactcttttgtatattgtatcccttgggctcaccatagcaacttctccagtgttatgattttactgtcttcatatttgaacaaccttatgggaccggggttttcttcttgtggttcttatatatccctgtatattatttccatgttacagaagtttgactgtcagctacatgttaggtaaaaacaagcaaggtattactgtaactaagttatttttaaagttgaaata

SEQ ID NO: 3224 - DNA, 1741 bp, Cricetulus griseus
gggggcggggccgggatggtaacggacaaacccgggagccgcgttcggagagggccgctctgtgaccgctgccgccggcacttgctccgagtggtcctgcggtccacctctgccatgatgctccacggcttccagagcagccaccaggacttctccttcgggccttggaagctgacggcggccaagacccacatcatgaagtctgcggatgtggagaagttagctgatgaattgcatatgccatccctccctgaaatgatgtttggagacaacgttctaaggatccagcatggctctggctttggaattgagttcaatgctactgatgcactaagatgtgtaaacaactaccaagggatgcttaaggtagcttgtgctgaagagtggcaggaaagtaggacggagggtgaacactccaaagaagttcttaaaccatatgattggacctatacaacagattataaaggaacgttacttggagaatctcttaagttaaaggttgtacctacaacagatcatatagatacagagaaattgaaagccagagaacagattaaattttttgaagaagttctcctgtttgaagatgaattacatgatcatggagtttccagcctgagtgtgaaaattagagtaatgccttccagcttttttctgctattgcggtttttcttgagaatcgatggtgtgcttatcagaatgaatgacacaaggctttaccatgaggctgacaagacctacatgttgcgagaatatacatcacgagagagcaaaattgctaatttaatgcacgttccaccttccctcttcacggaacctaatgaaatctctcaatatttaccaatcaaggaggcagtttgtgagaagctagtatttccagaaagagttgattctagccctgcggactcacaaagcacaccctcggaatagaatgtggtacagcctactctccgtgtagagcctgcctggacatcttggctgtttgtagggatatttttattatgagaattaatttccttgcttatgctcagattttctgtggccttaaaggaaaataaaagagtgttacaggcaggttccacttaactcccatttatattgtctgtcttcaagttcctcagcagtgatgtgtatgtgtctcaggaggggggacatgatctgcatccatcatgaagcatcgtcttctactgtgaagaggctaaattgtaaattccatcactgagtcccgatgccttgtgacgtccataggattctgactgcatgttgatgtactgtactggctgggcttggggctggctttctggtgtttattcgcacttctgaagagttgtgacctgtcacctaggaaattaatcttgtattattcattagttccagtttctgggcaacatgattgtgtgtgtttgtacacacatgtatttttaaaacttttcatttaaatgtctttgtctctgagtagtgttagattacttattttgataattcattgttaaaaattgtggagaattaaaagaatttaactttttttttaaaaaaaaaaaaaagaagtgggtgggggaaggatgagtgtgcttctgaggatcttattagtgtgttccggtgaggaatgccaagggaatgtgttggccatttctaaatatgacatgtaccattttatatttatttgtccattgtcttttgtaagaggagaataaataataaggaattatgctcttaacagctgagccatctctacagcccc

SEQ ID NO: 3225 - DNA, 1740 bp, Cricetulus griseus
ctgcagccgccgccgccgccgccgcaggagcgtttgatcgtttgcaatggctttgataacttaaacagcggtttctaccaaacaagttacagcatcgacgagcagtctcagcagtcctatgactatggaggaagtggaggaccctacagcaagcagtatgctggctatgactactcgcagcaaggccgatttgtccctccagacatgatgcaggcacagcagacatacacagggcagatttaccagccaactcaggcctatccttcaactacacctcagccatactatggagacagctttgaggaggagcctcctttattagaagagttgggtatcaattttgatcacatctggcaaaaaacacttacggtgctgcacccccttagagtagctgatggcagcattatgaacgagaccgacctggcagggcccgtggtgttctgccttgcgtttggagccacgctgttactggctggcaaaatccagtttggctatgtctatgggatcagtgcaattggatgtttaggaatgttttgtttgttaaatttaatgagtatgactggtgtctcatttggttgtgtggcaagtgtcctagggtattgtcttcttcccatgatcctgctgtccagctttgcagtggtattttctttacaaggaatggtaggaattcttctcactgcgacaattattggctggtgtagtttttctgcttccaaaatttttatttctgcattagccatggatggacaacaacttttagtggcatacccttgtgctttattgtatggagtctttgccctgatttccgtcttttgaactgatttgtctgggatgtggatatcagtgggccacattcacaaaaaggacctgcgactcttaaaattggaccagcaaactactgcagtgcagctcatgccgattaccagtagcgtggaagcagcacaagtagatgagccttttgttcgtttgtacaggacagctgaacattgtgtggagtcacctggcagatgaccgctctgtgtgtttgttcttatacagctaagaagtgcagtttctttcctgatcctgcagcctttgacaaacagctcttttcctcacaaatgatattatgatgtttttgatagatttttaccaactgggaaaccaactacacagctgataatctttctccaaaacaacccagttacagtaaagaagaaacaagtcttgttgcagaatatttttctggtgaattaggaaagaaaatactcactctgtccttaagttaagtgcactgaagtaaagctgaacaaagcaaaatcccaaagcagagctttctgagtttgcacttcaaatatttgacattcctataaattgtctcatgaaatctgtgctgaaattcagagatacaagcagttcacagcctgtctggtggagatgaaatgtgaacagctgtttagacgttagtgtcaactactctggactggccacatgatgcttagttctggcccacaccgacccaggaagaagaaatcacttaacttttttttttttttttagaaaaaaatatttaaaatttcacaatttcagtattgcagttatcaatgtatagtgaatttgatgcttattaaaattttcccaattaactctgctgtcaagtttatttttactaaactactgttctctgtcttgttttcattagggtttgattttgaatcctgattaaaaaaaagttttaaaaaataaaaagtcatctagtgt

SEQ ID NO: 3226 - DNA, 1740 bp, Cricetulus griseus
cagcactgcacgtctttcctgctggcagggtcatgtggagatggtacgggtgcttattgcctgccatgctgatgtcaatgcagcagacaatgagaagcgctcagccttgcaatctgcggcctggcagggacatgtcaaagtggtccagcttctgatagagcatggcgccgtggtggatcacacgtgcaaccaaggcgccacagccctctgcatcgcggcccaggagggacatgtggacgtggtgcaggtgttgctggagcacggcgctgaccccaatcacgccgaccaatttggacgtactgccatgagagtggcagccaaaaatgggcattctcagatcattaagttgttagaaaaatacggtgcttccagtctgaatggctgctccccttcccctgtccacacaatggagcagaagcctccacagtcagcaccgtccaagatgcagtcactaaccatcaggtccaacagctctgggggtactggtggaggggacttgcagccttccctccggggcctgcccaatgggccagctcatgccttcagctctccatcagagtctccagactcaactgtggaccggcagaagtcatctttgtccaacaattccctgaaaagctccaaaaattcatctctgagaacaacttcctccacagccacagctcaaacggtgcccattgacagctttcacagcctgtcattcacagaacagatccaacagcactcgctgccgagaagcaggagcaggcagtcggtcgtgtccccctcttccacaacccagtccttaggacacagccataattctcccagtagtgagtttgaatggagccaagtaaaaccaagtttgaagtcaacaaaatcaaataaaggaggcaaatcagaaaactctagcaagtctgggtcagctgggaagaaagctaaacaaaacaattcctcacagccaaaggttctagaatatgaaatgactcagtttgacaaaagaggacctgttgctaagtctgggagtagcccacctaaacagacactgggtgaatctcagtgtaagattgtggttccttcatctcaggacggcagccgcgtccagccacagtttctcatccaccagcagagcggggagcaaaagaagaggaatgggataatgacgaaccccaattaccatctgcagagcaaccaggtgttcctgggcagggtctctgtccctcgaacagtgcaggagcgagggcatcaggaggtgctggaggggttccctccctcagagactgagctgaaccttaaacaagccctgaagctccaaattgagggctctgatcccagcttcaactacaagaaagaaacacccttgtgagagtttccccttctgtgaaacagaagacattgtggtcagaatggccatccagctgccagatggaagcaagacacctgaggatgtgctggtcagactgtgactccctcagtactgtttcctgacatactgtcatgtgcctacccagtaaggctgcccttctcagcgtaacccccatgctgacgcagtctccaccacactgaataaatggagatgtaaactgcagttcctcgatacaaccaaacccagttttgagtattttcccatttggtaaatgtgcatgtgccacagtcaggtgtctctgcaaaggcagtgttctgtatttattgttttctgtcgttgtggtgtgtactcagtcccatcgcattgtctggtgttcctggttcttgtgtatttaa

SEQ ID NO: 3227 - DNA, 1740 bp, Cricetulus griseus
ggccggagcttctccaactaccggccgttcgagccccagaccctgggcttcagcccgagctggcggctgacgagcttctccggcatgaagggctgaggctgcaaggtcccccaggagactctgctcaaactcctggagggactgacgcggcccgcgctgcagcccccgctcgcctcgggtctggtcgggggtcaggaagagacggcgcaggaagggggcctggccactaggccggcctccagctcagccctgccctcgctgagcattgggatggactcctgcgtcattcccctgaggcacggcggcctgtcgctggtgcagaccaccgactttttctaccccttagtggaagatccctacatgatggggcgcatagcctgtgccaatgtgctcagtgacctctacgccatgggcatcactgagtgtgacaacatgttgatgctactcagtgtcagccagagcatgagtgaaaaggagcgagagaaggtaacaccgctcatgatcaaaggttttcgcgatgctgccgaggagggaggcacggcggtgacaggtggacagacagtggtcaacccttggattatcatcggtggggttgccactgtggtgtgtcagcaaaacgaattcataatgcccgatagcgcggtggtaggagatgtgctggtgttaaccaaacccttaggaacccaggttgcggccaatgcccaccagtggctggataatccggagaaatggaataaaatcaagatggtggtttccagagaagaggtagagttggcctatcaggaagctatgttcaatatggccactctaaacagaactgcagctggcctgatgcacacatttaatgcccacgcagccacggatatcacaggctttggcattttaggacactctcagaacctggccaaacaacaaaaaaatgaagtgtcctttgtcattcataatctgccaatcattgccaagatggctgccatcagcaaagccagtgggcgctttggcctcctccaaggaacatccgctgaaacctctgggggattactgatttgtctgccaagagaacaggcggcccgcttttgttcagagatcaaatcttcgaagtatggagagggtcaccaagcgtggattgttggcattgtggagaagggaaaccggacagcccgaatcattgacaagcctcgcgttattgaagttctacctcggggagccactgctgccgctgctgcttctgctgggccaggggttgattttaagacctttgcaaaggctccctgcgtagtgccttccaggtttttttttctttgcactgagttgattcatttgtgcacagggagtatgattattaagattacatatggaaaaagtaaactgcaacatgaaattagagtttggaccaatatattgatgtctaaattgttagaactcttactgattcattgtcaaattcgctattaatttttctgacaaaccacctcttttcctattctggacaagaattgagcaacttgtccaactaggaaaggaagactgaagcccccaacttggtctctgttaatgacgtctcttcctctaactccactaaggattggcagagactgaacaaacctcagagccaggtgctggtggtcattaaatcttatactgaaaatttccggagatttagttaatagagaaaatttcttacatctaaataaataaaagggacttcgttaggaaaaaaaaaaaaaaaaaaaaaaaaaaaaa

SEQ ID NO: 3228 - DNA, 1740 bp, Cricetulus griseus
aacacccttaagaagctgaggggcctggtccccaacaccgtgcccagcctcagcaaagccagtggccgcagggttgtgtcccacgaggtggtgctggggggcaaattggcagccaaaaccagcttctcactgagccgccccagcagcccacgggtggaggagctgagagggaacgccctgtacagccgtctcagggagtacctgctcactcaggagcagctcaaggagaatggctaccccttcccccacccagagcgcccagggggcgccgtcatcttcacagctgaggagaagaagcccaaggactcctcctgcagaatttgctgtcgctgtggcacagagtaccttgtgtcctcctcaggccgctgcgtgcgcaatgaggagtgttactaccactggggacggctgcggcggaaccgagtggctgggggctgggagacccagtatatgtgctgctcagctgcagtcggctctgtgggctgtcaggtcgccaagcaacacgtgcaggatggccggaaggagaacctagaaggctttgtgcgcaccttccagaaggagctaccagaagattccccacgccggcgtcttccgcccttgactgtgagatgtcctacactacatatggcctggagctgacccgagtcacagtcgtggacacagatatgcaggtcgtgtacgacacctttgtcaagcctgacaatgaagttgtcgactacaacaccaggttctcaggggtgacagaggccgaccttgtggacacgagtgtcacactgcgggacgtgcaggccgtcttgctgagcatgttcagtgctgacaccatccttatcggacacagcctggagagtgacctgctggccctcaaggttatccatagcacggtggtagacacgtcagtgctgttcccacaccgcctgggtctgccctacaagcgctccctgcggaacctcatggccgactacctcagacagatcatccaagacaatgtggatgggcacagctccagtgaggatgccagcgcctgcatgcaccttgtcatctggaagatccgagaagatgccaagaccaagcgatgaccctcccacctgccaccactaaccataccaaccccttcctacatccctggctgccctcagccctgatgccctcggccctgatgccctcggcctcttttcaaactgtgtaataaaacacaacagctgactgtgcgcctcccgggcttgggctacaggtctggagtggccctgagctggggctgagaccaacccccttccactcctttgtatataatgcaggcgacaggacaagccctcatggtttgagacgggttgtctttttttacttttattacttgtttattttggtattaattttttaattaaacctgctgacctgcacagcccctcaacagaggggtccatccctggtgccgttgggatccaggggctgaaccctacagtcagccctgtgggcctggatgtctgccctgccttgtagggtggcttccagaactcatcccaactcaccaggactccccaacctcagagccaagccagccccaaggcctggccttccaggcctctgggccatcttccatgggggctgctgcctctctccgtgggtaggaaccgaataaatgtttatatgaactttagatttcataatgtgtggtgctttggggaccaggtaggaccctgacacacctccttgtggactctgccccagtggccagggtcaagaaaa

SEQ ID NO: 3229 - DNA, 1740 bp, Cricetulus griseus
  modified_base (1525)..(1525): a, c, t, g, unknown or other
gtgcgttgaagccggagaccgcggcggcctctgctaggaccctccgccccggagcctccggccggagccgcagcctctgccgcagcgtccctgccgcccgtcccctcccctgtcgcctccgccggagccgcctcgcgcactctggggtatggccgtcaatgtgtactccacatctgtgaccagtgagaatctgagtcgccatgatatgcttgcatgggtcaatgactccctgcacctcaactataccaagatcgaacagctctgttcaggggcagcctactgccaattcatggacatgctcttccctggttgtgtacacctgaggaaggtcaagttccaggccaaactagaacacgaatacatccacaacttcaaggtgctgcaagcagctttcaagaagatggggtgtcgacaaaatcattcctgtagagaaattagtgaaaggaaaattccaagataattttgagtttattcagtggtttaagaaattctttgacgcaaactatgatggaaaggattacaaccctctgctggcgcggcagggccaggacgtagcaccacctcctaacccaggtgatcagatcttcaacaaatccaagaaactcattggcacagcagttccgcagaggacgtcccccacaggccccaagaatatgcagacctctggccgactcagcaacgtggctccaccctgcatcctccggaagaatcccccatcagcccgaaatggtggtcatgaggctgatgcccagattcttgagctcaaccagcaactgctggacttgaagctgacggtggatgggctggagaaagaaagagacttctatttcagcaaattgcgtgacatcgagctgatctgccaggaacatgaaagcgaaaacagccctgtcatctcaggcatcattggcattctctatgccaccgaggagggatttgcaccccctgaggacgatgagattgaagaacaccaacaggaagaccaggacgagtactgagggcagcagtcctgactgactgtggcttccctgcccccaccccatgcccaccccagggaggttggggcaggtgagaggatgaggccctgactgggtccctcaagtggcactggcccaggggacttccaggacccctgtccactccccactcctatttatttccgttgtctctatgctgtgttggccaacactttccagggtgcctctgtcacccacaagccagccacctgctcccctgacagccagcagctgtatatttgacaaagtcattggtatatttttacttactggattgtccttgcactttacctgttcttttccagggctgacagcagggcttggggaagtcttcctggcttggctccccttccctctagccaagactggggcaggactcatcaattcttatttattttgtctcttgacttctctcttggtagttgaggggacagctagtgtgagggtggggggcaggggagctgaggaggcagtgctgtgagtccagggagtagaaatgacctcctggcacngggtttacccaccccaaaagaccccctgcctccagcaccaaagcccagcactgccccaaggctccctatccactccctcctgcagcctggttataccacacagactctgcctggcccccattttctgtctgtcccccattctcccacctccccacctttgcccctagggcactagcctgcaaatgtgttcacttttatttaaataaattgtgtgg

SEQ ID NO: 3230 - DNA, 1739 bp, Cricetulus griseus
  modified_base (1694)..(1694): a, c, t, g, unknown or other
  modified_base (1705)..(1705): a, c, t, g, unknown or other
tcgagctgtcgcatccgccttgcgttcgctctccgggtcttgctacctcgcggaggacgctgcacagactttgccgccagtctcctagctctcctctccaagtccgccgcggcgaacatggcctcaggagttcaggttgcagatgaagtatgtcgcattttctatgatatgaaagttcggaaatgctcctcaccggaagaaatcaagaaaagaaagaaggctgtcattttttgtctcagtgcagacaaaaagtgcatagttgttgaagaaggcaaagagatcttggttggagatgttggtgataccataaccgatcctttcaagcattttgtgggaatgcttcctgagaaagattgtcgctacgctttgtacgatgcgagctttgagaccaaggagtccaggaaagaggagctgatgttcttcctgtgggcaccagaacaggcgcctctgaaaagcaaaatgatctatgcaagctcgaaggatgccatcaaaaagaaatttcaaggtataaagcatgaatatcaagcaaatgggccagaagatctcaaccggactagtattgctgaaaaactaggtggctccttaattgtagcctttgaaggatcccctgtgtagatcatcagccagtgccacgaattgaagcttccatgtttaacactatctttcactatatccataaagcaaaaaatattaggccagatctcactgaggggaatttgtcttgtcatcttttagagtaaactaaactaaaaattctatagatgtgtgcaaacaccaccactctacataaatgtagcctctaaagtttcattgatgtggaattaaattcttattggccaaatgcctattttcatgaggtgacatgtaaagattttgttaagcccaggatttttaataacacagttcacaaaatagtacaaggcaatgtgaagcgaactctaatcttcgctaacctcagcagttacttttgtttcttttgcttagaaaactgattgtaatctatgtataattttcatccaaattttctatttttccttgacttaaacagaataatgagatataattttctttataatgtgtacaacactaatttacactaacagcagtaagactaagccaggcagtcttcactctgctggatgtcatgaggctgcttcagaagcgtgtctgcttagaattcacactgatgttgcagagcaccatgcagagcccagtgctggatgcagcaagcagcactgtccctgcagtgagaggctccctcggctgggaaactgcttacggtgactttgtcttagaaatcatggtatatcctcaggagaatgttcaaagtcttgtaacaactaattatattgcaaattagggcttcattgtaatctactttattaatgaaaaatgataaagcagtatattaataagccagggtgctgtcaatctttaatttctccttcagaaccctgctgcatctggtccagcaggatgtagaagagtgtggagtacgtttcctctggggcctggtaggatgcaaacccctacagcagtttaccagctgtgtgtgaaatgggaagcaggtaccagcaggtgacactcacaggggactgctgaacacttggatgtgattgttaacatcacaggcatgacactgaccaatgtagagatgcacaaacagctgaacttagtagcaatgctggctttangtaataaggancatttagaaacacttaaaaaaaaaaaaaaaaaaa

SEQ ID NO: 3231 - DNA, 1739 bp, Cricetulus griseus
caaaacctcatgaaaaaatagggtttcctgcagccagaagatgtcacagttgtgttcaaataaaaaatgatgttttcatttgtgggggctataacggagaagtgatcctgggggacatctggaagctgaatctgcagacttttcagtgggtgaagctccctgctaccatgccagagcccgtttactttcactgtgcagctgtcacacccgccggttgcatgtacattcatggaggagtcgtgaacatccatgaaaacaaacggactgggtcattgtttaagatctggctggtggtacctagcctgctggaactggcatgggagaagctgctcgcggccttccccaacctagcaaacctctcccgaacacagcttctgcaccttggactaacacaggaactcatcgaacgcttgaaatgaggatttctggactgttcattgataactggaaatgttaaatttaaagagactcctttatttatgggcagtgtagagtgtgctacaaagaggattggttacctgatcaatgactgtagataagcccttagagtaaatgggactggattttccctaagggtcaccagcattttagtttctctctaaccagcacttggaatcccgatggcatctcctggcgtgggaaaggctatgatgcctgctgctcctctgcctctttgaggtctgccggccatcttcctgcagtcctgggaatggaagtgcaatatatagaaacatggtctatacagattgtgtagaagtgatgactatatagcaactactctactttctgtacctatcttgggcaagacagctgattgctttagactaaaattatgccaaggattttcagtgtgatcataagccaacttcttggtaaagctggattttttcaagtctacgttttcttattctagttcaataaaaaaggaagattactgttccttggtttgttagagtggccctcccaccaacactctgatgtagcacaaaaagtcattttcccttttgttctttcttgtgttctggtgttggacttgagggttaaatgagggtttattgttatagccatgcatttcaagaactggttactataggtgtaaattccattggtccctaggtaccttagaactctggaagcattggcagggtctgaagcaggctcagtggggttctggaacgtccatgtgtagtcacccttctagtttgtgagatttgcaagaaaaaaaaaaacctttgagaagttttttaaggccccgcctagtctgcacaggctgagtccgaggcagttttctgagaaaaggccagtttcactaagtggcagtaattgctgttgtactcgttaggcatcagggatggagaggaggcatcaggaaacacactgactggtggagtctgcagggagagtgcagacacctcccgggacactggagggacaggctggaaaggaaggccttctctttggagctgctctgaggctgggccaggcttggctcttcccgcaggttgcgaggccatacacagtgcttgccttactttaaagctatttgccacagtcctgttaaatagtgtggatgtccttttgcagtctggtgtgcatgccatgtgatcaggacagcttttccacctcccctggtttcctacaagcaagtaaatctaccctgaaatgtccagtctgtacttattaccttgtcagtgtttgctgttggttttctaaaacaatctgatcaataaatctctaaa

SEQ ID NO: 3232 - DNA, 1739 bp, Cricetulus griseus
gaggacccacttgaggaagaattctcctgtttgtggcaggagtgtggcttttgctctctggacagtcctattgacctcatccgccatgtctacttccactgctaccacaccaagctgaaacagtgggggttgcaagccttgcaaagccaagctgacctcagtccctgcattctggacttccagagccggaacgtgattcctgacatccctgatcatttcctgtgtctatgggaacactgtgagagtaccttcgacaatcctgagtggttctatcggcacgtggatgcgcacagcctgtgctgtgaataccaagctgtcagcaaggacaaccatgtggtgctgtgtggcgtggaaaggctgtacctgtactttcaaggaccggtgtaagcttcgagaactccagtgctctcactgttctaagagattttgccacagagaggctgttgcgtgaccacatgcggaatcatgtgaatcactataaatgccctttgtgtgacatgacctgcccactgccttcctccctccgaaatcacatgcgctttcgacacagtgaggaccggccctttaaatgtgactgttgtgactacagttgcaagaatctgattgacctccggaagcacctggacacccacagcaaggagtcagcctacaggtgtgactttgagaactgcagtttcagtgcccgatctcttagctctatcaagtcccatcaccgcaaagtgcatgaaggagactcagagccaaggtacaaatgtcatgtctgtgacaaatgcttcacacgtggcaacaacctcactgtgcaccttcgcaagaagcaccagttcaagtggccgtcaggacaccctcgttttcggtacaaggagcatgaagatggctacatgcgactacagctagttcgctatgagagtgtggagctcacacagcagctgctgcagcagctacaggaaggatcagatccaggagtagcactgaatgaaggcagcctgcagggcatcgttctagaaacagtgctgggagggccaggacctgaggaagagatggaagaggaagacagggttgagggaacagccatctcggcttctcaggacaaccccagttctgccatccatatggtcaaccagacagtcagccaaggccagcgagaaatggtctactatgtgctatctgaagccccaggagagcccccaccagtctctgaactatcctcaagagagatggaaaaacttcaaggaatgcctgagaagccagagatccagatggtttgaggctgcagagcctgaccacttctccagatcttggagtttgagccaggcaggtagcagctcccccaggtgggcagactttgattttggatgcctttagaagtggtgctgagaacagtatgttcccctgtgactcagggattcattgaagaaatcctacatgtatgttctcattagagggaaatgttaccaggtttaatatactcccttggcatgctagacagagtaaatgtttagtttagtctacattcattcctgttttagggccattggcccagggatgatgagtggctgttccttatgagagctgtctcctcactataagttaagcattgagaaccaggtgccatttctctcaaggtttccttttacattccagggacacttgtggttatcttcagggataggattggagacactgtgtatgtatgacagttgttttttggtaataaagcacttgggctgttaaaaaaaaaa

SEQ ID NO: 3233 - DNA, 1738 bp, Cricetulus griseus
acccgcactgtggccctggccgcgctccgtgaaggtgtccccggagctgctgaacatcgccccggaaaacttccttatctcccacggtccgaattccacggcggacccctcctgctcgctgctgcaggaagcctttcggagatattacaactatatttttggtttctacaagaggcatcatggccctgctaagtttcaaggtggagctcagttagagcaacttcaggtgtcaattaccctccagtcacagtgtgattccttccctactgtgtcctcagatgagtcctattctctacttgtgcagggaccagtggctttcctcaaggctaacagagtttggggagcattacgaggtttagagacatttagccagttagtttaccaagactcttatggggccttcaccatcaacaaatccattattactgactctccaaggtttgcacacagaggaattttaattgatacatccagacactacctgcccgtgaagacaattttaaaaactctagatgccatggcttttaacaagtttaatgttcttcactggcacatagtggacgaccagtcttttccttatcagagtaccgcgttccctgagctaagcaataaaggaagctattctttgtctcatgtctatacaccaagagatgtccaaatggtgcttgaatatgcccggttccaaggaattcgagttataccagaatttgatacccctggacatacacagtcttggggaaaaggtcagaaagaccttctaactccatgttacatcaaaaaaaggaaactgaaagagttggacctataaacccaactctaaatacaacttatacattctttaacacatttttcaatgaaatcagcagtgtgtttccagatgagttcattcatttgggaggagatgaagtagatttccagtgttggtcatcaaatcctaatatccaagatttcatgcagaaaaaggggtttggtaagaactttaaaagactggaatctttctatattaaaaacattttggatattattacatccttgaaaaaaggctccattgtttggcaagaggtttttgatgataaagtagagcttcagccggacacagtggttgaagtgtggaaaaatgaaaattatttggcgaagctagaagaagtcacattttctggcttcaaagcaatcctttctgctccttggtacttagacatcattagctacgggcaagactggaaaaaatactacacagtagagcctcttaaatttgacggttctgtgaagcagaaacaacttgtcattggtggagaagcttgcctatggggagaatacgtggatgcaactaaccttattccaagattatggcctcgggcaagcgctgttggtgagagactctggagtcctgaaactgtcattgacatagatgatgcctacagcagactggtgagacaccgctgcagaatggtcagccgtggaatagctgcacaacctctttttactggacattgtggccattagcataaagtgaaaaagtgaacagaaaaggcttcagcagcttgaactataatcatgttgattttgaaatcatgtaaaactatttgttaggttttgtttttttttttaataaaccatctttttattgattgaacctgttgtatcacaacactcgaatactggcatctattatgtgagcatcttaaaaaataaaaggaaaagctttgtgataccactcaaatattacaaaaaaaaaaaa

SEQ ID NO: 3234 - DNA, 1738 bp, Cricetulus griseus
atttacactggaaagagctatccttgtctcaactgattcacttaatttatataataggtgaaaatcgtcaggtaccacaggacctaatgcaaaaactagaatcactgatccttaagtattttgatctgataaatttagaggaggttggtacaatctgtttggggttttttaaatcaagtagtaatctctctgaatttgtcatgcggaaaattggagatgtagcttgtgctaacatgcagcatctcagcaaccacaccttagttcacattcttaaaatgttccgctttactcatgtagatcatgtgaatttcatgaggcggtttggagaaattgctcctcagcgaatcccttctttgggggttcagggtgttatgcacctcactcttgcctgctccgccttacgcttcctggacgaaagagtaatgaatgcagtagctgcctctttgcctccaagggtaacacactgtcgaagtaaagatgttgccaaaattctgtggtcatttggaaccctgaactataaaccacccaacacagaagaattttattccagtctgataaatgaaatccacagaaagatgcctgaattcaacaagtacccggagcaccttctgacctcccttcttggcttggctttttctgaatactttccgactgagttcatcaatgttgctctaagtccagaatttgtcaggttagctcaagagaatagtaagtttgaactcactaaggaactgtatactcttgatggtacagttgccattgagtgtccagattacgagggcaatcgtcttaattctcaccttcagcaagaggcatctgtaaacctgtggaatttagcacgtaaggatatgaggtcaaagcccgagttcttagaagctctctgtttacttgagaccatcttaggtggcccccagtacatcaagcatcatatgattttgcctcacacccgatcttctgacttagaggttcagcttgatgctaacatgaagccactgccaattaacatcgaagtaacaccaacagatgatgtagcccaattacggtttaagcaggtgggagtcagcctcacagatggtttgatgaaccggttgctaaaggcaaaagccaagaggtctttccagagggaaagtgagttagagactggccagccacctatggagttaagaaagaagacagccggacccttggtggactctgcttgtaatgtgacagacagatcaggggatgtggggatagatggcctgtgccctgtagcccacatgcagcctccactagtgaagctagctattcagttgacaaacaagaaccaatattgctatggtaccagggttctgcttggactgcacaatatgaagaggaggcagctggttcgaattgggtaccgcgtggtagaattatcctactgggaatggcttccactactgaaacggactcgcttagagaagctagcatacctccatgagaaagtattcacctctgctctctgaagtaccttcatgggcatttatgctcataaaagcaataggtgcacactctacacctatagggtgagcatccttagccaggaaatcaaagtcaaaaatgttccaaaatctgatactgagtactgatagatctcagatcagggatattcaagtggtagtccatgcagataccccagacttgaaatctgaaacacctttggtcctaagtatttgatatagagattctcaacctgtcttccaaccaattacaaaag

SEQ ID NO: 3235 - DNA, 1738 bp, Cricetulus griseus
ttttgcacataataaggcggttatttggcagaaaagtagagtacctgaccacaggatggctctcatgtcagttctgggaactgctgtaatgggcaacatggaatctgttgagcaccactgtgaagaatctcagatttacctaagtggattctttccaaagcttgatgcagaccacaattccacaagtctttcaaccccagaaagaagtttcatctttattaatagtcgaccagtacaccagaaagatatactaaagctaatccgacgttattataatctgaagtgcctaaaggaatctactcggttgtatcccattttctttctgaaaattgatgttccttcagctgagctggatgtaaatctaacaccagataagagtcaagtgttattacagaataaggaatctgtttaattgtcttcttagaaaattctgtaatggtgacctgttatggaccactacccagtacagagtctttagtcacccaacccttgaaccaaagaatctcagtgatggtccttgtagcaagccctcaaatgtaatagataacagatctggacagcttacagcctatgacttaattagcagtcgagcagtcaagaagcccatgtcagcacgtgccctgtttcttcaagatcatcgagctcagttcctcgcagagcatcccaagactggtctggaggatgcaacggcacaaattgaagcactgtgggagacattgagtgaggaggagaaactaaaatatgaagaaaaagctaaaaaagacttggaacgatacaataatcaaatgaagaaagctattgaacaggaaccacaagtatcattaaaagatggcagaaaaaagataaaggccaccagtgcgtgggggttgacacaaaaacacaagttgaaagcctcattatctaatcagccaaagcttgaggagctctttcagtcccagaatgaaaaaggaagagtgaaaatattaaaatagctgaggtccccttttctatggaaaacttaaaagtgaattttaagaaacagaagaaagttgacttggaagagaaggatgagatttgcttgatccacagtctcaagtttcctgatgcatggctggtcacatctagaacagatgtcatgttactgaacccatacagagtggaggaagccctgctatttaaaagactccttgagaatcataaactccctgcagagccactggaaaagccaattgtattaacagagagtctttttaatgggtctcattatttagaggtgttacataaaatgtcagcagtcgaccagagatgcagtggatcagcttacctgagtgaccctcgtcttacagcaaatggcttcaagatcaaactgacaccaggagtttccagtactgaaaactacttggaaatagaaggcatggctaagtgtctcccattctatggagtaatggatttaaaggaaattcttaatgccataatagacagaaatgcaaaggagctctacgaatgcaggccacgcaaagtggcgagttatctggagggagaagcagtccggctgtcacgacaattacccatgtacttaccaagagaggacatccaagatcttatctgtaaaatgaagcaccagtttggaaatgatattaaagggtgtgtccatggccgccctttttttcaccatttaacccatcttccagaaacttcatgattaaacttataataattagttactgttgaaattaacgtgggttttaaaccattttgt

SEQ ID NO: 3236 - DNA, 1738 bp, Cricetulus griseus
cagcaggaagtagagaagctggcccgagagaacagcagcatgcggctggagctagcctgcgctccaagtatgaggccctgcagaccttcgcacgcaccgtggccagagggcctgtcacacccaccaaggtggccaccaccagtgtcatcaccatcgtcaaatctgctgagctctcctccacctctgtgcccttctcagctgcttcctagtgcctgccggggcctggcagggcacgggcagtggcacagccctcacgcctatcccgggctccctggcacagattccacatgtccacttgcccactgtggacccgcgcgcggggctggaggcaaggatagcagggacaggcagatgcaggataaaagggaggctctcatgagccagtgccacaagcagccccctctcacatctctccttctcccaggggtgtgtttttagttgctgacaggaaccacacgggccaccaggatgaacaactccaggcccctgtggcagggagtgaggactcatctcccacttctccggtgcctgtctgtcagcaccatcagtgccatcctctaagggcctctagctggggtggataccatactgtcgctttctgggctatggccttcttgtccttatgaaaggacactacaacctgctttagcctttagagccaggtacatgtcctgggaaacgagtcctggccgcccaggcccagcggatgtggaagagacctaagaggcatggtatggagggacaaagggtgcatctggagggccttgtggacacgcctctgtgggtgtcagtgggggcccaagggcagacgataggtgcagatactctgcagctttggtgcccaattgatacctgcctattcctccttcatagggctctgggtcattggccatcttgtgctttcttactgaagtaattatgtcctccagaccctgaggagtagggtgagcagggagtcaggagcaggctaagccaaagccaggcacttagaaagcactgttggaaccatagccttggtaggtaatccatattggatatcaataaggaccatgggatatttaaagagagagaagatatatatatatatatataattatatacacattttatcgtacagatttttcataacaattttctttcccagtttgatactgtagatcttttattaatgcagagtaggttggacagtggggcggggaactacagtggtaggcaggtgaccactggccttgagttgctgccaactcctggcctgtggtggtctcctgggcaaagactccatactgttggccttcaggctcgatgaggctttcaatgccacctggagtacctgtgcaggatacctgcctggagcggggctgggaagggagtgagcttgccccgtggctctatgtcactgaaatttcattgtcacaatttaatatatagatgtttttatttaagataaaacttgttcctccgacttctcaaagcaagctttactttttcaaaaggtgacagggacacatactgaccatgcagaggcttggtgtccccagccacctgctacttggcagtttcatttcaatatttattttttgtgcttcctcccccatgttataaattattgggaaaagatcacagatcacagactgttgatcccttgtctgtgccctgcctcatggccaccacctaatttattgctgtacatgtcgctgtgactgcttttgtatctttgcaataaagaatttcctgtttg

SEQ ID NO: 3237 - DNA, 1738 bp, Cricetulus griseus
  modified_base (113)..(113): a, c, t, g, unknown or other
taccgtaactaatggtgtagtgaaagtacttgtcactgatctatgtgtaccattaagacatatgcttagcataacattggagccttgccgtggaggaggttggtcacctttgngtttctgccatctgctagacatgttgttctttacttaaagagtgtgcttaagtgtctttttctggtgtatgtgggccctttttaattctgctgatgtaacttggatttgcatattttctacccacttttctgtctcatcattgccatttgttcctgggtaggcttcagaatttggaggaggtcaggcccttataggtgctatgctcctagcagggccagtgggtgtgactgagaaaggcaggttggctgtagcaggaaagagctgtttacttcttgaagtagctgtatgggcttcatgcttcttggataaatagagatacataggtacatttctgaccagtactttatcctgaaagtggtgcagaaagctggtgttgacccaggttgcacagcaggatatgctctcttcctgttgacccatgaccaagagaaatccagagaaacagcaagacagtgcagagtacttcacccactgcagtaacaaaggataaggtgtagattgtaggtagagatgatgtcaaaaaaggaacagttgcagcactgtgtgtgataccctcaggcatggtgaggccttgaagtgtttccccttttcaagggaggctgtttggtgagatggaacaagcactttggaaacattctcagccctctttatatgacaacttcgtcctcacagtgactaattcattggagtggctctcatgatgcccaccatcatttgtcactaccaaaggctgtgatgaaataggccatatatctgatgacataggcctgcatagccagcattttgaacatttttgttgcatggaacattttctgtagtatggtataaaaaggccagaggattaaattatgcacaaaatatgaaataaagaagacctgtaagcatgcaccctgtcctcacttagtggatgtatgggcagaattgccagtaacagagtttttttggtgctatttctatgtctttaattctgatgcattatataggaagtagctgttgcatacaactttgaggtttcctctgtctatgactgaagtgggttcctcataagagataacccattccagacccctttcccattgtgtagtaggtcccagcaattcttagtgctctctggttggacctgcatctcagattctgctacttttgtcacatggtcaccttgtgtttcctttttataagcacaccagtgtcaaacaaaggtggctatttggtaatacaaaaacattttgttcagtatttagtgatggaaagagccaatctgcagagatagtcatagaacagcatgaggattttaggtatggagctgtggccaacatcatggagagaggaagagtttttttattttattttgtttagatttatttatttatttttatctcagcacagggatactgtgtttactgatggctgagcttgtctgacatgacatcaggattcctctgccaatattttccacagacatcatctgtcaccataattggtgacttatagaagttattatattaatgtactaggaataatagtacaaaaatcttattttagaactatactatttttttggtgctgaggatggaacccagggtcttgcacatgctaagcatgcataccaccactgagctacaat

SEQ ID NO: 3238 - DNA, 1738 bp, Cricetulus griseus
ccgactcccgaaaggtgctgggcggatccggggcggcggagggcgagcggctgcagcggcggtagcggcggaggcagcggtagcggcggcgggaggcaggatgagcgcacgcggtgaaggcgcggggcagccgtccacatcagcccagggacaacctgccgccccagcgccacagaagcgaggacgcggccgacccaggaagcagcagcaagagaggagactgaagagacatcctcgcaagagtctgcagaggaggattagagggcccgaaattcgtatttctacctcagcatcagttggatcttttcgaagggagaagacactgcagtgaccacttactctctactgccatggtctttctactttcctgcggggtggggcaaggggcgggatgggcaaggggcgggggcggggagggagaaatcacataaccttgagaaggactatattaatcactttctttgtaatcccttcacagtcccaggtttagtgaaaaactgctgtaaacacgggggacacagtttaacaatgcaacttttaatgactgttttctttttccttaacctactaatagtttgtggatctgataagcaagggtgggtggctgagaaaaactctgtgttgggcttaatcagtcactacatccaaaccctaacaggtcaccctggtgaccagggcattcgtataagaaaagcattgtatgtgactctgtgcagcacccccagatgccaccctactctgatcatagtgaatcttctgcttaggacaccaaagataagaattagatactactctcctttgtgtataatcttgtagacacttacttgatttttttgttttttactttttaattctaaacgatacaaatggtgtatctatcttttcattcagccagcaaaccagaattagattatgctcattttttagactgcagtaccacttacctcagatgaagcctgtgtgttacttcaagtaatacattttgttttgacataagatggtcggccgaggtgcattgtcttggttcggtctgccatctctgcattcaagctgcacttttagccagagatgcaataattccccactactcaatactacctctgaatgctacagtgaatttacagtcctgcacttgttaacacgctgctaaactgagcactgcaagagacttttgcaaaaatgaatgaattaaaatcaagccaaccttcaaagaaacttgaaactttgtaggggagctacaaacagctcagcttgtgcctaatgcaatcagaaaataaaataggtttttaagattagttgcctataagaataatgcttgacagatattttcatgtatgttacacaatgtgagttctgtaaaatgtctcaagcagatttattctgagcgcttctcgtgtagagtttttgtgcctttctttcctagcgagggcgttgacttttctcacggtgttatccactgggccaggaggtagttccccatgatggcttctgttcatgtgacttttaatacttaagccaaatgaaacaaacaaacaacttcggatgggccttttagaagcctcgttggccagctcataaatctgaagcagtttctcatattggccaggctcggcacacgagcgatgtccatctctaatgaagttactcttaatttcctgtatgttgtacaatcaaacacactgctacctcttaagtcccagtatacctcattttcatactagaaaaaaaagaaaaaaaa

SEQ ID NO: 3239 - DNA, 1738 bp, Cricetulus griseus
ggtcgagactggagatggactcagcggaagagacagcctgacagttacttcaacgtcctcaatgctttcctcgacaggaaggacagctactactccatccaccagatagcgcaaatgggagttggcgaaggcaagtctataggccagtggtacgggccgaacactgttgcccaggtcctcaagaagcttgctgtattcgacacgtggagttctttggctgttcacatagcaatggacaacactgtggtgatggaggagatcagaaggttgtgcagggccagccttccctgtgcaggggctgctgcatttcccacagactcagagcggcactgtaatgggttccctgctggagctgaagtcgccaacaggccattggcctggagacctcttgtgctcctcattcctctccgcctgggacttacagacatcaatgaggcctatgtggagacgctgaagcactgtttcatgatgccccagtccctgggtgttatcggagggaagcccaacagtgcccactactttattggctatgtgggtgaggagctcatctatctggacccccatactacgcagcccgcagtggagctgactgacagctgctttatccctgatgagagcttccactgccaacaccccccctgcaggatgggcatcggagagctcgacccatccattgctgtgggatttttctgtgagactgaggaagactttaatgattggtgtcaacaagtcaaaaagctatccctgcttggtggtgccctgcccatgtttgagctggtggaacagcagccttcccatctggtctgccaggatgtcctaaacctgtccctagattcttctgatgtagagaggctggagaggttctttgactctgaagatgaagactttgaaatcttaaccctctgaaagtcctggggttggggaatggcctccatggccctcattggggtgctttgagaacccagactgccttgggcactcagtgtccccgcattccatccacccagcccacccctgccgagtgctgtgcgcctgtgccacctctgtccagagggcctgctctgctcatggaccaaggactgcggtgcttggaggccttactgcttggagtcagactgcctaaccccaaacacaccaagggcctgtccacataagaaggcctagtcaggaagagccgcgggtcaggagcttccagagttcgtacagagagacagccacagcatggcctcattccgctgggcagggtgagctctgggctgtctcctccacccagtgtgattatcaagggctacctcagtgggagaacatatggaaagaactacagcaaggctgctacttgctttggagagaaagtattccagtggggaatgcggaaaacccaaagaagacagtgtgtgggcagtgtggacacctgagccatggggcagctgacaagctcccagggcatctggagccgtggtcctaaggttccccattaggacctcactagggaagaggtttgtttcctgtaaggggctgatgcattttccagtcacactgcctgctgctgttagctttccaccttaggagggcttccccctgggaggagaagaggggagcagagctactcttcgcttgtgacactgtgcctgctggtggtagggtgcacactgctacttgagcctaacatgttcttgcccttctcagaaaccctccagggtaacagaattttagatggtttggggccagaaatgctaaa

SEQ ID NO: 3240 - DNA, 1738 bp, Cricetulus griseus
  modified_base (20)..(20): a, c, t, g, unknown or other
  modified_base (106)..(106): a, c, t, g, unknown or other
ctttctctgacggacttgcngaaaaatgaaactctggccacctgattagtctgatggggcagtccagctcaggcacctctccaataacctggagactctcctcaancgggacttcctcaaactccttcccctggagctcagttttatttgttaaaatggctcgatcctcagactttactcacatgctgcctggtctctaagcagtggaataaggtgataagtgcctgtacagaggtgtggcagactgcctgtaaaaatttgggctggcagatagatgattctgttcaggacgcactgcactggaagaaggtttacttgaaggctatcttgaggatgaagcagctggaggaccatgaagcctttgagacctcatcactaattggacatagtgccagagtgtatgcactttactacagagatggacttctctgcacagggtcagacgacttgtctgcaaagctgtgggatgtaagcacagggcagtgtgtttacggcatccagacccacacttgtgcagctgtgaagttcgatgaacagaagcttgtgacaggctcctttgacaacaccgtggcctgctgggaatggagttctggagccaggacacagcatttccgggggcacacgggggcggtgttcagtgtggactacagtgatgaactggatattttggtgagtggctctgcggacttcgctgtgaaagtatgggctttatctgctgggacatgcctgaacacactcactgggcatactgaatgggtcaccaaggtggttttgcagaagtgcaaagtcaagtctctcttgcacagccctggagactacatcctcttaagtgccgataaatatgagatcaagatttggccaattgggagagaaatcaactgtaagtgtttaaagaccttgtccgtttctgaggatagaagtatctgcctgcagccaagacttcattttgatggaaaatacattgtctgtagttcagcgcttggtctgtaccagtgggactttgccagttatgatattctcagggtcatcaagacacctgaggtagcaaacttggctttgcttggctttggagatgtctttgccctgctgtttgacaaccactacctgtacatcatggacttgaggacagagagcgtgattagccgctggcctctgccagagtacaggaaatcaaagagaggctccagcttcctggcgggcgaagcgtcctggctaaatggactggatgggcacaatgacacaggcttagtctttgccaccagcatgcctgaccacagtattcacctggtcttgtggaaggagcacggctgacaccgacagctaccaccgctgactttgggtgccaggactgagggttttgggtgcaacgtctgtggcagccaactgcatgaaccaaagttctcacctaaaggtatcatcacgcagtgcacaatcatttatctgtttgccaggggtcagggctggggcgggagggcttgttttactgacatacaccgcagcatgctactgaggtacaccagtgacttactttatttgtacttagttacgttggtcaggtaagtatgaggttgcatttttggatttatctttctgagtggaatatggagtaaaaagaagttaaatgattcattaatctgctaagtggttgcgtataaaataacatggagtctgttattaaagctttttcccatagtctttgtttgaattttgaagcaaaaaggtgctgtgatgttatagc

SEQ ID NO: 3241 - DNA, 1737 bp, Cricetulus griseus
  modified_base (346)..(346): a, c, t, g, unknown or other
tattgggtttgggtgactcagaatacacatacttctgcaatggagggaaagtaattgataaacgactccaggagctcggagcccagcacttctacgacactggacatgcggacgactgtgtaggtttagagctcgttgtagagccgtggattgctggactctgggccgccctcacaaaacactttaagtcgctcagaggacaagatggaatgagtgacacactcccaccgccatcagatgcccccttgaacactcctgtgaagccggagttgctacacatccagtcacaagttgaacttctgcgattagaggatggtgggagagaaaggattctgaggggggggancacaatgaagctaacaggagtcagaggagagatttgattgaagactttgagtcctcgctcgtccgctcagttcccccatctcacacacctctactaagtattcccactttgccgccagaatatttggaggtccatcttgaggagcctcttggccaggaggaaagccaaacatctgtgacttcagtggatccagtttttcaagttccaatttcaaaagctgttcagctgactacaaatgatgccataaagaccacactgctgttggaattggacatttcaaaaatcgagttttctcatcagcctggagattccttcaatgtgatctgtccaaacagtgactctgaggtagaaaacctgcttcaaaggctacagctggctgataaacaagcataccatgtcatcgtgagaattaagacggacactaagaagaaaggagctgctgtgccccagcatgtgcccgaggggctgttctctccctgaaaagcggaggctgcaagagctatgcagtaaacaaggggcgagctgattacaaccgcttcatccgagatgccagcgtctgcctgctggacctcctcctcgccttcccgtcctgttgtcctccactcagcctcctgcttgagcaccttcccaaactccagcctcgaccatactcatgtgctagctcgagcttactccatccagacaagcttcattttgtgtttaacatcatagaatgtccatctaacaccacagtggccacgctgcggaagggggtgtgcacaggctggttggccacattggttgccccgtttcttcagccaaacacagaagctttgcacgcaggcagtcctgatgccctggctcctaagatatccatctctcctcgagcaacacattctttccacttaccagaagacccttcggcccccatcataatggtgggtccaggaactggcgtagcccccttcattggcttcctccagcacagagagaaactccaagaacaacacccacatggaaattttggagccatgtggctgttttttggctgcagacataaggacagagactatttgttcagagaggagctcaggcgtttcctcaagattgggattttgactcatctgaaggtctctttctcaagagatgtcccagcggagggggaggaggccccagcaaagtatgtgcaagacaacctgcagcgtcacagccagcaggtggccagggtcctcctccaggagaacggctacatatacgtgtgtggagatgccaagaatatggctaaagatgtgaacgacgcccttgtagacatcataagcagagaggctggagttaacacactagaagccatgaaaacactggccacgttgaaacaagagagacgataccttcaggacatttggtcataaact

SEQ ID NO: 3242 - DNA, 1737 bp, Cricetulus griseus
taactttttttttctttcattcaacacagatgtatactcagagagtgcagcaaatcttagcttcccatgaccccacaaaacctatatttttatatattgcctaccaagctgtccactcaccactgcaagcccctggcaggtattttgaacactaccgatctattgtcaacatcaacaggaggaggtatgcagccatgctctcctgcttggatgaagcaatccacaatgtgaccctagctctgaagaggtatggtttcataacaatagtattatcatatattcctcagataatggtggacagcccatggcaggaggaagtaactggcctctcagaggcagcaaaggaacatattgggaaggggcatccgggcagttggtttgtgcacagcccacttctgaaaaacagggaacagtgtgcaaggaacttgtgcacatcacagattggtaccccaccctaatttcgctggctgaagggcagattgatgaagacattcagctagatggatatgatatctgggagaccataagtgaaggtcttcgctcaccccgagtggatattctgcacaacattgaccccatttacaccaaggcaaaaaatggctcctgggcagcaggttatggaatctggaacacggcaatccagtcagccatccgcgtgcaacactggaagctgctcacgggaaatcctggctacagtgactgggtcccccctcaggctttcagcaatctgggcccaaaccgatggcacaatgagaggattaccttgtcaactggcaaaagtatctggcttttcaacatcacggctgatccatacgagagggtggacctatctggccggtatcctggcatcgtgaagaagctgctgaggagactgtcacagttcaacaagaccgcagtgcctgtcaggtaccccccgaaggatcccagaagcaaccctaggctcaatggaggagtctggggcccatggtataaagaggaaaacaagaaaaagaagacaaacaaaactaaggctgagaaaaagcaaaagaaaagtaaacctgggacgaggaaacagctgacagtgcactcttcaacaaaatgccacccaagtgttaccactggctaaatgcaagactttctgacttggttaaatataaatagcctggtttctaggtaattcggagaatttgcctcagaagtaccactgccagctgcctcgggcttattttcactttgctctctgccagccactcctggcatctggctgccacgtggaccaaaccaccctcctgagtgccaaaggtgatgctcctgcaggccacacagggaggagagggtaacatgattaaagacgactattgatacagtcaaagactgtgttacctcaaaagcctaaaagcaatatttccaaatgaaaattttatctgtaacatatgcaacttgggcttttagactaattcaattttgtgttgtctttgtctcttcgctgagaaaaagctgtttttcataggtggacagcttacacctcatcttatcgtgcttaaaggaagagaagataatgtctgagcattgccaagaatgaatgtaaccacgtcccagacacattaatagaacaataattttagtagaacatgcctaatttatttttcaaaaaagttatgaaaatgattttaattattttatttttggtttctaagtaagaattttatttcagttccttaaagttactaagcactgtaatgtcataaatgactgtaa

SEQ ID NO: 3243 - DNA, 1737 bp, Cricetulus griseus
tagattaccttgatggtgttcatacagtgtttggtgaagtgacagaaggcatggacatagttaagaaaatcaatgagacgtttgtagacaaggattttgttccatatcaagatatcaggataaatcatacagtgattttagatgatccatttgatgaccctcctgatttactaattcctgatcgatcaccagaacctacaagggaacaattagatagtggtcggataggagcagatgaggaaattgatgacttcaaaggaagaccagctgaagaagtagaagaaataaaggcagagaaagaggactaaaactcaagctattcttctagagatggtgggagacctacccgatgcagataattaaacctccagaaaatgtgttgtttgtgtgtaaattgaatccagtgaccacagatgaggacctggagataatattctcaagatttgggccaataagaagttgtgaagttattcgagattggaaaacaggagaatccctgtgttatgcttttattgaatttgaaaaggaagaagactgtgagaaagctttcttcaaaatggataatgtactcatagatgacaggagaatacatgtggattttagccagtctgttgcaaaggttaaatggaaagggaaaggtgggaaatacaccaagagtgatttcaaggaatatgaaaaggaacaagataaaccatccaatttggttttgaaagaaaaagtaaagccaaaacaggatgcaaaatatgatcttatattagatgagcaggcagaagactcaaaatcaagtcactcacacacaagtaaaaaacacaaaaagaaaacacgtcactgttctgaagaaaaagatgatgaggaatacatgccaatcaaaaatcctaatcaggatatctacagggaaatgggttttggccattatgaagatgaagaaagctgttgggagaaacagaagagtgaaaagagagaccgacgtcagaaccgcagtcggagccgatctcgagaaagggacggtcactatagtagcagccacaaacccaagtaccagacagatccttatgaaagggaaaggagtagaaagagagaccgaagcagaagtccaaagaaatccaaagacaaagaaaaatctaagtacagatgagctggacgaggtggaaatgaatggctagcaggtctgctcctgccttacctggagcactttttgtactaaattttattgttatgcatacatggtagcattctatatttaacatctttcatattttcagtcctttttaaatgaagcatttcataccacagatatctgtaaattgtatataagaaataaatagtaagttgtatacctggctgtagtaagagatggagtgtcactcactatggaagttccatatgtcccttccccctccaggaattatcattctgagttgtgtttgcctgctgttaattttatatagttttgaattttatataaatgatatgatatatgtttatttctgtgacttttttaaagagttgattgatttttttttattaggtagttgtaatgaatatgaagcagttgatctgttgatgaggttttgagtttttgctagtttttgctaatctaagcagtgccactgtgaacgttttgtctgggcgtggtactatctagccatattgtttgaattttcaatgcatttataattatggttgcttagtttatctagtatgtggatgtgtatgggagcaggggtagccacaaga

SEQ ID NO: 3244 - DNA, 1737 bp, Cricetulus griseus
gacccgctgtctgcttttgtcaccttcgccttctaacccgtagctaccatgcgtgagtgcatctccatccacgttggccaggctggtgtccagatcggcaatgcctgctgggagctctactgcctggaacatggcatccagcctgacggccagatgccaagtgacaagaccatcgggggaggagatgactccttcaacaccttcttcagtgagacaggcgctggcaagcatgtgccccgggccgtgttcgtagacctggaacccacagtcatcgatgaagttcgcactggtacctaccgccagctcttccaccctgagcagctcatcacaggcaaggaagatgctgccaataactatgcccgtggccactacaccatcggcaaggagatcattgatcttgtcttggacagaattcgcaagctggctgaccagtgcacaggtcttcagggcttcttggttttccacagctttggtgggggaactggctctgggttcacctccctgctgatggagcggctctctgtcgattatggaaagaagtccaagctggagttctccatctacccagccccccaggtttccactgctgtggttgagccctacaactccatcctcaccacccacaccaccctggagcactctgattgtgccttcatggtagacaacgaggccatctatgacatctgtcgtagaaacctcgacattgagcgccccacctacactaaccttaaccgcctcattagccagattgtgtcttccatcactgcttccctcagatttgatggagccctgaatgttgacctgacagaattccagaccaacctggtaccctaccctcgcatccatttccctctggccacatatgcccctgtcatctctgctgagaaagcctaccatgagcagctttctgtagcagagatcaccaatgcctgctttgagccagccaatcagatggtgaaatgtgaccctcgccatggtaaatacatggcttgctgcctgctgtaccgtggggatgtggttcccaaagatgtcaatgctgccattgccaccatcaagaccaagcgcagcatccagtttgtggactggtgtcccactggcttcaaggttggcattaattaccagcctcccactgtggtacctggtggagacctggctaaggtccagagagctgtgtgcatgctgagcaacaccacagccatcgctgaggcctgggctcgcctagatcacaagtttgatctgatgtatgccaagcgtgcctttgtgcactggtacgtgggtgagggcatggaggagggggagttctctgaggcccgtgaggacatggctgccctagagaaggattatgaggaggtgggtgtggattctgttgaaggagagggtgaggaagaaggagaagaatactaatctattctttctgccccctggatcatgtcaaactcctagaacttcagcttcaacattagctgataggcattcattctgtgatcatgtatttgttctgtggccctcgtatggtctttccatgatgtctcaaagtaaaaagctttaagaaaaaaaaaaaaaaaaaaaaaaaaaaaaaaaaaaaaaaaaaaaaaaaaaaaaaaaaaaaaaaaaaaaaaaaaaaaaaaaaaaaaaaaaaaaaaaaaaaaaaaaaaaaaaaaaaaaaaaaaaaaaaaaaaaaaaaaaaaaaaaaaaaaaaaaaaaaaaaaaaaaaaaaaaaaaaaaaaaaaaaaaaaa

SEQ ID NO: 3245 - DNA, 1736 bp, Cricetulus griseus
gaatcaaacagtgcagacttaatttgtctctagaaagactgtcctgctgcttgaaatgctttctatttagaataggaacaaaaatggaaaaagaaaaagtaagggatgatgaaaaaccagacccagaaaactctttggattttttctgaagagttttaatcaacttgaattgttggagacccatggacacctgattcccactggtactcagagtctctgggtaggcgattctgatgaagatgaggagcaagaggaaaaacaagaagagtggtatcaattgcaagaagaaaaaaataggaaaaagaataccaagcaaattgcttcttttgggtcgtgctagaaaaaaatacggcttgctaccgtgcagaggctgctctctgagaaggccactgaagtgaacactagggatgaggatgagtatacacctcttcaccgagcagcctacagtggacacttagacattgttcgtgagctggtggctcacggggcagatgttcatgcagtgactgtggatggctggacaccactgcacagtgcttgtaagtggaacaacaccagggtggcctctttcttacttcagcacgatgcagacatcaacgcccaaacaaaaggcctcttgacccctgtgcaccttgctgctgggaacagagacagtaaggacaccctggaactcctcctcatgaatcgctacatcaaaccaagggactgaagaacaactcacaggaaactgctttcgatattgccaggaggacaagcatctatcactacctctttgaaatcgtggaaggctgtactaactcttcacctccgtcttaatggctctagtaattttctcaagcttcagagtaccagtgcctcctatgtatgagatgtaaaatagccccatatacagagcagacgtctcattacaggactgtagtatgaatcacagtgttctcccaagtgacctgcttaatcttgatgtcaaatgtatttgagaggtgtttgaatgcatctgtggtgaatgctgcagagcttgtgatttttctcagaagtaattttaactggacacgggtaatacagaagctaagggtattttttggtgctgatccaagagaaaagtatttttaaatatcccacactctgggtctttgttcagtgtttagtgtagtgatgtgtatttttatgagctaactccaaattttcatcgtcaacatactggtgcagtttggctgtcttctctgcatctccagttgcttttgttctaaacaagaaacactaacaaatcagtgacgtacatctttgtaagtttaaaaaatgtggaatgtttggatgtttggtaagatgtaggccattctgaagaaagcagttagggagatgtttaagccttgaatgttttacactgcctcccccaccacattcctcataatcctgtggacagtcctacctcacccaggtcaacccatgtgaaccttcttgctatggccagtcagtgtctcctcttagacatgcacaaaactgtaccttggtccaagagattaaaactgccctccacagggttcacctgtctctctccctgctggattgggcactactcatgagttccaggaaatgtccaccaccacccccacagccctcattttctacaagccatgacaaaggcaaagggacaaggaattgtaacagtgaggaatgattatcatatgggaccagaacaacaagtggctcaggctttcttacaaaacaacaacaaaaac

SEQ ID NO: 3246 - DNA, 1736 bp, Cricetulus griseus
gcattgtgggaagggcagccggtgctgccgcagctgccatctttagggactccgggccgggcctgctaggcctttacggcggaggcggccgtgtgcgcggcgggtgcgctcgggggcgaggcggagggttccgtgggcggggggccgagcttcccggcggcgaagggcggcctgcggcgggcagagggtgacaggcggcgggcgccgcgccgcgcgaggatgggccggtcgcggagccggagctcgtcccgctccaagcacaccaagagctccaaacacaacaagaagcgcagccgctcgcgctcgcgctcgcgggacaaggagcgggtgcggaagcgctccaagtcccgggagagcaaacggaaccggcggcgggagtcgcgctcgcgctcgcgctccaccaacgcggcggcgtcccggcgcgagcgggagcgcgcctcgtccccgcccgaccgcatcgacatcttcgggcgcacggtgagcaagcgcagcagcctggacgagaagcagaagcgggaggaggaggagaagaaggcggagttcgagcggcagcgaaaaattcggcagcaggaaatagaagaaaaactcattgaggaagaaacagcacgaagagtggaagaattggtagcaaagagggtagaagaagaattggagaaaaggaaggatgaaattgagcgagaagtcctccgaagggtggaagaagccaaacgcatcatggaaaagcagttgctcgaagaactcgagcgacagagacaagctgagcttgcagcacaaaaagctagagaggaggaagagcgagcaaagcgtgaggaactggagcggatattagaagaaaataaccggaaaatcgcagaagcacaggccaaactggccgaagaacaattgagaattgttgaagaacaaagaaagattcatgaggaaaggatgaaactagaacaagaacgacaacgccaacaaaaagaagagcaaaaaattatcctgggcaaggggaagtccaggccaaaactgtccttctcattaaaaacccaggattgaatggcagactctgaactttttacaaagaaaaatgaaaaaacttcgtattgtagcttcatgttgaagtggtttttttgtttttgtttttttttttttttttttttttttttttttttaatttggaaagtctggaaagttagcttgttctaataggggctatgctctgcaatccctttatttttccctcttttcctcccattacgtcaaatccttatcagatcattgctgtcttctagaagtggtgtatttttcacctgttgggattctgtattggttgatggtctgctgaagagcaggtcacttgatgaatagcttggtctggtaaggtgttcactgaccactgactttggggttatactctgtttactacgtcataatgctggttttgctgactttttgttttttatacatttataaaaaaagaaaaagttggtaattgcattgcaaaattcccagggttttgctggacctgtgtggtgttgttacagcagtgtccttgtgatactgtggctcttggtgttcctgataacaggtaaggataacagtttgtcacctgctacagaagtacccacagtgcagtatggtctctgtcggacttttgtttctttcattgacaaaatcaaaccagcattccccactgtaaataaatgattttgctgaataaagtgaagtcttaaattcaaaaaaaaaaaaaaaaaaaa

SEQ ID NO: 3247 - DNA, 1736 bp, Cricetulus griseus
ggtcatcatcagaaaagctaagtttgctacacaataaggatcaggagatctgaccctggttgcagaaccattcctgtttgcagaatacagggttgtattcccacttcatctttccagaccatctgggaaattactaggagtccttggaagggaaagaaggaagattgttggttggaataaaaacagggttgaatgagttccagaaagcaggcttctcaaactcgtggacaacaatctgctgaagaagacaactttaagaagccaactcgaagcaacatgcagagaagtaagatgaggggagctgcctcaggaaagaagtcggctggttcacagccaaagaatcttgaaccagccctcccaggaagatggggcggtcgctctgctgagaaccccccttctggttctgcgcggaagaccaggaagaacaagcagaagattcctggcaacggagatggtggcagtaccagcgaagtgccccagccccccggaagaaacgggcacgggctgaccccactgtggagagtgaggaagcattcaagaatagaatggaagtgaaagtgaagattcccgaagagctaaaaccatggctggtggaggactgggacttggttaccaggcagaagcagttgttccagctccctgctaaaaagaatgtagatgccattcttgaggagtatgccaattgtaagaaatcacagggaaacgttgataataaggagtatgcggttaatgaagttgtgggagggataaaagagtatttcaatgtgatgctgggcactcagctgctctacaagtttgagcggccccaatatgccgaaatccttctggcacacccagatgcgccaatgtcgcagatctatggggcgccacacctactgagattatttgtgagaattggggcaatgttggcctatacgccccttgatgagaaaagcctggcattattgttgggctatttgcatgatttccttaaatatctggcaaagaattctgcctctctgttcactgccagtgattacaaagtggcttctgctgactaccatcgcaaagccctgtgaaggtctactgaccactcactatcgtctggtatctgtaaacacttctgtttagtcctttcattgtataattgatgttctttacaactgtcgatgtaaaacagggcttatgtttcagtttgtttcctgttctgttgtaaacagaaaataaaaggagtgcccagctcctttcctcatttcaaagttgctaccagtgtatgcagtaattagacaaagaagaaattcagtagaacattttattgcctagttgacaacattgcttgaatgctggtggttctatccctttgacactacacggttttctaatatgtgttaatgctacgtgataagatgccctggttcctagtgccaaaggttcaacttaatgtatatacctgaaatcccatgcatttgtgctttttttttttttatggtgcttgacgtaaacagcccatcctctgcaagtccatctttgttccttaggcattcattctatctttgctcaaattgttgaaggatggtgatttgtttcttggtttttgtatttgagtctcatgcacgttctaacatgatagaggcaatgcattattgtgtagccacagttttctgaaaagttgatattttaggaattgtatttcagatcttaaataaaacttgtttctaaatttcaaagcaaaaaaaaaaaaaaaaaaaaaaaaaaaa

SEQ ID NO: 3248 - DNA, 1736 bp, Cricetulus griseus
gcccgccccgccgcgccggccgctgtcagaggtcgcagtgtatgctgagcagctgttgtcgccggctgctgcacgtcctggtcccgagcttcccgccgctgatccgtggcctgcggctctgtcctggccacctcatgaagccgttggtcgtgttcgttttgggtgggcccggtgcgggcaaggggacccagtgcgcgcgcattgtcgagaaatatggctacacacacctttctgctggagagcttcttcgtgatgaaaggaagaatccagattcacagtatggtgaacttattgaaaagtacattaaagaaggaaagattgtgccagttgagataaccatcagcttactaaagagggaaatggaccaaacaatggctgccaatgctcagaagaataaattcttgattgatggatttccaagaaatcaagataaccttcaaggttggaacaagaccatggatgggaaggcggatgtatcttttgttttgttttttgactgtgataatgagatctgtattgaacgatgtcttgaaaggggaaaaagcagtggcaggagtgatgacaacagagagagcttggaaaagagaattcaaacttatcttcagtcaacaaaaccgattattgacttatatgaagaaatggggaaagtcaagaaaatagatgcttctaagtctgttgatgaagtttttggtgaagttacgaagatttttgacaaagaagggtaactaaccctgaaaaaacatctttgaaatcatgcttgaatattgctttgatagctgctgtcacagcccccttttaaggcaattttaatctttcaaaattacatctcaattaatgtctagaaatatatagtaagacaaattatgtgttatttttaatttgtggtcacagtacacagtgaattcaggtttaatcatctttggtattatggtgctcacaaaatgaagagggtatcagctagttcttgtttgtattaaaaactaccccttttatcccttttatgtttgtgccttctgtgagcaaaattttttagcatgcatgcgtatcccttttgtaattgcaatgtgttaggatttgggaattcttccttttgctgcacatttaagattttcagcctgttaagtaaatctgtggaccaaatttaaaggaactttatgtctagtcaactcttgcacaagtaaacaaactcataaaatggattcctagcaatgttctagtatttatcaaatgactgaccattttctgttgaaagttaaaacttaggcatcgatttgttacagcttgtgcaaagttgtatgacagggcacagtctttgctctcaaggtttgggtcaggggacagggacttcagagcctgacaggattgtcagctttcttctgacatattctgtggggcaagggtctaatgacttgtgttcctatgctctgtgacatagggctagtcatcattaaactgatgttaacacagttcctagtaggagacccctgacacgcacgtgctagtttatgttaatgtgtttcagttcttgttttaataacacttcaagagttttttgttttctttcttagactaaatacagagttaaaataaattagaaaaagcaatctagtggttaaaattcccatttgtattttattttctggaatatgttgttttcattgttacttgttttaaaagattttaaaaatcattgcactttggtcagaaaaataataaatatatcttaataaatagtt

SEQ ID NO: 3249 - DNA, 1736 bp, Cricetulus griseus
tatgagaaatgagtgttggacgtcgaagaataaagttgttgggtatcctgatgatggcaaatgtcttcatttatttgattgtggaagtctccaaaaatagtagccaagaaaaaaattggaaaggggggagtaataatacccaaagaaaagttctggaagatattcagcccttcccgggcgtactggaacagagagcaagagaaactgaacaagtggtacaatcccattctgaacaggctggccaaccagacaggggatttgtattcgtctccaaatataagtcatctgggctattgtgaacctgacccaagggtcatgacagctgtgacagattttaataacctgccggacagatttaaagacttcctcttgtatttgagatgccgaaattactcactgcttatagatcaaccgaagaaatgcgcaaagaaacccttcttactgctggcgattaagtccctcattccacattttgccagaaggcaagcaattcgggaatcttggggcagagaaaccaatgtggggaaccagacagtagtgagagtcttcttgttgggcaagacgccccccgaggacaaccaccctgacctttcagacatgctgaagtttgagagtgagaggcaccaggacattctcatgtggaactatagagacactttcttcaacctgtctctgaaggaggtgctgtttctccggtgggtgagcacttcctgtccagatgcggagtttgttttcaaaggcgatgatgatgtgtttgtgaatactcaccacatcctgaattacttgaatagcttatccaagaacaaagccaaagatttgtttataggtgacgtgatccacaatgctgggcctcatcgggataagaaactgaagtactacatcccagaagtcttctatactggggtctacccaccgtatgcaggaggaggtgggttcctgtactccggagccctggccctgagactgtacaatataactgaccgggtccacctctatcccatagatgatgtttatactggaatgtgccttcagaaactgggccttgttcccgagaaacacaaaggcttcaggacatttgatattgaagagaaaaataaaaaaaataatttgttcatatgtagatctaatgttagtgcatagcagaaaacctcaagagatgattgatatttggtctcagttgcagagtcctaatttaaaatgctaacgtgcactggagctgcatttcacaaaaaggcctatcctgcctagttcccatgttgtgctttcacagtagggtgacttctgtatgaagccatcagccttgatgaggtagcatctgaaccctgagccctcagttccacacttttgtggccaggggaaaagctgaagataattcaccatggtcagatgattggttctgacccttcctctggctgccagtcctcagttcctaatttgtggtttgtcagtttaaaactccaggattctattcttgccatattatctatcagatgttgcttagctgaagcttttctgagtagtgatgcttccctgtctcagtgtagaagtacctgtgtttttatttattgttcagatcaaagaccaaaacattttcttaagaatattttgtgtaatattttatttgtatacagtgttgtttgtgaaatatttaactagagcatgatattttattttttctcatttttaattttttgagaatttcatacaatgtgttttgatccatattcgcctcccca

SEQ ID NO: 3250 - DNA, 1735 bp, Cricetulus griseus
gatgctggaagccatgacggagcccagtcccgaagatccacctccgactctcaagccagagactcagccaccggagaaacggcggagaacaattgaggatttcaacaaattctgcagttttgtcttggcttatgcaggttacatccctcctagcaaagaggaaagtgattggccagcttctggctctagctcgccattgcggggtgagagtgcagcagacagtgatggctgggactcagccccctcggaccttcgaactatccagacttttgttaagaaagcaaagtcatcaaagagaagggcagctcaagcaggtcctacccagccaggacccccaaggtccactttttctcgcctacaggcccctgacagtgccactctgcttgagaagatgaagctcaaggactctctgtttgacctggatgggcccaaagtggcgtctccactgtctcccacatccctgacgcatacctcccggtcccctgctgctctcaccccagtgccactttcccagggggacctttcccagcctcgaaagaaggaccgaaagaacagaaagttgggaccaggaggtgggactggctttggggtgcttcggaggcctcgaccggcccctggggatggggaaaaacggtctcgaatcaagaagagcaagaagcggaagttgaaaaaggcagatcgtggggatagactcccacctcctggccctcctagggcacctcccagtgatacagactctgaagaggaggaggaagaggaggaggaggaggatgaagaagaaataacacaagcagtggggggtgaagtcccagtttctgtgctcccaacaccccctgaagcccccaggccccccgttacagtccaccctgaaggtgttccccctactgacagtgaaggcaaggaggtgggtagcacagaaaccagccaagatggagatgccagctccagtgaaggcgagatgcgggtcatggatgaggacatcatggtggaatcaggtgatgactcatgggatctgatcacgtgttactgcagaaagccctttgctgggcggcccatgatcgagtgcagcctgtgtgggacgtggatccacctctcctgtgctaagataaagaagaccaatgttcctgacttcttttattgccagaaatgcaaggaacttcggccagaggcccggcggttagggggtctccccaaatcgggagaaccttgacatcactcttgaggctggaacttgtgactttacttgggaactgaggctcagagtcttcagcctaattcccgagggagacttgtttggaattgagtgtcttgtacgctgtccttcctgctccatggacttgaattagacccattacatctgggtcaggggaggctggatctgtagacaagtctctgtccagtcaacctaccaccctttgactttcagggccagggctcaaactgggatgtaatgggatagttgtctataaaattgtagtgtaaatacagcactccctcatgttttcttctctctcactcccatttgctttcttctacaccggttgtttttaattttgggctcccatgtttgagcaaagtggttgctcaaaggcggagtaccatagctggtggagtgggggagaaaagcaaaaaggtgtcaattatcactagcctcatttttaataatattggctggctgcttgtacagacagccagcgtgttgtaaataaagcagagtgggctcttgtgttttaca

SEQ ID NO: 3251 - DNA, 1735 bp, Cricetulus griseus
ggcggcgacaccgcgcgcgcggattgggccctcgcggctgccgtagtgaggacggccgcggacgccgggtcgggggcacacggaggtccggaggtcccggccctcgccggcggcggagcaccagtgagcgggatcgcgggcgacgcgcggagccggcgcggtcatggccgactactggaaatcacaaccaaagaaattctgtgactactgcaagtgctggatagcagacaacaggcctagtgttgaatttcatgagagagggaagaatcacaaggaaaatgtggccaggaggatcagtgagattaaacagaaaagcttggataaggcaaaggaagaagaaaaggcatccaaggagtttgctgcgatggaggcagctgccctgaaggcataccaagaggatctgaaacgccttggcttagagtcagacattccagagccgagtatatcaccagtgacaagcactgtccagcccacttctacatcagatcaaccaaaagagaagaaaaagaaggaaaagaagaagaaagacccttccaagggtagatgggtagaaggtgtaacggctgatggccactgttactactatgacctcatcacaggagcatctcagtgggagaagccagaaggatttcaagggaacttaaaaaagacagcagcaaaggctgtttgggtggagggtttaagtgaagacggttacacctattattataatacagaaacaggagaatccaaatgggaaaagccagatgatttcattccacacactggtgatgtgccttctagtaaggacaaggaaaagtcacctgagtccctagaagaatccaagtcatcagattctcacagcgactctgatggcgaacagaagaaaccaggagaggcttctgcagaaacaaagaaactggtaatcaagtttaaggaaaaaataaaagtactgagaaaagaactgacccagaaatacaaaaagaaaaaagtaccccaaaacagaatccatcaaccacaaatgaagaaaaatccaaacctcttaagaaactgacgaacccttatggagaatggcaagaaattaaacaagaggcggagtctcaggaagaggtcgacttggaacttccaagcactgaaagtgaatatctgtcagctccagaagctgctgctggagaaatcaaagtggtatttaaagaaaaaactgtctcttctctgggagttgcagcagatggggtggctccagtcttcaaaaagagaaaaattgaaaatgggagatctcggaatttaagacagcgaggtgatgatgaatgactgggaagctgctgcagtttacatttatgctaaatgtatcttatgggaatcaaataaatctttcttcatgtgaaatttatttttgttcctcaaacgaagcctaccacattgcattgtaatacagtgtattatgttcaatgtctaaaattgctaattatatgataatttaagatgctatgtatctgttatttaaacatggggaagacccttgctctgttcttactcgtatgagcatacttgtcctgcattgaaaatgctattaacagtcctttcccagacaggcctccttttcatagccctggatcccttggaaggtcaacctaaggtaatggaaacaaaaggcttgaactaaaacaggtttcatggttcacttagatgtttcccattttctggttacatttcttaagtagtaaatttcatattctatttaaagtacctcccttta

SEQ ID NO: 3252 - DNA, 1735 bp, Cricetulus griseus
gaaaagcagaggaagtggaaacgctatctcctgataggcctggccacagtcggaggcggggcagtgattggtgtgactggggggctagctgccccccttgttgctgcaggagctgccacaatcatcggcagcgctggggcagccgccttgggctccgtggctggcatagcagtcatgacctcactgttcggtgcagccggagctggcctgacaggatacaaggatgaagaagcgagttggggccattgaggagttcatgttcctgcctctgacagaaggcaggcagctgcacatcaccatcgccatcactggctggcttgggtccggcatttaccgcacattcagcgccccgtggacggctctagcccgcagccaggagcagtactgcttggcctgggaagccaagtacctgatggagctgggcaatgccctggagaccatcctcagtggcctcgctaacatggtggcccaggaggctctcaagtacaccgtgctctccggtatcgtggctgccctgacttggccggcttccctcctcagtgttgccaatgtcatcgacaatccctggggcgtatgtcttcaccggtcggcagaggttggcaagcacctggcacacatcctcctctcacggcagcagggccggagacctgtcaccttgattgggttcagcctgggagccagagtcatctacttctgtctccaagagatggcccaggaagaagattgccaagggatcatcgaggatgtggttcttctgggtgcaccagtagaaggggaccccaagtactgggaaccattccggaaggtggtgtctggaagaatcgtcaatggctactgcaggggagactggttgctgagcttcgtgtaccgcacgtcttccgtgcagctccgggtggcaggcctccagcccgtgctgctgcaggaccggaggatggagaacgtagacctgtcctcagtggtcaacgggcacttggactatgccaagcaaatggatgtcatcctcaagactgtgggcatccgaaccaagccaggctggggtgagaaaggtttcccactggctcctggcagcctgccccaagaagagcctctccagacagccgcagtttccacagatgagacgatccaccaggatgggcaaacccagggacctgatccaggagacagtctcaaaactgccataccttccagtgccaggcaagcccagatgccaacagagctgaaccaatccacagaaaccttgctccctactgctgccagtccagcagagggacccctgatctgcagccatggtgtgagttctaacccactgggctgccctgactgcacacaagggacccaggagtcctgtgcggaactggactgaccccagcaggagcctggactatctctccagacttctgtacacaactctctctaacacttctgagctcctcgggatgttctggaagtgtgaaatttccacaagtgccttccttaaacagaaagggcctagagtagagagccatggaggaaacacttgctccctgagggaacactggtcatgtgacctacaacatcaacccagctccaggtcagtataggctcctgccctgcaggtcccatctagaggcccaggagtcactgtggaactggaggttcccctctgcccctctctttctccaacttcagcggaaccaagtgtcttcccaatctttatcaactctccaggctgctcaccagccccaggccctaccag

SEQ ID NO: 3253 - DNA, 1735 bp, Cricetulus griseus
  modified_base (1720)..(1720): a, c, t, g, unknown or other
tgcggagcgcagtgctttcttccttcggcagccgaggctgcggcgggccgggctggggtcgggaccaggaggaattttgttgtcagagactaacaggaggttgtccataattgactttaagcagcaaacagtaaaaccctgagctcttcagctccgcctttcttgctctgagaagtggaaaaccaagaaggtttgatgttttgtgtggcgcctcctgaattagaaaccaagatgaacataaccaaggagtctggtattgttttcagcaaattccaattcgtcgtgtatggagctttcaaagaaaattgctgagcgggctgggggtggagatgggcaaagtgcaggtttaccaggaacctaacagagaaacaagagtccaaattcaagagtctgtgagaggaaaagatgtatttatcatccagaccatctcaaaggatgtgaacaccaccatcatggagctcctgatcatggtgtatgcatgtaagacctcatgtgccaagagcatcatcggagtgatcccctactttccttatagcaagcagtgcaagatgagaaaaaggggctccattgtctctaaattgctggcttccatgatgtgcaaagctggtctaactcatctcatcactatggatttacaccagaaagaaatccagggcttctttaatattccagtggataatttaagagcctcccccttcctgttacagtatattcaagaagagatcccggattataggaacgcagtcatcgtggccaagtctccagcctcagcaaaaagggcacagtcctacgccgagagactgcgactgggaattgcagtgatccatggagaagcacaggatgctgagtctgacttggtggatggccggcactccccacccatggtcaggagtgtagctgccatccatcccagcctggagctgccattgatgatggccaaagagaagccaccaatcacagtggttggagacgtcggaggacggattgcaatcatagtggatgacattattgacgatgtggagagctttgtggctgctgcagagatcctgaaagagagaggcgcatacaagatctatgttatggctacacacggcatcctgtccgctgaagccccccgtctgattgaggagtcctccattgatgaggtggtggtgacaaacaccatcccacatgaaatccagaagctccaatgccccaagatcaaaaccgtggacatcagcatgatcctctcagaagccatccgccgcattcacaatggagagtccatgtcctaccttttcagaaacataggcttagatgactgaattgttctcctgtggcagaactcccacaggtctagtgggaagcccagcatgcatgctgggagggtccatgcctggccaggcactccttccctctccacaccttcctgagtgattcctgtgaaggtacaaggaccaactttttaatgtcggtttaggtttttgtgagtttggggggtaatttttataacagaaagacctcttaaataaagtaagttaaaacctgatcatttttagtataaccattttaaggaatacacttgaatgaggtttttaagctcattcctttttttaaagttgcttgattcccagtgttacaaaaaagttaaataaaatgacctgctgtctgctgtctacagtcaaaagctgctgttggttccaatacgtgactatttttagaaattggtttaataaatggnatatagagtatgtgg

SEQ ID NO: 3254 - DNA, 1734 bp, Cricetulus griseus
gtgcgcagttcctggtcgtttgccggtgctcccggggcccagaggctgtggatggcagaagcccagagtgggactggccagctacaggagcaaaagaaaggtctcctgatagctgtcagtgcttcagtggacaaaattatctcgcattttggggctgctcggaacttggttcagaaggcccagttgggggatagtcggctgagcccggatgtggggcatctggtgctgaccaccctctgcccggccctccatgctctggtggctgatggactgaagccattccggaaggacctcatcactgggcagcgcaggagcagcccttggagtgtggtggaggcatctgtgaagccaggttcctgcacacattcgatgggatccctgtacagccaggtcagccgactggccccgctcagtagcagccgcagccgcttccacgctttcatcttggggctcctcaacaccaaacagttggagctgtggttttccagcctccaggaggacgcaggcctactctccctcctatatctgcccactggattcttctccctggcgtgtggtagctgtccatccctgtccacagagctgctacttctgttgcagccactgtcggtgctcaccttccacctggacttgctttttgagcaccaccaccacctgcctctgggcctgcagcaggctcctgccccgttggggccgcctcctgccctccagcagactgtgcaggccgtgctgcagtgggggggccgcttagctcagagtctccgagggacttcaggagaggtcactacagactcttccgccccggcaacccgccctccaccaggcagctggtgggatcagctgacccaggcttctcgggtctacgcctctggcggcactgagggcttccctcttctccgctggggacccaggcgtcatggagctactgctgagggtgcgcgggagacgcctccacgcacagaaccaaccacaccaggcaaaagcgtgtggttggggcggctatttggtgtgcctgggggcccctcagaaactgagacgggagccttcaagtccaggagaccatccagctggttgcccccaacagtgagtgtgttggctctggtgaagagggggacatctcctgaggcccctcctgaggagcctgtggactcgccaggcagcagggtgcaggctgacagggcagtccgggctctctgtgaccacactgccgcaggacctgaccagttgagcttccagcgtggggaagtgcttcatgtcattgccacagtggatgaagactggcttcgctgtgggcgtgatggtgtggaggggctggtgccagtaggatacacctcccttgttctctagctctggacctgtttccttttcctacctggaaggtgaaagctgctcttgcaaacatgtacgaaaggatttcctgtctacagggctcccttgtcctcctccatctgccccaagagagcatcacccttctcatctgcaaattagcatctgtccccctctaccttcacccaagtggactgtgccggtatagtacatgcctctgcccccaagcccacaggactgtggtctcctgtctgtccttagcccttgttgcctgtatttaagatgtactcctgctgtgtgaagtgctagagggaagcctggacacccctggtgggtgggcctctggcattggtctctctccttccttccttgtcccaataaaatgtgggagttagaaaaaaaaaaaaa

SEQ ID NO: 3255 - DNA, 1734 bp, Cricetulus griseus
gtgacttctgatgactttgcaaataacattgtgcgctaccatgctgagaagatactcccaaggatgcagcagtgattcagtaaaagcagcagacgtgttttgtgtttatctgggtgaccctgacaagagcaatgcctccaggcaggtgttacgctgcccattcagctcaggcttccagggaacaccttcgtacagtaaagaaagaagaggaggaagatggctatactttggttcggacgccccggccacagacacttaaccgccctggccaggagctattccgtcagctctttaggcagcttcgctaccatgagtcttctgggcccctggaaactctgaggcggctccaggagctctgccgctggtggatgaggcctgatgtcttccaaagcacagatgatggagctgctggtgctggagcagctcctgagcatcctgcctgcggagctgcgcatgtgggtacagctgcactgccctgagagtggcgcggaggtggtggctctgctggaagagttgcagagggatcatcatggaataccactgaaggaccccatgcctttctcagaaccctgatgtgcattggataggcaccggagctctgcagtctgcacagatatggtcccctcgcacaagaacagttctgctccaaaggaccatctggagcctccacataaaataggcgtttgtaacttcctgcctgggcaagatgattctcctactgtctcagtgcctacccatttccagacagaagagagcacaggataccaggaagctttgactttccaggatgtgacggtgaccttctcgaaggaagaggtgggggtatttggactcagctcagcgtgtaaatactgttggcagaatgttccgaattcgctcattccttctcattcatctgagagttcacactagagagaagccctatcagtgcaaggagtgtgggaaagccttccgatggagttccaatctctcccgacatgagaggaaacactctttgcaacagcagtgtgattaccatgaaaatagagagacttcaaagctagaatcaaaaatcctcactggtcagaagaagcccttttggtgtcaagaatgtgggaaaacctttacacgtaaaagaagccttttagatcataagggaatacacagtggagagaaacgctttaagtgcaacctgtgtgaaaaatcttttgacagaaactatcgtcttgttaatcatcagaggatccatgctacagagaagccccataaagggcgtgagaacccttctgacaagagttccaggttcattgcactccagaaagtacccactaagaaaggctgccacaaatgcaatatttgtgagaaaacgtttggcaagcattcacatctcattagccacaggagatttcataccagagagaggcccttcaaatgcaaagtgtgcggaagaccttcaggtggtcttccaatttgactcgtattttaagtgagccttgatcagatgcgttggggatacttttaaaacggcttgagtcaagcactggatgaaagtcatactccaaagtgcacaattgctgggtaggagcccagctacggacagttttgagcagtacagtactggatgacagcttctgattgtcttggcaacggtgtctaatcttgaacttggtgtgggaagctcaggcttcagtcgacatggtctttccactgcttaaggaactgaagttgtggatggggagagacagaggggctgag

SEQ ID NO: 3256 - DNA, 1733 bp, Cricetulus griseus
aaaatttccccccctcctgtgtcctcttcacccccttcttttgggggccccgtgaccctaaatgtggggggaacactatattccaccacattggagaccctgacacgcttcccagactccatgctgggggccatgtttagggctgacacccttatcccagccagtctccaacccgcaaggagatggccactacttcatcgacagagatggcaaggctttccggcatatcctcaatttcctgaggctcggccgtctggacctgccccgtgggtatggagaaactgcacttcttaaggcagaggctgacttctaccagatccggcccctcctggatgcccttcgggaactggaagcttctcggggtacccctacacccagagctgccctgctccatgcagatgtagatgtcaacccccgcctggtgcacttctctgctcggaaggggcccacaccactatgagctgagctctgtccagggtggacaccttccgagccaacctcttctgtaccgacctgagtgtctgggtgccatgcgcagccgatttggtgtggccagtggggacagggcagagggaggtccacattttcgtctagagtgggcctcccgcccccgggaactcccagaagtggagtatgaaagactggggctgcaaccgctgtggactggggggccggaagatcggagagaggtggcaaacgcgcctaccttcctggaggaggtcctgcgggtggctctggaacatggcttccgcctggactctgtcttcccagaccctgaagacctgctgaactctagatctttgcgctttgtccgccactgagaatgctacccttcacttgactgtgtagaagagaaagaatgctgctgcgtcagccaaggggctgatggctctcccgaagactctagttctggtgtgggagctatgagaggcagggatcccacctgactggagcctagatggactctgggattcccaaatcgagctgtcccgattcccaggactcaagagtggtccagacgatctacactggggcttatcctgggaaagcatccgtgaattctcgagcctgctcttgcttgaggatgggtcctctgtgtttaggggtgtggaaaaataaggaagcacctctgccctgggtaaactcagcagaactctggaggtttgagcagtagggggaagacatactttgaattatcaaaatgtagatctgttccctagacttgccaggcaatgtatctgactgatgcttggatccctgtcatcttggttcccatcagtgttgctgactcttgtgtttatgtgatggtccttctgtgatcttggcatgcccaggcctgtttgaggttgcttagcaactctttaggctcaggtatctctgtggtatgtgtgagagcagattgagatttagtttaatcatagggtgtgtgtgtgtgtgtttgcgtgtgtgtgtgtgtgtttgcgtgtgtgtttatgcccacaccactatgtaggcaggaggggcttgtttgagtttgagtcaccaggcttttcctatgataggtaaaagccactgggcttagctgggcctctgagacctctgggagctcttggttgctgagacaaccatgagcttgttgctaggaaatagctgggtaaggcctaaggctgtcctgggcagagacgagacagagttgggagagtgggagaggatgtgggaagggatagcatttctgggtccctgagtggatggga

SEQ ID NO: 3257 - DNA, 1732 bp, Cricetulus griseus
tcttcatcgctgtgggtgtggtgtgcgctctgctagtagtcctgctgatggcagccctctacctcctccggatcaaacagaggaaagccaaggggtcaacttcttccacaaggttgcacgagcccgagaagaatgccagggaataacccagatccaggacacaaatgacatcaatgacatcacatatgcagacctgaatctgcctaaagagaagaagcctgcccccagggtccctgagcccaacaaccacacagaatatgcgagcattgagacaggcaaactgcctaggccagaggatacccagctcaccatctccacccaacttgagctgtggggcaagaattcctttagatcagactgccccgtccatggaagaactacatcaggagacagcaagtttcagccaacagcgctggcctcccacctgccaggctgactagcccccggggagacggaaccctctctcctagaccagcagactccctgggcatgttcagtgtggccccgcctcctttccagtcccagcttgcttcctccagctagcactaactcagcagcaatacgctctgtggacacctgtaaattattgagaaatgtgaactgtgcagtcttgaagctaaggtgttagaaaatttgatttgtgctgtttcgttgttgttggttcatttttttttctttttctttattttattttattttttcatgtgttgaatggttgggtcttgtgaagtctgaggtctaacagtttcttgtcctggaaggattttcttacagcagaaaccgatttttccaaatcccaaaaacccgaagaacaaaaaggaaccctcagcagctactacttcaaggcactcagcctcactgggacgaaccgggcccggttcttacacagccacgtgactggctggccttttctttgcctccatggctgctgtggtaagtgcagccttgtctgacccaatgctgacctaatgttagccgttccatgttgaagggagaaggtcagtgacaacctccttcactcataaacacctcagaggcatgcagagagaaaggacgctcggccagcagccggcgtttagcactctgaggtgatccattattgccagaaaacctcagcagggtcaccctgggacagaacctggtcataactgaccacacagctgtgagccagggcaaacccctctgtcactggctagcaaatctaggcagaggctctgtctgacccacacccttcaaactggatgccggggcctggctggacccatggcaaatggatgttacaacctggccatctggtcttaacatgtagctcagtaagttgagaccctaatgtctctgatccctggggattcctggctcggttattcaagtaagaaactgagccaacctgcctggttctataggtgcaacagagggggaatgtcaggaacacagcgccatcttcttgggctgtcttctaattccaaagggttggtttgtaaacctccatccctttcccctctgcctagagacagcacacatgagagtacacacaggtgtatagaccagttgaaaggacagcctctcactgacatcagattttgtcttaagtttttttggagggagaaagggaatgaggcagggaaggtgtatagctatagctttagtggggcagcctgaagggccccaaatgtatgtatggaatcctggtagaaggaagaggcgaaaaacgccctgtgagaggagtgggatt

SEQ ID NO: 3258 - DNA, 1732 bp, Cricetulus griseus
attcacagtctgagaacgaggcttcacctgtgaaacggccgagactactagagggcactgagcggcctgaggagagcagccggtcgaagcagaagagtcggcgtaggtgcttccagtgccagaccaagctggagctggtgcagcaggaactgggatcctgtcgctgtggttacgtgttctgtatgttacaccgtctccctgagcagcatgactgtacgttcgaccacatgggccgcggccgtgaggaagccatcatgaaaatggtgaaactggaccggaaagtggggcgctcctgccagcgcatcggggaggggtgctcctgaaggccaagcagggccaccacacgacgctgttcttagttcactaatgttagccttatttaggacaaagtcagccagacaccttgtactgggcacgcgtcagactacagccggccgtttcctttctttagccagccatcctggtactgtagtttaggggttgatggtggatgaaattgatttctggctggttactaaggtgcctgctagccattgtataaaattaaaacatgaagaatattttttttgagcatggctagtggatttaaaacaacacatacctgtcactgctggagtccaacttacaaaagccttaagcggaaagtgtccagaccggactgagtcactagaggaggcacaggcctcagccacgcaggaggctttgacaggaactcttcgtgtccggcctttcacctcttcacttttgcttggtcccagcaggacctgatggccatgtgtgccttggccacgggaggctgctgagactggccacgtggctgggctgggcagtggcctcgctctccctcagtgctggaagtgggggtggggaccgattctaatggaggaagctttttacctgatgtaatggggaaactcgtcacacaagaagacaacttcactttaaaattagctccactcaagattagtccacgcatgctccccaccttttctgcacaggatccgtggccatgacccactggctctggctgcaacttgacaagggcaagagtgttgctcatggcagccctgtggctgaggcctgcacctgggccttggcaaccagatttctgcatttggagtttcatctgcaagtagtgtctcaatccaaaataccgaataggaaatcatgttcttcccaccctatatccactctgcacccgtcagatgggacccactgcacaatctccagccttaattcttgcttcaggacccagaccaccgcgcctcactctagggcagcccagggctcaggggctaggtctgcccagcgtttaccactgttgtcaagccacagccctctggccgcatggccatcctcagcgaggcgccacatgtccttcttagcccctcaggtccccgcagcactgggagggggtgctggggaccttgcacccagggatcacagccaggttcaagcctcctgggagcactggggagggaggaagggcttgttccctgcagtgtctgttctgtgaagtttgttacatgtaagggaagcggaaattcttgtatctttaaagaggaaatcttatttaacccgttgtgccctagattgacttacacacatagcctagagctcagttttagtttaacattgtgaaaatattaaaagaatcttgtaactttattctttttttctcctgctgaaaaaaattaaaccaatcgtacagacaaaaaaaaaaaaaaaaaaa

SEQ ID NO: 3259 - DNA, 1732 bp, Cricetulus griseus
catttggagcttctaaattagcactgaccctgagttctaaggctccaagcacaatgactcaagcagaaattaaactgtgttctttattgctgcaagagcattttggtgagattgtagaaaaattggagtccacctaatcagaactggcagccagcctcttagagtaattgcccatgacacggaaacatcactggatcaggtgaaaaaagctctttgtgtcctcatccaccataacctcgtgatctatcgtgtgcataaacgcagtgttgtggagtatgaagcccagtgtagccgggtattgcgaatgcttaggtatcctcggtacatctatactaccaaaacgctgtacagtgacactggagagctgattgttgaagagctcctgttgaatggcaaaatgacaatgtcagctgttgtgaagaaagtagcagatcgactcacagagaccatggaggatggcaagaccatggactatgctgaggtatcaaatgcatttgtgcgactggcagatactcacttcgtacagcgctgtcccctggttcctgccactggcgattctgaccctgggccaccaccacctgccccaacccttgtcattaatgaaaaggacatgtacctagttcctaaactgagcttgataggaaaaggtaagaggaggagatcatctgacgaagatgcttctggagagcccaaggccaagaaaccaaaacacacagataacaaagagcccattccagacgatgggatttattggcaagtcaaccttgacagattccaccagcacttccgtgaccaagcaattgtgagcgcagttgcaaaccgaatggaccagacaagtagcgagattgtgcggacaatgctccggatgagtgagataaccactccctcgggtgccccatttacccagcccctgtcctccaatgagatcttcaggtccctgcctggcagctataacatctctaagcaagtccttgatcagtacctcacactgctggctgatgacccactagagtttattggaaagtctggcgacagtggtggaggaatgtatgtcatcaacctccataaggcattggcctccctagccaccgcgactctggagtctgtcatccaggagagattcgggtctcgctgtgccagaatattccgtctggtattgcagaagaaacacctggagcagaagcaggtggaggactttgccatgattcctgcaaaggaggcaaaggatatgctgtataagatgctctcagagaacttcatatcactccaggaaattcctaaaaccccagaccacgccccatccaggaccttctatctgtacacggtgaatgtactgtcggctgccaggatgctgttgcacaggtgctataagagcatagccaacttgatagaaaggcggcaatttgaaacgaaagagaacaagcggctactagaaaagtctcagcgggtagaagcgatcattgcatcaatgcaggccacgggtgcagaggaggtgcagcttcaggagatagaggagatgatcacagcccctgagcgccagcagctggagactctgaaacgcaacgttaacaagttggatgccagtgagatccaggtagatgaaaccatcttcttgctggagtcatacatcgagagcaccatgaagagacagtaacccagaagaaagcagtgttgggatctatctttcacatactagtcacctgctgtaccactgagttatatccccaaccag

SEQ ID NO: 3260 - DNA, 1731 bp, Cricetulus griseus
ctggaccagctgcagggcctgcaactcagcctgggctctacagctacataagagatgatctgttcacctcagagatctttaaactggagctgcaaaatgtgcctcgccatgccagcttcagtgatgtccggcgctttttgggccgttttggtctacaatcccacaaaatcaaactctttggacaaccaccatgtgcctttgtaacatttcgcagcgctgctgaacgagacaaggccttgcgagtgctgcacggcgctctctggaaaggccgcccactcagcgtgcgcctggctcgacccaaggctgaccccatggctagaaagaggcggcaggaaggtgatggtgagccatcagttacacagattgccgacgtggtgacccctctttggacagtaccctactccgagcagctggagcagaagcggcaggaatgtgaacgggtgctgcagaaactggccaaggaaattgggagcactaaccgtgccctgctaccctggctgctcactcagagacaacgacacaataaggcttgttgcccactggagggggtcaggccatcaccccagcagactgaatatcgtaataagtgtgagtttctggtcggagttgggatagatggagaagacaacactgttggctgccggtttggcaagtacaagggtggaacttgtgctgtggcagccccctttgacactgtgcacattccagaggccactaagcaggtggtgaaggccttccaggaattcattcggtccaccccatacttggcatatgaccccgagacatatacaggccactggaaacagctgactgttcgtaccagccgcagaggccaggccatggccattgtctacttccacccccagaaactgagctcagaggagatggcagggctgaaggcctccctggtataccatttcatggaaggaccaggcaaggccagtggagtgacttgcctctactttgtagaggagggacagaggaagactcccagccaggaaggcctgcccctggagcatatggctggtgaccagtgcatccaggaggacctgctgggactgaccttccgcatctcccctcatgcattcttccaggtaaacacacctgcagctgaggtgctctacacagtcatccaagaatgggctcagctggatgggagcagtactgtgctggatgtgtgctgtggcactggcaccataggcctggccctggcccggaaggtgaagagagtagttgggattgagctgtgccaggaagctgtggaggatgcccgtgtgaatgccctcaccaatgagttgagcaatgttgagttccactgcggcagagctgaggatcttgtgccaggcttggtgagcaggctgtcctcccagcaacttgtagctatcctagacccgccacgggctggcctacattccaaggtgatactggccattcgtagagctgagaacatcaagcgacttctgtatgtttcctgcaatccccgggcagccatgggcaactttgtggacctctgtagggccccatctaaccgagtaaaaggcatcccattccatccagtcaaggctgtggccgtggacctgttcccacagactccacactgcgaaatgctcatcctgtttgaaaggatggaacaacatcctaatggcattggaaccctggggcatcaagactctccaactacaagagatcttcttgatagcacgccactggaaacagagactgctctctcat

SEQ ID NO: 3261 - DNA, 1731 bp, Cricetulus griseus
cagaacacaacaaatacccttgagaagtcagatggtctctttgcccaggacagagatccaaggttttcagaaatctatcccaacatcagtgcagatcagagtaaaggcatctcctccagcactgtccctgctacccaacagctattctcccagggcaactccattccctcctaacccccggccggcagaaaatttcaggaatagtggtctgacccctcctgtaaccattgtccagccatcatcttctgcagggcagatgttggcccagatttctcgtcactccaactctacccagggagcagctccaacttggacccctagtacccgtccaggcttctctgcacaggtgcccacacaggctacagccaagactcgttcttcccagtttggtgtgagcaactttcagacttcctcctcattcagtgctatgtctctcccgggtgctcccacggcaccacagggtacttctgcctaccctactctcaccaaccgtggatccaactttccttctgaaactgcaggacagactgcaggacaattccagtcccggacagcagagggtgtgggtgtctggccacagtggcagggccagcagccccatcatcggtccagttctaacgagcaacatgttcagcagacatcagcacaaccgcctagccagcctgaggtttttcaggaaatgctgtccatgctgggagaccagagcaacagctacaacaatgaagaatttcctgatctaactatgttcccccccttttcagaatagaattattggggtgaggataagggtgggggaaaaaatacactgtttgtttttaaaagtcaaatcttttgtaaacagaataaaagttcctctacccttcccttccctcacccccgatatgtacccccttcaccccttgactctgaagtaacatttatagaagaaatggactgaattcccagacttttaggtcttctgaaaatctgaggacaggtgaggttagaagtcctgtttatgtcttcttaccagaagtgtcacagaaatgacttgtgctggagacaagagtgagtgagtgagtgagtgtgtgtgtgtgtgtgtgtgtgtgtgagagagagtgttgatagggctggtctcctacagaacacagtcagtgatcaagcaggattactcgtgctctttggtgctctcaatttatgtggaagagctgcagatattaccagaataggctggctagataaacactgtcagaaaccccagacctgcccataggataatgctgcatttttctgtcagagtcacatgtgtgttctggagaggttatttctgcatggaaactcaacttcttggattagctatctgagtggaagtcctcaccgatgagggaataaaccaaatagaaagccctcctatacatgtcccctccttcctgttgtcaaaacaatatttaggtcttcctgaagtctatcgttctttgctgcctctccaaactcagatttgggttttgctttggaacataaaacagggtcacttgataattataaccactagaaaaaagattaaactaatatggaaaacatctattaagtgtattcatagggaatgaggagccaggatggagagactcatggagaggctgagggaatgttacattctaagtttcccttcatttgtctacagtctggtgccagtcaatagagtggaaagggaggcttatttttttattctaagtgcacacatacagtatacat

SEQ ID NO: 3262 - DNA, 1731 bp, Cricetulus griseus
ttaataactaagagaaggcgggaacttctgcaaaagcacaaggagcagcagaaggacgcaggtgtcccttggtgaggcttccagcactgcggaggacgcggtccagtacctgtaccagtggaggagtgtaatggccgagcacactgctgccctggaggagctgcaggagcgtctggaccaggctgccctagatgacctccgggtcctgacggtgtcactgtctgagaaagccacggaggagctgagacgcctgcagagcacagccatgacacaggagctgctgaaacgtagtgcgccctggctcttcctgcagcagatcttagaggagcacagtcgggagtcagcggctcgcactgcacagctggaggcagaggagagacagcatggccagggagctggtgcagggcgtgaggcagcggctacagcaggatttaccagaggcctgcactgaggagcaggcagagctgaggcattgggagcacttggtgttcatgaaagggtacagaggctggaggcccaggaggcccactttgctgagtcacttgtggctctgcagttccagaaggtggcccgagctgctgagaccctctctgtctacacggccttgcttaccattcaagacttgctgctgggggaactgagtgaatccgagacactgaccaagtcagcctgtgcgcagatcctggagtcccacagccagcccggagctgcaggaactggagaggaagctggaggagcggctggtgcagcaggaagcagctgagcagcagcaggtcctggagagctggcagcagtggatggctgatggacccgggctggggcgaaaccccgggggagatggatcctgaaaggcaagtctctgccatgctgcggcaggccctgaacaagggccagaagctactggaacagcaacagcagagggtgagagaggagcggcagaacagtgcggtgctggaagattctctggaaagcatggaggctgacaccatggccagtctgtgcagccagggactgagactggtgtcgtacctctcaaagatgacaatggtgccagggagcacgcttctcagactcctcggtgtggtgcttccagcggcttcgcagcctcagctactggccctgctggacacagtcagtgaaaagcactcagaccacacagcagagaatgggagcagtggggaccaggctgagcagggcaagaggaggaaacaccagggctggtggcaagctttggacagcagattgagagcagatctggtgagtcaaggattggagaggatgctctgggcccgccggaagaaagagagcatattaaagaaggtgtatactcctgtccaggagagggtgacattccctggaaaaggaagactaggccacacctgtccctagagcccattggggaactggcacccatgcctatcacaggggtggacaccatggacatattaaacacaggagagaagatctttgtattcaagagcccaaaggagccagagatctccttgcgtgttcctcccaggaggaaaaagaacttcctgaatgccaagaaggccagcagggccttgggcttggactgaccccaggataagcaccagggagtatctcaagtcaggcgcatctttcctccagccctatttgggtccatctgtctgtctgtatcacacagcttgcaatatacacatacttgcagcatagacacagtgccacacatattggctctccagtgctcag

SEQ ID NO: 3263 - DNA, 1730 bp, Cricetulus griseus
aagtttcgtcgctgagagagcgtgagggactcgcggtgcagacccaggggctgagggcagatccatattttggattcctgctgtcttataatgggtgacattttgccattagatgtcattggtagaagagttgacgttaacggagaatttgcaacagtgcgtttttgtggtactgttcctcctgtggcaggactctggctaggagtcgagtgggacaatcctaagagaggaaagcatgatggcagccatgaaggaactatgtattttaaatgcaggcacccaacaggaggctcctttgttcgtccaaacaaagccaattttggagtagattttcttactgcccttaagaagcgttatgcattagaagatggatctgatgatgatggaaaatcatgttccttaatagttggaagtaaacaagtacaaactgttggttttgagaatattacaaagaagcagagccaattgagagcattgcaagacatttccctgtggaagtgtgccgtgaattgtgctggtgaacaaggaagaattgctgaagcctgccccaatattcgagttgtaaatttgtccaaaaacttgttgtcttcttgggatgaagtgattcttattgcagagcagctcaacaacctggagtctctggatctcagtgaaaataaactgcagtttccctctgactcaccaactccaactggaacattttctaatctgaagattttagtcctaaataaaatgggaataacatgggctgaggtgctgcgctgtgccccttcatggccaatccttgaggaactttacctcaaatctaacaatatatccatttcagaaaggccagtgaacgtcctgcagaaaatgaggttactagacctttcctctaacccagccattgatgaaagccagctgtgcctcatagcatacctgcccagactagaacacctactcatttctgacattggactttcttctatacatttcccagatgctggaattgggtgcaaaacatccatgttcccgtccttgcagtacctggtagtcaatgacaaccaaatatcagaatggtcatttatcaatgagctagataaattacagagcctacaggctctgtcctgcactagaaaccccttgtgtgaagaagacaaagcagaagagatcatcattgccaagattggtcagctgaagaccctgaacagatgtcagattcttccagaggaaaggcgtggagctgagcttgattaccaaaaaacctttggaaatgaatggaaaagggctggtggacatccggatccagacaaaaacaggccaaatgcagagtttctgtcagcccatcctagataccagcttctctgctgcaaatatggtgcacctgaagatgaggaactcaaaccacagcagccattcatgctcaaaaatcagctactatcactgaagatcaaatgctcaaaccaacatgaacagaaagtattagaaaagcagttgccagattccatgacagttcaaaaggtaaagggactgctgtcacgtcttctcaaagttcctgtgtcagaacttctgttgtcctatgaaagtcccaagatgccaggcagagaaattgagctagaaaatgacctacagtcattacagttttattctgtggagaatggagattgtctactagtgcgatggtaacaatccaacttgggaaaggaccatttggttgtatattaatagaataataaaggctttgattacta

SEQ ID NO: 3264 - DNA, 1730 bp, Cricetulus griseus
gatgttcacagaagaagatgtcaaattctacttggctgaacttgcacttgctttagaccatctgcatagcctgggaatcatctatagagacttaaaaccagaaaacatacttcttgatgaagaaggtcacatcaagttaactgattttggcctaagtaaggagtctattgaccatgagaagaaggcttactctttttgtggaactgtggaatatatggctccagaagtagtcaatcggagaggtcatactcagagtgctgactggtggtcttttggtgtgttgatgtttgaaatgctcactggtacactacctttccaaggaaaagatcgtaaagaaacaatgactatgattcttaaagccaaactcgggatgccacagttctgagtcctgaagcccagagtcttttacgaatgcttttcaaacggaatcctgcaaacagaattaggtgctggaccagatggagtgaagaaattaaaagacattcaacaatagaactggaataaactagtataagaaagagaaattcacccaccttttaagcctgcaactggcaggccttgaagatacattttattttgatcctgagtttactgcaaaaactcccaaagattcacctggcattccacctagtgctaatgcacatcagctttttcgggggtttagttttgttgctattacctcagatgatgaaagccaggctatgcagacagttggtgtgcattcaattgttcagcaattacacaggaacagtattcaatttactgatggatatgaagtcaaagaggatattggtgttggctcatactctgtttgcaagagatgtatacataaagccacaaacatggagtttgcagtgaagattattgataaaagcaagagagacccaacagaagagattgaaattcttcttcgttatggacagcatccaaacatcattactctaaaggatgtgtatgatgatggaaaatatgtgtatgtagtaacagaacttatgaaaggaggcgaattgctggataaaattcttagacagaagtttttctcagagcgagaggccagtgctgtcctgtttactataactaaaactgttgagtatcttcatgcacaaggggtggttcacagagacttgaaacctagcaacattctttatgtggatgaatctggtaatccagaatctattcgaatttgtgattttggctttgcaaaacagctgagagcagaaaatggtcttctcatgactccttgttatactgcaaattttgttgcaccagaggttttgaaacgacaaggttatgatgctgcctgtgatatatggagtcttggtgtcctcctttatacaatgcttactggttacactccatttgcaaatggtcctgatgatactccagaagaaatattggcacggataggtagcgggaaattctcactcagtggtggttactggaattccgtttcagatacagcaaaggacctggtgtcaaaaatgcttcatgtagatcctcatcagagactgactgcagcccttgtgctcagacatccttggattgtgcactgggaccaactgccacaataccaactaaacagacaggatgcaccacatctcgtaaagggtgccatggcagctacatactctgctttaaaccgtaatcagtcaccagttttggaaccagtaggccgttctactcttgctcaacggagaggtattaaaaaaatcacctcaacagccctgtga

SEQ ID NO: 3265 - DNA, 1730 bp, Cricetulus griseus
tgcgtggtggcctgctttggccttgtcttagctagaatgtgatttcatattggacaagcaaaggaaccatgatgtctggtggagaccaggagccaggtcactattatgtgggcatcgatgttggaacaggtagtgtgcgtgcagccctggtagaccagagaggaatacttctggcttttgcagaacggccaattaagaagtgggagccacaattcaaccaccatgagcagtcctcagaggacatctgggcagcgtgttgccatgtcacaaagaaaattgttcaaggaattgatgtacaccgaatccgaggacttgggtttgatgccacgtgttctttggttgtcttggacaaacagtttcatcctttaccagtaaaccatgaaggggattcctatcgaaacattatcatgtggctggaccatcgagcagtcagccaggttcacaggatcaacaagaccaagcatgatgtccttcagtatgtaggtggtgtgatgtctgtggagatgcaggccccaaagctcctctggctgaaggagaacttgagagagacttgctgggacaaggcgggacatttctttgatctcccagacttcttatcatggaaggcaacaggtgtcacagcacggtctctctgctcactggtgtgcaaatggacatactcagcagagaaaggttgggatgacagcttctggaagatgattggtttggaagatctcattggtgataattacagcaaaataggaaatctcgtgctgcctcctggaacttctcttggaagtgggctcacaccagaggcagccaaagagctgggtcttcccccgggcattgctgtggcagcctcactcattgacgcccatgcaggaggactaggagtaattggagcagatgtgagaggttatggtctcgtctgtgaggaacagccagtgacatcacggctagctgtcatctgtggaacatcatcttgtcacatggggatcagcaaagatccaatttttgtgccaggcgtttggggaccttatttctcagccatggttcctggcttctggctgaatgaaggtggtcagagtgtgactggaaaattgatagaccatatggtgcagagccatgctgcttttcctgaactacaagccaaggccacagccagatgccagagtatatatgcatatttgaacagtcacctggatctgattaagaaggctcagcctgtgggtttcctcactgttgatttacatgtttggccagatttccatggcaaccgatctcccttagcagatctgactctaaagggcatggtcactggattgacactgtctcagggccttgatgatcttgccatcctctacctcgccactgttcaagccattgcttttgggactcgtttcatcattgaggccatgcagacagcagggcactctctcagtaccctcttcttatgtggaggcctaagcaagaaccccctttttgtgcagatgcatgctgacattactggcatgcctgtggtcctgtcacaagaggtggagtctgtcctcgtgggtgctgctgttctgggtgcctgtgcctctggggacttcacatctgtgcaggaggcaatggcgagaatgagcaaagtggggaaagttgtgttcccaagacgtgaggataaaaaatattatgacaagaagtatcaagtatttctgaagatggtggaacaccagaaggagtattcggcaatcatgaatggaaactgaaca

SEQ ID NO: 3266 - DNA, 1729 bp, Cricetulus griseus
ggcacctgtgagctgcagtgcctagaccgaccgcgaggaccgtcatcatgcatcgtgtaccgctgctgcttgtgctgggcttgttgctcttgggccccgctgctcctgcgcgcctcggcctcaagcgcccttcccgattcagcagcttctcctgggataactgtgatgaaggaaaggaccctgcagtgatcaaaagcctgtcgctccaacctgaccccattgtcgttcctggagatgtgattgtcagtgttgagggcaagaccagcgtccccctcacttctcctcagaaggtggagctcaacgtggagaaggaagtggctggcttctgggtcaagatcccttgtgtagaacagctaggcagctgtacctatgaggactcctgtcaactgttggacctatacttcccccctggagagccctgcccggagcccctgcacagctatgggctgccctgccactgtcccttcaaggaaggcacctactcactgcccacgagcaacttcacagtgcctgacctggagctgccgagctggctgagcaccggcaactaccgtatccagagtgtcctgagcagccaggggaagcgcctgggctgtatcaagattgccgtctctctcaagggcagatagcccagcagcagccaccacggaatgaaggggcaccaggaaggcgtgcctcttcttttgtgttccaggacccagaaatgcctgcctctagccccattctccttcagttctagcctctgcaaatcactgtacaacctgacctgagggaggatgggccaggcgggtcctgacgtctgggctttgagccatgctcttccccacctctacaacttcctaagactttctttcctgtccaaaacagtcaaggaatgggaaccaacatgtttggggaatcttaagttcaaactgacccaaccttggtctcctgaggttatccccacccccacccccttcttttattactaacttaaaaccggaataacagtattaacctttctcattccaccctaagcctcctgcaaagaggcctaggtagaatggatgacattccttatactagtcaagaaacaaaacctcaaacccaatagcacatgtgcgctggtgccagatggccagggtctggaatggcatatctagtcctggggaggtgcagcctaatgtgaccagtaagtgccatgtaagaatgttgccagatattcacaatatttttcttccttagtccccaaacccagacttttatatgaaatcttagaatttgtaactattggtaacaaattgttttcttttttttcttactatataaaccgtacgggtcaaaggggcatcatggacttgtctgggggctatctggctcacaggtggtagtttcttacatcttctcagtctcaagttatctggcatcatctcttccctcttcagggtcaagtcggtggtgcctggcctcaaagagggctcagcctgcattagcacatttctaagtggcctctgagagctgggcactgtgccagcctcagagtacatcagcatcagggtacaggggttcacaccagagtgggtgccccagaagccaccatgtggaacagggatcccatgaagagagtggatcctggatcaggttgcaccatgacaacttcccaagcctcggatagcccaggttttctggactggaagcctaggctggcaataaacctttttaacttgacaaaaaaaaaaaaaaaaaaaaa

SEQ ID NO: 3267 - DNA, 1729 bp, Cricetulus griseus
tctttcataatcccatgtccagaccgaccttcatctcagggaacatggaggcttgactacaactctgcagtcccgtatcactttctggctatgggagacgtaaacagggacaagatccaggacgttctctttctttataaaacaccaatagcagtaacaatttcaccagatcctgtgccgatgaaggcttttccactccctgtgcctttgtggctgctgtgtcaggggccaatggcagtgtgctctggggagagggcctgtggcccaagatgtcgcccttgtaaagtgtgccatgccacaaccatcagacagcgaagtgtcttctgcctgtatccttgtgggaagactaggttctttcatcgcagtcaacttattcacagggcaaactctgtggaaccactccagcagtttgggtgggaacgcttccatcttgagccccttgatccaggtgcctgacgtggatggtgatggtgccccagacctactgatcctcacccgggaggggcaggaggtcagtggggctatctattcaggcagcaccgggtaccagattggccacagaggcagtctgggtgtggatggaaacggtggcgccctcctccatgtgaccagaacgggtgctcattatattctcctgccctgtgcaagtgcgctttgtggcttctctgtgaagggtctctatgagagagttactgggaaagatggccagcttaaggaagactcctactgggagaacatgctcaatagctctgcccaccggaggcttctgcacagctctggagcagttcgctacctgatgaatgtcccagggaaatctggccaggatgtgctccttgtgagctctgaggcctgtatgttgctggatggacaagatctgatgcccaggtggacccttggtgcaactcaggttctgagaaaacccatccttggccactacaaaccagacaccttggctgtggtcattgaaaatggaaccagcattgatagacagatcctacttctggacctcagtacggggtctatgctgtggagccagtccctcccaagcctgcctgggggcccaccatccacaagcctgatgactgcagaccaccgctctgctttcttcttctggggcctccatgagcttgtcggcaccaatgagatggatccccaagacatgcagctcagcctgtacatgttccaccccaccctgcctggcatcctgctggagctagccaatgtgtctgccaacatcgtggccttcgatgcgatcctgtttgagccaagccgccatgctgcctatgtgctcctgacgggcccagcaagtgcagacatgcctggcctggtgtctgtgatcaaacacaaagtgcgagaccttgtcccaggcagtagagtggtccacctgggtgaaggcagctcagacagcgaccaagccatccgggaccggttctcccgactacggtaccggagtgaggtttaggtgggcgcagctggagcacatggagagactccaacggtgaaaacacagcctccaggaaagttggactaccctcagcctccatgctgacctcactacttgccctggtgattctgcccctctgggatctatgtccttaccagctatacccaaggatttggggggggggcacctccaatctcctgcctgtaccatgtattctctcaaaggtctcactgtgcagtccatatgatctggtcaaggggaccatgtctcctggaaagtgagcaa

SEQ ID NO: 3268 - DNA, 1729 bp, Cricetulus griseus
gaggaaatgggagagactcagtcagagtactcggattctagctgtgaggaatggggccttcttctgcaatgaatgtgactgtcgcttctctgaagaggcctcgctcaagaggcacacactgcagacgcacagcgataaaccgtacaagtgtgaccgctgccaggcctccttccgctacaaaggcaaccttgccagccacaagaccgtccacacgggtgagaaaccctatcgctgtaacatctgtggagcgcagttcaataggccggccaacctgaagacccacactcgaattcactctggagaaaagccctacaaatgtgaaacctgtggggccagatttgtgcaggtggcccaccttcgcgcccatgtgctcatccatactggagagaagccgtatccctgtgaaatctgtggcacccgcttcaggcaccttcagactctaaagagccacctgcgcattcacacaggagagaaaccttaccattgtgagaagtgtaacctacattttcgtcacaaaagccaactgcgacttcacttgcgccagaagcacggcgccatcaccaacaccaaggtacaataccgcgtgtcggctgctgacctgcctccggagcttcccaaagcctgctgaatgaagcatggagtgttgactcttttctccctagccctttctcagaccctccccgaaggatgctgtaatactttacaaaggtcatcccatgatgtagtgcctctctcatccactagtgcaaatcatagttggggtgggggtggggcgcggggtttgcgggaccgggagccaagacagctccccttcccacactgccataagacattaagaaaatactattgcttcttctcctatgtgtaaggcaaaccatgtcagcgaaaagcaaaatcattttctatatcaaagtaggggagaatgcgaaagttctgatgtgacagattgcaacacgaggaatgtaaaccttctgtgggaacagaaatctcttttgtatgtaaatgtgtattgttttaaaagacaagacttcaggatgttgtccaagagagggctttaattttttaaccaaaggtgaaggaatatatggcagagttgtaaatatataaatatatatataatataatataaatatataaacctaaaaagatatattgaaaatataaaactgcgttaaaggctcgattttgtatctgcaggcagacacggatctgagaatctattgagaaagagcacttaagagactattttaagtattgcgtctgtataagtaagaaaatattttgtctaaaatgcctcagtgtatttgtatttttttgcaagtgaaggtttacaatttacaaagtgtgtattaaaaacaaaacaaaaaaaacaaaaaaagttgcagaaggagaaatgtatacttttgttccagttttcagtttgtatatacctgtaacgtgtcctcacggtgccttttttcacggaagttttcaacgatggacgaacttgcgccatccccttttgaagtgtagacagacacagggacttgaagttgtcactaactaaactctctttgggaacgtttgactcctcccacattgtgcgtcatgcttgttgttataattactccggagacagggtttggctgtgtctaaactgcattattgcgttgtaaaatatagctgtacaaacataagaataaaacgttgaaaagtcaaaaaaaaaaaaaaaaaaaaaaaaaaaaaaaaa

SEQ ID NO: 3269 - DNA, 1729 bp, Cricetulus griseus
tctctagtcccgagcggtccgtgccggttgtcggaaagcgtctcttgcagctcgcccagcatggcgtccgtggggaccctcgccttcgatgagtatgggcgcccctttctcatcatcaaggatcaagaccgcaagtcccgtctcatgggactcgaggccctcaagtctcacatcatggctgcaaaagctgtagcaaacacaatgagaacatcactgggaccaaatgggctagataagatgatggtagataaggatggcgatgtcactgtaacgaatgatggtgccaccattctaagcatgatggatgtggatcatcagattgccaagctcatggttgaactttccaaatcccaggatgatgaaattggagatggaaccacaggagtggttgtcctggctggtgccttgttggaagaagctgagcagttgctggacagaggcatccacccaatcagaattgccgacggctatgaacaggctgcccgaattgccatagagcacctggacaagatcagtgacagtgtgcttgttgacataaacgaccctgaacccctgattcagactgcaaagaccacgctgggctccaaagtggttaacagctgtcatcgacaaatggctgagatcgccgtgaatgctgtcctcaccgtggcagatatggagcggagagatgttgactttgagctcatcaaagtggaaggcaaagtgggtgggaggctagaggacaccaagctgataaaaggtgtgatcgtcgataaggacttcagccacccacagatgccaaaagaagtggaaaatgctaagattgcgattctcacgtgtccatttgagccacctaaaccgaagacgaagcacaagctggatgtgacgtctgtggaggactacaaagccctgcagaaatatgaaaaggagaagtttgaagagatgattcaacagattaaagaaactggtgctaacctggctatttgccagtggggctttgatgatgaagccaatcatctacttcttcagaatgccctccctgcagttcgctgggtaggaggccctgagattgagctgatcgccattgcaacaggaggacggatcgtcccgaggttctcagagcttacctctgagaagctgggctttgctggtgtggtgcgagagatctcatttggcactacaaaagacaaaatgctggtcattgagcaatgtaagaactctagagctgtgaccattttcatccgaggaggaaacaagatgatcattgaagaagcaaagcgatccctccacgatgccttgtgtgtcatccgaaacctcatccgagacaatcgagttgtgtatggaggaggggctgctgaaatctcctgcgccctggcagtcagccaagaggcagataagtgcccaactttggagcagtatgccatgagagcttttgcggatgccctggaggtcatccccatggccctttcagaaaacagtggcatgaatcccatccagaccatgactgaagtccgagccaagcaagtgaaggagtccaaccctgcccttgggattgactgtttgcacaagggcacaaatgatatgcagcttcagcacgtcatagaaaccttgattggcaaaaagcagcagatctctcttgccacacaaatggtgagaatgattctgaagattgatgacatccgtaagcctggagaatctgaagaataaattgtaccatccaccactgtgactaaacaataaagggtgtgtc

SEQ ID NO: 3270 - DNA, 1729 bp, Cricetulus griseus
  modified_base (353)..(353): a, c, t, g, unknown or other
gtgtcacagtcaattgttaaacaagcaggacttgaaatggaaagggaacttgacaaggttaatctgtcttcagattaccagatggtactagtcacaaaaggatttaaattgtcctgtcagtatgtgttccatgtggcatggaaaattagaaaaaaaacaacagatattgaaagatgcggtgaagacctgtctaggaaaaatgcctccaactagatgtaaattccatttctttcctgcccttgggacaggactcattgagatagagaagagtacagcagccatgataatggtagatgaaattttagctatttttacaagatgcacaaagaagaaaccctgactgttaggattgngatcttcagtggatgtggagacatacacggctttttgtgctgaaatgatgaagaggtccaatgagttgagtctcagcagtaacagtgttctttcagtcccccagtggaccagaggggagcaaagaggtggacttgaagccggatcacctgccatcaatctgatgggtgtaaacgcagaagagatgtgtgaggccaaagagtggattgaaaggttgctgacttctgaggaacaccacatcatcgagaataatcatattctctaccttggcaagaatgagcatgacaagctgtctcagctccagacagcctcaggtgtctccatttcagagactgtcacgtcccctgaaagcaatgctagagattagaggtgcccaggctgacctcattgaagcagtaatgaatgttgaatgtatgctgtgtgaagttcagggagaagtggcaagaaaaaaggagaaaagtcttttcgacttgttaggacaatggaccaataaggaaggaaaactggatgaaatggaaaaatttcacacatatcttcgttacccagtacctttaactcaggaacttgaggaccgaaagagacagtttgagaagtgtggcttgtgggttgtgaaggtggagcagatacagaataatgcgctcatggctgccttcctagagaagaagaaaatgatggaagagagaacgccaagaggacctgggagtcaaaggttgtttcagcaagtcccatatcagttttgcaatgtggtgtgcaaagtcggctttcacagactgtactcaacacctcatgacccagtttatggagctggcatacatttcaccaagagcctcaaaaaactagcagacaaggtcaagaagacctctagcacagatagactaatctatgtgtttgaggcagaagtgctcacaggctccttctgtcagggtaataacttaattattaccccaccgccattgagtcctggggccttagatgttcatgacagcgtggttgacaatgtttctaaccctgaaactgttgttgtttttaatggcatgcaggcgttgccccagtatttgtggatttgtacacaggataggacattgttacagcaccagatgtggggacaggactactcatcaggtctagcgatggtctcttcaccaccacagtcctggttggaggtctcatatggcagcactgtttagtctctatgtcattttaacaaccagcagggcttgggtggattgaaaaacaatgactgtcagtgacttaaacataactgggttactaaagcaccaaccatacactagtgtctcactgccttctttacctttgggcttggggtggatagatgacagctaaaacttgttcctgactttctcttctccttgacatc

SEQ ID NO: 3271 - DNA, 1728 bp, Cricetulus griseus
cccagaccagaagtttatccagtggttccagaggcagcagcttctaacagaggaggagagctatgccctctcctgtgagattgaagcagctgccgatgccaacaccacctccccaagcctcggaagagcatggtgaagaggctgagcctactgtttctggggtctgacatcatcactgggagcactcccaccaaagagcagcccaagtccacggccagcgggagctctggtgagagcatggactcagtcagcgtgtcatcctgtgagtcaaaccactcagaggctgaggagggttccatcacacccatggacacaccagatgagcctcaaagaagctctccgagtcctcctcttcatgttcctcaatccattccatggacacgaattcctcagggatgtcatccttaatcaaccccctgtcctcccctccgacctgcaactaaaattcacaagcgctccgtctccgtgacctctattacctccacagtactgcctcccgcttacaatcagcagaacgaagacacctgcatcatccgcatcagcgtagaagacagcaatggcaacatgtacaaaagcatcatgttgacaagccaggataagacccctgctgtgatacagagagcgatgctgaagcacaatctggactcagacccagccgaggagtatgagctggtacaggtcatctcggaggacaaagaactggtgataccagactctgcaaatgtcttttatgccatgaacagccaagtgaactttgacttcattttacgaaaaaagaactcagtggaagagcaggtgaagctgcgtagtcggaccagcttgacattgcccaggacagctaagcggggctgttggagtaacagacacagcaagatcaccctctgaaagggacaatacacctctacttgccaaaggcagagtgggggtgagaacagctgtggtatctgcagccaccacccagtgttgaggatcattggtgaagccaacagatatttattgagttcagatgtgtacaaagcactacgtagagagagtggaagtgaatttgacattaaaaggataaatgattcactgatgctcttggacatgaaagggtaatacaaaatgatccaaattttaaaaagtatatgcactcacatatctagtgtgtgtgtgtgcatatatagatatataagaggaactttacaggatgttctggactatggaaaaaccaatttgcacaatggcctgagaagttgaggtcactttttacagggaaatagaagggactgagaacctagtctcataccttccaaacaaatagaatcagacctaccacacagagtgttcttcatgccagtattataaacccaaactatttttgtaaagggagaggattactttctcagtcatgtgccaccagatgaacaaactgcagaggtcagactggccacaggctgcatgaaaggccatcaagggaaggtttggatgagtcagtggtctctgtcctctgcctgtgtctgccggagcttcagaggccttcgtgccttgctggtccccatcacaatgcctctggagtcaacacaagcttgtttcaatttctggaaaccctgttatgtttctgtgttctctcctaaagaacacaccacaatctttactgcacaagtagctgcggtcttccataacttatcagccagagaagaaagtgcagaagactggcgactcatttggactcttctctgtcttgga

SEQ ID NO: 3272 - DNA, 1727 bp, Cricetulus griseus
atcaaggaagtgatcaagagtcattctcctgaagacatgacaaaaacgtcatccaatgtcactattatcatgccaccctcttgatggatgccttgggtttcagtttgtgtagaatgatgatgtcctttctgggtgtgtgttcatgctggtctgtacagtgactcagagctttgaagggcctcagcactccattctgatggtcttacaactttctgtattttcagaactgggcttcttgagattatttcatattcccaccagaacttccagcctggttacatacccttaactttagtttaagatggcggtgtgatggagctcttccaaaagtctcttgttggttaagtggtaaaatctgtgttgtaataggatgtagacacaaacaagaaacctgcaggtgtcagtccttcagcaaacattgggacaatcacagtaagcaagcctagtgctactgcgttttcaccttacacattaagatgaagtgcatggtggtgtttcattcttgacttatgcaatgcgatattttaaatgtaaataacactggtcacatgccaatgtatatggttccctggggttatatctattttatgtaaactctatttgtttctggttgaggaatgagcgtgaggcctgtgagcagattccatgctctgctgctttttccaatgtagatgtactgtgtttctgttaggtactgtctggatcatggctagtgggataggaagttagcattttactgcagctgtctttacatattgaatttttaatatttgtggttttggttgcaaacagaattttagcctctgtcagtttgtgaatctccagctaaaaatgaacagccacaggaagggctggaactagcctatagttgagttaggctatctcaacacgtgtgcacacagccttatgcagtgttcatctgattgaagtcccagtacctaggatgtgcctgacctgacaaaggcaagccatcatttagtgaaccctgaaaacatttggtaacattccagccatgaggtgtggaacctgccaagtcctttcccacagtcctcactaggtagatgtgcttgagccctgcacattaggtcagcccccaacacacacggctgcagataacttagctctgtttattgaccttccacaagcagctagagcagagtaataaggagtcaattatcttgaccttaatttaaaactttccatgaacatagggctagaaatacttttgccaagtagcattcctagccttcattttatgccaatgtttagaaaacaataatgtatagcaagtataatttctaaagaataatagacttttctattagattattaattgtaaatgagtcctgttttttaaagagttggtaactcgtcatggaggtgtatttgtatgtgtaactgtattaaagagtcacaacattttttcctctcatgtttgataattacatattttaaaagactgaaaggaaaaaattagtcataagtaacccttttgtatagttcacttaaactgaagtattttcgtgtgactcaggtaaagttgggatctacacagcacaggagtctattttttagcttgctaactagaaaatggaaaacttgtattttcactgcatatgcacctcacctcccctaatcagaaacactgctcacttgtgtggcaaagtcagtcagtcttcctattgccagtcaacatttgccaatggcacagatatacctccatttat

SEQ ID NO: 3273 - DNA, 1726 bp, Cricetulus griseus
cagccagcgagagggcgcgagccgcggcgcagcctgcagcctcccgccagccggcgagccagtgcgcgtgcgcggcggcggcctcggcggagaccgggaagcggacgggcaggcgggcgagcgagcgagcaagcaggcggtgcgggcgcgcgaggcgaggccgagtcgcgagagacatgggggaccgagagcagctgctgcagcgggcgcgactggcggagcaggcggagcgctacgacgacatggcctccgccatgaaggcggtgacagagctgaatgaacctctatctaatgaagatagaaatctcctctccgtggcctacaagaatgtagttggtgccaggcgatcctcttggagggtcattagtagcatcgagcagaaaaccatggcagatggaaatgaaaagaagttggagaaagttaaagcttaccgggagaagattgagaaggagctggagacagtttgcaacgatgtcttggctctgcttgacaagttcctcatcaagaactgcaatgatttccagtatgagagcaaggtgttctatctgaaaatgaagggtgattactaccgctacttggcagaggtggcttctggggagaagaaaaacagtgtggttgaagcttctgaggccgcatacaaggaagctttcgaaatcagcaaagagcacatgcagccaacacaccccatccggcttggcctggccctcaatttttctgtgttctactatgagatccagaatgccccagagcaggcctgcctcttagccaaacaagcctttgatgatgccatagctgagctggacacattaaatgaggattcctataaggactccaccctcatcatgcagttgcttcgagacaacctcaccctctggacgagcgaccagcaggatgaagaagcaggagaaggcaactgaagtcccttcaagtccctgacccttccttcacccaccacccccatcatcactgattcttcctcgccacaatcactatatctagtgctaaacctatctgtattggcagcacagctattcagatctgccctcctgtcccttgggaagcagtttcagataaaccttcatggacatttgctggactgatggttgctttgagccacagggcattcccttttgaattgtgcagagaagtgtgttgtgaatgaggcatttattatgtctgttgatctatggcaatccaggtgatgataattgagtgtagaaaggagaattagccaacacaggctatggctgctatttaaaacaagctgacagtgttctgttaagcagtacatcttgtgcatgcaaaaatgaatccgaccctcgcaccccttccttcagctaatggaaactgacacagcgacagcttgttccttcaccatcagctttataaactgtttaacgccagctttcagcagcccttgctgtgcctctttaaattatggcgtgtgcacactttcttttcaatgcaatgcatcagaagtttttggtatgtgtaacttttttttggttgtgattaagaatcatggatttatttttttgtaactctttggctattgttcttgtgtatcctgacagcatcatgtgtgtcaacctgtgtcaatcatgatgggtggttatgaaatgccagactgctaaaataaatgttttggacttaaaagagtaaataaatgctgctttggggatattaaaaaaaaaaaaaaaaaaaaaaaaaaaaaaaaaaaaaaaaa

SEQ ID NO: 3274 - DNA, 1726 bp, Cricetulus griseus
ggagaagctgtcacagctggcgtaccaccccctgaagatgcagagctgttacgagaagatggagcccctgcgggagctgggaagggacccgaccaaggaggagctgtgcaagtccatccagaggattctggagcgagtgctgaagaaatacgactatgacagcagctctgtgcgcaagagattcttccgggaggcactgttgcagatcaccattcccttcctgctcaaaaaaactggcccccacctgcaagtcggagctgccacgcttccaggaactgatctttgaggacttcgccaggttcatcttggtggagaacacatacgaagaggtggtgttgcagacagtcatgaaggacatcctgcaggctgtgaaggaggccgcagtgcagcgcaaacataacctctaccgggacagcatagttctgcataacagtgaccccaacctacacctgctggccgagggtgcacccattgactggggcgaacagtatggggacagcggcgatggcagtgacagtggtggcagccccagcccttctgaagcagccacactcacagaaaagcgcaagcgtgtcaagcaggtggtgtccgtgatccaggacgaggagtcagggctgccttttgaggctggctccgaactgccttcacctgcatccccggacagtgtcactgagctccgaggcctgctggcccaggatctgcaggctgagagtcccccaccagccagcccccttctcaatggggcccctgtccaggagagcccccagcccatagcagtcctcgaggcctcctcaccaccagcctcaccccttgggcatctcccacctggaaaggctatggacattgatatccctaagcccagtgatcaagagactggggagcaagtgtccagccctggtagccgtccccccatccacaccaccactgaggacagcgcaggagtgcagacagagttctaggcgtcctctccaggcttctgttggatgctgcgctgggccacttctccttgggcactatgggctcatctctggggaggggtaccccagcctgtgccttgtgggggaggggtctggggtggtgtggcacctccagggtctggcttacccaagtcactttatggggttcagtatacctgttactgccccgtttttctgtgggctggtctccgatgctaggtctgattttgagggcttcctctttatgcaaggggctggtgagcccactggcctcactttgctggctattgctgtgggagggtggggcttgggggggtcttataggggagtgtacaagggatctgtgatggaaagagaaaggcccagaaagtggaagtttgtgcaggggaagtgtcctgggggctgggggttgggagcttgggagtgtccgattgaggccaggatggcaaaatgaagaagctggaagctggattgtcttgggtggttgaggagagcaaggagacactgcctcttcaaggcccccaggaggtctcctcccagccatgttctttgtccaatggacttgctctccaagcatgggcccaaggcccatagaatgtggctggtacgcagggacacccaatgccccagccctactcaatcatgtcactaatttcttctgatgctctctagtgccttgggggtttccatctcccttccagataaggtatgaagaatctatgcaaactgtgtaagcttctgctcctgaataaatgctttatttaaagctc

SEQ ID NO: 3275 - DNA, 1726 bp, Cricetulus griseus
gtcattgcagggttgtttgtgcagtctcggcggcggcggcgacccacagtgattcggccgctgcgccggggggtgggggggccgaacgggactcttttctttcagactgaccgcggggcagctgcggagcatgtcgaccccggcccgtaggaggctcatgcgggatttcaagcgattgcaagaggacccacccgtgggggtcagtggtgcaccatctgaaaacaacatcatgcaatggaacgcagttatatttggaccagaagggacaccctttgaagatggtacttttaaactagtaatagaattttctgaagaatatccaaataaaccaccaactgttaggttcttatccaaaatgtttcatccaaatgtgtatgctgatggtagcatatgtttagatatcctgcagaatcgatggagtcccacatatgatgtctcttccatcttaacttcaattcagtctctgttggatgaaccaaatccaaacagtccagcaaatagccaagcagcacagctttatcaggaaaacaaacgggagtatgagaagagagtttcggccattgttgagcaaagctggaatgattcataatagacacctggtctgttcatcttttcatcgttgttgtgtataatttacctcccagtagaaaggctagcaagttttaagtgccacgggttttaaggattctgcagagaaaaaagaaaaagtccttcagtttagaacctacaaaagcttgtgtatcttgattaatgtactttttattgcatggtgtgaactaagttattgctgcataaatttgtaatatatcctgtttgtatttttttccaagtgtataatgttggtgtggagttttcatgacagaatatacacattttgtaaatctgtacttttttcaaatattgaatgccttatttttgaattctttagatttttaaattggagaaaagcacttaaagttttttatatatgaatattacatgtaaagctgttaaaatacataacttcagtgcaagagactttgtcacttatttccttatctgtgcaggagggactgagaagtctctaactctccaccagttgagagcttcatttccaactgcagaagatcatacttctattttatcaagaaagtctgcaaatttgagtctaaaaccaattctgatctccggctttattttgaatgtacttatgttagttcagttgagtaattatagacttactggtctgattctgtccagctctgtatttgggccacttgttaacgtgcatttctcatgttaaactgtacctattgtgacttcacaattggcacctcggccacaagcagagctgattgactctgttgtgtggcagcaccttcacgggcttttgattaagaagaaagtaaaaccatcaccatttaccaaacgccgtgccgcagtattagcaatggccggttgtgttggtttgagcatggcagagatttggaaggaatcttggtgtaacttgaatatttgcaaactaccttttaatgcagctgcacgctacctgtttattctgaaactgttgagcaccagggcctgccgagttgcttctcacctcctcagttgtatacaagttgtactgcatcttagtttactggatagatttaaaacacagtattgtagaaagctaatacaaagctatcctatgccttcaaatagtatagaaaatggaaaatatacaagtaaattctgttgaaccact

SEQ ID NO: 3276 - DNA, 1726 bp, Cricetulus griseus
ggcgacactggccaagaagaggaaagttctagagtttgaaagagtctatcttgataatctccccagtgcatccatgtatgagcgcagttacatgcacagagatgtgatcacacatgtggtaccaagacagatttcattatcactgccagtcatgatggacatgttaagttctggaaaaaaatagaagaaggaattgagtttgttaaacattttcgtagtcatcttggaataattgagagtattgcagttagctctgagggagcattgttctgttctgtgggtgatgataaagcaatgaaggtgtttgatgtagtgaacttcgacatgatcaatatgctgaagcttggctattttcctggacagtgtgagtggatatattgcccaggagatgccatatcttcagttgctgcttctgagaagagtacaggaaaaattttcatttatgatggtcgaggagataaccagccgcttcatatttttgacaaactccatgtatcacctcttactcaaataagactaaatccagtttataaagcagtggtttcttcagacaaatctggaatgatcgagtactggactggacctcctcatgaattgaatcattaagtatgtttactgaactgcagcagatgaggcaacaactgccagacatggaatttggacgacgaatggctgtagaacgtgaactggaaaaggtggatgctgttagattaattaatatcattttcgatgaaactggacacttcgtgctatatggaacaatgctgggcattaaagttataaatgtagaaacaaatcggtgtgtgcggatcttaggcaagcaagaaaatattagagtgatgcaactggcgttatttcagggaatagcaaaaaagcaccgagctgcaacttactatagagatgaaagcttctgaaaatcctgttcttcagaatgttcaagctgacccaacaattgtctgtacatctttcaaaaagaatcgattttatatgtttactaaacgagaaccagaggatacaaaaagtgcagattctgaccgagatgtttttaatgagaagccttctaaaagaagaagtcatggcagctactcaagctgaaggaccaaaacgagtttcagatagtgccattgtccatacaagcatgggagacattcacatcaaactttttcctgttgagtgtcccaagacagtggaaaacttttgtgttcacagcagaaatggttattataatgggcatacatttcaccgtatcattaagggcttcatgattcagacaggagatccaacaggtactggtatgggaggagaaagcatatggggaggagagtttgaagatgaatttcactcaacattacgccatgacagaccatacactctcagcatggccaatgctggatcaaatactaatggatcccagtttttcataacggtagtaccaacgccttggcttgacaataagcacaccgtgtttggacgagtgactaaaggaatggaggttgtgcagcggatttccaatgttaaagtcaatcccaaaacagataagccttacgaggatgtcagcatcataaacatcactgtcaagtaaatgtgttctgtacattccaaagtaaaagggacttacattaacatgagactttcacatttggaaatttaatacttgctgaatatgcaaatcatgttttaaaaaaacacaaaactgtattttgtacttttagttaaaggccatttt

SEQ ID NO: 3277 - DNA, 1725 bp, Cricetulus griseus
gcgctgggcccctagttttatgtagctgggaagttgggctgcggggtcgtccctgtcctcctgcttccggtgttcctgggtttccttctgcggcgcgggccctcgccacggactcgccggccctgtggggccgcggcttgagtggtgccttctgcgagtcctaagtacattttaaaaccttcaagatggttctagcagatcttggaagaaaaataacatcagcattacgctcattgagcaatgccaccattatcaatgaagaggtattaaatgctatgctaaaagaagtatgtacagcattattggaagcagatgttaatattaaactagtgaagcaactaagagaaaatgttaagtctgcaattgatcttgaagagatggcatctggtctgaacaaaagaaaaatgatccaacatgctgtatttaaagaacttgtaaagcttgtagaccctggagttaaagcatggacaccaactaaaggaaagcagaatgtgatcatgtttgttggattgcaagggagtggtaaaacgacaacatgttcaaagttagcatattctgtcatcattgcttctgaaggagtggataaattcaaaaatgaaaattttgaaattattattgttgatacaagtggtcggcacaaacaagaagattctttgtttgaagaaatgcttcaagtttctaatgctatacaaccggataacattgtttacgtgatggatgcatccattggacaggcttgcgaggcgcaggcgaaggcttttaaagataaagtagatgtagcttcagtaatagtgacaaaacttgatggtcatgcaaaaggaggtggtgctctcagtgcagttgctgccacaaaagtccaattatttcattggtacagggaacatatagatgactttgaacctttcaaaacgcagcctttcatcagcaaacttcttggtatgggtgagacatgtatgaacagtttcagaatatcatgaaaatgggcccattcagtcagatcttggggatgattccaggtttggaacagattttatgagcaaaggaaatgaacaggaagtcaatggcaagactaaagaaactgatgacaattatggaaagaacttctgacgcagtataccaagtttgcacagatggtaaaaaagatgggcggtatcaaaggacttttcaaaggtggtgatatgtctaagaatgtgagtcagtcacagatggcaaagttgaatcaacagatggccaaaatgatggatccacgagttcttcatcacatgggtggcatggcgggacttcagtcaatgatgaggcagtttcagcaaggtgctgctggcaatatgaaaggcatgatgggtttcaacaacatgtaaagaagatgccttcatataaactgccgtggttgattatgtcatctgcgggggagaagaattttctggcctgtcttgctctcattcttttgtctcacccttttccttttgtcttccttctcttcttctgacataagggaggagtggctggtttttccaaaagtcatcatatttctgctttaaatcttctgttagtttcactgtcataacacttcttaagttaaacaaatcatgatgtaaaatttagtacataaaggttttaattgtctcaaaagccaagcattacatttataaacagtcccgatcagtaaaattacatgatattgaagaaaagtgctgcaaaataaacttcaagtgaataaaagttaaa

SEQ ID NO: 3278 - DNA, 1725 bp, Cricetulus griseus
agcctggaattgtgtcgccatttaaacgagtattcctaaaaggtgaaaagagtagagataagaaagcccatgagaagttgacagagaggcgccctctgcacactgtggtgttggcattacccgagcgcgtcgagccagacagactgctgagcgactatattgagaaggaggtgaagtatttaggtcagttaacatccatacctggctacctgaacccctccagtaggactgaaatcctgcatttcatagacaaggcaaagcggtcccaccagcttcctggacacctgacccaggagcatgatgctgtgctcagtctgtctgcctacaacgtcaagctggcctggagggacggggaggacatgatccttagggtgcccatccatgacatcgctgctgtctcctatgtcagagatgatgctgcacacctggtggtcctgaagacggcccaggacccaggcatctctccgagccaaagtctatgtgcagaaagttctagaggcctcagcgcaggttccttgtcagatagtgcagtgggaccagtagaggcatgttgcctggtcatcatggccacagagagcaaggtcgccgcagaagagctgtgctccctgctcagccaggtcttccagattgtttacacggagtcaaccatcgactttctggaccgagcaatatttgatggggcctccacacccacccaccacctgtcgctgcccagcgatgactcttccacaaaggtggacatgacggacacttatgatgctgaagccagcaccttctgcttctcagactctggggatgtgggagggctgccacccttgcccttctgcatgcagccatcaccccatagcaagactgtcagcgagagtgagctgagcaccagtgccacggaactgctgcaggactacatgctcacgctacgtactaagttgtcatcacaggagatccagcagtttgcagcactgctacatgaataccgcaatggggcctccatccatgagttctgtatcagcctgcgacagctctatggggacagccgcaagttcctgctgcttggtttgaggcccttcatccctgagaaggacagtcagcactttgaaaactttctggagaccattggcgtgaaagatggccgtggtatcatcactgacagctttggcaggcatcgccgtgccctgagcaccacctccacctctaccaccaacgggaacaggaccacaggcagccctgatgaccggtcagcgccttccgagggagatgagtgggaccgcatgatcttggacatcagtagtgatattgaagcgctaggctgcagcatggaccaggactcagcgtgatgggttgtgacagcgtacacttgtcttacacagctattccaggccttccagggaggagatacctggagctgactgtcagcccttcctggctaggagctagggaggggctgcagacacaggtggttctggtggccaggtcctctactgtgaaggagtggagagctgccacaggacatgtgccctaacacagggcagaagcctctgggcctcttcgtcaggggcttagcaatgcctgtagcatatccccacttggggagggccagttgcagcttggcaggaagagccagtcctgttggcctggtcctggacagctgatattttgcacatgattttcctcttctaactctcagagaccttaaaaagttgtttactacaatgtgaataaatttaa

SEQ ID NO: 3279 - DNA, 1724 bp, Cricetulus griseus
cttgcaataaatacaatgacaacttttttggattatactgcatttgtaagagaccttatcctgaccctgaagatgaggttccagatgagatgattcagtgtgtggtctgtgaagactggttccatggcaggcatctcggtgccattcccccggagagtggggatttccaagagatggtgtgccaggcttgtatggaacgctgttctttcttgtgggcgtatgctgcccagttggcagtcaccaaagtatctgctgaagatgatgggctgctgctgaatgttgatggcatgggcgatcaagaggttgtcaagcctgaaaatggaggtcaccaagataacacccaaaaagtggatgttccagagcatgaaatgaatgctggcaaggaaggtaaaagctgagcagcagagtgagccgtcgtgccagctccagctctgagtctgaccgccagacagtgttcaatagtgaaaaacaccaaaaaccgaactgaaagtctgcctgcagacttcaggagctccaagccaagcagtttgtaaagaaagatgctgccacctattggcccctgaactggcgcagcaagttgtgcacctgccaagactgtatgaaaatgtatggagaactagatgtcctgttcctgacagatgaatatgataccgttttggcttatgagaacaaaggcaagagtgcacaggcgtctgatagaagggaccctttaatggacaccctgagcagcatgaacagagtccagcaagtggaacttatttgtgaatacaatgatttgaagactgaacttaaagactatctgaagagatttgctgatgaaggcacggttgttaagagagaggacattcagcagttctttgaagaatttcagtctaaaaagagaaggagagtggatgggctgcagtattactgcagctagaggggagtgcctgcttcctcattcagtgaaaatgccactgttccagaataaagagacctgtgtcacacttggttccctttccgtcctcctgtggcctcagggaggttgactcatggcaggattgaggaagcaagcctttgttctgaatttcactgatgaatttaaagtgaaattttgccccattcttttggcacttagacatcagctttagtactgtaatgctcccagggcttccagggaatccacccatatctgaatccctttgctgctgcctaaaatgaccagatcccaccccatgggtgctttccagagtcctctggtttcttatgttatcagggatatgcataagcatatattaaaaacggacctattttgatacagttttgaatttgagagttgcactttccatgttccatcatgtcctcaaagtttatatcttcccaggtgtcccacttgactacaaaatgttcctgtctgcctgtggcaggtcagaaccatggctcggcagcagcgttagtgagcagcagcaatacagatgcccatgctgaagggcttgtctaagaaaggctctctacttaaccagaaaacctctttttgtacctgttcacaactgattttctttctcgtagagatggtttgggccaacctgtggcagttgatattaatgcatgttttatgcaaaaaaaaaatgtgatactagttacttttcaggaattctggcattgtatgtacatttttgtagaaattactactggatttaacatatttcaatcaggtttctgtaaaatccaaaattaaaccaatt

SEQ ID NO: 3280 - DNA, 1724 bp, Cricetulus griseus
ctcttgggaaaagccacccgatttctttacctggtggtcctttaccttcgggcggggagatccccaggtccctctcttggacgtctggccacgtagtgcggtgacgggcgtgtgggggctgacgcgggcggagcgattgtgataaggttgacattgacccgggggcggccagaagcgagacgcagtcaccagcgcgcgcagcaggccccgtccggggagccccccaacctgcggtccatcatgaagttccagtataaagaggaccatcccttcgaatatcggaaaaaggaaggtgaaaagattaggaagaaatacccggaccgggtgccggtcatcgtggagaaggctcctaaagccagggtccctgatctggacaagagaaagtaccttgtcccttctgacctcactgttggccagttctacttcttaatccggaagaggatccacctgagacctgaggacgccttattcttcttcgtcaacaacactattcctcccacgagtgctaccatgggccagctgtatgaggacaaccacgaggaagactattttctgtatgtggcctacagtgacgaaagtgtctatgggaaatgaggcagaagcccagcagatgggagcacctggacttgggggtaggggtggggtgcttgtgggactcggggaaccagagggagggctcccaaccatggaggagacgcaaggtgaagacatcggaaaacatcacaccgcacacactgtcttctgttttttcacaagctcaatcgttagttttctctgcttcctcagcccaggaagatcttgtgttggcttgactgtgagagcagggtgggtactttgttactcacagctttgctctgaattttcctgcagtttcatcagacggttgggaggagggcaggtggccactcgagaggaatacagttcagcagcaactcctgtctctttgggcagaggtttaatttttggcatttgcacaagtaggggaccatacctaagggaccaaaaaattcccactgtcattgaagcattgtgacccctgacctctgtctccaattcctccctctccaggtccttttcttccacgcaggcggcacagcaccgccccagttgtggcagtggacattcgcacagatgtttagatggagtcctcttgggaaatagggttgtgcgggaatgtggctacgattgccagttgtttggatggcattaaactggagttcagggttgagcatctctgctcctcatcccttaagcaccttagaatttcacgagcctcaggatcagtcctctagcatttccttccactttctcatgtacagggacaaggtgtctatgtgtggagggtccgggttacaaggtaagctagattacacacttgccacttatccttccccctgctcccctccttgagtctcatacacactggaatgttgtgattggccagctgtttccctccttgccatctgctcttcagagaagatggatcgaggaccccggcgttttgtggggattttactgactcagtttcatttaggggctatatgggggagcgggtgggaataggaactgcattcacacatgccatttcaattcatctctacaaatgaagagcgtcctccctgttgggagcagtctgtatgtctgctcttgtcagctgcaggttctgatgctttggagtcaatgctgtcaggccagggaaataaaataattgcttaacctaaaaa

SEQ ID NO: 3281 - DNA, 1723 bp, Cricetulus griseus
tgtataattttgtgaggtatacatattgtgggattgaacgcaaaaaatgaggtacttcagtattaaattagatgttcatagcgatgtctcctaaaggtgtttttaaaggctgccaatgccttgatcagatctgatttgtagacttgagaccttttgtttttctacaccttgagattctgctcatgaatcatgtatctaatctatatgatatgcagccgctgtaggaaccaagtcttgattttatatgtttatattctttcttaataaaccttagaaagactatgcgttactaagcagcgcacttttatggttgtttttccttgcccactgtgtcagtttcagaacaactgcagtacccagaactaagaccttcaattctcctcaacccctgatatacattctttcttatctaaatttacagaatgaataaccttttgatgtctaaaaaacaaaagcattttataatatctcattagccaaagctttctaggaacagagacgtttttccttgaaaatttgtttattcctggcagggtgaaaaaacatataaactaccctatttatatttgtatctctctatatatctacagattgtggaaatatagaaagagatatgacccaaagacaaatggtaaaccatctgaaagtgttgctccgtgctaaagaattttctggaaatttgcattttgatatctctttccactttgagaggaatctcagtgcagggaggtggccaaggaacagcacttcccagtggccaccagttcatgtgtctgcccaaggctccacgtgtatctcttacaacctgtaataattgaaagcaatggtttttttgcagtttaagatgcaatttttaatctgtgttttaaaatggagttcatatgggtgtgacacatgaactgggaggcacagatccacttgcagaacccaaagatacacaatcaattttgaaatgcaacttaagccattaattgttggtgtgaatttaaaattttctagtgtttgtatggtagtatgctgcctaagagcaaagcactctctgcacaaaagaaaattactgtagtggcttcattttaattagaatttttctccctggtgtttctttatagactaaaacaaaatcttttaagtttcttactacaggtaaaagctatgtgcaagaacctcaaaatgctaaaacctagcataatgccttagatctgtttttaagtcttgtatattcctacatagctgtccaatgtattatatttgtatagtgaattgtgtacaatttttgaataagtgcatcatcacttacccttatgttattgaacagtgatgatgatccatttcttcaaacattttaactgtcatattttttctttgtctattttgtgggtttttatttgtacagttcctcatggaagtttgctatcctgagatatgtgtatatgaaaagattattacaagggtaaaattaaagcaatatattaactatggttcttcaggagaaagcttacagtgtttcaggttgtgatttattttcaaagcagagttgactctgaacatcactttgttcatctgcattgatgtttgtatttctagtgtgagcagtttatgcaaaggtagatatattcagagaaattttaaatacatttatgcaagttactattgctttgctgatgctatttgcttatttgatgttaaataatgctattgtaaataaagaatctgttgttactgc

SEQ ID NO: 3282 - DNA, 1723 bp, Cricetulus griseus
cccacggcgctgaccgagtgctggaccggcggccgtcgggcgcccaggtctgcgcgcaccgctgctccggggtcactcggccgaggcgctggccgcgggagaccctcaggggagggctcgggctgccgggccgggcgccatgtccatggaggaccccttctttgtggtgaaaggagaggtacagaaagcagtcaacactgcccaaggattgttcagagatggacagagctatcgactggaccaccaacgagctgaggaacaacctccgcagcatagagtgggatctggaggaccttgatgagaccatcagcatagttgaagcaaatcctagaaaattcaacctggatgcaactgagttgagcataagaaaagccttcatcacaagtactcggcaaattgtcagggacatgaaggatcagatgtcagcttcatctgtgcaggcattgactgaaaggaaaaacagacaggcactgctaggagacagcagcagccagaactggaatactggagtgacggatcgatatgggcgccttgatcgagagctgcagctagccaactcccatttcattgaggagcagcaggcacagcagcagttgattgtggaacagcaggatgagcagttggagctggtctctggcagcattggggtgctgaagaacatgtcccagcgcatcggaggggagctggaggaacaggcagtcatgctggatgatttctctcatgagttggagagcactcagtctcgactggacaatgtgatgaagaaacttgcaaaagtgtctcacatgaccagtgatcggcgccagtggtgtgccatagccatcctcttcgcagtcctgttggtcgtgctgatcctcttcctggtgctgtgatgtcggccctcctcaggcccttctgcacatggactcgggagaggagaagcaagcactcggccacttacattcctctcccagaaacacgcctctgccctgcttcctccgtgtgactccgccactgagacagccctctctcccagcgctggaagggcaaggtcggaagaggaaagaggtcaccacacttccagctggagagcagaagctccagctgcccattctttctgggacagctagtcactgctttgccttactggacctcactccttgaggaagactcagagtcatcagaagaaagaagagccctacttactctgttgctcattctgatggcctctggcagccccttccctctgctcagatcctttccctgcttagatgggcgctgttgtcccttcaaaagaaacctggcaggaatgggacatttggagaggacgtttcccactgcgttgtatttcttagccccccaggagctggctgttgaggatgacagaaggctcagaaacacttcatgacaaaaatgcagtgtttcattttgctgggtaagagctgagattaaattgcttttccaggtgtgtttgtggcagggctaagcaacaggaaacagtgaaatccctgggggcttgggagtgctgaggacaaatggctttaatggactggagtggttgagagcaacagcacctgtgttggtccagcttaatgaagggctggtgatgtctccagaagccagacctgctgactgactgactgtcccagggagttctccctcagaggtgcatttgttttgtttctcaatgatgtgcttgcccagctaacttttaaattgcacttttaaataaatatttgtaaca

SEQ ID NO: 3283 - DNA, 1723 bp, Cricetulus griseus
gtagcaagagcgactgggtggacctgtggtagctatgatttcttcagtggtgagtttgtggtgtcacctgaaccagacacaagtgtccacactcttgacccccacgaagcacaagtacattatcctgggaagtgatggactttggaatatgattccacctcaagatgccatttccatgtgccaagaccaagaggagaaaaaatacttaatgggtgagcatggacaatcctgtgccaaaatgcttgtgaaccgagcccttggccgctggaggcagcgtatgctccgcgcagataacacgagtgccattgtaatctgcatctctccaggagcagacaatcaggggaacttcaccaatgaagatgagctctttctgaacctgactgagagccctacttacaacagccaagaaacctgtgtgatgactccttccccaagttctacacctccagtcaagtcactggaagaagatccttggccaaggctcaacgctaaggaccatatacctgcccttgttcgtagtaatgccttctcagagaagtttttggaggtcccagctgagatagctcgagggagtatccagactgtagtgatgacctcaaaagattaggtacttgaagaaaattgtcccaaagccctgactttaaggattcatgattctttgactaataccctgtcagttgggaagaagcaccgacgaaatggcttaagtagaagtagtggggcccaggcttcgagtctccctgcagcatcccagcgcagacactcggtcaaactgaccaatgcggcgtagactcaggggacagaagaagattggaaatcctcttctacagcagcaccggaaaactgtgtgtgtgtgctgagatgggcctgagaagtgggctcttcctatctaggatgcgagggctttttaaacttggtgcagaagttgaacttttttaaggggacaaaataaagtgtatacagtttgacttttttggaatttaacagttttatcctggccttgtacttgcctgtattataaatgtgaattttgtagatgtagggaattaagttgctgtaaaatgtgtgtaaatttgtatcctttacacaaattcagtctcttactctgacacagtaattgtgacaacagggctaatgttgaagaaaaatcagaagactctgtaagattttaaacgtgtttaaactttttaaaatgcttattatacacttgtatacaacacttgtgaagaacacacaactttttaaagaaaattagtaagcaaactggaaaagtgatgtattttcatagtgatctgtgctccacttaatgtttcttagggaccattagtgtcttttaaaagtattttatttctcatttcataatctataactaaacatttcataggaaaagcattgagccatgctaacgtagctgattttagtctccttgtcccacttagactatgcagtatctcttaacttcagtagcatttttctagaacagtacatctgatatgcttactgaaatttctggcatagaaggaggtgtgtttgcctcatacaccatcccagatcagtggcattagaatatatagttaccctcttttagtgtttgcttaaaaatacgtgaagtttttctcgctatttcaataacagatggtgctgctaattcccaacatttcctaaattattttatatcatacagttttcattgattattcgagtatgtccatttaataaatca

SEQ ID NO: 3284 - DNA, 1723 bp, Cricetulus griseus
tttcttgaggagtaacaactatagctttggggataatatagctttaagacaacttttggcagatgcaaacatcccaacatctgggcagtgttaccagaatcccggaggccctgacagaccaggagccactggttctgggaatgttaaagtagaaagggtttttcccctattcttgcctcctgaagcttccatgttaaggatggctggtcaactgacccaaagaggtgctctctcactgctgctcttcctaacaccagcagtgacaccaacatggtatgcaggctcaggctaccatccagatgaaagctacaatgaagtatatgcagaagaggtcccagctgcccgctccctggactaccaagttccccgatggtgttatacattgaatatccaggatggagaagccacatgctactcacccaggggaggaaattatcacagcagcctaggcacacgttgtgagctctcctgtgaccggggctttcgactgattggacggaggtcggtgcaatgcttgccaagccggcgttggtctggaactgcctactgcaggcagatgagatgtcatgcactgccattcatcactagtggcacctacacctgcacaaatggggtactgcttgattcccgctgtgactatagctgctccagtggctaccacctagaaggtgatcgcagccgtatctgcatggaagacggacgatggagtggaggcgagcctgtatgtgtagacatagatccacccaagatccgttgtcctcactcacgtgagaagatggcagagccagagaaactaactgctcgagtatactgggaccctcccgtggtaaaagattctgctgatggtaccatcaccagggtgacacttcggggcccagagcctggttctcacttccctgaaggagagcatgtgattcgttacactgcctatgaccgtgcctacaaccgggccagctgcaagttcattgtaaaagtacaagtgagacgctgtccaattctgaaaccaccacagcatggctacctcacctgcacctccgcaggggacaactatggtgccacctgtgaataccactgtgatggtggttatgaacgcgagggcaccccatccagagtctgccagtcaagtcgacagtggtcaggatcaccgcctatctgtactcgtatgaagattaatgtcaatgtcaactcagctgctggcctcctggatcagttctttgagaaacagcgactcctcatagtctcagctcctgatccctccaatcgatactacaaaatgcagatatccatgctgcagcaatccacctgtggattggacctgaggcatgtgaccattattgagctggtggggcagccacctcaggaggtgggacgcatacgggagcaacaactgtcagccagcatcattgaggagctcaggcaattccaacgcctcactcgttcctacttcaacatggtgttaattgacaagcagggtattgaccgggaacgctacatggaacctgtcacccctgaggaaatcttcacattcatcgatgactacctgttgagcaaccaggagctggcacaacgccgggagcaaagggatatatgcgagtgaccttgcctcagggtgtggccgaggtcaactgttgttgggagcccggactcaggtgggggtgaggtttgccaaatctagtacagttcccaggcatcattttagggcagaatattcgtttccctaagc

SEQ ID NO: 3285 - DNA, 1723 bp, Cricetulus griseus
  modified_base (1561)..(1561): a, c, t, g, unknown or other
ttgcttcaagaaacggcttatgaaagactttaccgatgggcgcaaagtgaatgcagaacattgacacaggagtcctgtgatgtgtctgccgtgttaactcaggccatggaagccctgcaggacaggcctgtcttatacaagtataccttagatgaatttggaaccgccaggcgaagtactgttgttcgtgggtttattgatgctcttacaagaggagggccaggaggtacacctagacccattgaaatgcattcccacgaccctctgaggtatgtgggagacatgctggcatggctccatcaagctactgcctctgagaaggaacatctggaagctctcttaaagcatgtaactgcacagggtgttgaagaaaatattcaagaagttgttggacatatcactgagggtgtgtgtcgtcctctaaaggttcgaattgaacaagtaatacttgctgaacctggggcagttttattatataaaatttctaatctcctcaagttttaccatcatacaatcagtggcatcgttggaaacagtgcagctactctactgacgacaattgaagaaatgcacttgctcagcaaaaaaatattcttcaatagcttgagtcttcatgcgagtaaactgatggacaaggttgagctcccgccacccgatcttggacccagttctgccctgaatcagactctcactttgctgcgggaggttctagcatcacacgattcttcagttgtccccttggatgctcggcaggctgacttcgtgcaggttttgtcgtgtgtcttagatcctctcctccaaatgtgtacggtatcagccagcaatttaggcacagctgacatggccacgttcatggtcaactcactgtacatgatgaagacaacattggctctgtttgaattcaccgacaggcgcctggaaatgcttcagtttcagattgaagcccatttggacactcttataaatgagcaagcctcttatgttttgactcgagttggcttgagctacatctacaatactgtacagcaacataaacctgagcagggttctttagccagtttgcccaacctagattctgtggcactgaaggctgcaatggctcaatttgaccgatacctctcagccccagaccacctgctgatgccacagctcaacttcctactcagtgctacagtgaaggagcagattgtaaagcagtctaccgaactggtctgcagagcctatgaggaagttcatgcagctgtgatgaatccagtcaatgcatacaaagatccagagagcatcctacacaggtcgcctgagcaagtgaagacactactctcctgatgatcttggcggcatttgcagattattgctgcctggcaatgtcaagggtggtttgggtttttaatctgagtctttattttttagtttgagaattacagttttccttgtatgagattgaggtcagtttctttcattctcagctaacatggagataaatcagtattggcttgagtctagcaatgttcgcttgttcattagctgcctctgcatagcattcaatgaatatatgtgtcanattttatcaaaatagcataatacaaggcaggaacttatgttgtgcataatttatttctactgtgaaaaaaaggattgatgcacttagcattttgtttgctaagagaaaaaaatatttttccttgttatctgattttcttaatatatattaaactatttctgg

SEQ ID NO: 3286 - DNA, 1722 bp, Cricetulus griseus
ctcaccccacctgtcatggactgcagtcgggataggatggtcgcggtggtccccgggcagttcgacgacgcggactcctcagacagtgaaagcacaaacgtgaagtcaattcaagcaaaagacgatatcctacttaaaaaccctcagaatgatgtgacagaggtacagagtgaaggtgagattgaggaggaagacaactatgactatgacagtgattggttctgggatgatacaaccggaaaactcaccaagagttctacctggaatggaggcagtaaccggcaggcaaatccccagacttctaactgcagttcaaccaaaatgtctactccaattgacaagtccttgcgaaaatttgaaaataaatcaatctaaataaactgaatgttactgattctgtcataaataaagtcaccgtaaaatctagacaaaaagaagcagaatcgtatcgagttaaagataaggctgacagagcaactgtagaacaggttttggatcccaggacaaggatgattttattcaaaatgttgcataaggaagacatagcagaaattcatggctgcattagcactggaaaagaagctaatgtatactatgctaccacagccagtggagaaagcagagcaatcaaaatatacaaaacttctattttggtattcaaagatcgagataagtatgtaactggagaatttagatttcgccgtggctattgtaagggaaaccctagaaaaatggtgaagacatgggcagaaaaggaaatgaggaacttatccaggctaagaacagcaaacataccatgtccaaaaccaatcaggttaaaaagtcatgttcttctcatgggcttcattggcaaggatgacatgcctgcaccgcttttgaaaaacgtccagttgtcagagtcgaaggcacgggagttgtacctgcaggtgattcagtacatgagatcaatgtatcaggacgctagacttgtccatgcggatctcagtgaattcaacatgctgtaccatggtggagatgtgtacatcattgatgtctctcagtctgtggagcacgatcacccacacgcgttggagtttttgagaaaagactgtgctaacgtcaatgatttctttttcaagcatgctgtggctgtcatgactgttagggagctcttcgagtttgttacggatccttccatcactcctgagaacatggatggttatcttgaaaaggccatggaaatagcatcccaaaggaccaaggaggaaaagactagccaagatcatgtggatgaagaggtgttcaaacaagcatatattcccagaaccttgaatgaagtgaaaaattatgagagagatgtggatataatgatgaggttgaaggaagaagacatggctttgaatactcaacaagataatattctataccagacggtcacgggactaaaaaaagatttgtcaggagtccagaaggtccctgcactcctagaaagtgaagttaaggaaaagacctgttttggttcagaagattctggaagttctgagtgctctgacacagactctgaagagcaggaagacaatgccggatgcaaaaagcacactgctgaccctgaccttgataaaaaggaaagaaaaaagatggtcaaggaagcccagagagagaagaggaaaaataaaatccctaaacatgtagaaaaaaagaaaggaaaaaacagacaaaggaccaaaaaaggcaaatagaatg

SEQ ID NO: 3287 - DNA, 1722 bp, Cricetulus griseus
ggacatagacacaaaattttcagaaaacaggtgccaaaagcttttacccatggctcatagtgcctaccaatcgaacttgcctcataattacaccatgacagtccataagaatcagcttgctcaggctcttcgagtatacagtcaacatgctagagggccagcctttcacaaatatgccatgcaattacacgaggactgctacaaattttggagcaatggccatcagctctgtgaagagaggagtttgactgaccagcactgtgtacacaaatttcactccttacctaaatcaggagaaaaaccagaggctgataggaaccctcctgtgctctaccacaatagccgagcccgctccactggagcctgcaactgtggaaggaaacaggcgcctcgagacgaccccttcgatatcaaggctgctaactatgacttttaccagcttctggaagaaaagtgttgtggaaaattggaccatatcaatttccccgtatttgagccaagtactccagatcctgcacctgccaaaaatgaaccgtctcctgccccaccggactcagatgctgagaaacttaaagagaaagaacctcaaacccaaggagagagcacaagcctgagtttagctttgagtttgggccaatcaacagatagtttaggtacctatccagctgacccacaagcaggaggagacaatccggaagttcacggtcaaggagaagtaaaatctgaaaagagaccaaacttggttgatcggcaggcatccacagttgaatatctcccaggcatgctgcattcaaattgcccaaaaggcctcttacccaaattctccagctggtctttggttaaactaggcccagccaagtcttacaactttcataccggtttggaccaacagggcttcgttccggggacaaactatcttatgccttgggacattgtcatcaggactagagctgaagatgaaggagacttagacacaaattcctggcctgctccaaataaagctattcctggaaagagaagtgcagttgtcatgggacgaggaaggcgtcgggatgacatagctagagcttttgttggctttgagtatgaagactctcgaggtcggagattcatgtgctcagggcctgacaaagtcatgaaagtgatgggaagtggaccaaaggagtcagcgttaaaagccctgaacagcgatatgcccctgtacattctgtcttcatctcagggcagagggctaaaaccacattatgctcaacttatgaggctttttgttgtggttcctgatgctcctttgcagataatactgatgccacaggttcaaccaggcccaccaccatgtccagtattttacccagaaaaacaagaaatcactctcccacctgatggcctttgggttttgagatttccttatgcatatgtgactgagaggggaccttgttttcctcctaaggagaatgtgcagctaatgagttacaaggtgcttcggggagtcctgaaagcagtgacacaataagttttctagccattcaagtcccagactggagcggatgtttgtcttgttttggtatgtgtgagagatttttttttagatatgtgttctgtgttttcccaaaaccaaatgtgttttggttagaagtgttcagtatttggacaataattgttctattatttcattatattgatatttattgtaaaatacaataaaaatttcttctaaaaaaaaaa

SEQ ID NO: 3288 - DNA, 1722 bp, Cricetulus griseus
ggctgccgggcagggggccgcgggagcggtgctgtgagtgagcccggctgctgggccgccggctccggcgcatggacctcctccgagccggggccgcgtgcgctcgggccatggcgcgcctgggcgcggtgcgctcacactactgcgcgctgctgctggccgcggcgctggcggtgtgcgccttctactacctgggctcgggccgggagaccttctccagcgccaccaagaggctgaaggaggcccgcgccggggccgccgcgcccacgccgcccgcgttcgagctggcccggggctccgcggcgccggcctcgggcgccaaggccaagagcctggagggcggcgcggcggtgccggtggactaccacctgctgatgatgttcaccaaggccgagcacaacgcggcgctgcaggccaaggcccgagtggcgctgcgctcgctgctgcgcctcgccaagttcgaggcgcacgaggtgctgaacctccacttcgtgagcgaggaggccagccgcgaggtggccaaggccctgctgcgggagctcctgccgcccgccgccggcttcaagtgcaaggtcatcttccacgatgttgctgtgctgacagacaagctcttccccattgtggaggccatgcagaagcacttcagtgctggctcggggacctactacagcgactccatcttcttcctctcggttgccatgcaccagatcttgcccaaagagatcctgcggatcattcagctggaccttgacctgaagtataagaccaacatcagagagctgtttgaggagtttgacaacttcctgccaggtgctgttatcggcatagccagagagatgcagcctgtgtacaggcacacattctggcagttccgccatgagaaccccaagactagagttggggaccctccgcctgaggggctccctggcttcaacagtggagtaatgctgctgaacctagaggccatgcgccagtccccgctttacagccatctgctggagcctgcacgggtacagcagcttgcagacaagtaccacttccggggccaccttggggaccaggacttcttcaccatgatcggcatggagcaccctgagctcttccatgtgctggattgcacttggaacaggcagttgtgcacctggtggagggaccatggctacagcgatgtcttccaggcatactttcactgtgagggccatgtcaagatctaccatgggaactgcaacacccctatcccagaggactaggacccagctcacccactatgcctatggggctcccggacatggggaaggaggagtgactctgcaaggatgcccttgggatccaggtgctgcaggccccccagctgtccagtccctgtccagtggccatccaaagaagcttagctgagcactgctggagctcaggttgtttcccttcagggcattgtgaaggacagacacagatgtcttccaggatgtagctgaagatacaagaactggctttgctagaccaaataagtgttaacttagataggcaggcttctgtttgtgagaagaacaagtcgtgctgctgtagtcccagtgagcactgagccagtgagtcagggctttaacaagtagcccagagtttaagcctccgaaggaatgccacagtcccacaatctttcccaggaggctttgcacctcctctccagatgttcttgttacagtccagctcatgtcctcaggcaagaaa

SEQ ID NO: 3289 - DNA, 1721 bp, Cricetulus griseus
aaaaagcctaaacagaggagacgccatggacgatcagggctgccccaggtgtaagaccaccaaataccggaacccttcgttgaagctgatggtgaacgtgtgcggacacactctgtgtgagagctgtgtggacttactgttcgtgagaggagctgggaactgtcctgagtgtggtactccactgagaaagagcaacttcagggtacagctctttgaagatcccaccgttgacaaggaggttgagattcggaaaaaagtgctgaagatatacaataaaagagaagaagattttcctagtctaagagagtataatgatttcctggaagaagtggaggaaattgtcttcaatttgaccaacaatgtggatttggagaacaccaaaaagaaaatggaaatatatcaaaaggaaaacaaagatgtcattcagaaaaataagttaaaactgactcgggaacaggaggaattggaggaagcattggaagtagaacgacaggaaagtgaacaacgaagactgttcctacaaaaggaagaggagctgcaacagattctgaagaggaagaacaagcaggccttcttggatgagctggagagctctgacctccctgtcgctctgctcttggctcagcataaagacagatctacccagctggaaatgcagctagagaagcccagatccacgaagccagtgacgttttccaccggcattaaaatgggtcaacagatttcattagcaccaatccaaaagcttgaagaagctctctatgaataccagcccctgcagatagagacctgtggaccacaagttcctgagctagagatgttaggaagacttgggtatttaaaccacgtccgagctgcctctccacaggaccttgctggtggctatacttcttctcttgcttgtcacagagcactacaggatgcattcagtgggcttttctggcagcccagataaacctgtgttttctcatttataagatttggatcctggagccaaaccaaggggtttgaaagtaaagagatttgtgaaatgccagcacacacagctgcaagactgcgccacttctagctgctgtgttcaggtgtttattacagtctgaaccaagctgagaaatgtgttgcatgtagattcctggaagagctttattttctacttctgttcttcagacagggattgaagcattgcacctcatctgacaggaaaagaataaatgatttccctatgtatggagttgaccctcagcagtaagaaactcagggcctgttttgtgcagtgcaaagtgaggcaaacctaatatggttcccagctgtgagtcccactcatgataaaccagagcctagcattagcccgctttaatgacaaattcaaagaaggaggctaataaaattgaatacttcaatggcacctttcactgccaatgtgagctcattttatgatgagatgctgagactggaaaaggcaccacttaagtgaaatttctctgtgcataaattgtagactgatgtagttttccaccagaacttcaagtggctttattgtactcatgattttgcttagtttggatgtggataggatactacccatagcatcccagccttgtgtgagtctgttgcatagaaccctgaatgaggaacatagtttttcaaggaaattgaagggctgtctatcaaatctctgccacaagaaatactaatttatggcggaaagttaaatgaatcaa

SEQ ID NO: 3290 - DNA, 1721 bp, Cricetulus griseus
tccgccttccagatcaacctcagcccgctcaaggagccgctcggcttcatcaaggtcctggagtggtttgcttccatctttgcttttgccacctgtggcggatttaagggcaaaacagaaattcaagtgaattgtcctcctaaagttggtgacaataagacagttacagctacttttggttatccattcaggttgaatcatgcattctttcatccgcctccagatgtcaatgtgtgtgatgtgaagtgggaagaccacgtcctcataggtgactactcttcttccgcacagttctacgtcacatttgcagtctttgtgttcttgtactgcattgctgcccttctgctctatgtgggttacaccaacctctaccgggatagccgaaaacttcccatgatcgactttattattactcttgttgccacttttttatggttggtgagttcctcggcctgggctaaagctcttacagatattaaaatagctaccggacacagtattattggccaacttgagccttgtcggttaacaggagtgtcatgtcactttggttctgtgactagtatgggatccctcaatgtatctgtgatctttggctttctgaatatgatactttggggaggaaatgcttggtttgtgtacaaggagaccagcttgcatagtccatcaaatgcgtcagcttcccacagccaaggaggcatcccaaccccttctggaatgtaattaagtggggaatatactgtatgaatgtgtgctatactgtgccttgttgccaacatcttgagaagcattattgtttctaataaaaagtaatggctttttcagtaaattggtgggtttaaaattttgctgcttttctatataaaacttgctttttctagaaacatgagatgtaaatgtggttttacatgtaagtttgaacattcaggatcctgttatgagatgatacttatttttaaatcaacagtaatttcactaagttaccttctaaaatgtttacaccttaagccttaccataaaccttcattcagaaaagttatgtcatatcataatataggaagaatgagtttggaatatacactactgtttgcttctatgcatcatatccttaaggcttggcttgttttaagaaaaccttgattgcataaattgtatttagaaaaaattagtacaaattttatatctgaatattgttcatgttaaaagtttttgaattgagaagactgggtatatattttgtttctctttttctaaatgacctgctgtacttattaggtatactaaaattgtcttaggagcaaggacttgaaaattgtaacatgtgtagagttaactctacacttctgttgcctgaggtgtattcattatttctggtggtttcttgggcttgctatgttagaaaccacggttcccacaatagctttatagatgtgggcattctcaatgatgcttctttgctatccttgttcatgctaagaaaaagctaccttttttcttccagaccctgtttagagggttactaaaaattaaggttgctttttacttttgaaacatttaacattatttagtcaatgaagttgcttctcctgagtttaacattgatattgtgaaaataaatgcagttcagatttcctatttcttaatattcattcgtacttcacaaaaggatgactaaggaattatgctcataaaggaacccagtaagctgtactgtgtgtgtg

SEQ ID NO: 3291 - DNA, 1721 bp, Cricetulus griseus
ggggctgatggaagtggagagggggctggagagggcaccctactgtatccagcatgctccaaggctacagcgtccgtggttccaggccttgttggggaccttcttcacctgggcaatgacagcagctggagcagctcttgtgttcatattctccagtgggcagaggcggatcttagacggaagtctgggctttgctgcaggggtcatgttagcagcttcctattggtctctgttagcaccagcggttgagatggccacgtcctcagggggcttcggtgccttcgccttcttcccagtggctgttggcttcaccctgggagctgcttttgtctacctggctgacctcctgatgcctcacttgggtgctgcagaacgacccccagaccggccctggcactgaacttggaccctgcattgatgaagaagaagtctgatcccgagggccccaccacactgctcctgcctgagagggaactctccatccggatagagaagatggcagttgctggcctcccagagggcactgtcccgtcagggcctgtgcaagggaacccagggcagactggggtcagcagctggagaaggatcgctctgctcatcctggccatcaccttacacaacgttccagagggtcttgctgtcggcgtaggatttggagctgtagaaaagactgcatctgccaccttcgagagtgccaggaatttggccattggaattgggatccagaatttcccagagggcctggctgtcagcctccctctgcgcggagctggtttctctacctggagagctttctggtatggacagctgagcggcatggtggaacccttggctggggtctttggagcctttgctgtggtgctggctgagcctgtcctgccctatgcactggcctttgctgctggtgccatggtctacgtggtcatggacgacatcatcccagaagcccagatcagtggcaacgggaagctggcatcctgggcttccatcctgggattcgtggtgatgatgtctctggatgtgggcctcggctagttccaacaaccttgggacaccaggaaggaaagtgctgggcttctgcaggaccatgagcctctcattaaaacccggttcctttctctcctctccatatccttacagatcagttctgattacactttgacttttcattttgctttggaggggaaagttggttttctttgtaatctcaaggcgtcatagaactgtagatttgtgtttggaccactgagtggaaggaatctttcttcagtgggattgtcaaggccaacccctactgtcccacctccagtctccctcactagactcaactttagctcctcagggtcacctccagaagtcagctcttgggacacaagacctgagcatgttggcctagggtttcagagccggtggtcagagcccctggtgctctttcaccgtggcccttctgccacctagaatgctgggacagaagattcatgaacacagacgtctgctccccaatgctgaggcagctcaagcagggtctgtttcttccagggagggctcttggtagggtcacaagaacagagcacttagtcgcagttcctagatctcctagctattaatctcaatgtgtttacagccattgttttcctgagagacttgtggatactagcaaattgcaagtcctcacccccttgtttaccaatggagttacttaagttagctctatcgaatga

SEQ ID NO: 3292 - DNA, 1721 bp, Cricetulus griseus
ggaggaggctgaggaaaaagagagaccatagacttcctcctcggcctagagcgccctttaaagtgttgggggagaggagggcgggcagggaccaccctgaactggccgccggcggtatcatggcgtcccggaaccccctccccaagactatgaaagcgatgacgaatcttacgaagtgttggatttaactgagtatgcaagaagacaccactggtggaatcgagtatttggccacacttcgggacccatggtagaaaaatactcagtagctacccagattgtaatgggtggtgtgactggctggtgtgcaggatttttattccagaaagttggaaaacttgcagcaactgcagtaggcggtggctttcttctcctgcaggttgcgagtcacagtggctatgttcagatcgactggaagagagttgaaaaagatgtaaacaaagcaaaaagacaaattaagaaacgagcaaataaagcagcacccgaaatcaacaatgtgattgaagaagcaacagaatttatcaagcagaacatcgtgatatccagtggctttgtgggaggctttttgctaggccttgcctcttaaggactcgaaggcactgtcttagtgtctccagcatttgagaagagagctggtggcagtaggacaatctctcaatggctcatgcccccagagtctccagggtaaccaacgcccagctggacaattgcaaatgcagcaacttagcattcaccacctgaagcttgacaagctagtgtctgctgtaagacaacctatatggtatgtaaacaatagtattcttgagcaaaccatggcttttgacattttttaatttacatttgtttagaaaccagcctatgaatataatcattggctatttggagacagaaaaaagctgttatgtgtactgtccaattaaatattaccttgtcttattttaaaagttctttgtgctttactgcatagtgccaatagtgtaaaaaagtcttacagcttcaatattatggctgaatttttaagtaatgtgtgtgcaataaactgaagaattgtattacccctttgtgggaggcacagaactaatttgggagtatgttattagttgggtcattgatacattttatggacttcaaatgcgtttcatttttttatttctaaaaatcctaattataattttggcctcttcaccaaaaggtacagattgctttaaaatgcttaatagtataatatgaatttattgtctgaagaactgtgattttctgtgtagtcataaaattataacctaaatgtaattgcttccttgtttatggccctcatgcattggtagcattatatttcttgaacactaggtcagttcacttgtttttcagggccagcatcatactttctcagaacctcccttgtccaagaaaatctttctgtattgttagtcttactcatagaattctaggttggcattggggaaaacagcagaacagtataagttggagtcttcagattggaaagattgcagctgtttagactatctccttgtgataggaagctcctgggatatattctgtatattgaaaatgtgtcatttcatatttctgatattggttataaattctgtgcttttactgtcttgaagtttttaaaaatcgaatgtgagattgagttttaatttcttttattctcattagtgcctcatagaatgctgttaaataaaactcagtttcttaat

SEQ ID NO: 3293 - DNA, 1721 bp, Cricetulus griseus
cttacactgacatcaaagtgattggcaatggctcatttggagtcgtgtaccaggcacggctggcagagacaagggaactagtggccatcaagaaggttcttcaggacaaaaggttcaagaaccgagagctgcagattatgcgtaagctggaccactgcaatatcgtgaggctgcggtactttttctactccagtggcgagaagaaagatgagctgtatttaaacctggtgctggagtatgtgcccgagacggtgtaccgggtggcccggcactttaccaaggccaagctgattatccctatcatctatgtcaaggtgtacatgtaccagctcttccggagcctggcctacatccactcccaaggtgtgtgtcaccgtgacatcaagccccagaatctgcttgtggaccccgacactgccgtcctcaagctctgcgatttcggcagtgcaaagcagttggttcggggggagcccaatgtttcctacatctgttctcggtactaccgtgccccagagctcatcttcggagccacagattacacctcatccatcgatgtgtggtcagctggctgtgtgctggctgagctgcttctcggccagcccatcttccctggggacagtggtgtggaccagcttgtggagatcatcaaggtactaggaacaccaacccgggaacagatccgagagatgaaccccaactacacagagttcaagttcccacagatcaaagctcatccctggacaaaggtgttcaaatcccggacgccacctgaggccattgcgctgtgctcgagcctgctggagtacactccgtcctcaaggctctcccccctggaggcctgtgcgcacagcttcttcgatgaactgcggtgtctcggaacccagctccccaacaaccgcccgcttcccccctcttcaacttcagccctggtgaactctccatccaaccgtctctcaatgccattctcatccctcctcacttgaggtccccagcaggccctactacccctcacctcgtcctcacaatcctcacaagctttaactgagactcagagcggcccagactggcaggcgcctgatgccacacctaccctggctaactcttcttgagggccccaccgaccacccctccacatccatctgggaactcccaagtggggctgggaagggggccatagcccatcaagctcctgccctggctgggtccctatacgagagggcagagggaaatgaactcctatccccaacatctagcccctccctcaccagcctcacctttgtggtgggctttttaaagaggattttgactggttatggggagggaagagaaggaaggacagggggtttggggtaagaggaccttctacccccttggtcccctcccctcccccaggctaccactccttcccccctcccgtgtcccttgtaaatagaaccagcccggcccacctcctctccccttccctggccctttgggtgtaaatagattgttataattttttcttaaagaaaaacgtcgattcacaccatccaacctacccccacctcagctgtaccccctctcttgtcctctgctcccaaggctcctaccctctccccatcctggaaggaaggagtagggaagagcccctggtgtcttagtttccacagtaaggtttgcctgtgtacagacctccgttcaataaattattggcatgaaaccctaaaaaaaaaaaaaaaaaa

SEQ ID NO: 3294 - DNA, 1720 bp, Cricetulus griseus
  modified_base (1701)..(1701): a, c, t, g, unknown or other
gtccggactgcccctgggaggcacacccacctctcccggccgcacccctgcgcagcagcatgtccgcgcttgagtggtacgcccacaagtctctgggcgatggcatcttctggattcaagagcgcttctacgagtcaggcaaccgcgccaacatctggctggtgcgcggctccgagcaagacgtggtgatcgacacgggcctggggctgcgcagcctcccggagtacctctactcctccggcctcttgcaggactgcgggctaaggaggatgccgggcgccggccctgacagcgaggtggtgcgagcccccagccctggctggagggccaggcagttccgagtgcaggcagtgcagccgaccctcattctgcaggatggggatgtaatcaaccttggcgacagacagctgactgttatgcacatgccaggtcactccagaggcagtatttgcttacatgacaaagaccggaaggttctcttcagtggtgatgtggtatatgatggatcgctgattgactggctcccgtacagcaggataagtgactatgtcggaacttgtgaacgtctcatagagttagtggacacaggtcttgtggagaaggtgcttcctgggcacttcaattacctttggtgctgaaaggtctttttcgtttagcatctaactatatttcaaaagctggaatatgccacaaagtatctacttttgccatgaggtctcttgcaagtttagccctccgtgtaacaaattctaggacctcaacctagtatctgtactgatcatttgctggaattaactgtgtagattaacccagttcccttgtgttgtttaaaacggtaactagtgagcatttcaaaaagtgcttttatataatcatattgtataatagagaagaagaaaaagaaaaaaaaagaaaaaaaaaaaaaaaaaggtgggtctgtttcaactgatgacacagtactgagaaaagagatggttcagggcaactataatcacttagtaagccttaaatatagccattattttgtatcagcagcacaaaataaagccaaaagtccttaatcattgactgttttatcatattttagtatttgtttaagatcaggagagagtaggcattaagttttattaggaaaatttattccagatgagatatttccctatttattaaaagtgcaattttcagtatacaacatggactaggaacaaagctagtaactgaacacaggtttgcctgctaccaaactgtgccctctcttaaacctgcacaatctatagaattgaccacatatatattttttactttccaacatgtcatatatgggaagaacaaatcaaacaatatcaaatcctaatagcatttttagaatataaaaaagatatattttcaccctgacagtgacccttgatttatgatttttggaaatagactattgtgaatgtaactcaaagttgtcaaaatgttagacatttcaaaaaaattttcttatttatattgctaataatgaactcgtagactttcactttctttgcttaattaatgtctccttttaagtgaaaaagcttaaaacaaactgaaaccttgtgtgctatgctgatgtagttgaataaatggttatgtatatttgttcttatatggatagtaatatgaatgtgacatgcacaaattgtcctataattttccaataagtatatgtaaacnttggtgtgataactattaa

SEQ ID NO: 3295 - DNA, 1720 bp, Cricetulus griseus
acggtggaaaaatactgagttgtgggttgagaagagcagcagctatgagaatggagagattggcgaaggtcaggccaaaggaggcgaagagacaaatgaggaatccaacctcttgagtccggtgcaggatggcgtgaagacgccgcaaattgacagcaacaaaggcaacaactaccggatcgtcaaggagatcttgatcaggctgagtaagctctgcgtgcagaacaagaagtgtcgcaaccaacaccagcgactgctgaagaacatgggggctcacgcggtggtgctggaccttctgcagatcccctacgaaaagaacgatgagaagatgaacgaggtgatggaattagcccacgccttcctgcagaacttctgccgggggaacccacagaatcaagttctccttcacaaacatctcaacctgttcctgactcctggactcctggaagcagaaacagttcctggactgtatctgctagcagtagcgatctgcacatctatgctgtttttcttctccaagcctgtgggtatccggccatttcttgtgtctatcatgctcagatcaatatacaccatcggtctggggccaacactaatacttcttggtgctgctaatctatgtaataaaatcgtgttcctggtgagttttgtgggaaatcgaggcacattcacccgaggttatcgagcggtcatcctggacatggcctttctctaccatgtggcgtacgtcctggtttgcatgctcggcctctttgtccacgagttcttctacagcttcctgctctttgatttggtgtacagagaagagaccctgctgaacgtcatcaaaagcgtcactcgcaatggccgctccatcatcctgaccgcggtcttggctctcatcctggtctacctgttctccatcattggcttccttttcctgaaggatgacttcaccatggaagtggacagactgaaaataaaacaccagtcccatggtacctcctcttcttcttcattgtcatcatcatcgttcttaacctgatcttcggtgtgatcattgacacctttgctgacctcagaagtgagaagcagaagaaggaagaaattctcaagacaacctgcttcatctgcggcctggagagggacaaatttgacaacaagacagtctccttcgaagaacacattaaatcagagcacaacatgtggcattacttgtacttcatcgtcctggtgaaggtgaaggacccgacagaatacacagggcctgagagctacgtggctcagatgatcacggagaagaatctggactggtttcctcggatgcgggccatgtcacttgtcagcaatgaaggtgacagcgagcaaaacgagatccggaacctgcaggagaagctggagtccaccatgggtctggtgaggcagctatctgggcagctggcagagctgaaggagcagatgacagaacaaaggaagaacaagcagaggctgggcttccttggatcaaacacaccccatgtgaaccatcacatgccaccacactgacaccatgggggcacgccgtgaccagcctttcatcagatgcctgcctcgttgctgaaggaaggatgagatggagggagcaaacagtggctattgttgagaagctaaaaacagccaagtgccaagatgctgagccattgagctcccggaacaatccgtaactgtgttttcacgcttgagaagactcaagctaaaaaaa

SEQ ID NO: 3296 - DNA, 1720 bp, Cricetulus griseus
cctggctttgaggccactttcttccagctgcccaagatgcgcagctgtggtggctccttgagtgaagcccaagggttatttagcagcccctactatccaggccactacccacccaacatcgactgcacatggaatatcaaggtgcctaacaacaggaatgtgaaggtgcgcttcaaactcttctacctggtagaccccaacataccactgggcacttgccccaaggactacgtagagatcaacggggagaggtactgtggtgaaaagtcccagttcgttgtcagcagcaacagcagcaagatcactgttcgcttccattcggatcactcctacacagacaccggcttcctcgctgagtacctgtcctacgactccaacgcccctgtgacaacatcaacgactgcggggatggcagtgatgaggagggatgcagttgtcctgctgagactttcaagtgttccaatgggaagtgtctccctcagagccagaaggtgtggatgggaaggacaactgtggcgatgggtctgatgaggcctcgtgtgatagggtgaaggtcgtctcttgtaccaaatatacctaccgctgccacaatgggctctgtttgagcaagggcaaccctgagtgtgatgggaagaaggactgtagtgatggctcggatgagaagaactgtgactgtgggctgcgatcatttaccaaacaggctcgggtagttggtggcacaaatgcagatgagggtgagtggccctggcaggtgagcctccacgccctgggccagggccacttgtgtggggcctcgctcatctctcccaactggctggtctctgcagctcattgctttatggatgacagaaatttcaagtactcagaccacacaaagtggacggccttcctgggtctgctggaccagagcaaacgcagctccactggggtacaggagcacaagctcaaacgcatcatcacccaccctttgttcaatgagataaccttcgactatgacattgcgttgctggagcttgagaagccagcggagtacagcactgttgtgcgacctatctgcctgcctgatactacccatgtcttccctgctggcaaggccatctgggttacaggctgggggcacacccaagaaggaggcaccggagccctgatcctgcagaagggtgagatccgtgtcatcaaccagaccacctgtgaggacctcatgccacagcagatcaccccacggatgatgtgtgtgggtttcctcagtgggggtgtggactcctgccagggtgactctggtggcccgttgtccagcgtggagacagaagggcgaatcttccaggctggtgtggtgagctggggtgaaggctgcgctcagaggaacaagccaggcgtatacacgaggctccctgcagttcgagactggatcaaagagcagactggggtatagaagcatggatggcctgccatgaacacccacagggatgcccccacatgcaaacctggagacatgccaggaccactgaggccattgatactgcggcctcttcctcacaacccaaactgtgaactgcattcccaggactcagggttcttcccttggcttccaaaatggggccaggagttgggcagagaacttcagtggcagtggccaggctggggggcaaggatttgatgacaggcttccatccttgccctgagctgggtgaagatgaccctttcctggagacctgcttcc

SEQ ID NO: 3297 - DNA, 1719 bp, Cricetulus griseus
gagcaggtgccccggggcttttccgaagcccaggcggcagcgtggctcgaagtggtgcggggtgctcgggtagtggccctggatcgcggaggctgcggacgtagttccaaccgcctagcccgctttgccgacggcacccgtgcctgtgtacgctatggcatcaacccggagcagatccagggcgaggccctgtcctactatcttgcgcgcctgctgggcctccagcgccacgtgccgccgctggcactggctcgggtggaggctcggggcgctcagtgggcgcaggtgcaggaggagctgcgcgccgcgcactggaccgagggtagtgtagtgagcctgacgcgctggctgcccaacctaaccgacgtggtggtacccgagccctggcgatcagaagacggccgtctgcgcccactgcgcgacactgggggcgagctgaccaacctcagccaggcagagctagtggacctggtacaatggaccgatctgatcctcttcgattacctgacggccaacttcgaccggctcgtaagcaacctcttcagcttgcaatgggacccacgcgttatgcaccgcgctacgagcaacctgcaccgtggaccgggaggggcgttggtctttctggacaatgaggcgggtttggtgcacggctaccgggtggccggcatgtgggacaagtataacgagccgttgttacagtcagtgtgtgtgttccgagagcggactgcaaggagagtcttggaactgcaccgaggtcaagacgcggcagcccggctgctgcgcctctacactcgccacgaaccacgtttccaagagctggccgagctcgcagacccccatgctcagctgctacagcgccgccttgacttcctcgccaagcacattttacactgcaaggccaaatacggccgccggcctggggacttaatggcactccgaggaagagagggactgggatatgaatgatgaaggttaaggctgttttctctgcgacaggctaggaccaaccggccaacgcccacccagtgacctgatcgcgaagctgtctaaaaacttgtgttttacccacttgtccctttcttttcctgccagacggtttcctttccaagttctggaagggcaaactcatcgaagcaggaagtgtaacactccctccacccagtttattaaaaggattcttttctgtgtttgtgtggagattggatccgaagaaactggctgctggggtttggcccccgaatgggagtctctatgggagatgcagtccattcttgtcgccgccccccaccctttcccaaaaaggaaaacttccgtttgagcccttgagctaattctatttcctatcaccatacgggtggaaccagagccggctgtgacttgggctggtggagcccccttcctgtgttctccctttgttccagcgccacgatggagagataactgttccaagctgggggacagctctggataggacaaagaacaagacttccccgccccggggagccctacagaccctggcaatttgtctgactcattccccaactcccatcatgttggcctgaaggctatgaattcaggactagttgtatgcagagtcagtaatgaatttcttcctgtttctcccagctgaccaaaaatatgacaatgatgatgttcaccagaaaaaaaaaaaaatcaattccatagactactttactttgagttaattttaatttttta

SEQ ID NO: 3298 - DNA, 1719 bp, Cricetulus griseus
cacacactctactacttcctaaggtgtccacagatggagtccatggagaaccccaacctggaccccccaagaatgaccctgaacaatgaacggcccttcatgctgctgccaccactgatggagtggatgcgggtggccatcacctacgcagaacaccgccgcagcctcaccgtggacagtggtgatatccggcaggcagcccggctgctgctaccaggcctggactgtgagccccgccaactcaaacctgaatgttgcttcagttccttccggaggctggatgctcgagctgctactgaaagattcaaccaggacctgggcttccgcatgctcaactgtgggagaacagaccgcaggaggccatgtactacagcgccgagcatggctacgtggacatcaccatggagctgagggcactgggtgtcccctggaagctgcatatctggatagagtccttgcggacctctttctcacagtcacggtactcggtggtgcagggcctcctgagggacttcagctctatcaaggaggaagaatacaatgaggagctggtgacagaaggcttgcagctcatgtttgacatcctcaagaccagcaaaaatgactccgtcctccagcagctggccgccatcttcacacactgctatggcagcacgccccatccccagcatccccggagactccgggaaagaccgaaagctgttttatgcacacaaggtccttttggtgacagcatctaacaggtttaagaccttaatgaccaataaatcagagcaagatggggacagcagcaaaaccattgagatcagtgacatcaagtaccacatctttcagatgctgatgcagtacctttactatggaggaacagagtccatggagatccccactgctgacatcctgcagctgctgtcagcggccaacctgttccagctggacgccctgcagagacactgtgagatcctgtgctcccagaccctcagtgtggagagcgcagtcaacacctacaaatacgccaagatccacaacgccccagagctggccctattctgtgagggcttcttcctcaagcacatgaaggccctgctggagcaagatgccttccggcagctcatctatggccgaagcagcaaagtccagggcctggacccactgcaggacctgcagagcaccctggctgagcgagtacattctgtctacgtcacctcccgggtgtgagtcagggtggatggtgactgctatctgtgggtgtgcgaaggtctgctaaagccaggaacacagccaccagtgacaccctcagtgagggaggcccttacactcaggactagagtgcaagagcacacttctctctgggatctgtgactcttggacatgaaggacagggccttggtggaagagaaggggtgacccctccccaccctccccctcaatcttggcttcccatcctctggcctgtttatggacagattctgggacagcatcaagaacagctaccttagaaactatttattcatcagaagcccctggggcttgcaatcctggaaaatattttcaattcagctgcttgtgctggatgtacaaaagaatgagtggtattttattgctgtaatattgtatgatattgtaactataccttaatgttgtcacttactgtaaatgtactatgattttatcaacaataaacactcattaacagtagaaaaaaaaaaaaaaaaaaaaaaa

SEQ ID NO: 3299 - DNA, 1718 bp, Cricetulus griseus
ggctcctagagtagctagaaaagcttcgatcctacgtggggaagagtggactattaacctgcgccttgtccgggagggtcctctttgacctaatggcagcacctccgctgggccgactggtgctgacccatctgctggtggccctcttcggcatgggctcctgggctgccgtcaacgggatctgggtagaactgcctgtagtggtgaaagagctcccggagggttggagccgcccttcgtacctctctgtgcttgtggcgctggggaacttgggtctgctgctggtgaccctgtggaggcgtttagcccacggcaagggcgagcggatccctatccaagtggtgcaagggctaagcatagtgggcacagccctgctggcccctctgtgggaccgtgaggcttcagtggcagggcagtcccactctgtggccttcctaacgctggcgtttgttttggcactggcctgctgtgcttctaatgtcactttcctgcccttcctgagccacctgccacctccctttttacggtccttcttcctgggccagggcctgagtgccctgttgccctgtgtgctagccctggtgcagggggtgggccgccttgagtgcctgcctgtgcctgccaatagtaccactgggcctccgatcaaggtgtctcccatcaagttccctgagcgcttttctgtcagaactttcttctgggtgttgactgcccttctgggcacttccgctgctgccttccaaggtctcctgttactactgccatccccaccatcggtacccatagtgggtccagtgcatcgggtaggaacaccaggaacagaggaggaagaggaagaggaagaagcctcaccgttgcaggagctaccaggccaagtggcaggcactattcccagcccagaccctaaggcccaccagctgttctctttccgaagtgcctgtctactggggctgctggctatcaccaatgctctgaccaacggtgtgctgcctgctgtacagagcttttcctgcctgccctatgggcgcctggcctaccacttggctgtcgtactgggtagctccgccaacccccttgcctgctttcttggccatggcagtgctgtgcaggtctctggcagggctgtatggtctgtcaatactgggcatgtgctttggagcctacctgatgacactggcagtcttaagtccctgtcctcctctggtgggcacctctgcaggtgtggtccttgtggtgctttcatgggtcctgtgtgcaggcgtgttctcatacatcaaggtggcgatcagttccatgctgcacagtggaggccggccagcattgcttgcagctggtgtggctatccaggtgggctctctgctgggtgccattgctatgttccctcccaccagcatctatcaagtatttaaaagtggagaggactgtgtggcccagtgtagctcttgaacctgggatgtgcgggacttacttcacctcacttgtctccacctggagattgccacaatgcctgagtcctgtggcctaaggtggcctcccaactcagatacactcgtggatattacacactccatcagagacctggctttgagaaagaccaggctgaggaccaaagagcaggcttggaaccagggataggttggggctgaactggacttatagacagctgtgagttgccatatgggtgctggaaattgaacccaggtcctctggaagaacag

SEQ ID NO: 3300 - DNA, 1718 bp, Cricetulus griseus
  modified_base (78)..(78): a, c, t, g, unknown or other
acaacccccacccacgacgggcgtgtgggcaccgctctgccagcactgcatcctgtctctgagggaacggaacacagngccgatctgccccgtagacaaggaggccatcaagcctcaggaggtgttcaaagacaactgctgacaaaagggaagtcctcaacttatatgtctactgcaagaaacgcccctggatgtaatgccagggtgattctggggcgattccaggatcatcttcaacactgctccttccaagccgtgccctgccccaacgagagctgccgggaagccatgctccggaaggatctgaaggagcacctgagtgcatactgccagttccgagaggagaggtgcctttactgcaagagggatgtggtggtcactgacttgcaggatcacgaggaaaacttgtgtcctgcatacccagtgtcttgtcccaacaagtgtctgaggactattccgagaactgaggtgaatgaacaccttgccgtatgccctgaggcggagcaagactgtccctttcagcactatggctgcactgtcaaggggaaaagggggaacttgcaggaacatgagcaggcagccctgcgggaccacatgcttctggttttagagaagaacttccaactagaacagcagatctctgacttatatcagagtctggaacagaaagaaagcaagatccagcagctggcagacaccgtgaagaagttcgaaaaggagtttaagcagttcacacagatgtttggcaggaatggaagtttcctcgcaaacgtccaggctctgaccagtcacatcgacaagtccgcctggctggaagcgcaggtgcgccagctgctgcaaatagttaaccagcagcaaaatagattcgacctgcactctctggtggaagcgattgacagcgtgaagcagaaagtcaccctgctggaagccagtgaccagagattagttgttttagagggagagaccagcaagcatgacgcacacattaatatccacaaagcccagctgaataagaacgaagaaagatttaaactgctggagggcgcctgctacagcggcaagctcatctggaaggtgacagattacaaggcgaagaagaggaaggccgtggaggggcatgtcgtgtccgtcttcagccagcctttctacaccagccgctgtggctaccggctctgtgctagggcctacctgaatggggacgggtctggcaaggggacccacttgtccctgtactttgtggtgatgcggggtgagtttgactcactgttgcagtggccattcaggcagagggtgaccctgatgcttttggaccagagtggcaagaagaaccacattgtggagaccttcaaagctgaccccaacagcagcagtttcagaagacctgacggggagatgaacattgcctctggctgtccccgctttgtgtcacattctaccctggagaattccaagaatacttacattaaagatgacaccctgttcctgaaagtggccgtggatttaactgacttggaggatctgtaaatgttaaccgataagaaaacttcgggcccagaagaacaggggcaggtggctgtcctttaagccagacctctagactgaacatgcttttgtcatcggccttttgcctttagtgtctgagtgttatcgttttctcttggatcctggccctggtttgaaacttaaattcttaaaatattgctgttatttatattttt

SEQ ID NO: 3301 - DNA, 1718 bp, Cricetulus griseus
cagcaacccagagatcgcgctggagtttgtgcctgaggccactctgctctgagacagctgtccctttgaactgcaagcaccgctccaccgatcccgagcccaactcccagccaccatgctcctactgttgttggggatcctgttcctccacgtcgcagtgctagtgttgctgttcgtctccaccatcgtcagtcaatggctcacgggcaatggacacacgactgacctctggcagaactgtaccatgtccttctctggagccgtccagcattgctactcatcgtcagcgagtgaatggctgcagtctgtccaggccaccatggtcctgtctgtcatcttcagtgtcctgtctctgttcctgttcttctgccagctcttcaccctcaccaaaggcggccggttttatatcactggattcttccaaatccttgctggtctttgcgtgatgagtgcagcagccatctacacggtgaggcacagcgagtggcatgccaacactgagtactcctatggcttcgcctacatcctggcctgggtggcctttcccctggcccttctcagtggcattatctacgtgatcctacggaaacgtgaatgaggtgcttgacgaagcaccatccgtctaggctctgagtgctcatagggtacatggggagggaggaaggaaaccagaaaacaaaccgaacaaaccaaaaagagctagccccaaaccccaactcaaatcaaaccaaacagaacgcagttgaatggggaattgctgtcaattgaagatgtatatactatctatggtttataaaacctatttataacactttttacatatatgtacataggattgtttgctttttatgttgactgtcagcctcgtgttgaatcttaaagaactttacatcttaacaccataaccaagctcagtatctttgtttttgttttgttttttttttttcttttgttttgctcagacatgaaaactcccgtgtggcccctttcatctaaaatcagatacctccctcccactcaacctcataggataaccaaagtgtggggacaaaccccaaatggccaaaggccttcacactgtgggtgacctggtgcatttagcaggaatatccactccccgaattgctgtgtggagccctaagcactcacagacaaaacaccctgaccagagccctctgcaaaaacatggctggtggctctggaacacttgtccttgcaggcagagtaccagggccacacatttaaataggaagtcagagacaaggagtctgtgaaatggtgctatagatttaccattcctcgttattactaatcatttaaaccactcactggaaactcaattaacagttttatgacatgaggtagaatggagaccgatataaacggttcataaccgctttcgtacctagctaggctattgttattactacgataaataaatctcaaagcctccatcactcccacagtttctcccggtcggagcattgggacaagtgtctagacccctgggactgtgagttccctggcttgctgggtctagagtgtccgttgcctccaaggactgtctggcaatgacttgtattggccaccaactgtagatgtatatacggtgcccttctgatgctaagactccagacctttctttttttgcttgctttttctgtattttataccaactgtgtggactaagatacattaaaataaacatcagagtaact

SEQ ID NO: 3302 - DNA, 1718 bp, Cricetulus griseus
ttgcaaacccatctctgcgatctctgcagcagttacgagctgggagccggggccgcccgggaagtcccctcaaggcactctcctgtccgggacgccgctatggacgacattttcactcagtgccgggagggcaacgcggtggcggtgcgcttgtggctggacaacacagagaacgacctcaatcagggggatgatcatggcttctcccccttgcactgggcctgccgagaaggccgctctgcggtggttgaaatgctgatcatgagaggagcacgtatcaatgtgatgaatcgtggggatgatacccccctgcacctggcagccagtcatggacaccgtgacatcgtacagaagctgttgcaatacaaggctgacatcaatgcagtgaatgagcatgggaatgtgccccttcactatgcctgtttctggggtcaagaccaggtggcagaggacctggtggctaacggggctcttgtcagcatctgtaacaagtatggagagatgcctgttgacaaagccaaggcaccccttagagagcttctccgagaacgggcagagaagatgggccagaatctcaaccgtattccatacaaggacacattctggaaggggaccactcgtactcggccccgaaatgggaccctgaacaaacactccggtattgacttcaaacagctcaactttctggcaaagctcaacgagaatcattctggagagctatggaaaggccgctggcagagcaatgacattgttgtgaaggtgctgaaggttcgagactggagtacaaggaaaagcagggacttcaatgaagagtgtccccggctcaggattttctcacatccaaacgtgcttccagtgctaggagcttgccaggctccaccagctccccacccaacccttatcacacactggatgccatatggatctctctacaatgtactacatgaaggcaccaatttcgttgtggaccagagccaagctgtaaagtttgctttggacatggcaagaggcatggcttttctacacacactagagcctctcatacctcgacatgcactaaatagccgtagtgtaatgatcgatgaagacatgactgctcgaatcagcatggctgatgtcaagttttctttccagtgcccagggcgcatgtatgcacctgcctgggtggcccctgaagccctgcagaagaagcctgaagacactaacagacgctcagcagacatgtggagctttgcagtgcttctgtgggaactggtgacacgagaggtgccctttgctgacctctctaatatggagatcggaatgaaggtggcactggaaggccttcggcctacaattccaccaggtatttccccacacgtgtgtaagctcatgaagatttgtatgaatgaagatcctgcaaagcgacccaagtttgacatgattgtgcctatcctggagaagatgcaagacaagtaggactggaaggtcctggcccagactccagaggtgtcaaaacaaggttgggggagtgtacttccccaaagctgaaggcctctggttgcctcccgtctccaatcatggtactaccccagttatggggctcatccctgctcccatccctaccactgtagccccaaaaggggctgggctcaagagctttgtcacttgccacatgatgtctcccaacatgggagggataagccctgcctgtcacaataaagtttattatgaaaaca

SEQ ID NO: 3303 - DNA, 1717 bp, Cricetulus griseus
ttggctcatgctgatctcaacatgcttcctggacaatgtttctgcttctcagttcagtgtcttctcttattgtctacctagttatgtgtgaagtgtgcagaattcagggaagcctagacgtttcatactcagctaggggtagtttgttttcatgatagtgtgtaaatttagcaaccaaaaattaattgttcatgcacatctaaggaagataaagttgtagtgagataatgtgttgctgacaggtaggaggtggtggtacaaggaaccacagggctgttctcataacatgaacactcctgtaggttgatcagtaccggggtgtggtctcagtggatatcttgccttattcctcattcaggcatacgatcgacaccctctgctagcatgacttgcatgtttacagtgtctttgctggaacctcagctgacctgaaagggacactggagatgcttcttgctaggttgacagagcccaggagactgcatttaggccactctgtccatctgtgtatacatcccatcccctcactcctatggtcaaagggtctgggattagcagcccagcgtttggaatacagcgtgtctggggtgtcaccaatgagtgacactgctcttttcattgtagttaatgttatattcttcaaatggatgcacaccccagctgatcaaggccttggcccaggcttgggttagatgccaatgaccagattttgcatgtgcaagcattggttctatttgtggcctgaatcttcttgtgggaattataaacgccattgaatccactagtaagtagtcttttgaaaccatgcagctttattgctcccttcccccaaagaatgttgtttgaagttttctcatttcggcagtagaggccataactgccattgtaatactatcaatgcaacatgaaactgaaggtgcctaactgcttacaaagcagagttagccatcacactttaacccggaaggaagagaagagaagggcacagacacagcagaaccctgtggatggcaaggactgaggggtcatggcctgagtcctgtgtctttggcacatatactgtgggccatgtgtttcttcttgcctgcctttggtttccttcaggccctgtttcaggaacccaaagccctcgggactgagtggaacaccgtccagtggacttcaaaggccacacttttgagaggtttccacaagcagccagggcatcaaggagcctgctggggtttaggttgggattattttgttttggtgtttttcttcaagtttcagcaggagagatgtgcaatgtttcacatgattcagatttggcatcattctttaaaatgctgcattgcaatatcgatcactttgaagtgggaaaaatgcaaagttgtgtttcccttttatctggaatccctaagaagcgtgttagtgttcgtactgtgagtggtctttcctcgtatggctttggccatgtggctgtcataactttcactgtatcaggttctcggctccttcgtggaaatgagaagccctgcgccaccatgaccttttgttccatgagcgcaatgccacctcattaacctttttagtggtgtggattttataccatctgtgtatgtttgcaaatattaagttattacatgttttaaaatgagcatttttcatcctaaattttatatgtttgcaaatatattttttaattaaaatttactaaaaccaaagttttagtcaccta

SEQ ID NO: 3304 - DNA, 1717 bp, Cricetulus griseus
ggggagcgcagtccacacccgggagcttgtagattccagacgccctccggactggcaagatgtgttccctggggttgttccccccgccgcctcctaggggtcaagttaccctatatgagcacaataacgagctggtgaccggcaacagctatgagagcccgcctcccgacttccggggccagtggatcaatcttcctgtcctacacctgaccaaggatcccctaaaaactcctgggaggctggaccatggtacgagaactgccttcatccatcaccgggagcaagtgtggaagaggtgcatcaatgtttggcgtgatgtgggcctttttggagtcctgaatgaaattgcaaattcagaggaagaagtgtttgagtgggtaaagacagcatccagctgggccctgactctctgtcgatgggcctcctccctccatggctccctgttcccacacctatctctcaggagtgaagatctgattgctgaattcgcccaagtaactaattggtctagctgctgcttgcgggtcttcgcatggcaccctcataccaacaagtttgcagtggccctcctggatgactctatccgtgtgtataatgccagcagcactatagttccctccctgaagcatcgcctacagcgaaatgtggcagccctggcctggaagcccctcagtgcctctgtcttggctgtggcctgccagagctgtattctcatctggaccttggaccccacctccttatccacaagaccctcctctggctgtgcccaggtattatctcaccctggacacacaccggtcaccagtttggcttgggcccccaatggggggcggctactctcagcctcccctgtagatgctgctattctggtatgggatgtctcaacagaaatctgtgtcccccttccctggttccgaggagggggagttaccaatttgctgtggtccccagatggcagcaaagtcctggctactactccttcagctgtctttcgagtctgggagacccagatgtggacttgtgagaggtggccaactctctcagggcgctgtcagactggctgctggagtccagatgggaatcgattgctgttcactgtactaggggaagcactaatttattccttgtcattcccagaaggatgtggaacggagaagggacatgttggaggtgcaaagtcagcaacgattgtagccgatctttctgagacaacaatacagacaccagatggagaggagaggcttgggggagaggtccattccatggtttgggaccctagtggtgaacgtctggctgtgctcatgaaaggaaacccacgggtacaggatgggaatcccgtaatcctcctttttcgaactcgaaacacacctgtgtttgagctgcttccctgtggcattattcagggagagccaggagcccaggctcagctcatcactttccatccttccttcaacaaaggggccttgctcagtgtgtgctggtccacaggccgaattgcccacatccctctgtactttgtcaatgcccagtttccacgctttagcccagtgtttggccgggcccaggagcccccagctggaggtggaggctccattcatgaagtgccactatttactgagacatcaccaacctctgccccttgggaccctcttccaggactacaacctgctcaaccccactcccctcactctcacttgtaaataaagtcttctggttt

SEQ ID NO: 3305 - DNA, 1717 bp, Cricetulus griseus
gtttgtttctgaagcggggctcccgcacgccggctcaggattggtgccgggccgggccggggtcttggccggaagcggaagtggagaaaggatgcaggaccatcagcacgtgcccatcgacatccagaccagcaagctgctcgattggctagtggacagacgacactgcaacctaaaatggcaaagtctggtgctgaccatccgggagaaaatcaacactgccatccaggacatgccagagagccaagagattgcccagctgctatctgggtcttacattcattacttccactgcctaagaatagtggaccttcttaaaggtactgaggcctccaccaaaaatattttcggccggtactcttcacagcggatgaaggattggcaggagatcataggcctgtatgagaaggacaacacctacttagtggaactttctagcctcttggttcggaatgtcagctatgagatccccttgctgaagaagcagattgccaagtgccagcagctgcagcaagaatacagccgcaaggaggaagagggccaggctggggctgctgagatgcgggagcagttttaccactcatgcaaacagtacggcatcacgggagacaatgtccgaagagagctcctagccctggtgaaggacctgccaagtcagctagctgaaatcggagcaggaactcaggccctgggggaagccattgacctgtaccaggcctgtgtggagtttgtgtgtgacagccccacagagcaggtgttgcccatgctgcggtacgtgcagaagcagggaaactcaacggtgtatgaatggaggacgggcacagagccctctgtggtggagcggccacaactggaggaacctcctgagcaggtgcaagaagatgagatcgactggggcgactttggagcagaggccatttccgactctgccatctctgtggagacccctggaatagactggggcatctccctggaatcagagtcaaaggatgctgggagtgacaggatagactggggtgacgacatcgctgcttcggagatcactgtgctggagacaggaactgaggctccagagggcgttgctaggggctcagacgctctgactcttcttgaataccctgagacccggaatcagttcattgatgagctgatggagctggagatcttcttgtcccagagagcagtggagatgagtgaggaggccgacatcctgtctgtgagccagtttcagctggctcctgccatccttcagggccagaccaaagagaagatgctcagtctggtgtccacactgcaggatctgattggccggctcaccaatctccgaatgcagcacttgtttatgattctggcctcgccaaggtatgtggaccgagtgacagagttgcttcagcagaagctgaagcagtcacagctgttggctttgaagaaagaactgatggtggagaagcagcaggaggcgcttcaggagcaggcggctctggagcccaagctggacctgctgctagagaagaccagagagctgcagaagctgattgaagctgacatctccaagaggtacagtggccgtcccgtgaacctgatggggacttctctgtgacgtgctccctccatgtcttctgtttcccagcccccaggtggaggtgggatagcccaagctggtgtcactgggcctcgccagcaagaagccaggcagacctggggacagagccatgag

SEQ ID NO: 3306 - DNA, 1717 bp, Cricetulus griseus
ctggaagcccacaaagactcccacaaagaggtggtgagagctgctgaagaagctgcatcgacactagccagctcaatccacccacgagcagtgcatcaaagtgctcgtgcccaatcatccagacagccgactaccccatcaacctggctgccatcaagatgcagacaaaagtggtagagaggatcaccaaggagtccttgctgcagctcctcgtcgacatcatcccaggcttgctgcagggttatgacaacaccgagagcagtgtacggaaggccagcgtgttttgcttagtggcaatctattccgtaatcggagaagatctgaagcctcacctggcacagctcacggggagcaagatgaagctgctgaacttatacataaagagggcccagaccaccaacagcaacagcagctcttcctctgatgtgtccacacacagctagtggccatgccagtctgtgcagaacacacagaggtggttggtgcctctgagaagctccatcagctcgcccagtggactgagaaatgaagagccatacttacatgtgtcttgcaccgcctgctgacatcaccaaaccatggagggcacagttctgagaacccagagctctctagccagtgcttggtacacagtagcatattttttcagtccatacagacttggggtggtatggggtgttgctgtgtgttctttatgcttatgttgttagagtgtggtcagatgggacaagaccctgtgtgtgtgtgtgtgtgtgtgtgtgagagagagagagagagagagagagagagagagagagagagagagagagagagagaccccaccgaaactgaacagttcagaacattgcctgatgtcctcacagtgctcacaaagggctagcctcgaatgtcacatgccctcttcaacctgagtagagagaatacaatcatttcacaggtctcttgggctcaatctgaagactgctgcctgcaatgctgaggagacttgcatgctgccaccaccacctcatggagggcgtcagcgcgctctcagaaccctgatggctacagctgccttgccttgcctccacctcctcaaaggactctgttcaaagcacctagtccctgaaggacttcacagcgcccaggactgtgttcgcctccccacctatctgactatccagggccttgaaacccctaccctgtgtccagggggactgctcatctgacttcctgcttcctggcaagctgcccctccctctactggacaggcgctctccaggtgcactcgtgtgccgtgcggacctggtgcccacagatggcctgggctcgccttatctatggctcaccattagcttttcaacacctgtgcaggtaaagcaacaggtttgtctcagacatcttctgtttctttctctgccaccctctatggaaactcccactttaaaagacagcagattagaacttcgtagacaggactctgctaacaatgtttggaagaaataattgctctgaaaacaatccgccaccaaaatagttcacacgcatggtccctgtgcccccagattgggtgttgtttgtttggggtttttgggggctttttcatgttacatccatatctgtatttatatcttatttgtttcaccttccaagtgtatcatggcaaatgtacagattttttttgttgttgttaataatgtgctaggatttgctaaaaaagaaaattaaaaaaaaaaaa

SEQ ID NO: 3307 - DNA, 1717 bp, Cricetulus griseus
agccttcaagtcctaaacgcgcggccgtgggttcggggtttattgattgaattccgctggtgcaggatcctctgcagagagagagagcgcgagagatggatatggacaaacggattcatttagagctgcggaacaggacgccctctgatgtgaaagaactggtcctggacaactgtcggtcaattgaaggcaaaatcaaaggcctcacagatgagtttgaagaactggaattcttaagtacaatcaacgtaggcctcacctccattgcgaacttaccaaagttaaacaaactcaagaagcttgaactaagcgataacagaatctcaggggacctggaagtattggcagaaaaatgtccgaaccttaagcatctaaatttaagtggcaacaaaataaaagacctcagcacaatagagccactgaagaagttagagaatctcaagagcctagacctgtttaactgtgaggtgaccaacctgaatgactaccgagaaaatgtgttcaagctcctgccccaggtcacatacctcgatggctacgacagggacaacaaggaggcccctgactccgatgttgaaggctacgtggaggatgacgatgaggaagatgaggatgaggaagaatacgatgaatatgcccagctagtggaagatgaagaggaagaggatgaggaggaagaagggaggaagaggaccgtgagtggagaagaggaggaggatgaagaaggttacaatgatggggaagtggatgatgaggaagatgaagaagatgctggtgaagaagaaaggagtcagaagcgaaaacgagaacccgaagatgagggcgaagaggatgactaaggggaattaacctatttggggaaattcctattgtgatttgactgtttttacccatatcccctcccccctcctattcctgccccccgaaacttattttttctgattgtagcgttgccgtgggaatgagaggggaaaagtgtactgggggttgccgggggtgggtgggaggggggaggaataaaatactatttttactgccactctttattttcccccctcctttttccttgtgtctggttttgtccccgtaaatgcaatagcttagtacgcaccaagcaagtgtttgttcttactctctggagaggatggctttgaggtctctttttggtatgtcccacatccccagagttggtcaagaggctatggctggcctccaccaggtgggtgactcacagccccgttctggttcatgtggtctctgctagaggcacccagcacgcgggtttgtaaatagcaacctaaaggcgtattttggcactggtttggggacattccccatctctcatccctttcccccccttcgcagatggcagcaggctttgcttttgcaaagagaacttttgttactctgaagctgggatcctgagagaccaaaaattgttttccctctctcatacattggagcacggaaaaggaatgcaaaattgtattttcttactgagtgggactctgaagtgaccgcaggctcctcctagtgaatgctgtttcctttcggtgtcccctttctggattgctttacaagtgacgtgctgtttcccaccctgtgtctcatctgtacaaagaccatctgcaacccatttttctcccacccttgagaagagccaaaacttttgagttttatgtctgtttgtcattgataaatttcaataaatcttttt

SEQ ID NO: 3308 - DNA, 1717 bp, Cricetulus griseus
caaggatgcctatgtgggaaggatggacaactatctgatccgccatccaaactgtgtcaacgtcactaggtggaatgcagtggtctgcagtgggacctatgcccaggtgtatgttcagacatggaacactccgaatcttagcatgatcatcacacgagatgaatacccatcccacccaatggtgcttcggggtatcaaccagagggccatttccccccagtaccagcccgttgtcatgctggagaagggctacaccattcactggaacggtccggcgccacgcatcactttcttgtacctcgtgaacttcaacaaggatgactggatccgagttggcctctgttacccatccaacacgactccaaagacatcagtaactgcatggccaaagcgtacccacagtattacaaaaagcctcagtcaagcgcatgccagccatgctcacggggactctgtcaaggctgtggcacccatcagatggtgtttagcagtgacccccacaagagctacctccctgtacaattccagtcacccagtaaagcagaaacgcagcgtggagatccatctgttatttctgtcaatggtacagacttcaccttccggagtgcaggcgttctcattcttgttgtggatgcctgcagtgttcctttccggttgacggaaaaaaagatgttccttgctgcagatgtcagtcagatggaagagtatttaaaggctagcatccctccaaggtcaatcgttctgttgagcacgagaggggaaataaaacagatgaatatctctgattcattagtacttctgggattggtcaaaacagcacatctgtatagcaaaggcagtattgtatttttgggattcagcggtaaactttagaccatcatggctaagctgttcaccagtcctgctgagcagggcctgggggtggcttgagcagtacctccctttgcagatggaggactacgggtgccccagggccagcagtgtccacagaagagacctcgaactgttacagcaggctttgaaagtgctttagagactgactgtaatttaagtagctagggaaagaaaaaaaaaaaagtgaactaacttatttaatttatggcattttaagatgacactgttaacccaatggaaccattttcctgtttgatacaaaagggagagagaaagaactcaaagcaatcgctcgagtgccagctcgagcaccttggcattgcccagatggtcaagaaccctttgtcttcctgaggctgctgagttcggagagcactccgtgacttgtgtttctttacagaacatgctacctcaaagtgccgtgacaaaccatgccgactgtcagtgctcacaggaggggcacgtgtcttaatcaaagtctgctgatttgtttgtttgggttttttcagatgtggggttttttgttttttttttttttctttttctttcttttctttttttctttcttctttttttgtacagtgagatcttacctatgaaacctattaccgggtaatggttcctgaaggtgattgaattgtgtgtgggaatgtgtgtgtgttatattatgacttaaatatatttgatgtgtgcttttttagagttcaggtttttttaaaaaatatttggagagggtatgcaagtgtcaaggcactcagtttttctgatgtatgtactaataattagggcctaagttaaataaataaaaatgcgtgtgcatgta

SEQ ID NO: 3309 - DNA, 1717 bp, Cricetulus griseus
gcagcagcagcagcacaggggccagaaccgagatgcccctcagccctatgaactcaacacagccatcaactgcagggatgaagttgtgtctccccttccatctgccctgcagagtttctcaggctccctttctgcccctccagctgcctcagttacctctgcaccctcatcttcctcctcccgacatcgaaaacgacgcaggacttccagcaagtcggaggcaggggctaggggtggaagccagggttccaaggagaagggcaaagggagtgggggaggccgtcatcaccacccactccctgcaactggcttcaaaaagcaacagcaaaagttccagtatgggaattactgcaagtactatggctatcgcaatccttcctgcgaggatgtgcgccttagggtgttgaagccggagtggtttcaaggccgggacgtcctagatctgggctgcaatgttggccatctgaccctaagtattgcctgcaagtggggcccagcccgcatggtggggctggacattgatccacggcttatccactctgcccgccaaaatatccgacactatctgtctgaggagcttcgtctccgagcccagacttctgagggtgacccagggacagagggggaggaagggactaccactgtccgaaaaaggagctgcttcccagcctcactgacagccagccggggtcccatcgctgcaccccaagtgcccttggatggagcggacacatctgtcttccccaacaatgtcgtcttcgtcacgggtaactatgtcctggaccgagatgagctggtggatgcccaaagacctgaatatgatgtggtgctctgtctcagcctcaccaagtgggtgcatctgaactggggtgacgaggggctgaagcgcatgttccgccgcatctaccggcatctccgccctggcggtattctggtcctggaaccccaaccatggtcctcctactgcaggagaaagtctctcaccgaaacaatctataagaactactttcgaatcaagctgaagccagaacagttcagttcctacctgacatccccagaggtgggcttctccagctatgagcttgtggccacaccaagtaacacctccagaggcttccagcgtcctgtgtacttgttccacaaggcccgttcccccagccactaagtggccttctggacagaaggtgtgaagaggctacccttgctgctcctgaggacctagggaagaggaaattatcccaaccaaggtctttcgtgtctggctccaaaaagtttccttccttggatctgtaaagagagcttttctcaagttgcttcccgaagtcttctccctgacacctctggcacttgagcaagcccagctgtgctggaattacatcggcttcctctccgagcctgctgggctggatggcatggactgtttgctgactctgtcctcctagggcatgggaagggggaatgtcaattctctaggcccttcctcctgttctccgaaggagattcctgcttctcagcctttgttcctagctgcacttaagtggaccatggatggactaagggtgttagaggggaagtttggtaaggagacacacaggtactgtgaaaatcttccttctgctgtcccccggtgggagagggagctgggtttggaatgtgagaacagcacaataaacttgataactagggccgtggaccccgaaaaaaaaaaaaaaaaaaa

SEQ ID NO: 3310 - DNA, 1716 bp, Cricetulus griseus
  modified_base (339)..(339): a, c, t, g, unknown or other
gcacgagcaagatggcagcctccgagacggttaggctacggcttcaatttgactatccgccgccggccacgccgcactgcacagtcttctggcttctggtggatctgaacagatgccgagttgtcacggatctcatcagtctcatccgccagcgcttcggcttcagttccggggcgctcctgggcctctaccgtggaaggggcctgtcgccccgcgagagcgcgcgcctggtaaagccctgaggaaagtagtgcagggccaaaagggggctcaggctacctgtcagagtctgattcttgtccagagtcggtcagtgatagcctctgcaatatcacagtntcggggatcaccttttcagagaaactctcagctgagctgttgaacgatggacctgctgcaaaaacggcagctgtcaacaaacaggcctcaaagcccgcctttcccttcagctccggcaagggcaagggcaaggccatcagaacctcgtcatccagttcagactccagttccgagtcggaagaccagttcttggtgtccaagaacatctctgaaggcgcctcagacttcttaaagacagccggtctctttgcagggcaagggtgtccagggctgacgttgcagacttcgggtgttatgggctggaagccttctgactccagcagaggcaggcaagctcttggtcctgctccaagtgtgcctgtccctacccagttttgggaagaggatggggtcgaggagaggacttcttgttggggaaggggctgaggggccggggtatacgaggccgaggtcgaggccgagggcctgctatctcctgtatcttaaatagaagctctgagagtcagaagcagaaacagttaaatgacatcctaacaaactcgtccactgtgatccagaatcctgtagagacacacaagaaggactatagtctattgccactgttggcagctgcccctcaagtcggtgaaaagattgcatttaagcttttggaactcacgtcggactactctcctgatgtctctgactacaaggaaggaaaaatattaagccatgacccagaaacccagcaagtggatatagaagtcctctcagacttaccagctttgaaagaacctggcaagtttgatttggtctatcacaatgaaaatggaacggaggtggtggagtacgcggtgacacaggagaggaggatcactgtgctttggaaagagttgattgatccaagactcattattgactcctccagtagcatctcaagtaaatagcgtgtctgcacataacctctgacctcgtcgtctggcagtctctaagtagtatttgtgaccatgatcatagcctgaaattttaaaagaagattgaaattttttttggactttctgttatcttcactttaccatattagaaaaaaaaatactacctcatcatttagagtaacatgggtgttagtttgtggatctttatttctctcaggctaaattcagtaacccagtagaaaacatccctgtgggcagaccagaatggcagtgtgcttgctctcttccacctcttggaccacaagtagcaatcgtcactaggagtttacagtgcacatggaagaccgtgctgtgcatcttgtttttgctttttaaatcgcatttaaaatactaaggcatgtttcttgacttaattttttaaccacgtgagttgttctgttaagcctggagcatctcacgcatt

SEQ ID NO: 3311 - DNA, 1716 bp, Cricetulus griseus
acagagtgacttccttaaggatgtggaactcagcaaaatggcacctccagacctacctcactggcaggactgccatgaactgtggagtaagaaacgtcgacgccagcgacaaagtggtattgtaatagaagagctgcctccgtccaaagcctctcgaaaagaaaccacctcagggacaacagctgagcctgtgaagaacagtagcccagcaccccctcagcctgctcctgttaaggcagagcctggtcctggggatgcagtaggcagagccaactgacctgagcatccctccagatggcacagctgcttaatatccactcaaatccagagatgcaacagcagctggaagccttgaatcaatctattagtgcactgactgaagccagttcccaacagcaggactcagaatccatagccccagaggaatcattgaaggaggtaccctctgtatcagtggtcctgccttcagcagaacagacaacccctgaagcttcaaacaggagttgaatcccgccgtgacagccgccttgctgcaacttttatcccagcctgaagcagagcctcctggccacctgccacatgagcaccaggccttgagaccaatggagtactccacccgatcccatcccaacaggacttatggaaacactgatgggcctgaagcagggttcagtgccactgacactgatgaacgcagttctggtccagccttgacagaatctttggttcagaccctggtgaagaataggaccttctcaggctctgtgagccaccttggggagtccaacagttaccagggcacagggtcagtgcagttcccaggggaccaggaccttcgttttgccagggtccccttaacattacactctgtggttgggcaaccattcctgaagtctgaggaatagcaactctgttgtacatgcagagaccaagttgacaaactacggggagctgggaccaggagccactggggccaacagctcaggaacaactcttgggagaggagttccttattaacccagagacatcaatgccctgaaagattccttccctatcaatctttccatctagtcctctgaacctttaatgaaatcacttgccagagcaaggtaatcatctgcatatggctgctgcaacgttgtccgctgttttccttgctcacttgctactagcaggtgactcaacggtgttggcaccagttcctcctggatgggcaatagccagaatatttacttctgccttatgtaggagctatattacaaaatattagaagaaaaagagacattcatggcttaaatattcccttcctgtctaccatctcacatttttgcttcagtgagcactccccttacctatgttaagcatcttgtacatacctttcccaaataaattactcatccttaagtttgctcaattttgacaaaagttatgtccctcttcctgcacataaagcaggctgtagaaagtgacattcttgggcaagttggtagattttacccagtctttactttttgcttgtttgctttttctttctaccctctccttttgtccctctttcttctctgtgtgtctgcccctattctctccctatatcttttgaggtcatttgtttggaagaaaatatagttaaagatgcccaagaacctggaataattcttttcttttttctttttaccgtgtgtgtgtgtgtgtgtgtgtgtgtgtgtgtgtgtgtaa

SEQ ID NO: 3312 - DNA, 1716 bp, Cricetulus griseus
ctttgacagaagtgtggaggatgcccaggcgtggatgaaggtggtacaggagcagcttcaggtcaatgacaacacacagggaccccgagcagccctggaggcacggttgcgagagacagagaaaatctgccagctggagcctgagggacgagtgaaggtggaactggcccttcgggtctagctgaggcccttctggcaacctgccaggagggccagaagcctgagatcctggcccagctgagggatatcaagtcccaagtgggaggagacggtcacctacatgactcactgccacagccgcatcgagtgggtgtggctacattggagcgagtatctgctggcccgggatgagttttaccgctggttccagagatggtagcagagcgtacaggagcactgcaccttcagccaccggctgtcagagctgcagcagtggaccaccctggtcacacagacgttggagtcacacaaggggatgtgagtctgtgggatactgagacccaagagactggacccgagaggctgctggctgaaattccagagagagaggtccagctgtccctgctccaagcactgggccaacttgtgatgaagaagtcttccccagagggggcggccgtggtccaggaggatctgaggaagctgatggaatcctggcaggccctgcgtctgctagaggagaatctgctgagtctcattagaaaccagcagctgcagaggaccgaggtggacacagggaaaaactggttttcaccaacaacatcccaaaggccggctttctcatagacccccgggaccccattcccaggcggcggcatggggcaaacctactggaagaacatgacctccatgaagatcactcccagctcctgagggactttgaacagtggctgcaggcagaaaactccaagctacttggaatcatcacaatgagaacagccacagccaaggacttgaggaccagagagatgaagctgcaggagctggaggctcgaatcccagaaggccagcatctctttgagaacctgctccgtgtcaggccagcaagggaccccaccaatgagctggaagatctgcgctatcgttggatgctgtacaaatccaagctcaaggattccggccacctgctgacacagacttctccaggggagctgactgcattccagaagagtccgcagaggcggtggcggaatccctgctctctcctacagaaagcgtgccgcgtggcgctaccattgcaactgctgctcctgctctttcttctgctgctcttcctgctgcctgccggcgaggaggagcgcagctgcgccctggccaacaacttcgcccgctccttcgcgctcatgcttcgttacaacggccccccgcccacctagcccactggggcgtacaggtgaccttctgcagtccctcagaggctggctgccagggggaagctggacggaccagacacccagaacagcctcagtctaaatgctgcatctgttcccagaacaaacttgcctttttctacgatgccatctctgcctatttatactaaatgtgtactatgtgtggttagagactaatgtacagaattttttatatgccgtgtctgtatatgctcagtgcagatgacttcagatacgatgtctctttgtgcctgtggaagtccccagcagtgtgcttccctaatgggatttgtgacactcgtgccttagcttcctgccatccctg

SEQ ID NO: 3313 - DNA, 1716 bp, Cricetulus griseus
atggcggacgaggacggggaagggattcacccctcagcccctcaccggaatggaggcggcggcggggggtctgggctccactgcgccgggaacggcggcgggggaggcggcggcccgcgggtcgtgcgcatcgtcaagtccgagtccggctacggcttcaacgtgcggggccaagtgagcgagggcgggcaactgcggagcatcaacggggagctgtacgcgccgctgcagcatgtgagcgccgtgctgcccgggggggcggccgaccgggccggggtgcgcaagggggaccgcatcctggaggtgaacggcgtgaatgttgagggggcgacacacaagcaggtggtggacctgatccgagcaggcgagaaggaattgatcttgacagtgttgtctgtacctcctcatgaggctgacaacctagatcccagtgacgactccttgggacaatcattttatgattacacagaaaagcaagcagtgcccatatcggtccccacatacaaacatgtggagcagaatggtgagaagtttgtggtgtacaacgtttacatggcagggcggcagctgtgttctaagcggtaccgggaatttgccatcctgcaccaaaacctgaaaagagagtttgccaactttacatttcctcgacttccaggaaagtggccgttctcattatcagaacaacagctagatgcccggcgtcggggactggaagaatatctggaaaaggtgtgttcaatccgagtcattggtgagagcgacatcatgcaagagttcctgtcagaatctgatgagaattacaatggtgtgtctgatgttgaactgagagtagcattaccggatggaacaacagttaccgtcagagttaaaaagaacagtactacagaccaagtataccaggctattgcagcaaaggttggcatggacagtacaacagtgaattactttgccttatttgaagttatcaatcattcctttgtacgtaagctggcacctaatgaattccctcataaactctacgtccagaattatacatcagctgtgccaggcacctgcctgaccattcgcaagtggctctttacaacagaagaagaaatcctcttaaatgacaatgaccttgctgttacttacttctttcatcaggctgttgatgatgtaaagaaaggttacattaaagcagaggagaagtcttaccagttacagaagctgtatgaacaaaggaaaatggtcatgtacctcaacatgctaaggacttgtgagggctacaatgaaatcatcttcccacactgtgcctgtgactccaggagaaaggggcatgttatcacagccattagcatcacgcactttaaacttcatgcctgcactgaagaagggcaactggagaaccaggtaatagcgtttgaatgggatgagatgcagcgatgggacacagatgaagaaggaatggccttctgttttgaatatgcacgaggagagaagaagcctcgatgggttaaaatcttcacaccatatttcaattacatgcatgagtgctttgagagggtgttctgcgagctcaagtggagaaaagagaatattttccagatggcgaggtcacagcagagggatgtggccacctagcctttcctcactcccttcccttctccttgccctcatcctcttattcccttttgtcctcccatgccagacagtaaccattaacaacaaaaaaaaaaa

SEQ ID NO: 3314 - DNA, 1716 bp, Cricetulus griseus
tgaagctcgtctcgtggcctctctgctccttgcgccgttatggccgagatgccacacgctttacctttgaggcgggcaggatgtgtgacgctggggaaggactctacacctttcagacacagggagggggagcagatttaccagcgggttcacagtgccaccctggcaattgctgagcaacacaagcgggtcctgctggaaatggagaagaacgtgaggctgctgaacaagggcaccgaacactactcatatccttgcacacccaccacaatgctgcccccgcagtgcatactggcaccatatcacagggtctcagaacattgctgaagcctccagctatggtgaagggtatggggcagcccaggccagctcagaaacagacctcctgaacagattcatcctacttaagccacagcccagccaggaggacagcagtgagaccaagactccttctcagtgacagctgggactggtgggtgcagatgattgctgggccacctgttggaaggctaactgcagcagcccatggacagccttaaggagctgttggccacaagcctgaagagagcaagctgtccctccttgccctcaagggtgaggctggacctcagcacatggctggccacaccacctgagcatgaggggctggagccaccgtgggactatatactgttgatggttttaatatatattgcttatgacattctgtattaatgaggcttccctttatccctccctaacacatacccatttttaattccatgaccaggcatggtcaaggctgtttttgagtaagagggcagccgttcctgtcctcagtgatacaactctcctgctgccaagactgtttgagctgccagggtcagaggaggacaatcagcctggtgctgtctgcgggctcttcctcagaagtctaagggccaagatagcaggtagcttctgtcttctgggccaacagagacacaggaaggacccaaatgtcactgtaccatttggtagccttgcccttaggagttttaagcagaggtggcagctggttttaaaatgcactttctgcactggctccttcctgctcaataggctgaagatgtcttcgggcggggcacccattacctcagcagtagaggatggctgggccagcccagaaggctgcagcaggattgctgtggggagcaccttgctgctcccttttactgagcgggggtacagtgctccataaggggagtcacttgccctgggccagccaccccaggccagattctaaaaccaagaccttcccctcttcccacaaggtgctgaggctccctgctgaaatgcaattaaagcaattgattttttagtgctggtatttattgactaccgtgcagaagggctatctttctattcacatcaaaccttttgtttcgtgtttctgttttttaatactttagggttctgatttgtgggaacagaccttgtaaataaccactgttgacatttgtggcaggatgataaggaggctccctcccagaggggcccaagagccagggaggtgactcggccagcccagctctgactgacctaagcaatgagcacccagaggtcagctagtccagtaaaagaaatgggcccagatcgagagggaggcagagctggctcagttagcagcacgatgacgcatgaaggagattatgttgtgctctttattgccaaaaataaaacttgtaaaaaagacaa

SEQ ID NO: 3315 - DNA, 1716 bp, Cricetulus griseus
cttgggaccaagggaatacagatcaaggtgccaagagagaaggacttgcagaaagtgtctgagaacttgtctgagcaagaggaggaaaaggctgaacagaaagagactgaaaacctggccccaagagagcagactcggacagctgcagttggtgagatctgtgaggaaggtctgcgagtgctggaaggcctggcagcctccggactacgctccatccgatttgccctagaggttcctggcctccagtgtgtggttgccaatgatgcttctgcccgggctgtagagcttatagacagaaacgtgcagctcaatggtgtggcacatcttgtacagcccaaccaggcagatgcccggatgctgatgtaccaacaccagaaggcatctgagcgttttgatgtcattgacctggacccctatggcagccccgcccccttcctggatgcagcagtgcaggctgtgaatgatggaggacttctgtgtgtcacctgcacggacatggcggtattggcaggcaacaacggagagacgtgctacagcaagtatggggccatggccctcaagagccgggcctgccatgaaatggccctcagaattgtgctgcatagcctggacctgcatgccaactgctaccagcgcttcgtggtaccgctgcttagcatcagtgccgacttctatgtacgggtttttgtgcgcattttcacaggccaggccaaggttaagtcctcagccagcaagcaggccctggtgttccagtgtgtgggttgtggagccttctacctgcaacgccttggcaaagcgtcgagagaccctggtggcaggaccaagttctctgcagcctgtggtcctccagtgacccctgagtgtgaacactgtggacagcgacaccagcttggaggccccatatgggcagaccccatccatgacctggactttgtgggccgagttcttgaggcagtgaccactaatcctggccgcttccacacctccaagcgaatccaaggtgtcctgagtgttgttactgaggaacttcccgacgtccctctctactacacactggaccaactgagcagcaccatccactgcaacacacccagccttctgcagcttcggtcagctcttctgcacgctggcttccgagtctctctctcccatgcttgtaagaatgcagtgaagacagatgctcccccactagccctctgggacatcatgcgttgctgggagaaggagtgtccagtgaaacgggagcggctgtcagaaagcagcccagcattccgaattctggctgtggagcccaggctgaaggccaacttcaacatccggggagacgccaatcccagctcgcgccagcaaggactcaagcgcttccaggccaatccagaagccaactggggtccccggccccgtgcccggccagggggcaaggcagcaagtaaggatctggaggagaggcggaggctgctacaaaataaacggaaggagccagctgaggacccagcccagagggcagctcgcctcaagacatttccttgcaaacgattcaaggagggtacttgtcagcgaggggaccagtgctgttactcacacagccctgctacgcctgtggcctgatactcccctcatggactgtccagagaccatcaccgatatctcccccagaccagaggctgctgatggaggccctgctgggtcaggtgtggactgaaacaataaagagat

SEQ ID NO: 3316 - DNA, 1715 bp, Cricetulus griseus
gtgccgctgggccctgctcggctcttcggcgtggacgtcggaagaagaatacatgttcaccttcagtgaacaagagcatgttcccaaactcaattttgggtcgtccacccttcactccaaaccaccaacagcataataatttctttgctctctcaccaactctttattcacaccagcaacttattgatgcacaatacaactttcaaaatgtagacttgtctagagctgtggccttacagcccctggcatatggaactgtcagtccaatacagacctcgacatccccattatttcgaggaaggaagagaataagcgatgaaaaaaactttcctcttgatggtaaacggcagcgtttccattcaccccaccaagagccaactataattaaccagatagtgcctttatcaggtgaccgaagatattccatgccgccattgtttcacacacactatgtaccagatatagtaagaatgtgttccacctcttcgagaaattaccactattagaacccagagaaatcacactgcctgaggccaaagataagttgagtcagcagatactagagttgtttgaaacttgtcagcagcagatgagtgacttgaagaagaaagaactctgtagagcccagctgcagagagagatacagctgctgttcccacaaagcagactttttttggttggatcatctttaaatggatttggtgcccggagcagtgatggtgatttatgcttagtagttaaagaagaaccatgttttttcaggtcaatcagaagactgaagcacgccatatactcaccttagtctataagcacttctgtactagactgtctggctacattgaaagacctcagctgattcgtgcaaaagtgccaattgtgaagttcagggataaagtcagttgtgtggaatttgacttaaatgtaaacaataccgttggaattagaaacacattccttctcagaacttatgcctaccttgaaaatcgagttcgtccattagttctggtgattaagaaatgggcaagtcaccatgaaataaatgatgccagtcgtggtactttgagcagctatagtcttgtattgatggttttgcactacttacaaaccctacctgaacccatccttccatccctccaaaaaatttacccagaatcttttagtacttctgtacagctgcaccttgtacatcatgctccatgtaatgttcctccttacctctcaaagaatgaatcaagtcttggggacctcttactgggctttcttaaatattatgctacagaatttgactggaacactcagatgatttcagttcgtgaagccaaagccatcccaaggcctgatgacattgaatggagaaataaatacatctgtgttgaagaaccttttgatggaactaatactgccagagctgtgcatgaaaagcagaagtttgatatgatcaaggatcaatttttaaagtcatggcacagattgaaaagcaagagagatctgaacagtgttctgcctttgagggctgctaccctgaagagatagctggcctctaattcttaaactcttccaagaaataaagaacaatagttatatcataatgcatttgttacctccatcatggtttatttttaatgttgttattgatttgttttatttttaaaaggacatacttatataaagattgcatattttattatgacatttcctaataaactctttgattt

SEQ ID NO: 3317 - DNA, 1714 bp, Cricetulus griseus
aaggcttcatctcgattaacccaggggaatgtgaaaatagaggtggggtctccccaactttccaagtgcagctcacccgggacttgatctgcttctttgactcttcagtagaactcagaaattcaacggaaagccaacagagagtaagaatgatggaagaattggatgtgtgttcaccaaagttcagtctctcgagagcagaaagtgaagttaaacagcagaaagatcggatgctatgtgatgtggtactggatcagagagtgctgcctggtgtagggaacatcatcaaaaatgaagctctctttgacagcggcctccatccagctgttaaggtgtgtgagctctcagaggagcagacccatcaccttgtgaagatgatccgtgatttcagcattctcttttataggtgccataaagcaggatctgccatttctaaacactataaggtttacaagcgtcctaactgtggtcagtgccactgcaaaattacagtgtgtcgcttaggggaaaacagcaggatgacctatttctgtcctcactgtcagaaagaaaaccctcagcatgttcagctatgcaaactgccaacgagaaaagctgtaatcagctggacctctgggagagaagattgccttatggactcagtggctcggaaatttgaagagcagtggtcctgtgtggtctgtaccctcataaacaaaccttccgctgaggcctgtgatgcttgcttaactgtaaggcctgttgattcagtgctcaagaatgaagagaataacattgccgctagcaacttagtgaagtacccttgtaataactttgggaacacacatacagaagttaagatcaacaggaaagctgtatttggaagtacaacccttgtcttgactgatttcagtaataaatccagtacttcggccagaaagaaaagcccaaaccagataatcggtgggggatttcaaaactttcttcctacagatgtgtgttttagtgatctacagcacccctccaaagaaggagcaaactacattactcagccatccaacagggtaaacatatcgcctacagtttgtgcccagtctaaattatttagttcagcacataaaaaattgaaaacagctcactcttcagaagcagaccctaaatattacaaccctggactctctaacagtgaacgccaaaccagtacaacggatggtcctcgctctgtaaatgcgggcagtcctcggtgcaagaagcacaaccgcctttgtgtgctccgagttgtgaggaaagatggagaaaacaaggggaggcagttttatgcctgtcctctacccagagaagcacaatgtggattttttgaatgggcagacttatccttcccattgtgcaagcatggcaagcgctccattatgagaactgtgctgaagattggacctaataatgggaagaatttttttgtatgtcctttggagaaagaaaagcagtgtaactttttccagtgggcagaaagtggaccaggaatggaaattattcctggatgctaatacttttgctttttaaagaatgtctggcatatgaactcatcaggctcacaatgttcagccccctttgtttagtagaaagcttatagaatacctgtggtacatatatgcattaagatactgtcatatttgagaagtattctttgcttaaatatgtcactttcccatttcttttgtcataatgaacacactat

SEQ ID NO: 3318 - DNA, 1714 bp, Cricetulus griseus
ctgtgcgggcctggggacggcgggctcagcggggaccccgcagccttgtcaggcgccccagcagtgggagggacgccaggttctgtaccagcagagcagcgggcacaacagccgcgccctgctgtcctacgatgggatcaaccagcgcgtgcgggtgctggacgagaggaaggcgctgatcccctgcaagagattatttgaatacattttgctctataaggatggagtgatgtttcagattgaacaagccaccaaacagtgtgcaaagatatccttgacagaaccctgggaccctctggacatcccacagaattctacctttgaagatcagtactccattggggggcctcaggagcagatcacagtccaggagtggtccgacagaaggacagccagatcctatgaaacctggatcggcgtttatacagccaaggattgttatccagtccaggaaaccttcatcaggaattacactgtggtcctgtccacacggttttttgatgtgcagctaggcattaaggacccttctgtgttcaccccaccaagtacatgccagagagcacagccagagaagatgagtgagaactgctcctggtgaacttgctgggacagaaacaatccttggctcttagtgaccctgtctggaaatggattagagactggtttggttggatgcagctcttcaatggaaatacagacgattttaagtggatgaaccctgatgtgggttttcttgaacatctggatctggctgcttgtctgcaccagagtggcaacagttcccactgaccacacccctacctttggctactgcaacatgactctttaagattccttccagacttaaaatttgtggcatggcccaatgaatgtagatattctgcaaggaagtggaagtttataagagggagtaatgattcctctgaagggaaaagcaagttttaagccagaggcttagacaatcttagaattcacacatgagatgaagtaagagccatgtgtgttctgctttctgtcctagagtactgaactcttaactcctttaagtgttaaattcactaggctagctctggccttgacttccctggaactccatttcaccacaactgtgtcaatgtgacttccgctcatccttctcaggtcagctcccatgtgacctctgcaagctgcccccacacctgcattcattgcaccttgctgcttggcatgccttgctcattatactcactatgctgtgtcaggatttcctgattactagagactgccctctgctatcctggctaagagccccttgagtacgggtatcatgttctgtttactttaatatctccagtatcaagcaagtgcctggcacgtagtccgtgccctcaacatttgtagagtggagctcaccagctctgttggtggtcagtttcctcatctactaagcagggttgggttttctgattactagggagacttccagtgccacaacttactattctagattcttctatctctgtgtctgtgtttgatttggccatgtatcatctttagctattaagagaaatgtgtgacacttgctttatgctaaaacaatctattttgtaatttatacacttaagcaaatttgatgacatgtcacaaattctttttccatgtgtttgtttctgtaacgaatatggatgaactcaattataaggaagttaaaactctgctgtaataaataaataaa

SEQ ID NO: 3319 - DNA, 1713 bp, Cricetulus griseus
ttacaagacagctaagttaattcttgaaagtttgatccagactcaaagaaagcaaaggagttttgaaccaccatctgctggagcagctgtaactgcaaaatcaggacaagagattcgtcagcgaactgcagtctcaaagaaacctttccccagcaccagcaagctctaatcagggccctcctccaaaagttccagtgtctcctgggccatcaaaggatgcctcagctcctgggggacctccagagaggactattgctccagccttacccaggcgtcttggatcccctgctacttcagtgcctggaattgggccttcatcctccaggtccacctttagcaagacccgttctccccccgagaacgaggtgctgtggatagaattgttgaatatttagttggtgatggtccacagaacaggtatgctctcatatgtcagcagtgtttttctcacaatggaatggctttgaaggaagaatttgaatatattgcttttcgatgtgcctactgcttttcttaaatcctgcaagaaaaacgagaaacaagaagagactgagaaagaggaagcatcaacagacgaagccaagtcaaacagttctcagagctgactctgtttctaatcttgaaccaagtggagaatctttggtgacacaatagtaaataatcccatgtgccttcaactggattatttgtagtcttgttgatgtcagttattgtctttttttttgtgtgtggtactcaaaaaaattactttttagatatatgcttaatgctattcaaattcaaattgcctagcaagttcagtgtgttcaagtcccatcaactgggcattgaaagtaaaagcacgtggtatcagtgaatgtgcagagtgttttctacatctataacttgtaaataatatccattttgacataggaacaattttggctaggaataatttctttaatagtgcttaaggattgaaatataattaagattttgaatacttcatcattaaattttaactcctgagatatttgccagtgggaaggaaatatctatttaggtgtttacattaagtgatactgaaagctgtaaccttatttacataggcattggtacgaattctcaagaagaatgcaactgaacagtcaagtgcagagtttcttttgatgtcttttgttttgcagctgggccaaagccacgtgatgtatatagttagtttatgtttacatattaacaaataggaactgcatctgcatttgactgtacttgaattcttggtattatttatatttgtaaaataatgatgatatataaatgaattttttgtgtgcttgttttgttaaggaaaataaagatgacctggcagtgttttttctttgttaaatatctagactttcttcacatagtgttttgatggatgactagctatctgaaaaaaaatcttgttaggagagtcctctgtatgataaatacatagtaaattatgatgtttttgtttttattagactttcaaatttcagagaaataagaaatttaatgtttttaaatcagaagttagcatttttggattttgaaacacattatgccacttgtagtttttaaactttgagagacaaatacgtttttggagtaggcagtttaaactgctaataaaactcactggattgagtatgtatcccaaggatcaggtgggaacactacacacacacacacacttacacacacacacac

SEQ ID NO: 3320 - DNA, 1713 bp, Cricetulus griseus
gtgcgcgaacagatggctgcggccctgcgcaagctgcgccagctggaagagcaggtcaagctgatccccgtgctccaggtcaagctttcggtgctccaggaagagaagagacagctcaccgtgcaactcaagagccagaagtttctaggccactcctcagggacacgaggccggggtgagctctgcctggaccttccagagcccccgaggaccctgctgtgctagagacccgctctgtgggcacctgggtccgagaacgggacttgggcattccagatggtgaagctgccctagtggctaaagtggccgtgttggaaacccagctcaaaaaagcgctgcaggagctacgggcgactcagacccagcaggccaacctccagccccaggcctggccaccaccagacacccaggtccgtgtggacaccgtgagagtggtggaaggtccccatgaagaggacagaggaccctgcagaccctggagtccaccagaggagcctccagtttgtgggagtcaacggcgggtatgagtcctcctcagaagactccagcacagcagaaaactcagaacacgagagcacagagaacgaagccccagagataccagcaagggttctgagcatggctgaatgccctcaggttaggcctccagggactgcagcggccaagaccagtctggaagagagccaactcccccaggaagctcagcacaaacccacagctgaggtgacatcaggacccaactctgaggaggaaattcggatggatctgagccctgacctcatctcagcctgcttggccctggagaaatacctggagaaccctaatgccctcactgggcgagaactgaaagtggcctataccacggtacttcaggaatggctgcgcctggcctgccggagtgatgcacaccccgagcttgtgcgacgacatctggtcaccttcagggccatgtctgcccggctgctggactatgtggtcaacatcgccgacagcaacggcaacacggccctgcactattccgtgtcacacgccaacttccctgtggtgcggcagctgctggacagcggtgtctgtcaggtggacaaactgaaccgtgctggctacagccccatcatgctcactgctctggccaccccgaagacccaggatgacatagagaccatccttcaactcttccggcttgggaatgtgaacgccaaagccagccaggcaggacagacggcgctgatgctggcagtcagccacggacgggtggatgtggtgaaagctctgttggcctgcgaggtggatgtcaacgtgcaggacgaggatggctccacagccctaatgtgtgcgtgtgagcacggacacaaggagatcaccgggctcctgctggctgtgcctaactgtgacatctcacttacggaccgagatgggagcacggcactgatggtggccctggatgcggggcagagcgagattgcatctatgctgtactcacgcatgaacatcaagtgctcgatcgctcccatgtcagactgtgagagtccggcatcctcctcagctgaagagtgaacacagggagaggccagtgatttccccagggacatgccagccgcacagccgcacagcaaaccgtccctcccctcatccctttgtcctttctctctctctctctctctctctctcacacacacacacacacacacacacacacacacacacacacacacg

SEQ ID NO: 3321 - DNA, 1713 bp, Cricetulus griseus
cgcagcggcggggtcggcggacgcagcggcctcggcaagcggtttttcttcctagaattgtatatatagagcatcctggagtccaccatgaacggacagttggacctaagtgggaagcttattatcaaagctcaacttggggaagatatccgccgaattcccattcataatgaagatattacttacgatgagttagtactaatgatgcagcgagtgttcagaggaaaacttctgagtaatgatgaagttacaataaagtataaggatgaagatggagatcttattacaatttttgatagttctgacctttcctttgcaattcagtgtagtagaatactgaaactgacattatttgttaatggccaaccaagaccccttgaatcaagtcaggtgaaatatcttcgtcgagaactgatagaacttcggaataaagtgaatcgcttattggattgcttggagccacctggagaaccaggaccttctaccagtattcccgaaaacgacactgtggatggcagggaagagaagcctgctgcttctgattcttctggaaaacagtctactcaggttatggcagcaagcatgtcagcttttgatcctctaaaaaaccaagatgaaatcaacaaaaatgtcatgtcagcatttgggttaacagatgaccaggtttcagggccacccagtgctcctgcagaagaccgttcaggaactcctgacagtattgcttcttcctcctcagcagcgcacccaccagccgttcagccacagcaacctccatatacaggagctcagacacaagcaggtcagattgaaggtcagatgtaccaacaataccagcagcaggctggctacggggcacagcagcctcaggctcctcctcagcagtacggtattcagtattcagctagttacagccagcagactggaccccaacaacctcagcagttccagggatatggccaacaaccaacttcccaggcaccagctcctgccttttctggtcagccacaacaactgcctgctcaaccaccacagcagtaccagacgagcacttatcctccacaaacttatactacccaaacatctcaacctgctaattatactgtgccccctggcactcagcctggaatggctccaagccaacctggtgcttaccaaccaagaccaggttttacgccatctcctgcaggtaccatgaccactccttccagtgggcctaacccttatgcccgtaaccgtcctccttttggtcagggctatacccaacctggacccggttatcgataaggaggttcagctacactaatgatggctagttgcctcccaaaagactacaatactattttgtttcaatttgtactgtattgaagttcaaaaattttaaaagcagagcaagttttatgatatcattgttgctgttaattgaaagtataatttgccggaatacatacacagaaagaccaaaatgaacattgttttcctcccctgcttaaaactgtagcagcttcttagttattttggaacactactctttcatgtaaaatgattggctttctacttcccagaggatattaaaaagctaggctaaggttcagccatcacacttggctatttactattaacatgatgtactaaaaatagagccctttgacaagatgactagacattatgtataaaatgtaacattgataggctaataaaggtgattgaatccaa

SEQ ID NO: 3322 - DNA, 1713 bp, Cricetulus griseus
  modified_base (995)..(995): a, c, t, g, unknown or other
gtgccttggcctacagatcccagggtggtcctgggatcccaggctgttggtgggttgtgcagtggctgtcctggctgtgcacgggccggaaatttggtcaacacttactatgacttttccaagggcattgatcacaaaaagagtgatgacaggactctggtggaccggatcttggagccccaggatgttgttcgatttggagtcttcctctacaccttgggctgtgtctgtgccgcttgcctctactacctgtccaccctgaaactggagcacttggctctcatctactttggaggcctgtctggttcctttctctacacaggaggaattggattcaagtatgtggcactgggagacctgatcatcctcatcactttcggcccgctggctgtgatgttcgcctatgctgtccaggtggggtccttggccatcttccctctggtctatgccatccctctggccctcagcacggaagccattctccattccaacaacaccagggacatggagtctgaccaggaggccggcatcgtcacgctggccatcctcattgggcccaccttctcatatgtgctctacaacacgctgctctttctgccctacctgatcttcagcatcctggccacgcactgcagcatcagcctggcgctgcccctgctcaccatccccatggctttctcccttgagaggcagttccgcagccaggccttcaacaagctgccccagaggacagccaagctcaacctcctgctggggcttttctacgtctttggcatcatcctggcaccagcaggcagtctgcccagactctgaggagacaatcagctcccaccacagcacagcccctccttagaatgtgcaaaagcagagactgagaaggggtacacctggccagggtgggtgctcagcatgggctgccaacgcctgtccttaagtgttgggattatcttggtaaaggtaatctgcgtgtgatttgtttccctccttatgggganccctgaaaccactctcgtgtctgtgtttcttataatctccactagagggtgttgtcgggccactttcggatggaaggtccatctccccttgttctaaacagaacgccctaacaatttatgaaggagctgtgtcccagaagagccacagtgacaaggcacagtgctgtcctgttaccttggcacataggagatgctaataattggtgccaggtcccattaacatggagcacctgtcccctgaatgtgctgcctgatagagaaagtccctcattaacagccatgtggctcccggctttttgcctaggtggtgggcggttcagacatttctgtccttcatgtctcctttcactcgtcaccactgttgaggaaaatgtcagctcaccctgcagcaagacagacaagcctgggccttgtctcctcccagctgcctccctgatcggctgacctggagggcactgcagggtctcagcctgctagtaaaacgaaccttgagttaagcactgagtcacttccttggcctgacacatggctaacctcatcagaaccgtgtcagctgctacaccatgctctgggacagattttaatgcctatttttatatatgatctccagaggccatatttggtgccacattttatatacaggccactataatttatattatgtctcctgatttaatgaaggtttcctatagatttgttaattaaaatatgagaaaac

SEQ ID NO: 3323 - DNA, 1712 bp, Cricetulus griseus
cttctgataattcaccatcctctggatctgcttcaggcctggaccaaccctcccttcttaagtctcctgtcagaagcaccccggaaccccctcaccttcaacaccaaatggaaccaagagcacatatgagtcccagcacacagaacctattgctcttctgtcctcccgagcaatcaaagtggaaggctgcatcagaatgtacgaattggtgcacagaatgagaggaacggagggcctgagacagtggcaggaggagcaggagaggaaggcacgagccctctcagagatggcatctgaacaactaaagaggtttgatgagctgaaggaactgaagctgcataaggaattcaggacttacaggaagtgatggagaagagtccagcagctggatgcctccaatcagcacaaggacctgctgaatgtcgacctggctgccttccagacccggggcaaccagctgtgtagcctcatctctggaatcattcgcaccactttggagagtggttatcccacagcagagaaccaagctgaggctgagaaaaccctgcaggaaatgcgggacctcctctcaaatttggagcaggaaatcaccagagcctatgaagtcaagaagaagcaggatgaagaggaggcccgggccaagatgcaagaatcacaggtgcagcaaggttcaggggctcccacccagcccccagtgcacagtccaggcccagcagtgacacagaatgaagacctgcaggtgaaggtacaagatagtaccatgcagtggtatcagcaacttcaggatgcttctgccaaatgtgtgttggcctttgagggcctgaccagcagcaaggacagtcaggctaaaaagataaagatggacttgcagaaggcagccaccatcccagtgagccagatctccaccattgcaggttcaaaactgaaggaggtctttgaaaagatccatagcctactctccgggaaacctgttcaatctggcgggcgttctgtgtctgttactcttaacccacaggggctggactttgtccagtacaaactagcagagaaatttgtgaaacaaggggaggaggaagtggcctctcaccatgaagcagcattccccattgcagtggtggcatctggtatctgggagctccaccctaaagtgggagacctcatccttgctcatctccacaagaagtgtccctactctgttcctttctacccagcttttaaggaagggatggccttagaggactatcaacggatgcttggctaccaagtgacagattctaaggtggagcaacaggacaactttctaaaacgaatgtctgggatgatccgtttgtatgctgccattatccagctccagtggccatatggaaaccggcaagaggctcatccccatggcttaaatcatggctggcgctggttggcacagatcttaaacatggagcctctgtcagatgtgacagccaccctgctgtttgactttttggaggtgtgtgggaatgccctcatgaagcagtaccaggtccagttctggaagatgatacttctcatcaaagaagactacttccccagaattgaagccatcacaagctcaggacagatgggttcattcatacgcctgaagcagttcttggagaaatgtctgcaacgcagggatattcctgtccccaaaggcttcctgacttcctccttctggcgctcctgatgtccctccatca

SEQ ID NO: 3324 - DNA, 1712 bp, Cricetulus griseus
cagattctatcaagatggaaaatgggcaaagcacaggcaccaagctggggctgcctccctgacgcctgagcagcacagaaggccaagaaatatgcaatggagcagagcatcaagagtgtgctggtgaaacagaccatcgcgcaccagcagcagcagctcaccaacctgcagatggcagcagtgacaatgggctttggagatcctctctcacctttgcaatcgatggcagctcagcggcagcgggcactggctatcatgtgccgggtctatgtgggttccatctactacgagctgggggaagacaccattcgccaggcctttgctccctttggccccatcaagagcattgatatgtcctgggattctgttaccatgaagcacaagggctttgccttcgtggagtatgaggtcccagaagctgcacagctggctttggagcagatgaactcagtgatgcttgggggcaggaacatcaaggtgggcagacccagcaacataggacaggcccaacccattatagaccagctggctgaggaggctagggctttcaaccgcatctacgtggcctctgtacatcaggacctctctgatgatgacatcaagagtgtgtttgaagcctttggcaagatcaagtcttgtacactggcccgggaccccacaactggcaagcacaagggctatggttttattgaatatgaaaaggcccagtcgtcccaggatgctgtgtcttccatgaacctctttgatctgggtggccagtacttgagggtgggcaaggccgtcacaccccccatgcccctgctaacacctgccacgcctggaggtctcccgcctgctgctgctgtggccgcagctgcagccacagccaagattacagctcaggaagcagtggctggagcagcagtgctgggtactttagctacaccaggactagtgtccccagctctgacactggcccagcccttaggggctctaccccaggctgtcatggctgcccaggcccctggagtcatcacaggtgtgaccccagcccgccctcccattccagtcaccattccctctgtgggagtggtgaatcccatcctagccagcccgccaacgctgggtctgttagagcccaagaaagagaaggaagaggaggagctgtttactgagtcagagcgaccagagatgttaagtgaacaggagcacatgagcatctctggcagcagtgctcgccacatggtcatgcagaagctactcagaaaacaggagtccacagtgatggttctacgaaacatggtggaccccaaggacatcgacgatgacttggagggagaggtgacagaagagtgtggcaaatttggtgctgtgaaccgggtcattatctaccaagaaaagcagggcgaggaggaggatgcagagatcatcgtcaagatttttgtggaattttcaatggcctcagagactcacaaggccatccaggccctcaatgggcgctggtttgctggccgtaaagtggtggctgaagtgtatgaccaggagcgttttgataacagtgatctctctgcgtgactttggcctcatttcctggacttgcacttgccccttatttcctctgggttttgtagagtgttaacagtggtgtccctgggaccaggcactctgcccaacccacactgtagtgtacataaaggtgcagatactgctggccctaaaaaaaaaaaaaaaaa

SEQ ID NO: 3325 - DNA, 1711 bp, Cricetulus griseus
gataaagaatatgcgtatactttacagaatctttgtaatcaagttgataaagaaagtactgtgcaggtgaattactgtcagcaacgtgtccaagtcctggcttctgatgattcagcacacagagcagcttagtcggataatgaaggcgcacgcggaggacctgagctccgggcccctgcacaggctcaccttgatgatcaggggacaagcagcaggtgaagaagagctacctggggacgcccagcagcagatggaagcggaacatgatcaaggtcacaaaaagacagaattggagaaattaaaatccaggttcacagaacaacagactgctaaagaaacaagaaatcgaatttgatacttccttattagaagataatgaaaaccttcaggcaaatgagatcatgtggaataatttaacagcagacagtttgcaagtaacgttgaagactttagcagaagagcttgcacagacacaacagatgctcttaagcaaggaggaggccgtcctggagctagagaagaggattgaagaatcttctgagacctgtggaaaagaagtctgacattgtgctttttgttgataatctctaccgatttgaaggcactgggttttcaaacatcccccaacttatagatcaccacttctcaaccaagcaggtcatcaccaagaagtctggagtggttctgctgaatcctgttcctaaggataagaaatggattctcaatcatgaagatgtttcattgggagcattactgggcaaggggaattttggtgaagtgtataagggcacactgaaggataaaactgctgtcgctgttaaaacatgcaaggaagaccttcctcaggaattaaaaataaagtttttacaggaagccaaaattctcaagcaatatgatcaccccaatatcgtgaaacttataggcgtgtgcacacaaagacagcctgtctacatcattatggaactagtcccaggaggtgatttcttgtcctttctgaggaagaggaaggatgatctgaagctcaagcagctcgtgaagttttccttggatattgcatctggcatgttgtatcttgagagcaaaaactgtatacacagggacctggctgcaagaaactgtctggtgggtgagaataacgttctgaaaatcagtgacttcggaatgtctcggcaagaagacggcgggatatattcatcttctggcctaaagcagatccccattaagtggacagcaccggaagctcttaattacgggagatacagctctgaaagtgacgtgtggagctttggcatcctcctctgggagaccttcagcctaggagcctgtccataccctgggatgacgaaccagcaggcgcgggagcaggtggaaagaggataccgaatgtcagccccacagaactgtccagaagaaatttttaaaatcatgatgaagtgttgggattacaagcctgagaaccgcccaaggttcagcgagcttcacaaagagctcactgccatcaagaagaaaatcacatagtgccagccagggcataccaccttactgcagccatcttggaaggttatgtttttattagctgggtttttttgaaagtctgttccactttaaaatatgttaaaggcaaatttattcaagaaataaacagtcctaacccatggccatattagctaaccacagagtcctaccgtttgagaccactgtaaagagaaaa

SEQ ID NO: 3326 - DNA, 1711 bp, Cricetulus griseus
gaagccgcgctgcagccacgtccatcggtaccccggtaaggccgcccggcttggagattttcagggtgccagacatgtccgaggtaaagagccggaagaagccggggcccaaggggcctgccgctgagcccgagaagctgagcgacggcaggaagaaccccgaggcgcggggcggcgcgggttgggcggaccctcgcaccgggctcagcctgttatcgctggcggcgtgcctcggcctggcctggattgtatttcaacaaacagaaaaaatttccaagatggaaaaccaataccagttactgcaaatagaaagcagagagtttcaaggactacagaataaaatcagtttaatttccagacaagcttgagtctactgaaagtatcctgcaggaagctacagcatccatggctttgatgacccagtttgaacaggaagtatctggactccaaagatccatacatgacattgagaatagtgatgagatgctcacacaaaagatgcaaaaccttaatgagaaattccagaacattacagatttctggaagagaactctggcagaaatgagcgataatacaaccattttcaaatcagaagcaaagcatatacattctcaagttaccatgaaaattaattcagctgagcaaaaaatgaaattgctcaccaaacggctaaaagatttggaagacagtacactacgaaacatcagaacagtaaacaggcaagaagaggaagatcttctccaagtagaggcacagctcagctctgacacaaaagcagttgagaagctagaagaagaacagcactcactcctagccagagatgaagatctgaccaataaactttccaactacgaacccaaagttgaagaatgcaaggcacatttgccagctatagaaaatgcaatccactctgttctcagagtgtcccaggatctgatggggacagaaaagaaaatggaagaccttactatgcagatgttcaacatggaagatgatatgctaagggcagtgtctgaaataatggagatgcagaaaacccttgagggaattcagtatgacaatagcatattaaagatgcaaaatgaactggttgttctaaaagggaaagttcacgatttcatagcatattcaagtgcaaaggaaaaggagactttggagaaatataacctagaaaataagggagctggtgaccttttgcaaaggttctaaactgtgttacagatacttagaagaagtttaaaatgtaaatatgttcttactttatcctcaaaaatagccttttctattaactggttatgctttgaagtttgagctcacagagtacctttgtgaacctggactttaatttctgaagtttgaactatgtgacactagagtttactaaatacaaccaagagatacttaaaaatatgtcaataagcctgagcctgctttaaagataaaacaacacaacaataaattgtgataattatgacatatttgtcattattttaaagattccccaacttatgaaactcagtttgttttcacatattaattttttaaaaatgagagctggagctaggtatggtggcacatgccttaaatcccagcactcaggaggcaaaggcaagcagatctataagttcaaggctacctgtcctacatactgagactgtctcacaaaaaataacaaaaaaaataaaaaataaaaaataataaaaaaaaaaag

SEQ ID NO: 3327 - DNA, 1711 bp, Cricetulus griseus
ggtgagcgagaccgtggaaactgcatcacatccttacagctgcatcccaaaggctgggccacccttcttcggtgctcaagcaacactgatgatcaggagtggacttgtgtctatgaattccaagaaggagctccagtgcgacctgtctcacctcgctgttccctgcgtctgactcattacatcgaagaagccaatgtaggcaggggctacatcaaagaactttgcttcagccctgatggacgaatgatttcttccccacatggctatgggattcgcttgttgggatttgacaaacagtgcagtgagcttgttgactgtttacccaaagaagccagtcctctacgggtgattcgctctctgtactctcataatgatgtggtcctgacaacaaagttctctccaacacattgtcagattgcctcagggtgccttagtggacgggtctctttgtatcagccaaagttttaggcacaacttacatcaaataaggaactcttctggtgtttggcttatgaattacttcaatttaggtgaagtattttcttttttagaagatcttataagtttgggtcaagatcttgttcttataggttggtgaacacatatgtgacccaagtatttggccatctggcatcatccgggcatctccatttcgaccatgcagcatcgttctgtcagcattcctttgctcctgctgtctgtgccactgagcttgggtattcctggtcattttgcatgtggctcttgttctttctcccatccctgtttccaccactcctccatgcctcccttcctcttttttgattttggtatgaattttgtgaacatttgacaagagtcatggttgggatgaggaaaaacctgtggcactagtactaaataaaacccagaagctggatgttggcacaccagttgttgaaaaaagaaagttcatcttcatttatcagtacatttggcctttaaagttgctgtcaaatattgagcacagataatggcgttattctcataaatgatactcttgcaacaaaatatcttttttaaaaattcctgttaaaattacacaagttatctcatgtgagatttttgttgtgaaattctagaaaaatattataacttctttgtaatttatttacttgtatgaatttaaatctccagcatgtgtctttgttattttgttcctatcctcagcattggaaagcaaaaggaaaaggaataagctcagtcacttccattgtccagaagagttcattccccaaagagaatagtttagaaggaaatattacaattaaaactaccacaattacaaactattaagtataaagattaaattgacattcaaaagaagattccataaatgttaacagtttggaaagagttctgtatcagatggtatgcccacatgtcacctaagtcgagccaggggttcttgaatcattgtttttgaatacctactatgtgttaaagaatgtgtctgctttcaccaaaatttaggtttgtatctttggtcaaacttggaatattctaattaatatactgtcatcagaacactttctcacagggtctaaggtgctattggtccttctgctagactgtgcgctccttgtgggcagggctatcttcttcttttattcttgtatccatggtgcctgggagaggatctaacagagtagttgttcaataaatatctgttgaatggaaaaaaaaaaaaaaa

SEQ ID NO: 3328 - DNA, 1710 bp, Cricetulus griseus
agggttttatcatggacacatttcttatctggattttgcaaaattcggtgtgaagaagaagcccatttacattaatgtcatcagggaccctatcgagaggcttgtttcctactattactttctgaggtttggggatgattacagaccaggattaaggagacggaaacaaggagacaaaaagacctttgatgaatgtgtggctgagggcggctcagactgtgctccggagaagctctggctccagatcccatttttctgtggccacagctcagaatgctggaatgtgggaagcagatgggctatggatcaagctaagtataacctaattaacgagtactttctggtgggagttactgaggagctggaagacttcatcatgctactcgaggcagctttgccccggtttttccggggtgctacagacctctatcgtacaggaaagaaatcccacctgaggaaaaccacagagaagaaacttcccaccaagcaaaccatcgcgaagctgcagcagtctgacatttggaaaatggaaaatgagttctacgagtttgcactagagcagttccagttcatcagagcccacgctgtccgtgagaaagatggagacctctacatcctggcccagaactttttctatgaaaagatttacccgaagtcgaactgagtgaaagtgtgaccagagcagtcttgaacctggacttggctgtgttggagttttgtgttgcacacccctactggatagtgctaataactatttgccagtagctgatttgtttatgtggatcatgtctcacagagtttattggaatgtttgatcatgttttctcagaactgtttttgctgtagttgagtttgcccatatttatgtaggctttattttattttttggatgatcattagtgttaaagaaatcaactgaaaaccatgaataatactgtaaaaagacaaaacagttaaaagcagtattcctgatttctgtctccccagtatctaatattggggtggtatttctaagaatgttgacaacattatctgaggctttcttaaggatttccacacattcatataaaaaaaatgagtttagtatttgtttctccatggcttctctataacccagtacactgaagtatcggtgactgcatatggcaactccatcagtgagctgtgatggtaggattttcctacctctgtacttttacctgtagactatttttactacggtgctttataatgtgttttaaagcattgcatttacaaaagaaaaatgctgtaaatattgcatattttatgtatttggaccaaaaagttacaagtcagtagataaaaagtggttttgcaccttgtcattcaaaatggtggctattttacacctatggatttttaaaagtccgttttgttagagtttaatttgcctcttaattcttcaccttctccctcttcagattcagaaatcagattcttttagacttttttaaaggagtaattatttatatgtttagtttaaatacttacaggacctcatcaaacaaagcatttttgacagatggctacaaagtcacttattgtgtaatgagaggagcaaagaacgctgtgtatcagaaagcacttagaaagactaaaggaatgacagtgtcacctgctccaccactgtgaatgaaaatagtaagaggacatagcagcatttcccatatgaaatagtttatagatgac

SEQ ID NO: 3329 - DNA, 1710 bp, Cricetulus griseus
gcagcagctgctcccaccagggcaggtgcagatccgcaagatgaaggccgtgtacttggccctcaatcagtgcagtgtgagcaccacacacaagtgcctcattgcagaggtctggtgtgccacgcgggacctgcccaccctccagcaggcgctacaggatggctcaagcgaggaaggagtgagtgctgttgctcatcgcataccctgccgggacatgcctccaacacttgtgcggaccaaccgcttcaccgctagcttccagggcatcgtggatgcctatggtgtgggccgctaccgagaagtcaaccctgctccctacaccatcatcaccttcccctttctctttgctgtgatgtttggtgatgtgggtcacggactgctcatgtttctctttgccctggccatggtcctcactgagaaccggccatctgtgaaagctgcacaaaatgagatctggcagaccttctttggaggtcgctacttactcctgctcatgggtctgttctctgtctacactggcttcatctacaatgagtgcttcagccgtgccactaccatcttcccctcgggctggagtgtggctgccatggctaaccagtcaggctggagtgacaagtatctgtcccagcaccccatgctcaccctgaaccccaacatcaccggtgtcttcctgggaccttatccctttggcattgacccgatctggagcctggccaccaaccacctgagcttcctcaactccttcaagatgaagatgtctgtcatcctcggagtcacccacatggcctttggggtgttcctcggtatcttcaaccacatgcactttggccaggcacaccggctcctgctggagaccctacctgaactcatcttcctgctgggcctctttggctaccttgtgttcctcattgtctacaagtggctgagggaatcagctgccagtgcctccacagctcccagtatcctcatccactttatcaatatgttcctgttcgcccagagccccaccaatcagccactcttccatgggcaggaagtggtacagtatgtgctggtggtcctggctttggcaacagttcctatcctgctgctgggcacacccttgtacctgctgcggcagcaccgccgcagaaatactcagagaaggccagcgggcagagaggacaaggacagtgacaagcttctggcctcctctgatgcttcttccacctcggtgaatagctggaatgctgatgaagagaaggctgggatcccaggggatgaggaggaagctgagtttgtcccatctgaggtcttcatgcaccaggccattcacaccattgagttctgcctgggctgcatctccaacacagcctcctacttgcgtctctgggccctgagcctagcccatgcccagctctctgaggtcctgtgggccatggtcatgcgcataggcctgggcatgggtcgagagatgggtatggcagctgtggtgctggtccctgtgtttgctgcctttgctgttctgactgtggccatcttgctagtgatggaggggctctcagccttcctacatgctctgcggttgcattgggtggagttccagaacaagttctactcaggtaccggctacaagctcagccccttcaccttcactgtggacaatgagtagcatctactatgattcctgcctccccagatcaagaaagaaataaagaactggctggccca

SEQ ID NO: 3330 - DNA, 1710 bp, Cricetulus griseus
tccaccatgcatctggggcctgtggtatccaaggccctaagtacctcttgccttgtctgctgcctctgccaaaacccggccaacttcaaggatcttggggacctctgtggcccctactaccctgaacactgcctccccaaaaagaaaccaaaactcaaggagaaggtgcggctggagggcacctttgaggaggcctctctgcctcttgagagaacattgaaaggcctggaatgtgcagccagcaccactgcagagttgctattgctgtgatggtcagggggacgggggtgaggaggtggccccagctgacaagagccgtaaacatgaatgcagcaaagaggcccctgcagagcctggtggggacacccaggaacactgggtacatgaggcctgtgctgtgtggaccagcggggtgtacctggtggccgggaagctctttgggctgcaggaggccatgaaggtagctgtggacatgccatgttccagctgtcatgaagccggggcgaccatctcgtgctcctataaaggatgtatccacacctatcactacccttgtgccaatgacacaggttgtacattcattgaggagaattttactttgaagtgccccaaacataagaggctgccgttgtaatcccccacgtggccgatcctccaaggaagaggagctgcgcccacagccggtccttgatcccaccccgggtcttggttccggctgcttcgggcgctggcgtgaggcccgggttgtgaagaaaactgttctcttccaggccagacttggcgagggcaggccaccgggcggccagaccccggggcgcgcggcttcgggcggggtccaagtcccctgcaagttctgaaacgacgtggcatgcaagctgtgcccctgggaagaggccgagggcactgttagctcggtggacgacgtggggcaggacccaagcttttcttgcccagggtcctggaaggcctgggctcaggccatgtggtccctgatgtgggctggcctggggcggtgcccttatggcttctgtttgtcccctttccagtcttccaccccactgttggagcccggtctagaagcttgaggaaattgggcctggctaccctctaggcagatgtgctgctgtcccaaaacaccaccttgggttccagggactgccactctctcggctcatgggtggggacagtgctagacttcgtgtacaaacctgtgtacccctctatatatatgttatatagaatgtatatatgttgggaacatgctcgcttctgtgtgtcgctgctatgcgtcgtgtgctccacagcacagagccctaacctggccttgggcggggtaggggctacagtgatgtcccttccctatgcaaccaccatcaccaccgacaccaccatggccagtacccacctgtccgtttgtgttctcagctctgtccacgcttcaataggcctgatgcagaccccctttccctgcaacttcctgtacatacgactgtaaaatggtaaacgtgtgtattatatctggcctcgttatatagtgtatatatatgtatacatatacatatatataatatatatgaagactgtaaatgttaagacaactagtgttcttattagtatattgcttcacactgaagattgtgtgtatcgagctgtttctaaaagatgtttattttccttaagaaagtttaaaaaaaaaaaaaaaagtacatt

SEQ ID NO: 3331 - DNA, 1710 bp, Cricetulus griseus
gcgctgtggcccccggctgtgctgcgcaggagtaggctgcggtcgcgattgcggcggcgcaaagacggctggcatggtgggccgggagaaagagctctctatccacttcgttcccggcagctgccggctggtagaggaggaagtaaacatccctagcaggcgtgttctagttacgggcgccacagggcttcttggcagagctgtttacaaagaatttcagcaaagtaactggcataccattggctgtggctttcgacgagcaagaccaaaatttgaacaagtgaacctgttggattctgaagcagttcatcacctcattcatgattttcagcctcacgtcatagtgcattgtgcagcagagagaagaccagatgttgttgagagtcagccagatgctgcttcccagctgaatgtgggtgcctctgggaatttagcaaaggaggcagcttcgattggagcatttctcatctacattagctcagattatgtgtttgatggcacagatcccccttatacagaagaagatataccaaatcccctgaacctttatggcaagacaaaattagacggagaaaaggcagtcctggagaacaatttaggggctgctgttttgagaattccagttctgtatggggaagttgaaaagcttgaagaaagtgctgtgactgtcatgtttgacaaggtgcagttcagcaacaagtcagcaaacatggaccactggcagcagaggttccccactcatgtgaaggatgtagccagtgtgtgccggcagctggcagagaagaggatgctggatccatccattaaggggacctttcactggtctggcaatgagcagatgaccaagtacgaaatggcatgtgcgattgcagatgccttcaacctcccgagcagtcacttaaggcctattactgacagccctgtaataggagcgcaacgccccagaaatgctcagcttgactgctccaaattggagactctgggcattggccagcggacaccattccggattggaatcaaagaatcgctctggcctttcctcatcgacaagagatggagacagaccgtctttctattagtttatgtgttgtgtattttttaaatgaaaagtatagtatgtggcacttttttcaagaataaaggaaatagttttgtatgagtactccttaattgtgactcatgatccttcaggtaaatgatgctgttgcactaggggaacgtcggacagactgagggcagccatgccttttttttctggcttaccttgctgttccaagtaatgtaaattatgattcttaatgtaaagagctgggatgaaatagactgttagaccttggatgaaatgcattgtccattcctataacttcctttttgttgttattttgttttgcttgttgacttttgtatatcgatagcttcagtgtgtgtgtagtatcctataaaaatcatcggtgttcattacgtgctttgcttgaacccagatcaaaatgcttgaagaaaaggaaactttatttttgcaactttgagtatggtttttacgcttgagtctttaatctgttatgtatatcagaacttgtatagcctgacacttcaccttcatagcaccgtgtggcacacacttgagagtgcgtgtgtgtattttttaaatataaatacatatctgtctctttcactctgtcccaagtgatatttcatacatgtggttataat

SEQ ID NO: 3332 - DNA, 1709 bp, Cricetulus griseus
gggctcggctggcctcggctggcctcggctgcgctcggcaggctgcggtaaatctgggcttgcggtggctggcagaggctacggccggtggtccccgcatcgcgccgggatcccggagagccatgcaaatgtcctacgccatccgatgcgccttctaccagctgctgctggccgctctcatgttggtagcaatgctgcagctgctctacctgtcgctgctctccggactgcacgggcaggaggagcaggaacagtatttcgagttcttcccgccgtccccgcgatccgtggaccaggtaaagtcgcaactccgcaccgctctggcctccggaggcgttctggatgccagcggcgattatcgcgtctacaggggtctcctgaagaccaccatggaccccaacgatgtcatattagctactcatgccagcgtagacaacctcctgcacctgtccggacttctggagcgctgggagggcccactgtctgtatcagtgttcgcggccaccaaagaggaggcacagatggccacagtgctggcctacgcgctgagtagccactgccctgagatgcgtgccagggtcgccatgcacctcgtgtgtccctcacgttatgaggctgctgtgcccgacccccgggagcctggggagtttgccctgctgcggtcctgccaggaggtctttgacaagctagccagggtcgcccagcccgggactaattatgcactgggcaccaacatctcctaccccaataacctgttaaggaatttggctcgagaagaggccaactatgccctggtgattgatgtggacatggtgcccagcgagggcctgtggagacgcctgagggaaatgttggatcaaagtaaccactgggatggcatggccctggtggtgcctgcgtttgaaatccgccgggcccgccggatgcccatgaacaaaaacgagttagtgcagctctatcaggtgggcgaagtccgccccttctattatgggctgtgcacaccttgccatgcacccaccaactactcccgctgggtcaacctgccagaagagagcttgctgagacctgcctacgtggtgccctggcgggacccctgggaaccattttatgtggctggagggaaggtgcccacctttgatgagcgcttccggcagtatggcttcaatcgaatcagccaggcctgtgagctgcacgtagcaggatttaattttgaggtgctgaacgaaggttttctggttcataagggcttcaaagaagcattgaagttccatccccaaaaggaggcagaaaaccaacgcaataagatcctttaccgccagttcaaacaggagttgaaggctaagtaccccaactctccccatcgatgctgaatcctttcttcccctggtctgagaatttccagcatctggctcctcaggcctgactggggtaagacacatccctccactctacagaggtagctgtggttttggaacactggacttgactatggggtgctgggatcaagtcctagctttaccactaactagctgtgtggccttgaacaaatccttttacctctctgagcctccaataccccgtctgtaaaaagggaggtgaaaatacctacctcacagaactgttggctcagatgaggtgctgtatgtgaaaacatcctgtaaacttcgtacaaatgttaagtattattaatattattacagtgctattat

SEQ ID NO: 3333 - DNA, 1709 bp, Cricetulus griseus
  modified_base (10)..(10): a, c, t, g, unknown or other
tggagcagcngaacagactgaccagaggaccagcctcttgcagttcattatctaagacatcatcatcatcatgtagtactcaatcttcttttagctctactggacagccccgaggacccttggagcctcctcaaattataaaaccgtggagtttaggttgcctacgacctgcacctccacttagaccatcagcagctctaggttataaagaggaagtttcttcacaaaagaaagactgagcgaaaagcatctgaggaagaatacgtgattagaaaaagtacagccgctctggaagaggatgctcagatccttaaggtgatcgaagcctactgcacaagcgccaattttcaacaaggtactcgtaaagattctgtcccacagttactactccctgaggaagagaaactcattattgaagaaaccagaagcaacgggcagaccatcattgaagaaaagagccttgttgatactgtttatgccttgaaggatgaggtcaaagaactgaaacaggagaataagagaatgaagcaatgcctggaagaagaattgaagtcgaggaaggacctagaaaagctggtccggaagctgttgaagcaaacagacgaatgcattcgagctgaatccagcaccaagtcccctattctcccataagcatcattgtgcagctgagcccaggccttcagcacttgttgaaatggccagctgaatgatttgactgtgcacctcagtttttgctttgtggtttgggatctgtctccaccctccctctccctccctctccctcctccccacctttgtttgcttgagtgttcattacttggctatcggttgactgatacttgttttaataggggaaacaacctaagtggtgataaaatggccccaatactttgctatgcccaacagccctttactacctaattagctggaggcaaagctaattcacaggctgtgtctagagtagatgaaacaacacctttgcccaatgatccagctctccttccctgggctgtctcatggcccccttcaacactttaaaaattcttgccctgtgttgtctgttaataccaagagcagtgtaatgcccttattccctttgtgctggtatacatttaaaggcagtggtgtaggaactccaactgtccacaccaacactcagtccatcagtagactgcttcaggcacccccgcccgccccgcccccagcagcagggcagagcagcttgtttataatgacaaaccattgactttgtaagtagttcagaaatatgaactgcgaggaagcagattcagtagacagccccagaagaacagtgtgtacaagaaacaacagtagtaacccagatgttcacatgtgtcctgtctgtgcttaggtctctaaaaggttgtgtacatatgcatgtttggggactttgcctttctaaggaaaggtttttggtacttgggatattgaagcttgtgcagtgggctgcctgcgcttacacactaaataatataaaggaaatgaagccatgttaacccaacagccgtgtctccatagttgtgttgtttacaatactctgtaattaaactgctgcccttagaggcctttcagtttcttgtttgtcatgtcccttcttacaggaactcagattttctaaacttgttttattttaaagacttttaaaatggacattttcaataaacaagaataaacagtgctttataaat

SEQ ID NO: 3334 - DNA, 1709 bp, Cricetulus griseus
gagcgcgtgacgtcgggccacagcttcatttcgcacgtggcgcacgagaaggcacggcgtagctgcggtctcttccgaatctggagggtccgctgccaccatgaagcggccgaagttaaagaaagcaagcaaacgtatgacctgtcataagaggtataaaatccaaaagaaggtccgagaacatcatcgaaaattaaggaaggaagctaaaaagcggggtcacaagaagcctaggaaggaccctggaattccaaatagtgctccctttaaagaggctcttcttcgtgaagctgagctaaggaaacagcagcttgaagaactaaagcagcagcagaaacttgataggcaaaaagaacaggaaaggaaaagaaaacatgaagttaaccctggcgatgagcaatctaatgtggaacctcaccaggaatttgaagaacctaaaagcaagaaagcaaaaccaggcaaacagaatccaaagaaaattgcattgtcaggaacttaaaaaggtgattgaggcctcagatgttgtgttagaggttttggatgccagagatcctcttggttgtaggtgtcctcaagtagaagaagctattgtccaaagtggacataagaagctgatacttgtattaaataaatcagatctagtaccgaaggagaatttggagaactggctaaattatttgagtaaagaattgccaacagtggtgttcaaagcttcgacagacatgaagagcaaagagaagatgctcaaggcaaagaagaaagctgttccgttccaaaggaaactctgctctggcaaggaagcactttgtaagcttctcagaagttttcagcagtcatgtgggaaagatatccaggttggagtaattggtttcccaaatgtggggaaaagcagcatcattaatagcttaaaacaagaacggatatgtactgttggagttcctatgggacttacaaggagcatgcagattgtcccgttggacaagcagatcacagtcatagatagtccatgcttcattatctcaccatgtaactcctctgctgcacttgctttacggagtccagtaagcattgaagtactaagaccattggaggctgccagtgccattctatcccaggctgatagtcaacaggtggtattaaaatacactgtcccggggtataaggattctctggatttttttactaaacttgctcagaaaagaggtctgcaccaaaaaggtggaagcccaaatattgaaagtgctgctaaactgctatggtctgagtggacaggtgcctcattaggttactactgtcaccctcctgcatcctggaatcctccacattttaatgagaatattgcagcaaacatgaagaaaggctttaatctagaagaactagaaacaaataatgcacacagcatacaagtcctgaagggccctcgtttagctaatagaatccttttccggtcctctggccccacaaatggaataatagaagaaacagacatacccgaagaattgccaagacagaaagaaaacaaacagaatactgaagatcaaggaaatgatgaaaataatgcagagagctcaggtgtaccccctgtagaagacgccagggagatgttacctgtggaatcaacagcaaataaaccacctgacagatcatttacttggatgaaatgagtcaagaggatgatgactatgactttaaaacagattatctaataa

SEQ ID NO: 3335 - DNA, 1709 bp, Cricetulus griseus
cgccattctcgctagttcgatcggtagcgggagcggagagcggaccccagagagccctgagagccccaccgccgccgccggcctagtcaccatcacaccccgggaggagccgcagccgtcgccgccggccccagtcaccaccaccgcaaccatgagcagcgaggccgagacccagcagccgcccgccgcccccgccgccgccctcagcgccgccgacaccaagcccggctccacgggcagcggcgcgggtagtggcggcccgggcggcctcacatcggcggcgcccgccggcggggacaagaaggtcatcgcaacgaaggttttgggaacagtaaaatggttcaatgtaaggaacggatacggtttcatcaacaggaatgacaccaaggaagacgtatttgtacaccagactgccataaagaagaataaccccaggaagtaccttcgcagtgtaggagatggagagactgtggagtttgatgttgttgaaggagaaaagggtgcggaggcagcaaatgttacaggccctggtggagttccagttcaaggcagtaaatacgcagcagaccgtaaccattatagacgctatccacgtcgtaggggtcctccacgcaattaccagcaaaattaccagaatagtgagagtggggaaaagaacgagggatcggaaagcgctcctgaagggcaagcccaacaacgccggccctatcgtaggcgaaggttcccaccttactacatgcggagaccctatgggcgtcgaccacagtattccaaccctcctgtgcaaggagaagtgatggagggtgctgacaaccagggtgcaggagagcaaggtagaccagtgagacagaatatgtatcggggttacagaccgcgattccgcaggggccctcctcgccaaagacagcctagagaggacggcaatgaagaagacaaggaaaatcaaggagatgagacccagggtcagcaaccacctcaacgtcggtatcgccgcaacttcaattaccgacgcagacgcccagagaaccctaaaccacaagatggcaaagagacaaaagcagccgatccaccagctgagaattcgtccgctcccgaggctgagcagggcggggctgagtaaatgccggcttaccatctctaccatcatccggtttggtcatccaacaagaagaaatgaatatgaaattccagcaataagaaatgaacaaagattggagctgaagaccttaagtgcttgctttttgcccgttgaccagatacactagaactatctgcattatctatgcagcatggggtttttattatttttacctaaagatgtctctttttggtaatgacaaacgtgttttttaaaaaaaaaaaaaaaaagtactggtttttctcaatacacctttaatggtttttaaattgtttcatatctggtcaagttgagatttttaagaacttcatttttaatttgtaataaaagtttacaacttgattttttcaaaaaaaaattaacaaactgcaagcatctgttaataaaggtcttaaataataatgggtgttgggcgcacgcctttattcccagcactcgggaggcagaggcacagatctctatgagttcaagaccagcctggcctacagagcgagtgccaggacaggcttcaaaaatactacagaagaaaccctgtctaaaaaaaacaaacaaataaataaataaataaata

SEQ ID NO: 3336 - DNA, 1709 bp, Cricetulus griseus
agtggcttactcctctacgaatgggcaaagacagatggcaaggggactttgtgtccctggctagcctggacccctagttccgctatgaccttggcaagggggctgcagtcatcaggagcaaggagcccatagccctgggtacctggatccgggtatccctggaacgaaatggccgaaagggtgcccttcgagtgggtgatgggccccgtgtactaggggagtctccggtgcctcacaccatgctcaaccttaaggagcccctctatgttggaggagcgcctgacttcagcaagctggcccggggagctgcagtgtcctctggcttcgatggtgccatccagctggtgtctctaagtggctaccagctgctgactcaggagcatgtgttgcgggcagtggacgtctcaccttttagcagaccacccttgtacccatgccgaaggcacttcagagcaaccactttgaactgagcttgcgcactgaggccactcaggggctagtactgtggagtggcaaagccacagaacgtgcagactacgtggctctggccattgtggatggacacctgcagctgagctatgacttaggttcccagcctgttgtgctgcgctccactgtgaaggttaacaccaaccgctggcttcgagtcagggctcacagggaacagagagaaggttctcttcaggtgggcaatgaggcccctgtgactggctcttcccctttgggtgccacacaactggacacagatggagccctgtggcttggaggcttgcagaagctgcctgtgggacagactctaccaaaggcctatggcacaggttttgtgggctgtctacgggatgtggtagtaggccatcgccacctgcacctgctggaggatgctgtcaccaagccagagctaaggccctgccccactccctgagctaccaccagagctaccacactaattaatgttattattttatattcttgtatacttattatatttttatatgattttcttgcctgcacgttggccaggattgctggcctggcctcctttccgtccaggcagctgtgctgcagaaacaaagtggtgctgagggactcataagtagaccatggcaacctagagccctgggttttgaaggcagccttaggacacactcctctgcctaatgtaccatgcctagccctttgcactgtatgtccctacctgtccatttgttttggtcttttgggtctcctggtaagccctgcctgtgtgtgtgtattattaatgttttatgggacaagaactgtgtccctgagcaggaggggctgctggggctgaaggggtcctttattagagcaagtaccattgggtcctgtataggttctcacttaagctgctctcctgcatgtgttgagggccaacctcatcccaggctagcctggacccctagtgctctctgtaccaatactgtgatttagaaaaattgttaatattggggtaccattttacttaccccaaatgtgtctgcctgtcccagggtgctggaaacaaaccaagctccatctaaattttcttgactgggctcagctgaccctaccctgaccttttcctgctgtggtggtccaaggctggggagctacatggtatcttgttactaactccactatgtgtctatgtcaaataaccaataaaataaaagtactgaaaaccttaaaaaaaaaaaaaaaaaaaaaaa

SEQ ID NO: 3337 - DNA, 1709 bp, Cricetulus griseus
gggcaccctactttgccgtgcaatgtgctcaaattcaaatccaccactattatgttggactgcggactggatatgacttccaccctcaatttccttcctttgcctcttgttcaaagttctcaaaaaattgagctttttggtgctgttcaggtgacccctctgagctctggctatgccctaggaagctccaactggattatccagtcacattatgagaaagtgtcttacgtctctggatcctccttgcttaccacgcatcctcagcccatggaccaagcttctctcaaaaacagcgatgttctggttctcacggggctcacgcagatccccactgccaaccccgacggcatggtgggcgagttctgcagcaacctcgctctgacagttcggaatggaggaaacgtgttggttccctgctacccttctggagtgatctacgacctcctggagtgcttgtatcaatacatcgactccgcgggcctctccaacatccccttctacttcatctccccagtggccaacagttcacttgaattttcccagatttttgccgagtggctttgtcacaacaaacagagtaaagtgtatctcccagaaccgcctttcccacatgcagagctcattcagaccaataagctgaagcactaccccagcatccatggagacttcagcaatgacttcagacagccgtgtgtggtgttcactgggcatccttccctccggtttggggacgttgtccacttcatggagctctgggggaagtctagtctcaacactgtcatatttacagagcctgatttctcctacctggaggccctggctccttaccaaccactggcgatgaagtgcatctactgcccaattgacactcgactgaatttcatccaggtgtcaaagctgcttaaagaagtgcagcccctgcacgtggtctgtcctgagcagtacacccaaccacccccggcccagtcccacaggatggacctcatgatcgactgccagccaccagccatgtcctatcggcgggctgaggtcctcgccctgcccttcaaacgacgctatgagaaaattgaaatcatgccagagctggcagactccctggtgcccatggagatcaagcctggcatctccttggcaactgtctcggctgtgctgcacacgaaggataacaagcatgtgcttcagccccctcccaggcccacccagccccccagcagtaagaagaggaagcgggtgagtgaggacgttcctgactgcaaagtgctgaagcctctgctgagtggctccatcccagtagagcagtttgtgcagaccctggaaaagcatggcttcagtgacattaaggtggaagacacagccaaaggtcatattgtcctgctgcaggaagccgagacactcatccagattgaagaagattcaactcacatcatctgtgacaatgacgagactctgagggtacgattgcgggacctcgtcctcaggttcctacagaagttctgagtggggcatccgtgaactcttagacccctcacctcggacagtctgctggtgccctctggctgctagggaggagaggtgtctctggccaggacctgccagtctgacttccttgtactgctgaagccaagaactttttagtcctattcttttccattctgagctcttgagcatctagggagtgacagcatgacaggagtcctttcctgagggaa

SEQ ID NO: 3338 - DNA, 1709 bp, Cricetulus griseus
cggctttgctgtacgctggactggggcggcaatggcgcagcacgggaaactactcaaggaacagaagtacgaccggcagctgaggttgtggggtgatcatgggcaagaagctttggaatctgctcatgtttgcctaataaatgcaacggctacaggaactgaaattcttaaaaacttggtattgccaggtattggatcatttacaattattgatggaaagcaggtcagcggagaagatgctggaaacaactttttccttcaaaaaagcagtattggcaagaaccgagctcaagctgccatggaattcttacaagaactaaatagcgatgtctctggaagttttgtggaagagagtccagaaaaccttctagacaatgatccttcatttttctgtaggtttactgttgtggttgcaactcagcttcttgaaagtacattacttcgtttagcagatgtcctctggaattcccagatccctcttttgatctgtaggacatatggactagttggttatatgaggattattataaaagaacacccagtaatagaatcacatccagataatgcattggaggatctacgactagataagccatttcctgaactgagagaacattttcaatcttatgatttggaacatatggaaaaaaaggatcatagccatactccatggattgtgatcatagctaaatatttagcacagtggtatagtgaaacaaatgggcgaattcctaaaagctataaagaaaaagaagacttcagagatttgattagacaagggattttaaagaatgagaatggagctccagaagatgaagagaattttgaagaagctattaaaaatgtgaacacagcactaaatgtaactcaggtcccaagcagtattgaagatatatttaatgatgatcgctgcataaatatcaccaaacagaccccacctttttggatattagcccgtgccttaaaggaatttgtggccaaagaaggccaaggaaatttacctgttcgaggcacaattcctgatatgattgcagattcaagcaaatacataaaactgcagaatgtttatcgtgagaaagcaaagaaagatgctgctgctgtgggtaatcacgttgccaaattgcttcagtctgttggccaggcaccagagtccatttcggagaaagaattaaaattgctttgcagcaattctgcattccttcgagtggtaagatgccgccctttagctgaagaatatggtttggatacagtcaacaaagatgaaattatttctagcatggacaatccagataatgagatagtcctatacctaatgttgcgggctgttgatcgatttcataaacagcatggcagataccctggagtatctaactatcaagttgaagaagatatagggaagttgaagtcctgtcttactggcttccttcaagaatatggtttatctgtaatggtgaaagatgattatgtccatgaattttgccgatatggagctgctgagccacacaccattgctgcatttctgggaggagctgctgctcaagaagttatcaaaataatcaccaaacaatttgtaatttttaataatacttacatttatagtggcatgtcacaaacttctgcaactttccagttgtagaataagcactacattgtaatatgttaatgattgaaggtgtaattgtcttcgtattgtgctttagcttgtaaaa

SEQ ID NO: 3339 - DNA, 1708 bp, Cricetulus griseus
tccaggagggtgataagatcctctcggtaaatggccaagacctaaagaacctgctacaccaggatgctgtagacctctttcgtaatgcaggatatgctgtgtccctgagagtacaacataggttaccggtgcagaatggacctatagtacatcgaggtgaaggagaaccaagtggtattcctgtagctatggtgctgctaccagtgtttgccctcaccatggtcgcagtttgggccttcgtgagataccgaaaacagctttgaaatgcttgctgtcttccagtgtgtccagtgaactatttctctcactcaccttcctgccattctcccatgtcctttcttctctacatagccaacacttgatttaaagtgactgattacactcaaaactttactgctcaaactcgcaaaatcttctaattctaatgggagaataaaggtattatttggagaataagctgggcgggagagggaagccttgctgagaacaaatgagaagttacacattttactagaactgccaataaaaattcagctatcacccaaagaggaaagctcagtcttcctgtaaccacagatgacacctttttcttagctggtatgctttgaaggctagctgtgctacatgaaaggaggagctaatttttcttttcttttttttttaaatgcttttccttgtgaagtgtttgtggcctttaatttgtaactataatgttaagaatccatgatagagtgtgaaaaaattaatgttcatcatactgactctaatattcctaccacttgtagactatatatgatgctcctgccacataaattataatgtttaaagttttgaaaattgattataggtatacttaaagtatttctaaagtatttcttgtatttatcattgtgttttatatgtaattctaatagatattgtttgcttcagttgtttctgtttccttttcctgaagttttctgtgtgagtgatttcatgtaattaattgaaccatctactcacaggcaacatgtgaaaatagtatttgtaattatagtctatggcaggaactatactaaagtgactggtgacactatgtattactctgagatccaagtattgctataaagagactgagaaagaaaaaaataaattattttcctaagattatatgggtaataatagaatcacaatttaaacttgggactttgggtgacagtaacagtaagtatttccattgctaacagttctcaaagcaaggtctctggacaaaagcatcaatatttcctgaaattcttggatgtcatcccatacatggagtgagatgaacatggccaccagcaactgtgtctttctaggcagctgactaaggctgaagcttgagatttaccactgtcaggagctgttctctattttcaaattttatggagtacaggttttcaaagtatgacctgatgattctctggatttcctcagtgtccgttgttatatcccctttttcatatctaattttgttaattggcatgctttctctctgccttttggttagtttggatagagctttgtctatcttgttgatcttctcaaagaaccaactccttgtttcattgattcattgtaatgttttcctagtttctactttattgatttcagccctcagtttgattatttcctggcatctactcctcttttttttttttttgttttgttttttgtctattatttttgg

SEQ ID NO: 3340 - DNA, 1708 bp, Cricetulus griseus
gcgtgtggcgctgcagcaccgtccggaaggagggaggatcctcagagttcagtggctgcgaggcatagcagaggaggaatgattgtgaatagcctcctcctgtgagcagacattgtttactgtgaggagctgattgacctgaagatgcttcagtgcaagcgagttgtaaatgaggtgctcagcacagtggactttgttgctccggatgaccgagtagttttccgtacatgtgaaagagaacagaacagggtggttttccaaatgggaacttcagacgcagagagagcccttgctgtggccaggcttgtagaaaatgatgtagctggtattgatgtcaacatgggctgtccaaaagaatattccactaagggaggaatgggagctgctctgttgtcagacccggacaagattgagaagatcctcagcactcttgttaaaggaatacacaaacctgtgacctgtaaaatccgaatcctgccatcgctagaagataccttgaaccttgtgaagcggatagagaggactggcatttcagccattgcagttcatgggaggaaccgggaggaacgacctcagcaccctgtcagctgtgaagttataagagccatcgctgaaaccctctccattcctgtcatagccaatggaggatctcacgaccacatccagcaacatttggacatagaggactttcgacaagccacagctgcctcttcagtgatggtggctcgagcagcaatgtggaacccctctatcttcctcaaggatggccttcgtcccctagaagaagtcatgcagaagtatatcagatatgcagtgcagtatgataaccactacaccaacaccaaatactgcttgtgccagatgctgcgggaacagctggagtcgccccagggaaggttgcttcatgctgcccagtcttcccaggaaatatgcgaggcctttggccttggtgccttctatgaagagaccattcgggagctagatgcccggcgagctgacctcttggctaagactccagaggcagttgaggagccagctgaagatacctctggcatcattaagatggctatcaagtttgaccggagagcgtatccaccccaaattacccccaagatgtgcctgctggaatggtgtcggagagagaagttgccacagcctatgtatgaaacagttcaacgacccatagatcgaatgttctgctctgttgtcactgttgcagagcaaaagtaccagtccacactgtgggacaagtctaagaaactggcagaacagactgcagctatcgtctgtctgcggagtcagggcctccccgagggtcgattgggtgaggagagcccctccttgaacaagcgcaagcgagaggcccctaaccaagatcctgggggtctcagagttcaggagccagcactacctggggagatatgcaagaagccatttgtaaccctgggaagtagtgaagatgatcttctggaaggctgttgactactgtccctgcccttgtcaccagttgggggactgatgtgatggtggttatgggtgctggggcctaaaccagatgccattggacagtttgctggcccttgccatgaagaagttagaggtcttagcccaggccatcagtctgaaacaagtgccaaggaatgtccagcggtaatactatctctcataggtctaaatatctaagccaagttcccagtgacctgaatgt

SEQ ID NO: 3341 - DNA, 1708 bp, Cricetulus griseus
atggcagatggaggaggaagccccttcctgggacgtagagattttgtctacccttcctcagcccgagagcctagtgcccctgaaaggggaagcagccctgcaaggaaggaggagaagaagaggaaggctgcccggctcaagtttgacttccaggcccagtcccccaaggagctgactctgcagaagggtgacattgtctacatccataaagaagtggacaagaactggctggagggggaacaccacggccggctgggcatcttcccatctaattatgtggaggtgctgcccgaagatgagatccccaagcccatcaagcagcccacataccaggtgctggagtacggagacgctgtggcccagtataccttcaagggagacctagaggtggaactgtccttccgaaagggggaacacatctgcctgatccgcaaggtgaatgaacattggtatgagggtcgcatcacgggcacaggacgccaaggcatcttcccggccagctacgtacagataaaccgggagccccggctccggctctgtgatgatagcccccagctccccccatcacctcatctgacaaccacggctcgtctaccctgtcactccagctccgccacagcacaagtggactccactgactggggaggtcggacctcccctcgccgctctggcttcccgttccccatcaccctccaggagcagcccagaccccaaacccagaatctcagcactcctggaccagccctgtcccatcctcgaggcgccagccgtcctatagaaatgggggcctcctccccaagcaccacagatatacactggactccgtaccgagctatgtaccagtacagaccccagaatgaggatgagctggaacttcgtgaaggggaccgtgtggatgtcatgcagcagtgtgatgatggctggtttgttggtgtctcccggagaactcagaaatttgggacattccctggaaattatgtagccccggtgtgagtggtctccccggcaatttggagccagcgaggatggggtgaggagcagtagcactataggagggagagaggccccccacatcctcctccccccaggacctgtgctcccagcatctgcagagaccccagcaaccttccctttgaaccccctcaaagtcccctggactgattcccacccgcgagtcacaggcattcctttgacagccccccccttaccacccgcaaatacagtctgctctgatgtggaggctgtctccaggccttattgagaccagatccccaggtccccatcacccacagcgtttcccctaatgaggactggctctcgcttcacccccatggggttcctctaataaggaccggcttcctaccctagtagagaccaaaggcctcctcccatttcccaccagcctgcctgccaccactttcccttggggcctccagctgggcctagaagcaaggtggggaacaccttgtcagccttcaaggcccagtgagaggccttgcctcaaggcttcctcttctcagaggctactgagcccctgggtagggcctccacatatactctggaccctcccgactaaggcccacaactgcccttgacctatcaaaagacagatctacagggagacatgcttgctgccctaatttccagctcttcccggtatctaggtgccctctggaagagaatgtaaaataaacatggataccaggga

SEQ ID NO: 3342 - DNA, 1708 bp, Cricetulus griseus
tgctgctcctggtgggaccgggctgctggggccacgcggagcgcccgcgcgacagcctgagagaggagctcgttatcactccgctgccctccggggacgtggccgccacattccagttccgtacgcgttgggattcggatctgcagcgggaaggagtgtctcattacaggctcttccccaaagccctggggcagttgatctccaagtattctctgcgggagctgcacctgtcgttcacgcaggggttttggaggacccgatactgggggccacccttcctgcaggccccatcgggtgcagagctctgggtctggttccaagacaccgtcacagatgtggataagtcttggaaggagctcagcaatgttctctcggggatcttctgcgcatccctcaacttcatcgactccaccaatactgtcactcccaccgcctccttcaaacctctggggctggccaatgacaccgatcactacttcctgcgctacgcagtgctgcctcgggaggttgtctgcaccgagaacctcaccccatggaagaagctcttgccttgtagttccaaggcaggtctctcggtgctattgaaggcagatcgcttgttccacaccagttaccactcacaagcagtgcatatccgtcctatctgcagaaatgctcagtgcaccagcgtctcctgggagctgaggcagaccctttcagttgtatttgatgccttcatcacgggacaggggaagaaagactggtccctcttccgcatgttctcccggacgctcacagaggcctgcccactggcatcgcagagcctagtttacgtggacatcacaggccacggccaggacaacgaaacactggaggtgagccctcctcccacctccacataccaggatgtcattttgggcacccggaagacctatgctgtctatgacttgtttgacacagccatgatcaataactcccgaaacctcaacctccagctcaaatggaagagacctccagataatgcagaggccctaccagtgcccttcctgcacgcacagcggtacgtgagtggctacgggctgcagaagggagagctgagcacactgctgtacaacgcccatccctaccgggccttccccgtgctgctgctggatgctgtgccctggtacctgcggctgtatgtgcacacgctcaccattacctccaagggcaaggagaacaaaccaagttacatccactaccaacctgcccaggaccggcagcagccccacctcctggagatgctgattcagctgccagccaactctgtcaccaaggtctccatccagtttgagcgggccctgctcaagtggactgaatacacaccagaccccaaccacggcttctatgtcagcccatctgtcctcagcgctctggtgcccagtgtggtggcagccaaaccagtggactgggaagggagtcctctcttcaacaccttgttcccagtgtctgatggctccagctactttgtacgactctacacagagcccttgctggtaaacctgcctacacctgacttcagcatgccctacaatgtaatctgccttacatgcactgtggtggctgtgtgctacggctccttctacaacctcctcacccgcaccttccacattgaggagcccaaatcgggtggcctggccaagagattggccaacctcatcagacgtgcccgtggtgtccctcctctcta

SEQ ID NO: 3343 - DNA, 1708 bp, Cricetulus griseus
caaggccctggcgactggaggcggggcgggctgcgagtgcgagccgtctcggccgctctcccgctcggagcccggtccgggtggcaccgcgctccccgcgacaccggcagccgctggccgcgcgcgcctcagcgctcggccgggaggtggaggcgcagctcgggggaggcgggtcgccagcgctggctgcgcgccgcggtccgctgctcggctttcctttgtctcccgcctgcggggccggagcggtcccggtgcacagtccagcagcctcaagatggctgatggcaacgaggatgctcgagcggacgacctgccaggcccggccttcgagaactacgaggccatggagctggcctgcccggccgagcgcagcggccacgtcgccgtcagcgatgggcgccacatgttcgtctggggcggctacaagagtaatcaagtgagaggattatatgacttttatctgcccagagaagagctttggatctacaacatggagactggaagatggaaaaaaatcaacactgaaggcgacgtccccccttccatgtctgggagctgtgctgtgtgtgtagacagggtgctgtacttgtttggaggacaccattccagaggcaatacaaataagttctacatgctggattcaaggtctgcagacagagtgttacagtgggaaagaattgattgccaaggaattcctccatcatcaaaggacaaacttggtgtctgggtatataaaaacaagttaatattttttggagggtatggatatttacctgaagataaagtattgggaacttttgaatttgatgaaacatctttttggaattcaagtcatccaagaggatggaatgatcatgtacatattttagacactgaaacatttgcctggagccagcccgttaccaccggtaaagcaccttcacctcgtgctgcccatgcctgtgcaactgttggaaacctgggctttgtgtttggtggcagatacagagatgctagaatgaatgatctccactgtcttaatctggatacatgggagtggaatgaactaattccacaaggcatatgccctgttggccgttcctggcactcactgacaccagtctcttcagatcatctttttctctttggaggatttaccactgaaaagcagccactaagtgatgcctggacttactgcatcagtaaaaatgaatggattcagtttaaccatccttatactgaaaagccaaggttatggcatacagcttgtgcaagcgatgaaggagaagtaattgtttttggtggttgtgcaaacaatctgctggtccatcatagagctgcacacagtaatgaagtacttatattttcagttcaaccaaaatctcttgtacggctaagcttagaagcagtcatttgctttaaagaaatgctagccaactcgtggaactgccttccaaaacacctacttcacagtgttaatcagaggttcggtagtaacaacacttctggatcataaggcctcatagataataattctcatctacttgcatggaaaacgatcctgtatttgtcacagagtggcaccctttgtataatgatatgcattgttgtagtttgcagctttctgggttttatgtgcatgtgaatggcctagagaacttatttttgtgtctaaagtttacaataaatgtatttaacaccagtacctgtccaattgttaaagtaaaaa

SEQ ID NO: 3344 - DNA, 1707 bp, Cricetulus griseus
gacgcgatctatggcgacctcgggttccctctgcctgcgctctggaggaccacactcgtttcttttcggctgcgagcggtcccgcagccgtggctgagctggaagaaagatggcggctgccgtgcgacaggatttggcccagctcatgaatttgagtggctctcataaagatctggcgggcaaatatcgtcagatcctggaaaaagccattcagttatctgggacagaacaactagaagctttgaaagcttttgtggaagcaatggtgaatgagaacgtcagtcttgtgatctcccggcaactgctgacagatttctgcacacacctccctaacctgccggatagcacagccaaggagatctatcatttcaccttggagaaggtccagccccgagtcatttcctttgaggaacaggttgcttccataagacagcatcttgcatctatttatgagaaagaagaagactggagaaatgcagcccaagtgttggtggggattcctctggaaacaggacaaaaacagtacaatgtagattataagctggagacttacttgaagattgctaggctatatctggaggatgatgaccctgtccaggctgaggcttatataaaccgagcatccctgcttcagaatgagtccactaatgaacagttacaaatacattacaaggtatgctatgcacgtgtccttgattacagaagaaaatttattgaagctgcccaaaggtacaatgagctctcttacaaaaccatagtgcatgaaagtgaaagactggaggccttgaaacatgctttgcactgcaccatcttagcatcagcaggacagcagcgttcccggatgcttgctacgctttttaaggatgaacggtgccagcaacttgctgcatatgggatcctagagaaaatgtacctagatagaatcatccgagggaaccagcttcaagagtttgctgcaatgctaatgcctcaccaaaaagcaactacagccgacggttccagcatcttggacagagctgttattgagcataatttgttgtcagcaagcaaattgtataacaatatcacctttgaagaacttggagctcttttagagatccctgcagctaaggcagaaaagatagcatctcaaatgataacagaaggacgtatgaatggatttattgaccagattgatggaatagttcattttgaaactcgagaagccctgccaacatgggacaagcagattcaatcgctttgtttccaagtaaacaaccttctggagaagattagtcagacggccccggagtggacagcacaggccatggaggcccagatggcccagtgagtcctggcagagccccgtgcacgctgcatcattgccctttgtgcgggttgattcactgcccctccaaagcatttgcacacttcagtccttcatgtggaaatcccgtttaaagaagatgctagagcaggagttcagcgtttgaacatattagttcccatatattctgggtctgtgtattaaaccaactcagatattttgaaaacttgttctttaggcagaagtgaaagctctgtgatgaagtttgggatttgtgataactttgtagttatgtaaacttaagtgctttgtgcctctccaaatgtggttattctaataaatggggcaatgagccaaataaagagaacactttgtttttaattaaaaaaaaaaaaaaaaaa

SEQ ID NO: 3345 - DNA, 1707 bp, Cricetulus griseus
ctggcagccctgaggtgatactgactcctgagcgataccctgtgcagcggctgccgttttccactgtgtctgaggaggacctggctgcctttgaacgcatcatacctggcagagttgtcacagatccagagcaactggagacatgcaatgtggactggctgaggagcgtccggggctgcagtaaagtgttgctgaggccccagacctccgaggaagtgtcccagattcttaggcattgctatcagaggaacttggctgtgaacccacaggggggaacactggcatggtggggggcgagtgtccccgtttttgatgaagtcatcctgtccactgccctcatgaatcaagtcatcagcttccatgacgtgtccggaatcctggtctgccaggcaggctgtgtgttggaggagctgagtcgctacgtgcaggctcgggacttcatcatgccactggacttgggagcaaagggcagctgccacattgggggtaatgtggccaccaatgccggtggtctgcgctttctgcggtatggctcgcttcgaggaactgtcctgggcctggaagtggtacttgctgatgggaccatcctgaactgcctgacctccctgaggaaggataacacaggctatgacctgaagcagctgttcattgggcacgctgggggtcatcactgctgtgtccatcttgtgcccacccaggcccaaggctgtgaatgtggctttcctcggttgccctgggtttgctgaggttctgcagacattcagcacctgcaaagggatgctgggcgagatcctgtcagcgtttgagtttatggacactgaatgcatgcagttggttggacagcacctccacctgaccaacccagtgcaagaaagtccattctatgtcctggttgagacctcaggctccagtgctgcacacgatgctgagaagctgaccggtgtcctggagcaggtgctgaactctggcctggtgagcgacggcactatggctaccgaccagaggaaaatccagatgctgtgggcccttcgggagagaatcacagaggcgctcagccgggatggctacgtgttcaagtatgacatatccctccccgtagagcggctctatgacctcgtgatcgacgtacgcacccgcctcggccctcgtgccaagcatgtggtgggatacgggcacttgggggatggcaaccttcacctgaatgtgacggcagaggcctttagccaggagttgctcggtgccttggagccctatgtatatgcctggacagcggagcagcggggcagtgtcagtgctgagcatggccttggcttcaagaagaagaacgtactcagctatagcaagccacctgaggccgtgaagcttatgcaacaactcaaggtcatgctggaccccaaaggcatcctgaacccctataagactctgcctgctcaagcctgactggagctcttcatcttgttgccatgagacaccaggaccttggtcattaagggttggtaggccttgaggcctcccgtctgacaacacctgcaacagatcaggttgctgtcttcccttggctacccgggggccaactgtgaggaccctctgggctgtgatttctgtaggttgagcagggcagatagaactccctggtctcctgccagctcattgtgggcagactaagtgggtgggcagtttccccactcccaaacaggccaaatctca

SEQ ID NO: 3346 - DNA, 1707 bp, Cricetulus griseus
gtggcggacgaagcggcggcgggcgacgtgcagcgactgctcgtgcagttccaggatgagggtggccaggtgctgggttccccattcgacgtgcctgtggacatcacgccggacaagctgcagctcgtgtgcaacgcactgctggcccaggaggagcccttaccccttgctttctatgtccacgatgctgagattgtgtcctccctggggaagacgctggagtcgcagtccgtggagacagagaaaatcatagacatcatctaccagccccaggcaatcttcagagtccgtgctgtgacacggtgcaccagctcattggagggtcacagcgaagcagtcatttctgtggccttcagccctacgggaaagtacctggccagtggttccggagacaccactgtgcgcttctgggatctcagcaccgagacaccacatttcacatgcaaaggacaccggcactgggtccttagcatatcctggtccccagatggcaaaaaactggcttcgggctgcaagaatggccagattctcctatgggacccaagcacagggatgcaggtgggcaggaccctcactggccacagcaagtggatcacaggcctgagctgggagccccttcacatgaaccccgagtgccgctatgtggccagcagctccaaagatggcagtgtacgagtgtgggacacaactgcgggccgctgtgaacgaatcctaactgggcacacgcagtcggtcacctgcctccgctggggaggggacggccttctatactctgcttcacaggaccgaaccatcaaagtctggagggcccatgacggtgtgctgtgccggactcttcaaggtcatggccactgggtgaacaccatggcacttagcacagactatgccctgcgcacaggggcctttgagcctgctgaagccacagtgaatgcccaagacctgaaggggtccttgaaggagctgaaggagagagcatcaagacgctacaaccttgtgcggggccaaggcccagagaggctggtatctggctcagacgacttcaccttattcctgtggtccccagcagaggacaagaagccccttgcacggatgacaggacaccaggccctgatcaaccaggtgctcttctctcctgactcccgaatcgtggccagtgcctcctttgacaaatccatcaagctgtgggatggcaggacaggcaaatacttggcttcccttcgtggacacgtggctgctgtgtaccagattgcctggtcggctgacagccggctgctagtcagtggcagcagcgacagcacactgaaggtgtgggatgtgaaggcccagaaactggccacagacctgcctggccatgctgatgaggtatatgctgttgactggagtccagatggccagagagtagcaagtggtgggaaagacaagtgtctccggatatggagaaggtgaagaattccacagcttcctgaccttacctggactcagcctctgcctgccccgccagagaacaaagaatacaggtggccatctgcccaggacaggcggtctacatgtgactgtcataggaagttacaacatggagttaagccatgggcacttctgactgtacagcagtgggaaagccaggcctctggtccccatgtccattttccatgtgtcagctgtgcgggcctacactctcagcctcgccacgtggccaaataaataact

SEQ ID NO: 3347 - DNA, 1706 bp, Cricetulus griseus
gaaatccatgaagacacagacgtgcctaataaagtctccaaacaagatcttcctgctgatcaggtggccaacaagatcccagtattccgcttgcatctttttgatgcgtctgaccttgaatgctcactgtgtatgagattattctatgagccagtcacaacaccttgtgggcacaccttttgcttgaaatgtcttgagagatgcctagatcataatgcaaagtgtccactgtgcaaagacgttcttttacagtgcttgccatcaagcagaggtgtggaagagtccagaaaaagttgatgtttagcatacattttttctaaaagttgagtatgacttatctgtcatagctgagtgactgtgtggttgaactgtgaagcagagatgccgatgtctcggcatccttccactgacttgatgtttcatttcaaatggttcaggttttatagagcattgtgtaaaataatgttcatacttctttctgttttactaggtagcaagcagaccttatgcctttctgctctgtaccgtactactgctgctagctaaaaaccaagcaaaatgtagaaagtgaaaaatgaagaaactacttttcagtggacaatttgaagaaaggggtgtttgctcctcacttgggggggcagagaactattccaatagcttgcctttctgaaggccaactgcttcacgctcagtgctgcctccgtagcagagttgagttatggcacgtggtgctaccatctctgcctgtggagctggcctgcgttcagataatcccctgtgactagccacagaagcctcagaattcccatggctgggttattgccaacaggtggtgtcctgttgatggactgcaacccactggggcctgcatttactgtgccaacttcatttccagcatgtgaattttagccataggttcgttccttgggttcccagcttgttgactgtgtgtccatttctactcgctttgctttctggtgtttctaatgtacagagagctggatgggaaaggagccgtgcacagtgtacacatttaattcctcttagaatggtagctcccacccactccactgcttaactacgcaatgctctggattttacacatccacaggggaaatgaagaactcttcacttagaagtgggtgtttccaaacatggtaaattaacctccagagagaagtgcctggaactgccgttcctggtgtcactttcaagctttggcttcatgactttgtagcatttaaaaaatctgtttgcagccacaaatgtgattaacagaagtttacaaagcaacactgtacctgtgcgttatcttcaaagtctgctgccattcatctactgttcaagtgatgaagacaaccagtgagctaagatgaagagcaaatagttgggtgtggcactattggatgatgtgagataaatgagtctcattactgtatgcatttctttgtaatgccaggactaaaacatccagcaagtcacttaaacagtggcaagtgtgtatgtgtatttggttttcatttgtttgttaagcagccattttacttttgcacagttatgagttgaagggaaattaagataactctccttccccaccaatgctattcaactacctctatgtgcctggtttccttttagggttcccttcttctaaatctgcacaaaataatttcagctcatctatgttgtaatcgcagtgtgatata

SEQ ID NO: 3348 - DNA, 1706 bp, Cricetulus griseus
ttttttggggttgggaaatcccccaaaatatttgaacctggctacatgttgtatacctttttttttgtaagccttcagatagaataagcctgccatttcttgcacaaatttattaaatttgttttgtttttgtgggggagggtgtaggcccaggtggggaaatgggactgttaggttgaattaacattacaaaatgatacagtgccagatctcagttttgcatattatttttttttttcctttttctatttgccttggagccaaagtttctgttccagatggtaagaaaagtgtgcctgccggccagctgacctaaaaaaagctatggcatggaactctgcttcaaactgtttttttctttaattttttttgagtatcatcagcttacttgtctggcaagtgcagaagcctgaggctggcctgaactctgccaaacaaattatccaagtatattgaatcattaaatgtgtgccccctccctctttgctgcgcccatgttgtcacttaacccctaggagttatttattatctttttgttaatgtcaagctcatttggggtaatgtgatgactgtttaggtttacatgaccctcttctccttaccttatccccagatatgtatatatacatatataagatatgtatatattttacctttataaaatatatatatacacatatatgtatctatattcctttatttgtctgctaaaactggccataaaagagggagctgcctttgatctgtagtttaagaagatgccagggagtgtcataaatggaggctattgtattatgaatttggacattttgactaaaacgaacttgaatgaatttgcttgtaaggaaggagaaaccagttctctagactccacatgttcactctgcaaggccagctttggtcaagctgccaccagggcctgaggagctgactctgtcctacctagttccactagaggacccttttggtaatttcccattaaaaaatatcctcaaaaagttgtactgcaaggtgggtggcaggagcttgtacagttcagctgccaacacttcggaacagatttaaaagggaatgttttaataaaggatgactagtgatgacctgaacatcttggttaactgaccttaagcattgggtgcagatgctgagatggtttggttagctgaataatcaagtttgattctagtgttggggtgttatgttctgtttctcttagaaacccagcctgctctcatagatacctacttctattacatatcttgaacattgccaaaagaagccattcagcagctgcttttttttctcagtacaaatatatttgctatggaagaagtatcttccctctaatgctgcagtcctcagaatctggttaactgctcttccctgctgcactgagtatggttctaggttttgaagagggaatttgaagcaataggtaaacagggcttggttgaattggtctcacatatatcctgtcttaagccgctgaggtgatgagtccactgctcatgtgaccctacacctttgtggatccctcttggtttgtgaccagcatatgtttcttgaggttgtacaaacttgacaaaagttaatacttttgtattctctgcactgttgcactcttcaaatagccccttgaatattaacttgatatatactatttttgtctttgatgtctactagttatttttttttgtttttgtttg

SEQ ID NO: 3349 - DNA, 1706 bp, Cricetulus griseus
atttcttgccctaagtttgccattcaacacgatagatttcattttggaggtttcaaaccgacgcgctggcggaaggggatgtatttaatggaaatgaataacttgttttgagaaaaccatggcaaaatcaaacacaaaacacagagtttgttcccgggaatcttcagtaacttctctcctggcaagctgcagcctaagtggtataaggacaaattgtacagttctgcttctgaggctttacaggcctatattgatgattttgatttaagcagagaacattcaggagcaaacactggcagagtgaacattgatgaagagtctggtaatatgctacgattttccagctatgtgcataaaccaaacaatgctttttgaaaatcttgatcacaaacagcacttaaactctttatgctatagaagagaaactattaatgatatggactccattagcctaacaactgatgatttgttaagacttccagcagatggatccttttccctcacttctgttatacctggtcaccgaccaaacaagaaatacattgaaagacaggattcatcatcggacattaaaaagaaaccaaaattttcatatagactctactcccaagagaaaaggataatgtagttacttgtgatgtatattcaaatgtaaatggaaagaaatgtggtaggcccggaaccctaaaacctgtgaatagaaataataaacgtgttttggaatcatctttatccattcctaaagaatcatctttcaaggacagttcaaactatggtcctgaaatgaattatccaagatggctcactagccagaaatccgatcttaatatctcaggggtaactagtataccagattttaagtatccaatttggcttcacaatcaagacttgctacctgatgcaaataatcaaaagtgtttctaaaattacttaatgaagatgaatattcccctgtgcatagttaccagaaacaaagaactactcagcttacaaatgaagtagatggttttgaatattcttttcaacctgtaaactttacagtattccttcatccgagaataaaggattaggtaaccaatgtaaatgtcattgtgagaatctacttctcccaggacaatccccaaagccattctgtggtgacaaaattgaattgcttatcctgaaggccaaaaagaatctcaggcagtctactgaagacttagcaaagcctgtggagaaggatgacagcccttgttccttagacaagcttgaagcagaacgatcatgggaaaatgtccccgttactttcaaatctcctgtacctgttaatgctgatgacagtcctcagcaaagttccgggacgcaatgtattgatgagattcttgaagactctttaaatgatgagaaccagagctctaccctatctggaggcaaacatcatggtcctgttgaagccttgaaacaaatgttatttaaccttcaagcagtacaagaaagttttaatcagaataaaaatacagatccagaagaagagtttatacaagtgtcagaggatgatttttctacattacaattaaaggaaaatatgattcctattactaggtctcttcaaacggccctacaacatttatcacgcctgagagacctggtcgatgataccagtgggaagcagtcaaccaaaaatgtgaagaggaaaataaaacttaaaccacaataaacagtcacca

SEQ ID NO: 3350 - DNA, 1706 bp, Cricetulus griseus
gcatcactgtttcatggtgtgtgaagataacccagaaaattaaaaggagtttcaaaagagaatttgcagaggatgctctaggaaaagtctgagtactgaagacagtgagaaccatggaccagaacaacagccttccaccttatgctcagggcttggcctctccacagggtgccatgactcctggaattcccatctttagtccaatgatgccttatggcactggacttactccacaacctattcagaacaccaatagtctgtctattttggaagagcaacaaagacagcagcagcagcagcaacagcagcagcagcagcagtctgtagcaactgcagcagcctcagtacagcaatctacatctcagcaatccacacagggtgcctcaggccagactccacagctcttccattctcaaactctgaccactgcaccattgccaggcaccacccccttgtacccttcaccaatgacccctatgacccctatcactcctgccacaccagcctctgagagctctgggatcgtaccacagctgcaaaatattgtatccacggtgaatcttggatgtaaacttgacctaaagaccattgcacttcgtgcccgaaatgctgaatataatcccaagcggtttgctgctgtcatcatgagaataagagagccaaggacaactgcgctgattttcagttctgggaaaatggtgtgcacaggagccaagagtgaagaacaatccagactagcagcaagaaaatacgctagagttgtgcagaagttgggctttccagctaagttcttagacttcaagatccaaaacatggtggggagctgtgatgtgaagttccccataaggctggaaggccttgtgctgacccaccagcagttcagcagctatgagccagaattatttcctggattaatctacagaatgatcaaacccaggattgttctccttatttttgtttctggaaaagttgtattaacaggtgctaaagttagagcagaaatttatgaagcatttgaaaacatctaccccatcttaaagggattcaggaagaccacatagtggctgccatgtcctgcctcccctacccacttgttttttaaaacccgtcagttttggtaccgctcatggtacagttgtgagaaggacactcagttacaggtggcagcatgaagtgacaccgtgtgtcccactgcaggacactgaaaggttacctcctctgcagtgagatcgattgccctgcagcattactgtgagtcgcttgctctgtgctgctacttgggcagcactgcccatttatttatatttagattttaaacactgctgttgatgagtttgttggtttaagggacagaacttttaagtgttcaagccacctgtacaattggactttttattttaacttttcccacataagccagtttttatatttctaccagaaaagtaaaaatctttttttaaaagtgttgttttctagtttctaactcttaggagttatttttgtgccagatacattccaccttcccagtattgcagaactctaaatagttgtattaatcaaaacaaatgtacatacttttctttctttggagtactctgcacaaaaaaatgcagcctgtaaattgttagatttttgttacaaatgataccttgtaagagtcatgtgatcatactgtcaaagaaatttattttagatataatacctga

SEQ ID NO: 3351 - DNA, 1706 bp, Cricetulus griseus
tccaggagggtgtgttatttgctcagggcgggcagcctatgtgaaggagacagaggtgacgagggtgctttactatccttaacactggctttattttaaatggtggcttagtttggggccccaatctttcaagactttttataatgatgttaagaccagggcaaactatctactggccatggactgcagccagtaggtgccctgcccctcatgggacctgcacgcaacctctcttgacaagggtccctgaggccaagggaggtctcccttctactaggtccctgactttgactttgtggttctgtaggaaccatgtgcgcacttgtcactctattgtaaccacaaagggcagttgcacccagcatgtcagtgtcctgccctggctgcctgcctcccaccctcttggcactctctgggccggctcttcacccagaggcaattctcacttcattagtggtggacaagccttgagctgaaaggctcttcgttctctttggctagaaaatgtaaggtttgtgttttttaagttttagtttttaaggaatggatacttatctctggatgccacctgtgttctgacccccatgggtgggttggggcttaatgtctcctctttggtcctaccttctgccttgtggtgccctcctttccttctagaagttgggggtctagatcctcctaaagtgcttacttagaaaaagtgtggctgcttgcttcttggagaagccttttgaatgaaaagcagcaggtgcaggaaggagcatgcctggaggttgacatcttggagcaaaaaagtgttcacataagctcagctcctctgttggccttaggacccacggctgtgcagagatctctgctgttcgtcttgccatgaaagtctcctgattccctccaggagctcatggctgaagcctgaggctcctggactcagatctttgacattttctaaagaatagcaggcttgagaatccaacttctatttggctctccatgggttccccttgggatgagaagtgctgccacttcctaaacatcctgtcctcagctgtggcagcttcaaaggctgagttctgtgggtctgactcccttggttgaggacagtactaggcagtaaatctgacccccagtccacactccctgctgaaagggtactatggcctgctttccactcaggcagctcctgcagtcctccagcctggggacagatgtgaagctctccaatggccctgagaagtatgctccctataaggaggggccttggagctcctggtttccagggccaagtcccatctacagcttctttaacatctgttaagtgcaataaatttttctagaaaaaggcaaaggtgatttccaggtagagattgctgtcttttggtattgggatgccagaacaccacttggttttatttttctaagtgcatgtgattggttgagtgtgtggggctctgcatcctcctccctgggagccgcattccagcggcccctctccctaactttgttgggggaaagaggctaggagaaaacccctttgtcccagctgcagaggtaaaagcagacagcagcccattggccttatgtgtgtgtgtgtgcctgtgcgaatgtgtcactgctggtgggccggagtgatgtgatagggagggaagttgggaatgtatccttttcaaacaaaattaaatattttgagacgagaaaaaaaaaaaaaa

SEQ ID NO: 3352 - DNA, 1706 bp, Cricetulus griseus
agccagtgttagtgtcaggcatccagaagacactgagagttagcctgtggggaatggaagctcttgggacacttggtggccaggtgcagacactgactgccctcgggcctccccagcccacaagcctggacagcacagcattctgggagggattctctcaccctgagacacgtccaaagttagatgagggctctgtgctcctgctccaccgaaccctgggagacaaggatgccagcagggtggagaaccttgcctccagccttccactcccagagtactgtgcccaccaagggaaactcaacctagcgtggaggtgtctgacctaatcagtatcctggtgcacgctgaggcacagctgcctgcctggcaccgagcacagaaagatttcctctcaggcctggatggggagggactctggtctccaggtagccagaccagcacggtgtggcacgtgttccgggcccaggatgcccagcgcatccgtcgctttctccagatggtgtgtccagctggagcagggaccttggagcctggtgccccaggcagctgctacttggatgcaggattgcgacgtcgtctaagagaggagtggggtgtgagctgctggactctgctgcaagcccctggagaggcggtgctggtccctgctggagcaccccatcaggtgcagggcctggtgagtacaatcagtgtcacccagcactttctgtctcctgagacctgtgccctctctgctcagctctgccaccagggagccagcctgcctcctgaccaccgtatgctttatgcccagatggatcgggctgtgtttcaagcagtgaaggtggctgtgggtacattacaggaagccaaataggggatcctggttcctgcaggggtggtgggcaggtaaccaagtactcagtctttgcagaatttcaacaaggaatggtactggggaacttagagggtgtggtctgtcccacaaatatcactttgggcataagcagggaattcctcaccttggccctagccctaaagggaacaactgtagtgcctctctgctcccagtctgtattaaaatcggttgtttggtgactgctgccagcttaggttggccttactctgcctgccaggagggctggggagagaaggcaaacacagaaatctgctctggagcagacagagacctcatataccactgccagatcttggggaggcccggacccctggagctttctggaaactaaagatgttcctgactgacagcagaaaaggcagagttctagggtgcagcactgagacagcctccctgggtggcatcagcctgtggagattacaaatccccctgcctctgtcccacgtatcctgtgtgctctgatctggaaagacaggagaacccttgctcagcccaactgctcttggtgtccaggccccccaagacagagcttcgctgcctcagacagctgaccccctgccctgtggcccttctggtctacctcttcccctgtgtatctcaaccgcacaaatgcgccagctcttgttatacttaactgttcctgctgtggtttggcaatttattttaattaaataaaagtttttattataaaaaaaaaaaaaaaaaaaaaaaaaaaaaaaaaaaaaaaaaaaaaaaaaaaaaaaaaaaaaaaaaaaaaaaaaaaaaaaaaaaaaaaaaaaaaaaaaaaaaaaaaaaaaaaaaaaaaaaa

SEQ ID NO: 3353 - DNA, 1705 bp, Cricetulus griseus
  modified_base (1448)..(1448): a, c, t, g, unknown or other
tgcaccagaacctccaagtactcaactccaacctgtggcaaccaagcataaatctccagtgccccagaagccacaggacagtggagagagaccagatttcacttataaggccatgtctacttctcagagtcctactccttcccagaaaggaagttctggagatcaggaggtgacagctagacttctcactgcagggttccagactttggaaaagattgaagacatggctgtgtctcttattcgagaggagtggcttcttgatccatcacagaaggatctgaatagagataacaggcctgagaaatacagaaacatgttctccctggatggtgacaccaggagtgagaacaaggaattattttacaaaacaggtaatatcttctggaatccagccacgtggacaaacagctgctaagtgcaacggggatgttattgtgggtcttgcacatggagaaacccgagaccttctgggcagattagaaaggcagcagggaacttccacacaagagagacggcataaatgtgacgaatgtgggaaaagctttgctcagaactcaggccttgttcgccattggagaatacacactggagagaaaccctatcagtgtaatgtgtgtagtaaagctttcagttacaggtcagcccttctttcccatcaggatatccacaacaaagtgaagcgctatcactgcaaggaatgtggtaaggccttcagtcagaacacaggtctgatcctacaccagagaatccacactggggagaagccctatcagtgtaatcagtgtgggaaggcctttagtcagagtgcaggccttattttgcaccagagaatccacagtggagagagaccgtatgaatgtaatgaatgtggaaaagctttcagtcatagttcacacctcattggacatcagagaattcacactggggagaaaccctatgagtgtgatgagtgtgggaaaaccttcaggcgcagctcacatcttattggccatcaaagaagccatactggggagaaaccctacaaatgcaatgagtgtgggagggccttcagtcagaaatcaggccttattgaacatcagagaatccatactggagaaagaccctataagtgtaaagaatgtggaaaagctttcaatgggaacactggtctcattcagcatctaagaatacatacaggggagaagccctatcaatgcaatgagtgtgggaaagcctttattcagagatcgagcctcattagacatcagagaatccacactggagaaaagcctgaaaccacaggagtttaggaaaagctttaggttgtcatttgagcattattcagcagtagagaaaccctgtatgttaggtgtaattatgacctggttaaatacataatgcatttgtgatagtgcatgggatgattacattatgtttaggctcctgattgagttcacctcacatcaagntcttccttattctgtgctgcctgagcagttaactttcaagtttgtactataatccacgtacttactaataccttgctctgtaatttgttttatagaagtctgtatagtagtttcacatttgtatttatttccaaaataaaattgtaagctcctggagggcagggataataactgtaacaattgtatcactgcaccctcttagtgcctagtacagtactgagcacacagtaggtgtttaataaatgcttgttgaatta

SEQ ID NO: 3354 - DNA, 1704 bp, Cricetulus griseus
taaataaacaaacaaacaacaacaaaaaaaaatgttgctgcctcacagaggtcttctaccccagggatggccatgttcccaggcctgcagtcccctgtggccagcgccacctccgcagccccagtgctgcctgtgcagtctccgttggctaccccttcctccacagcaatgccagtcagctgtggctcctcaggctcgcttttgcatggtccccatgtaggcggcatttcatctacccctgctgcagcaactgtgcccgttatgatcaaaagtgagcccacgagcccccctccttcggccttcaaaggcccagctcatcccggcactcctgctcgtggtaccttgggcctgtcaggtgcactgggccgtggaataccccacaacctcagtgcccatcagtgtgtccacttgccttaaccctgcactgtccgggctttccagcctgagcaatcccctggctggttctatgtcccttccgccacatgcgtcctccacgcccattgctcctgttaccccggcttccctgtctccagtgccccaagtggtgccccacactgccctcgttccctgggctgcaggcgccctccacagtagcagtcacaccactgccggtggctgcctcagccccatcacctgcacctgtcctccctgggtttgcctcggccttcagttccaacttcaactcagccctggtggcacaagcagggttgtcatctggactccaagctgcgggtagctctgtttttccaggccttctgtccctcccgggtatccctgggttttcccagactccttcacagtcgtccctgcaagagttacagctcagcgcagctacgcagtcggctttattacagcaggtccattcagcatccactttggagactacccagcccagccagacgggttccctagctacccttccacacccggaacaccattctctttgcaaccaggtctatcccaaagtggatggcatgattttaagcatgtttattcttcttgggaacacatgaaatttgttagcatcagctggaatacagtactccagatgtattcaaaggggaacttgaggcccactatttttaatttgttattaataaccctacatactgctgagtttaactcaatatattccgggaaagcaaaaatggtgctgattgtagcctttagaatgacattcaggtgttttcaactaaaaaagtatacccagaactacctttctacagatgtataagtgaggaaggcttaggataattttgcaaaacatccttcatgatctcagcagtatgcccacaagtgattccccggccaccactattactccttgtaccccggatgctcttggcacatgtttccaatcatgggatgtatttctgctcaaacattcgtctgaagtaaatgtgcggcagcaatagagaagactcgctctgtcagtatgtgcagtatgtgctacagacctgtggtggccaagtgtgatccgccgtcatgctcaacagtgtctgcaacattaaaaggtaggggagtagggagaatgtaaaccatagactctactgtagtgcagctcagcatctacaagtttacttttgtaaagatggtgtcctgcaagatgttgcaaatgtattttcctttgacatggggaacaagctttttaagtatattgaataatcctgtatggttagtttttaacattttaaaaaataaact

SEQ ID NO: 3355 - DNA, 1704 bp, Cricetulus griseus
tgaaagagaccaccaaacgagttcgccttgggccagactgtttaccttcctattgtttttattacattccttaatgcttaccagggcctcactgcagtggatgtcacagatgattccagtctgatcgctggaggttttgcagattctactgtcagagtgtggtctgtgacacccaaaaagcttcgtagtgtcaaacaagcatcagatcttagtcttatagacaaagaatcagatgatgtcttggaaagaatcatggatgagaaaactgcgagtgagttgaagattttgtatggtcacagtgggcctgtctaatggagccagcttcagtcccgacaggaactatctgctctcctcttcagaggatggaactgtcagactctggagccttcagacgtttacttgcttggtgggatataaaggacacaactacccagtatgggacacccagttttctccgtacggatattattttgtgtcaggaggccatgaccgagtagctcggctttgggctacagatcactatcagcctttaaggatatttgctggacatcttgctgatgtgaattgcactagatttcacccaaattccaactatgttgctacgggctctgcagacagaactgtacggctctgggatgtcctcaatggtaattgcgtaaggatcttcactggacacaagggaccaattcattccttgactattttctcccaatgggagattcctggctacaggagcaacagatggcagagtacttctttgggatattggacatggcttgatggttggagaattaaaaggccatactgatacagtgtgttctcttagatttagtagagatggtgaaatttttggcatcaggttcaatggataatacagtccggttatgggacgccatcaaagcatttgaagatttagagactgatgactttactacagccacggggcatataaatctacctgagaattcccaggagttattattgggtacatatatgaccaaatcaacaccagttgtacatctacattttactcgaagaaacttggttctagctgcaggagcttacagtccgcaataaaccagcggtattagagaccttttggaagctactgtttggaaaagggagacttaaagcaaatacctcagtgattagtatttaagctacaaagaatgtttttgtctacatggatctgggagtatgctgcttggaaaatctgaacaggacagttccacgtttctatagcaaccacatttaactaatttccgttagttgaataagaggtattatgttcatgggagggggacatttatggtgctttggattgtgtggaaactatgcatttttttgttcaaatgttattttaatttattgggactacagtccctaagaatctataagtaccaaccatccaccgacatctcaattcctaccttgtaagttctgagtgcgaccactctacaagccaggtgacaagacttagacaccacactctatgtcagctgacatggctacatacgccctagtacacttgaagtcagacagacatttcagttgcttacctccagtgctgagccttgctttgaaaaactaagagatttagaccaagtcactgcctagtttttgcctttgttgggattttgtactagttttatatttttgattattcttagtaaataaagacaaccagcttttccaggttcataa

SEQ ID NO: 3356 - DNA, 1704 bp, Cricetulus griseus
gtgaaccactgatatccaagaaggacattttttaaacaaggaccaccctttactgaaattaccatggttgacacagagatgccattctggcccaccaacttcggaatcagctctgtggacctctctatgatggatgaccactcccattcctttgacatcaagccctttaccacagttgatttctccagcatttctgctccacactatgaagacattccattcacaagagctgacccaatggttgctgattataaatatgacctgaagctccaagaataccaaagtgcgatcaaagtagaacctgcatccccaccttattattctgaaaaggcccagctctacaacaggcctcatgaagagccttccaactctctcatggccattgagtgccgagtctgtggggacaaagcatcaggcttccactatggagttcatgcttgcgaaggatgcaagggttttttccgaagaactatccgattgaagcttatttatgataggtgtgaccttaactgccggatccacaaaaaaagtagaaataaatgtcagtactgtcggtttcagaagtgcctcgctgtggggatgtctcacaatgccatcaggtttgggcggatgccacaggccgagaaggagaagctgttggcggagatctccagtgatatcgaccagctgaacccagagtctgctgatctccgggccctggcgaagcatttgtatgactcatacataaagtccttcccgctgaccaaagccaaggcgagggcgatcttgacaggaaagacaacagacaaatcaccttttgtcatctacgacatgaattccttaatgatgggagaagataaaatcaagttcaaacacatcacccctttgcaggagcagagtaaagaggtggccatccgcattttccaagggtgtcagtttcgatctgtggaagctgttcaagagatcacagaatacgctaaaaatatccctggattcattaaccttgacttgaacgaccaagtgactcttctcaagtatggtgtccatgaaatcatctatacgatgctggcctccctgatgaataaagatggagttctcatatcagagggccaaggattcatgaccagggagttcctcaaaagcctgcggaagccctttggtgactttatggagcccaagtttgagtttgctgtgaagttcaatgcactggaattagatgacagtgacttggccatatttatagctgtcattattctcagtggagaccgcccaggcttgctgaacgtgaagcccatcgaggacattcaagacaacctgctgcaggccctggagctccagctcaagctgaaccacccagagtcctcacagctgttcgccaaggtgctccagaagatgacagacctcaggcagatcgtcacagaacatgtgcagctattgcatgtgatcaagaagacggagacggacatgagccttcaccccctgctccaggagatctacaaggatctatattagcataaaaaaaccctccccccaccccggctgacgtgctccctctttcaattgcactattactctggaggggaaaatctgacaattaagaaatttactgtgaaaaagcattttaaaaacaaaaggttttagaacatgatctattttatgcatattgtttataaagatacatttacaatttacttttaatattaaaaattaccacattataaaatt

SEQ ID NO: 3357 - DNA, 1704 bp, Cricetulus griseus
ggcagagatccaacagctaaccaaaagtagtcagtgaccgtagcagcctcaacaagctgttgacatctggccagcggcagctgctcctgtgtgagactctgacagagacggtgtatggagaccgtgggcagctgatcaagtccaaggagcgcagggtcttcctgctcaatgacatgctggtctgtgccaacatcaatttcaagtgcaggatggcagcatcctgctctatggcagtgtggacactggcacccagtgcctagcaacctgcaagagcccaggcccgcagcccgtgctctgcctgcggcacagccccttctacctgcttgctggcctacaggacgggaccctcgctgcctatcctcggaccagtggtgggattccctgggacctggagagccctcccatgtgcttgactgtgggcccagggcccattcgcacgctgctgagcctggaggatgccgcatgggccagctgtgggccacgggtcactgtattggatgctgccactctgcagactcagcaaagcttcgaggcgcaccaagatgaggcggtgagcgtgacacacatggtgagagccggcagcggcgtctggatggccttctcctctggctcctccatccgcctcttccacactgagaccctggagcatctccaagagatcaacattgccaccaggactactttcctcctgccaggccagaagcacctgtgtgtaaccagcctccttatctgccagggtttgctctgggtaggcactgatcaaggtgtcattgtcttgttgcctgtgccccggctggagggcatccctaagataacagggaaaggcatggtgtctctcaatggtcattgtggacctgtggcctttctagctgtggccatgagcatcttggcccctgacatcctgaggagtgaccaggaagaggctgaggggcctcaggctgaggaggacaagtcagatgggcaggctcacgaaccagtgcctgcacctgatagccacacaggccgagaactgacccgcaagaaaggcatactgcttcaataccgcctgcgctccacagctcacctcccgggcccctgctgtcggtgcgggagccagcacccactgatggctcggctctggagcacagtgaggaggatggttccatctatgagatggccgacgaccccgatgtctgggtacgaagccggccctgtgcccgtgatgcccatcgcaaagagatctgttctgtggccatcatctccggtgggcaaggctaccgccactttggcagtgctccaggtggcctgagtgggcggccagccccatgtagcgagacagacagcacacttcttatctggcaggtgcccttggctctatagctctccaccctgtcaatctggaggtcacagggcagctggaccactgcagacatgcagaccctttttggcccacctgggttcccctcagggacctgtacaagccacaagacaggcctggattctccactgaggccttgaagagcagagaaacctctgcaaacaaaaattcagaatgtttgggggagggttttagggtcttgggggaatgggaaggacacacttggagaatatggtcctttttgttttgttttgttttggaagtacaaaaaacataaaacctcaccactgcctgctgaacctagaacctttgtcagggctgagtgaggctcggaggtggccgtgccc

SEQ ID NO: 3358 - DNA, 1704 bp, Cricetulus griseus
  modified_base (29)..(29): a, c, t, g, unknown or other
gtcccgccgtactttagctgtctgtgcgnggccaccgcctccaggcagcccgcagcaagccggcttgtgacccgacgagcgtagcgccctctcaccgcgatgctgtgcttcctcaggggaatggccttcgtcccctttctcctggtgacatggtcgtccgcagccttcatcatctcctacgtggtcgcggtgctctctgggcacgtcaacccttttctcccctacatcagtgacacaggaaccacacctccagagagtggtatttttggattcatgataaacttctctgcatttcttggtgcagctacgatgtatacaagatataaaatagtggagaagcaaaatgagacctgctattttggcactcctgtctttaacttggtgtcattagttcttggattggtgggatgtatcggaatgggcattgtagccaattttcaggagttagctgtgcctgtcgtccatgatggtggtgcccttctggcttttgtctgcggtgtagtttacacgctcctgcaatcgatcatctcctacaaatcatgtccccagtggaacagtctcacgacatgccatgtccggatggccatctctgctgtttcctgcgcagctgtggtccccatgattgcctgtgcttcactaatttctataaccaaactggaatggaatccaaaagaaaaggattatgtgtatcacgtagtgagcgctatctgtgaatggactgtggcctttggttttattttctatttcctaacattcatccaagatttccagagtgtcaccttaaggatatccacagaaatcaatgatgacttttgaaagagcgagaatcctgtctcactcagtgaatgtcacagttagtttctggaagtggcacagaggacggatggacttggatgtcaccctgatcaggacgcatctgtggcacatccgggacttgaatttcattcagaatttctagtagttgttctttttacaaaggtatgtttttctagagaatgtttagcatcaatgacactttagcaatatttttatattttctaagacactttaatgaacaaattcatatgtagaaaagatgaggcattgcagaaaatgggaatatttttgtatagattatttagacttttatgtatgactgacttataaaaatacgctaagtgaaaaaaatgttaagtttggtgcaaataaaaaaaaaagccaaatcgggatattcactttaaaatttaattttttaaaacaatgatttgcataattttcatcacaagcatttatataatctaattcatagtgattatatatcctaatggtaaagattctgttaataaattaatactaaagcactttggatttttagtgcatgcatgaaacaaaaatgtttttatagttaaggcttcaaaaaccatttactgtgcacattaaccagcagatgtagaagacctcagtttgaaaattcagcctccttattttgtttcagttgtttgggcttcatgattgtgtgacaactctcttctggacagataccacagaaattgttacatgggctagacctgtcttggcaagccgagaaggtcccaaatcaccccattctgcagattccatgcaacttctaacgttatccccattttgctattattttaatttctacaaatgtgtatttccttggactgcatgcctgagaaggtaaataaatattactttaattta

SEQ ID NO: 3359 - DNA, 1703 bp, Cricetulus griseus
gaaggcccttcagagtacattctggagacaactgatgcacttcacgtgaaggcctgggtgtctgacatccaggagtgcctaagcccaggaccctgccctgctatcagccccgcccctgggacctccttcctcacaaaggacaacatagacagcctggagttgccctgcctgaatcattcagagagcctgcccagccaggatctgctgctgggacccagcgagagtaacgaccgcctgtcgcagggggcttatgggggcctctcagaccggccgtcagcatccttctcccctagttctgtctccattgctgcttcccattttgattcaatggaactgcttcctccagaattgccccctcgaattcccattgaggaggggcctccagcagggacagttcatcccctttcaaccccctaccctcccctggatactccagaagcagccacagggtcattcctgttccagggggagtcagagggaggtgagggggatcagcccctctcaggatatccttggttccacggcatgctctctcgactcaaggctgcccagttagtgctggaaggaggcactggctcccatggtgtcttcctggtacgtcagagtgagacaagacgtggtgaatatgtcctcactttcaacttccagggcaaggccaagcacctgcgtttgtcactgaatgaggagggtcagtgccgggtccaacatctgtggttccagtccattttcgatatgcttgagcacttccgggtgcatcccatccctctggagtctggaggctccagtgatgttgtccttgtcagctatgtgccctcccagcggcagcagggccgggagcaggctgggagccatgcaggggtgtgcgagggcgaccgatgctaccccgatgcctcctccaccctcctgcccttcggagcgagtgactgtgtaacggaacatcttccgtgacccagcccagccccctgaaccccctccatggacagatcccccacatcctggggcagaagaggcgtcgggggcgccagaagtggcggccaccacagccgcagcagccaaagagaggcaagagaaagagaaagcgggcggtggagggatccaggaagagctggtccccgtggctgagctggtccccatggttgaattggaagaggccatagcaccaggcactgaggctcagggtggtgctggcactggtggggacttgggggtgtccctaatggtgcagcttcagcagctaccactagggggcaatggagaagaagggggccacccccgagccattaataaccagtactcctttgtgtgagatacctacccaccctccattttcctactcctagccttaagttgtgagactgggctgggtagggacaccgaggaaaatgggagccccctccccacatgcttcctgacccttgtcagccaagggtgtgtatgttggtacaagtagaggttcaagagccctgttaactccccagttactacactacaggtgcccttgccccaggccaaggacttgggctccattacctccctaaggggctcttatggtcagtccctccttggggggctatctccccactaattaccccccaacccaagcaagggtgagggggaagggctgtcagttatattaaggttgttgttgttgttttaaacaaaatggaaaagcataaataaataaagggtttatcttagttcca

SEQ ID NO: 3360 - DNA, 1703 bp, Cricetulus griseus
aggatgtggaccagtcagctgcacaagagaggaagacggagtttgagagatgtcacaacatccggcgtttcatgtttgagatgcccttcacccagactgggaagaggcagggcggcgtggaggagcagtgcaagcgacgaaccatcctgacagccatacagtgcttcccctatgtgaagaagcggattcccgtcatgtaccagcaccacaccgacctgaaccccattgaggtggccatcgatgaaatgagcaagaaggtggctgagctccgccagctgtgctcctcagccgaagtggacatgatcaaactgcagctcaaactgcagggcagtgtgagcgttcaggtcaacgctggcccactagcatatgcccgggctttcctcgatgacaccaacacgaaaagataccctgacaataaggtgaagctgctgaaggaagtcttcaggcaattcgtggaggcttgtggtcaagccctagtggtaaacgagcgtctgattaaagaagaccagctggagtaccaggaagagatgaaggccaactacagggaaatggccaaggagctctctggcatcatgcatgagcagatctgccccctggaggagaagacaagcgtcctaccaaactccctacacatcttcaatgccatcagcgggacgcccacaagcacagtggttcaagggttgaccagctcatcctcgattgtgtgactttacctcatgaaccaccacatatagggacatgctttgtcatgtgcaaactcaggatgacttccagagctaatcaccggtgcgaccgagcacaggaagaagccatggggaaccggagagagagggagcctggactgtgatatttagtagcagattttataggagtcgggggaaggtgcgcatattttttttaaatcgcactggcaatatttagttttcctcatctcttaacaggagtatgtggacactcttaagctgcagttcagttttattctttttacaatgtagtgttatgggggctaagctggacaaatcttgaaaatatttttttctccctgtgtcacattcaggttgagtacaagaactatttttgtgtctagtttttgatgactgaagggaatggactattgtaatttttgtactagtgaacgaggagatgtagagcctttatattcatgccttgtgttggagacacgagagcttacaaagttgcgtgtgagcctaagcctagtccagcaacgtagaaccaaaggcctgcactaacaaacgcactccgctaagactagaacccagtgtacataccgtttgttaacacagcctccttgctccattcaggccacctgttgaatttctacatttctgacacacccacttccacgttgttactgtggccacttgtgctgttctcggtatatgcaaacacattggattttactgttttattcttgtacataagaagtgcaatatggagatgtatacagtctttgctatattaggtttataaactgttaaaaaaaaaaacttttcatccttttgccaaaatggtggagtatgtgattggtgagccctaaaccctgtggtgagttggggaataatttaaaaatttcaccatgttatattttcttttaagactttaatttagtaattttatatttgaaaaaataaaataaagtttattatgatcactgccctgctataattaaacatcctgtaccc

SEQ ID NO: 3361 - DNA, 1703 bp, Cricetulus griseus
  modified_base (28)..(28): a, c, t, g, unknown or other
tgacaaggacgcagagcccggggagccngccagtccgccagcccctggccaatggccacgtcaagaccgactaagtcagaagactaatgtgaggacctaaggtctctcctaggaacttaaggacagagagaccaagctggtggggttacctcttggttcagcacaagccctgcccccgactgggtcttagcccagtagggcaatcacaaccacataaggtgggcagtgggatggtgttgggaagttgggtgtccagacaacagaaggacactgggactggtccatggctctctacccatcctgggggctggggcctgggcaattaacagttggacttcatggataactttggaagcagcaggcctgtcctggtgaagggacatgaactctggggcgacaggtgggaggcaaagtctgaggaggccttggctgctgttggggccactaccccacctgccccctggcttcagctgggctttggctggtcccattaggcaatattcaggtgcttgcttgcaaccaatacctcccccagggggcctctgagctgcagcctgagagagacccagcagccagcaggctgcttggtggcattgctcttgtgcaagggctgggaaaacttcctttggcccctctcctctccctcccccaaggccccacactgttcccttggccttctgggggcccctgtggtgctggattcccaccaaccttgggcttttggaggtttcaatcccgtgtgttcggtggcgtttcccctttctcttacgttcaagacatttaccactagcaggcagcccttttctctgtgtcagtcaccatacccatatcaggagggtttcctggagtgaatctgcttgcccggcgatactcagcacagtgggctgcttatgtaggtcccctgttctcctgtggcgctcataggcacagaacccccagccaggggaggctacactgtaaaggcctggccacagacctgcaggctcagatctcaccaaatagcccagacttcagctcttgctttattgactatcttcagggctccaaccccttagtgcactggggcgcacaggttggggtaatcaagcccttctgaacagcggggagtctgctggctgtttagggaacctctgatgttctgggcccaaggcagccatctcagagttgcagataataagtatgctgtcctgcatggttgagttgctttggatgtctgctaggcttccagtgccctgtcccttcctcatgccagagagtcacaatggcctgtgcttattcacagcaataatacatagggagcgtctgtgagtcccttttgtcctggtccctcacttttcatggatctcccaggaggctgctgagtgggtcagcccatgtgagaatctatttctgaagctctgggctgggcaaagtgttgctgcaggaggcaggtgagaggcctagccatgaactgtgagtaaggcaagggaagtgccttctaacctgaggctacccatacctggacaagctataggccccagctttggaacagggcctttgaagtggataggactgtcctccagctggacagctctcaagaaaggcacatgattgatttgtgagcccgttgcctgctatgtctccatttgtctgtctcttccttttcataattgtgcacataaaatatactggtgtttgtgttcctaaaaaaaaaaaaaaaaaaa

SEQ ID NO: 3362 - DNA, 1703 bp, Cricetulus griseus
agctgcctgacgctgaggaggccaagctggctcgtgtgatgtttggccttagcaaggtgacagatgacacactcaggaggttcagtgtccgctatcttcgatctactcgaagtttggtcttcccttggttcaccccgggaggctcaggattgcgtggcctgaagctgctaggggctgaaggtcaggggaacgaagtacagtatgtggagaccaccattccccggcctggtgcctaccacaacctattttggattaccactgatcagccggcgagatgctgaggtggtcctgacaagtcgtgaactggacagcctggccttgagccagtccacggggctgcccaccctttccctaccccgaggaacggtctgcttgcccccggcgttactcccttaccttgaacagttccgacggattgtgttctggctaggagatgaccttcggtcttgggaggccgccaaactgtttgcccgaaaactcaaccccaagcgatgctctttggtgaggcctggtaaccaacaaccccgtcccctggaggccttgaaccaaggcttaagtcttcctcgtattcttcgcactgccctccccgcctggcacaagtctattgtgtctttccgccagctccgtgaggaggttctaggagagctatcaaatgtggagcaagcagctggtgtccgttggagtcgtttcccagacctcaatcgtctgctgaaggggcatcggaagggcgagctgacagtctttacaggacctacaggcagtggaaagacaacattcatcagtgagtatgccctggatttatgtacccaaggggtgaacacactgtggggtagctttgagatcagcaatgtgagactagcccgggtcatgctgactcagtttgctgtgacacggctggaagagcaactggacaagtatgaagagtgggcagatcgctttgaggacctgcctctctatttcatgactttccatggacaacagagtatcaggtctgtaatagacacaatgcaacatgctgtctacgtctatgacgtctgtcatgtagtcattgacaacttgcagttcatgatgggtcatgaacagttctctaccgacaggatcgcagctcaagactacatcgttggagcctttcggaagttcgctacagacaatagctgccatgtgactctggttattcacccacggaaggaggatgatgacaaggaactgcagacagcatccatttttggctcagccaaagcaagccaagaagcagacaacgttctgatcctgcaggataggaagctagtgactgggccggggaagcggtatctgcaggtgtccaagaatcgctttgatggagatgtaggtgtcttcccacttgagttcaacaagagttcccttaccttctccatcccaccgaagagcaaagcccgcctcaagaagatcaaggatgacaatggactagtggccaaaaagtcctcttctggcaaaaagggtgctgctgggcaccagaactctgagacttgcttagccgggaccccagctcctaccagccagatacctccaagtcctcaaggtgaaagctgtgcatagctgcttgctaaaatgagcttgatggatcagggtttccaaagaaccagcattttggtgaaaggaacgaagtgctgcctctgacgctggagttaggactcttttagagccttttccagtttgaatgaaac

SEQ ID NO: 3363 - DNA, 1702 bp, Cricetulus griseus
accagaaactgagtgctcgaatccgaaggagactctattatggttgggactgggagacggactgcaccctggaggagctctcccagccctgtggcagacatcactgtggaacttcttcagaaggcagcacccagtcctattcggcgactccagaagaaatatgtagctcatgtgtcccgagaggcttgtatctccccttgtgctatgatgttagctctggtgtacattgagcggctccgtcaccgaaacccagactacctgcagcacgtgtcatcttctgacttgtttctgatctccatgatggtggccagtaaatacctttatgatgaaggagaggaagaggaggtcttcaatgatgaatggggagctgctgggggagtggcagtgcctactcttaatgccttggaaaggggcttccttagtgccatggattggcgcctctacactgatcctagggagatctttgaggtgctgaattggctagagagctgtgtggctgagcagcaaggacgtcggcggggctggtacacctacacagacctgtgtgtgctgctggaacagccagcatggcagctgtctctgggctccctctgccagcggctggtaaagctgtcctgcttgttagctgtggcatatgtgagcagtgtggccctagctgtggcatcagtggctgtaatacaccagtccttggggctgtcctgcagcccctcaccaggtcctcctgacctcatactggtttccaaaggcctcttgcagtcctgcatacattcccccgtgccgcagtgcctgactaatgtctccaggtgccaggaagacaatgtagagttgccgtcactctggggcagtcttctggcctcactgacaccccctccggtacctcccccagaccctcctgccccacctactcctctccacaaatgtcccttttgcgagaagttccagagaaccccccctaactgccgtgcctgccaccagcctaaccgtactgtgtctattggcccttcacgtcccttttaccatacccatggtttggccccaccctggctctggagcccagtatcccctccattcctccaaccccagcaatgttctctttttagtgtcatggagctggcccgtctcaagtctttcattttcccaggctaggtagggttctgaggaatgcattaagagggcttgggagtccctaagaacctggaagaggatttagatttttgctacctttctgggtccttggctagtctcctgttctcctgggtaggagcataaggggttatgggggcagaacaaggtcattcaccctcttagaccacagaggctggctagtaggctaggacactgatggtgccagcgaccgtttcagctcagtgaccagaggcttgtcacagatgacagagaagcaactacctttctgccttctcaagcctggggtagggatagacttctgcttttgagtttccagagatggaaaggtaaaggtgggaggtgtggggagtgggtgaggagaggatgtcacagccaaggattgttgggtccttcaaccttgtccttttgtcttccaaccttagcatcctccaaggcttcccactcgacccgttcttttctaggtgttctctttacaggcctctctgggtaccactgctttgtatctgagtttttcacgcttttgtagaactgaggtttcaataaacagtttgtgttg

SEQ ID NO: 3364 - DNA, 1702 bp, Cricetulus griseus
atcaccactggagatctgcagtgggcttgttgagagaatctggtttgttctcacatttgccattggaaagcaggcaacagatggagactcagataggtgcactgatactagccacagacatcagtcgccagaacgagtacctgtcattgttagatctcacttggatagaggtgacttacacctgatgatggcagacatagggtaccatttgggcgtgagtccactttgtgaccgtcagactgagtctatcgccaacatccagattggttttatgacttacctggtggagcctttatttaccgagtgggccaggttttcagacacaaggctgtcacagacaatgcttggacatgtggggctgaataaagcgagctggaagggactgcagagacaacagcccagcagtgaggatgccaatgctgcatttgagttgaactcccagttattaactcaggaaaatcggttatcctaacctgaaccagtgggacaaactccctcctgcgaggctgtggaaatgtgaaatgggtcccaagggaagagccagttctgactccttcgagccctgaaacttgaactgaatctcagcagcaatctcaagccaacatgtccgatacagccacgcatctgccccttccactttgttctctctgagaaaacagaaatgtgaagtgccgagcctctgctgcctctggcaagactcatcattgtttacaaatctactctgaaatactggttctcaatcgccttggagcatgattgtgaaggaaccaccgagattcgcagctcaagctggagatgcagctctcaccaagcgttccactccagtgctgtttggcaatgcatatttttaactaatagtttttaatctggggcgggagggaaggaacaccagtatcccagctgtgtcctgactttgcagtgaagacactgcatgttgttttcactactgtacacttgacctgcacatgcaagaaaaaggtggaatgtttaacacaccataatcagctcagggtatttgccaatctgaaatacagtgggatggggaagtgtgtccttccgatcaagggaactaaagtccctttcgctgcagtgcgtgagaggtatgttgtgttgactgtgtgtgtttgcgtgcatgtttgtgcatgtatggctgtgcatgttctgtccatccatgtgggaaaggattgaaaatgtaagcttttatttattgttttagaatgtgacgtagtcagcagccacacttgagggaggggaaggtaggtaaagctgtaggattgctccagttgccttaaactatgcacaaagctaagtgaccaaacttctcgttctgatttgaaaagaaaagtgcattcttgttcccctccctccctttgatgaaacgtttcgctttgttgggccttttgatgtgaatagatgttttctaggataaaatttaaggactaattttagacaaaacattccacttttataatttgtttttcaaatggttttatgtatagcaagcacaactgtaaatctagtttaagagaaacggtgctttagttaatttgtatttcccttgttactgtaaaggactgtttattaattatgtttacagtttgttgcaacagccatcttgggagaaagcttgagtgtaaagccatttgtaaaaaggctttgccatactcatttaaacatgtgcctgttgctgttaacttttgat

SEQ ID NO: 3365 - DNA, 1702 bp, Cricetulus griseus
aggtctctggccagtatcgcttccacctgtccacaagcatggggaatatctttgcaaacctcttcaagggcctttttggcaaaaaagaaatgcgcattctcatggtgggcctggatgctgcagggaagacaacaattctatacaaactgaagctgggtgaaattgtgaccacgattcccaccattggtttcaacgtggagacagttgagtacaagaatatcagcttcaccgtgtgggatgtgggtggccaggacaagatccggccgctgtggcgccattacttccagaacacccaaggcttgattttcgtagtggacagcaatgacagagagcgtgtgaatgaggcccgtgaggagctcatgaggatgctagctgaagatgagctccgggatgcagttctcttggtgtttgccaacaagcaggacctccccaatgccatgaatgcggccgaaatcacagacaagctggggctgcactctctacgccacaggaactggtacattcaggctacctgtgccaccagtggggatgggctctatgaaggactagactggctgtccaatcagctccggaaccagaagtgaaccagacccctccctcccccttacttcctcctctccgccctccgctttcctctcatgtggcaaacgtgcgactctgtggtcctgagtgccagaagctgtctccatgggttggtcacagtgtgcatcgcaccgtgctgtacatgtgcagacgcagcctgcagccaggtttttatttaatgtaaatagtttctgtttccactgaggcagtttctggtactcctatgcaatattacttagcttttttattgtaaaaagagaatcaactcactgtcagtactgagaagggatttgggtgtaggggcacctggcctccgggagccattgggctgtaaactggtgtcagtatccatttggtggttggtttttaacccaaactcagtgcattttttaaaatagttaaaaaatacaggacaagaacacttgaacacacagaaaggagactatgcctagtgtaggttttgcagtaatggcctgaatgctagtccatcggatcacctgttcccctatgggaacaggagagaaggtgacaaaccaccatccgctgcatggtcacagtagagcccccgtgactcgcctgtctttgggtcacctgcattccatagcattgtgcttgtacttgtgctcacatggtcacctaggggttggctgggggccattgtggggtgcagggcctggcttgtatttggtgtgtggccgggccagatggcagcctacatacccagcttactcttgggcccacttggacgcgctggcaggaggcctgggtctcaccagcaggagcgcgtgcaagctgggagggtcagtccattccagacccacatcctggagcacccccatctccatgtgtgaagtagctttctccctcagcctgcaagggtccgatttgccatcgaaagacgacctctacttttttctttgtattttgataaacactgaagaagctggagctgttaaatttatcttggggaaatctcagaactggtttatttggtgtcgtggaacctcttactgctttcaatacacaattagtaatcaactgttttgtatacttgttttcagttttcatttcgacaagcactgtaattatagctattagaataaagtctcttaactatttg

SEQ ID NO: 3366 - DNA, 1702 bp, Cricetulus griseus
gtgcgtagcggggcccgtggtggctcccggagcgcgcggcgatgctgacccccgcgttcgagctgagccaggacagcgagttcctcacggtcgccatccgcatcccgcacgcgcgtgcctccgagttcgacgtgtactttgagggggtggacttcaagttctacgccaagccgtactttctgagattaacacttcctggaaggattgtagaaaatggaagtgaacagggaacctatgatgcagattaaaggaatttttaccattcgattgcccaaggaaactcctggccagcattttgaggggctgaacatgttaactgctcttctggccccaagaaaatccaggtctgcaaaaccacttgtggaagaaataggtgcttctggggtttctgaggaaggagctgatgatgaggattcggagtttgactgggaaattgagcagactccctatgaagaggtctcagaaagtgctctgctctcacagtgtcactatggatttggaaacctgcgagcaggtgtggttcagcggttacaggatgaactgagtgaggttattgatattaaggatccagatttcactcctgcgactgaacgaagacagaaacgcctggctgctgagctggccaaatttgactcggatcactatttagctgacttctttgaagatgaggctgttgagcagattttgaagtacagtccttggtggaatgatgcacatgcagaaatgatggcctctttgggaaagagccaagagaaaggagatgatgctgcattagtgtctttttcagaagaggaaaaatatcagctaagaaaatttgtgaataagtcttacctgctggacaagacagctcaccgtcaagtgtactacagtttagttgacatccttctggcctattgctatgaaatacgtgtcactgaaggagagcacaatgtcgagtctgcgtggactattagaaagctgagcccaactctctgctggtttgagacttggacagacgttcatgaaatcctggtgtcttttggaaggagagttttgtgctatccactttatcgtcatttcaagctggtgatgaaagcctacagagacactataaagatactgcaactaggtaagagtgcagttttaaagtgtctcctggatgttcacaaaatctttcaggaaaatgacccagcgttcattttgaatgatctctacatctcagactactgcgtatggattcagaaggccaagtccaaaaagttggctgccctcgcagaagccatgaaagcagtctccctcagtaaggcccagctggggttagagctgcaagaactagaagctgccgcacttcttgtccaggaggaagaaactgccgaaaaggcagcccagtgcaatcccatgcagccagctccaggctccagtcccgagaccagtgactcggacagcaccacatcgtctgacacagaagactcagcttcagagcaagaggagcttgttgggatgcagccctcactgctcacttctctgcaagtcccccttttggaagaggatagcagcgccctgctcatcaaggagagtgggctctgcagaaatgtggccggccaggaatgtgaagtcagtcaagggcagcagacccgggctccgtctgatagaggaggttggggatgagctgaggaccatgcttcagatttccacgcctcctgatgtcagtgctgggagccac

SEQ ID NO: 3367 - DNA, 1702 bp, Cricetulus griseus
aacaagtacaaaactaattgttcaattaaagaactcaaaaaggtcaaagacatgtgagcaaagcagtcagcttagcacagaaaatgacctcagtgaagatactgaaggtttcagatgcacagcatcaaaccagctgaaaactgagcaggaggaaaaagaggattctgcagctggaaaacctcaaaggaaaagtgtgaagcactgtttgtctacaagtgaaagactgaaaagtgcagatgtgttgagggatacactgaagcattcaagtgtctggaggaaacataattttcattccttggatgggacgtcaaccagagcctttcaccctcagacagggctgacctctcctttcaagtcctgttcctcaaagaaaaacacaatcaggttgctttgatctggacacatcactgctgcatctgagaagcctgtcctccagaagttctcgaccatgtctgaatattgaagaggacccagatgctcatgaaaagcccttttttgagttcgagtgctcccccgatcacaagtcttagtctcctaggaaattttgaggaatctgttctgaattaccgtttagaccccctcggcatagttgatggctttactgccgaggtaggagccagtggtactttctgccccacacacttaactctgccggtggaagtgtcattctacagtgtttcggatgataatgctccctcgccttacatgggtgtgattactttagagtcccttggtaaaaggggttatcgagtacctccttcaggaacgatacaagtgaccttattcaatcctaataagactgtggtgaagatgtttgttgtgatgtatgacctacgaggtatgccagccaatcatcagacattcctgcgccagaggacgttctctgttcctgttaaacaagaaatgaagagaagtattaataaagagaacgtccagcacacagcacagttattacgctacctcatacatctgaggttccagagttctaaatctggaaagatctacctccatagagatgtacggctcctgttctctagaaagtccatggaggttgatagcggcgctgcgtatgaactcaaatcttacactgaatcgccaacaaatcctcagttttcaccaagatgttgatgggggtgggaggggcaatttaaggttatttgctcagtgcccaggcttgaacgtaagcattcacagaatggagttcatcaaatcagagccaggggagtggccctcccctgctgtcctggaccagactttattaatggacccctgaaaatgagatccatgactccaagtggactggaagcagccgtgtcttcacccttttcaatactgttgaaaccacttcattggacagttgcaatagcaaaatccccagttagattagtgtttacactattttatttctgttatttaatatttaatgttttccttaatactcaagtgatgtttgtctctagtgttctaatgtagcacaatcctctgtaaaatcatactatgtatttttgacattaatgttgaaatctgaaatatatgcacaagtctttaattctgtgtggtgtgttttaagtgctattcatttaagctactgaagatgagaatggaatgttgggcttctttaagattaatgcactatgcaagcatgtatgctttttatatctctccaggttagtttttataacacttaccctggggctgtccc

SEQ ID NO: 3368 - DNA, 1702 bp, Cricetulus griseus
cttttaaaacctcaaacatggggaagtctctttctcatttacctttgcattcaaataaagaagatggttatgatggggtcacctcgacagacagcatgaggaatggactcgttaacagtgaggtgcataatgaagacggaagaaatggagatgtctctcagtttccatatgtggaatttactggaagagatagtgtcacttgtcccacttgccaaggaacgggaagaattcctagggggcaagaaaaccaactggtggcattgatcccatatagtgatcagcggttacggcctagaagaacaaagctgtatgtgatggcatctgtgtctgtctgcctgctcctgtctggattggctgtgtttttccttttcccacgatctattgatgtgaagtatattggcgtaaaatcagcctatgtcagttacgattttcaaaagcgaaccatatatttaaatatcacgaacacgctaaatataacaaacaataactattattctgttgaagttgaaaacatcactgctcaagttcagttttcaaaaacagttattggaaaggcacgcttaaacaacataactaacattggcccacttgatatgaaacagattgattatacggtacccacagttattgctgaagaaatgagttacatgtacgacttctgtacactgatctccatcaaagtacacaatatagtactcatgatgcaagtaactgtaacaacaacatactttggacactctgaacaaatatctcaggagaggtaccagtacgtcgactgtggaaggaacacgacttaccagttggcccagtctgagtatctaaatgtacttcagccacaacagtaaagtctaaaggaggtgtgatagagcagatgacccacctgagacatgttcagaactgtcagtgaggagatactgcccaggacaccttgaattgagcatgtctaaagttgatttgcttgtaccaagagcctttcctcgattgtaagttaactgattggctttcttcttatctttgttcccaaggtgaaaaactgagacttcctctaatacaataaataattatataaaagtcatagacttaatctatagttctattgataatagttcagtcatgaacataatttgacaagtaacctctgaaaatttttatatgaaatataaaccattactcatggaggacttttaaaaactaacctgttttataaactctcattcttataagatggtagtctttcgactatatgataacgtagctattagctaaatgtttttagcctttaacttgttgaaattttactcatttgcatgtttttgtcttatttttagctaatggttaataatatttaccaaattctgttgtacactttgtaagaacctctcagtatgtgcttcatgtatagttttgtcaactttttgtgatcatcaaacatattccttttgtgtacaatattgtaaataaactgcatggcttttatacagctttgataactgtcaaatgaagtggtattgattaggaaggtaaaacaagttgttaaaaaataataaagtaggaaaatgaaattcagaaaatataataaaataatcagtaggtcccaattactttttggatgtggcaaaaatagatatacaataaaacattttcatgctttccttttaaaataaaattaagtatttcctaaagtaaaaaaaaaaaaaaaaaa

SEQ ID NO: 3369 - DNA, 1701 bp, Cricetulus griseus
gttgcatctgtcttggagaagaagacaaagagcaaggggccctacatttgcgccctgtgcgccaaggagttcaagaacggctacaatctccggaggcacgaagccatccacacaggagccaaggctggccgggtcccttcgggtgctatgaagatgcccaccatggtgcccctgagcctcttgagcgtgccccagctgagcggggccagccggggagggggagaagccggggctggcggaggcacagccgcagtggcgcccggtggcgttgtgaccacgaccgcctctggaaagcgcatccggaagaatcacgcctgcgagatgtgcggcaaggccttccgcgacgtctaccacctgaaccgacataagctgtcgcactcggacgagaagccctaccagtgccctgtgtgccagcagcgcttcaagcgcaaggaccgcatgagttaccacgtgcgctcacatgacggcgctgtgcacaagccctacaactgctcccactgtggcaagagcttctcccggccggatcacctcaacagtcacgtcagacaagtgcactcaacagagcggcccttcaaatgtgagaaatgtgaggcagcttttgctacgaaggatcgactccgagcgcacacagtacgacacgaggagaaggtgccatgtcatgtgtgtggcaagatgctgagctccgcttatatttcggaccacatgaaggtgcacagccagggccctcaccatgtctgtgagctctgcaacaaaggtactggtgaggtttgtccaatggcggcagcggcggcggcagcagcggcggcggcagcagcagcagtggcagcccctcccacagctgtgggctccctctctggggcagagggggtaccagtgagctctcagccacttccctcccagccctggtgagctccaagttgatgggagcgaggggaagagcagaggaaagctcttcttggtacagtctcctcttctcaccaactcctcactgctcaccatcaaccaaggagcctccagacagaggaggaagaaggaattcactaggtttaacaatgtttctcctgctcctttcttctccctatcagagctgaccctccaaacacctgtcccctgagttgtgttgaagtcccctggacagtgagcaggggtggcagaggacagcagcagtcactgccctcaacctttaaaccccttgcctttcctcccagggatttgtgagcctttccctagaaggtcctgtgctctcctcctgcagtcccctctcctactgtctgctgccccttcctggggagttggtgctttcttttttgttgttgttttttcccagggggagggaggagagagaggagggggactaagattctgtcccagaggagggatacggtggtactgagggacagaagaagggaaggcagagggatactttcagtaaggtagggtggttgaacactaaacatcctactggatatctgtccagggaaaagccaaggggagtgtcagaaggagccactagggccagaggcagaacaagagagatggaatcttagggggccagggtaaaggaggagagccagggactagaggtgcttcctgggggtgggggaatgcagccacggtgtctcccccttccctcttccaccccagctccagccctggtcttttctcctctttcccacaacagaagctgtggccctggccatg

SEQ ID NO: 3370 - DNA, 1701 bp, Cricetulus griseus
tgggccctgcagctagctccaacagcttcgctgggctgtatctgaggtccagcaccatgatgccatcacaggcactgagtcccccaaggtgaacaacatgtacgtggaacatctaagaatggggatgctgggcgtacgcaagatgatggcctccattgccctggacaggttctcagtgtctggcacagagacaaagggcctgtgggataccttgcctctgtatacaacccgctggtctggaagatcaccaccattatcaccctgactgtccctttccccaatgtaaatatcaccgatgagttgggccatccagtgtcagcacagatccagaactctacggaggacccttctgcctatgacctgcttatcctggccaccatcccaggcctcagctaccggcactacaaagtcatgcacaccggtggggaccaggcagacaccaggaaactggtcgtccccatggccagcacccgcaagtttagtcccaagctgaggaaacggagcagccaggaaggcaagctcctgatgcctgtgatgaatgactgctatattttgctgtttgaccaggacactaacatgttacatagtattcaggagagacagagcaaccacacagtgcgcatgacccaagagttcctggagtaccgggccaatggagacgtgaagcagggccccatttctgacaactacctgtttgcacccaatgataccgctgagcctacttgggaagcagtggggatggagatggtggtgggcccactggcaacggacataaggcagtacttctacaggaatataacagaccaggattacatctattcgattcacactcgtctggcccatgtgcatctgagccccactggggaactgctctgccatcggatagagcagcagtaccatgtaggccccctggaaatgaaccgtgaggctatcctgagaaccagcagtgacctgaacagcgagcagatcctctactctgacaataatggctaccagatgcagcggaggccctacaaggctttcaagagcaatcccattgcccggaattactaccccatggtacagtcagccttcattgaagatgacaagagcaggctggtgctgctggcagagcaagcacatggtgtctcaagccaagagaaaggacaggtggaggtaatgctccatcggcggctgtggaacaacttggcctggaacctgaagtacaatctcacactgaatgacacctccgttgtgcacccggtgctctggcttctgctggggcctaaatccatcactgctgccctgtgcccaaggagcgggttggcacttcaatacaggcctgtcgtgttgttcagagagctgactgatgaagaggcccccatttggagaccccagaaccccgatgctgtgacattgccccccagcctgcacctgcagatcctcagtatacctggctggaactacagtagcaaccatggccaccacctgaagagccttcagagaggctacccaaagaagccccaggccaacctgcagcgtgtgctgctgcgcctgcaccacctgtatgaaggaggggaggacccagtgctctctcagcctgtgacggtggatctcaaggttacacttcaaggactagggtccgtggtagctgtggaggaacgctcactcacagggacctgggacaagcagatgctgcagcgctggcactggaagacaaag

SEQ ID NO: 3371 - DNA, 1701 bp, Cricetulus griseus
atattcgtaagttttcggcagtttccggggaaactcgggaactcccgtgcctggctggctcgagtgatcgcccgttgcggaggcgcagggtctcgggctagtcatggcgtccccatctcggaggctgcagactaaaccagtcattacttgtttcaaaagcgttctcttgatctacactttcatcttttggatcactggtgttatccttcttgccgttggcatttggggcaaggtgagcctggaaaattatttttctcttttaaatgagaaggccaccaatgtcccttttgtgctcattggcacaggcactgtcattattctcttgggcacctttggttgttttgctacctgtcgagcctctgcatggatgctgaaactgtatgcgatgtttctgacactcatttttttggtcgaactagttgctgccattgtaggatttgttttcagacatgagattaagaacagctttaagaataactatgaaaatgctttgaaggagtacaatgccacacgggattatagaagtgaagctgtagacaagatccaaagtacgttgcattgttgtggtgtcaccaactatagagactggaaaggtactacttattactcagaaacaggatttcccaagagctgctgtaagctggaggggtgttctccgcagagagatgcagataaagtcaacgaagagggttgcttcataaaggtaatgacaattatagagtcagaaatgggagtcgttgctggaatttcttttggagttgcttgctttcagctaattggaatctttctcgcctactgcctttctcgtgctataacaaataatcaatatgaaatagtataaccagtatacacacgggcttatttctctccaactttaaggttatttgtgagctttaacatcgcctggctggagacagacatctgattagcttgaaaaactacagcagtagactgattcaatcaagatatttgtgtattgttgtgttctatgtccactttctgtcctattcctatatccctgtatctctgaaacactggaagagctagtaaattgtaaatgaaataccatgtttcccttgaatttcatttctcagtgtggcaactgtgaaaagtgctgtgaattttctgttttgatacagtggtgatggaaatttaacccctatgaatttgctgttgatgttgtatgatagaaaattggcctccctgagggcttgattgtataaatctgcaccaagaagaaaaatgcttcattagtctctgctgataggcagagtcatatcgtgtaatttccttccagctcgtcatcagatggtgcctatcattagctttcctgggtggtggtaaccatctcaggctttggttgtaaagcagtaagactacaaaccattacccatgttctgtgacacatcagcttccagcacacaatgtatgtatttttgtctccaaactaaggcatttatactggttatactttgttatttcaaaggttattattactttaatggtatcagaactattgtattttctttatgaatttaatggaacttaccttaactctagctagatttttctcaccaagctgaaataatagttcacatcaactgtcaacattttgcttaattttaatagtgttcgttttgccttgtatccttgattaataaatataaatcctttacgcaataaaccccgcatttcctctaa

SEQ ID NO: 3372 - DNA, 1701 bp, Cricetulus griseus
gccgtctcgtgtggtggagcctgttagcgattcgctccccgcagccaaacgcccagaagcagcgcggtggtggcggccgggctccagttcttcacgtgagactcctgaagagaccagtcacaaaggatgagcgaactggaacagttgaggcaggaagccgagcagctgcggaaccagatccaggatgccaggaaggcctgcaatgatgccacactggttcagatcacatctaatatggactcggtgggtcgaatacaaatgcgaacaaggcgcacgcgtgcgggggcacctggctaagatctacgccatgcactggggatatgattccaggctactagtcagtgcatcccaagatggaaaattaattatttgggatagctatacgacaaataagatgcatgccattccgctgaggtcctcctgggtgatgacttgtgcctatgccccatctggaaactatgtcgcctgtggaggcttggacaacatctgctccatatacaacctgaagactcgtgaagggaacgtgcgggtgagcagagaactaccagggcacacaggctatttgtcctgttgccgattcttagatgatggacaaatcatcacaagttcaggagacacaacttgtgctctgtgggacatcgagactgggcaacagactacaacgttcgcaggacactcgggtgatgtgatgagtctctcactgagtcctgacttgaagacctttgtttctggtgcttgtgatgcgtcttcaaaactgtgggatgtccgagatgggatgtgtagacagtctttcacaggacacatctcagatatcaatgctgtcagtttcttcccaagcggatatgcctttgccactggctctgatgatgccacttgccggctctttgacctccgtgcagaccaagagctactactgtattctcatgacaatatcatctgcggcatcacttctgtggccttctcaaagagcgggcgcctcctgctggccggctatgatgacttcaactgcagtgtgtgggacgcattgaaaggaggtcgggcaggtgtccttgctggtcatgacaaccgtgttagctgcttaggtgtgactgatgatggcatggctgtggccaccggctcctgggacagttttcttagaatctggaattaacagtgtcatattttctgttctccaatggacattgcattttaacctgactccctgacagtttctctatcaggaggtctgacaggtgaggtggctctgagggagccagtggggtgtccatacattcttttccatgctaggaatctaagtgatccttttctgtcctttcaggggacagatgatgtgaaggccagggggtaaaaatctcactttgacctagggctgcactgaaatgtcaataccatttattatattaataaccagtagacactggcatgtcatttttggtattctaaaaggctgagtcctttgaaccattggatcttgctgttaatttcatattctggaacctagtttgtagaatgtactagtatttcagaagtttgacaaacctgacttgtccctgtatctgaagactcttgcctagtattctctgtaataggaaacagtggctcacctttaacatttttgagaaatgtaagctcatccactcaactggcacgtcttgctgggtgctgcctttgtgggttacttggatgtatacaatacattgt

SEQ ID NO: 3373 - DNA, 1701 bp, Cricetulus griseus
ttcagaggagtggggccgggccgtgtgggacggcttgttgttgtcgggccgggggaggcggaggtcgctgtttcgttcgctgtcttgtgcgatctgtgcggtccgcggcaggtcggtcgcaagagagggtgctgcaggggggcaaggctatgtcgcggctgcagcccgtttgggccggcagggcctggagtaacgggacgtcgccgcgaagcttcttcccccggatacaatgcggcccgagtgaaggccgcggcgccgccctccagtcctgaggagcccgcgccgcactcagcccgcgccgaggtcgtctcagcaccgacgctaagcaacccggctagcctggcttgatctagcccattcccggcaggtagcactgcactagtctttctggcacaagaaaccccatcccaaaggacatgaagctactggagaactccagctttgaggccatcaactcacaattgacagtggagactggagatgcccatattattggcaggattgaaagctactcgtgtaagatggcaggagatgataaacacatgttcaagcagttctgccaggagggccagccccatgtgttggaggcactgtccccaccccagacttcaggcctcagtcctagcagactgagcaagagccagggtggtgaggatgaaagccctctaagtgacaagtgcagccgcaagaccctcttctatctgattgccacactcaatgagtccttcagaccagactatgacttcagcacagccagaagtcatgaattcagccgggagcccagcctcagctgggtggtaaatgcagtcaactgcagcctgttctcagctgttcgggaggacttcaaggccctgaagccacagctgtggaatgcagtggatgaggaaatttgcttagccgagtgtgacatctacagctataacccagatctggactcagacccctttggggaagatggaagcctctggtcattcaattatttcttttacaacaagcgtcttaaacgaattgtcttctttagctgccgctccatcagtggttccacctacacaccctcagaggcaggcaatgcattggacttggaactgggagcagaagaggctgatgaagagagtggaggtggaggcagtgagggcaaggcagaggagaccagcaccatggaggaagacagggttccagtgatctgtatgtgatgaggaaaagtctcagcttcatccagcctcaaccagtgcctggacctgcctacctaaggagctccagagcctccccagatgctggctatatcctggcactgccaccatcctggcgctgcccaaggctatacctgcctagccctttggtttcagcctgtggatgtctacacacccatgcaggctcttactgcccgtgctgtggctggattaaacagcacagagcctgatagaaaagtgaccgctctgcaccaacaacagtctgccacagacaggacagctggaccacagagtttatttttgtatttcttattgggcctgtacactccagctctaagggccagtgacatgaagccctgttggcggtgcccagtgttttatgggttctggccttggaccagcccctggtgcccacttttgccccccccccaccttaccaggtgggccacatgcactgagtgtcactttgctgcagctcattcgtttccaataaaagtttctgtgacttaga

SEQ ID NO: 3374 - DNA, 1701 bp, Cricetulus griseus
gaatccggatgactcataacttgctgctaaattatggtttataccgaaaaaaggaaatatataggcctcataaagccactgctgaagaaatagaacaaaataccacagtgatgagtatatcaaatttctacgatcgataagaccagataacatgtctgagtatagtaagcagatgcagagatttaacgttggagaagattgtccagtatttgatggactctttgagttttgtcagctctccactggtggttcagttgctggggctgtgaagttaaaccggcaacaaactgatatggctgtcaactgggccggaggattacatcatgccaaaaagtcagaagcatcaggattctgctatgttaatgatattgtacttgccatccttgagttactaaagtaccatcagagagtcttgtatatcgacatagacatccatcatggtgatggtgttgaggaagctttttatacaacagatcgtgtgatgacagtttcattccataagtatggggaatactttcctggaacaggagatttgagggatattggtgctggaaaaggaaagtactatgctgtcaactttcccatgagagatggtatagatgatgagtcctatggacaaatttttaagcctataatctcaaaagtgatggagatgtaccagcctagtgctgtggtgctgcagtgtggtgcagactcactgtctggtgataggcttggctgcttcaatctcactgtcaaaggtcatgctaaatgtgtagaagtagtaaaaactttcaacttgccattgctgatgcttggtggaggtggctatacaatccgaaacgttgctcggtgttggacatatgagactgcagttgccctggattgtgaaattcctaatgagttgccatataatgattactttgagtattttggaccggatttcaaactgcatattagtccttcaaacatgacaaaccagaacactccagaatatatggaaaagataaaacagcgtttatttgaaaatcttcgaatgttgccacatgcacctggcgttcaaatgcaagcgattccagaagatgctgttcatgaagagagcggggatgaggatggagaagatccggacaagcggatttcgattcgtgcatcagacaagcggatagcttgtgatgaagaattctcagattctgaggatgaaggcgaaggaggtcgtcggaatgttgctgatcataagaaaggagcaaagaaagctaggattgaagaggacaagaaggagacagaggacaaaaagacagatgttaaggaagaagacaaatccaaggacagtagtggtgaaaaaacagattccaaaggagccaaatcagaacaactcagcaacccttgaatttgactccccaacttaaagatcctcctgaaaagtgagacgatatgggatgagaaacctttgatgtctgaggactcctggcttcattttatactgttttggcatggactgtatttattttcagaatggcttgtttttaattttcttggctaagttttattgtgagtttttctaattatgaagcaaaatttcttttttaccatgctttatgtgattgtatttaaaattgatgtgttattatgtcaaaaacaggatctattaaaaaacagcaattggcctttctgagctgatttttccatcttttgtaattatctttattaaaaaattgtacttgg

SEQ ID NO: 3375 - DNA, 1700 bp, Cricetulus griseus
ccgctcgccgcgatggagcccgccgtcgagatcctggtggacagcccggacgtagtctacagtgccgaggccatcgaggctcgctatgagtaccggacgacgcgcgtcagccgcgagggcggcgtgttgcgggtgcagcccacggctactcggttcaccttccgcaccgcccggcaggtgccccgactcggggttatgcttgtcggctggggcgggaacaacggctccacgctcaccgcggccgtgctggccaaccggctgcgcctgacctggcccacgcgcacgggtcgcaaggaggcaaactattacggctcgttgacccaggcgggcaccgtgaacttgggtctggatgggaacggccgggaggtgttcgtgcctttcagcgcgctgctacccatggtgtcccccaacgacctggtgtttgacggctgggatatctcgtcactgaatctggccgaggcgatgaggcgcgcacaggtcctggactgtggcttgcaagagcagctgtggccccacatggagagcctgcgcccgcggccctcggtctacattcccgagttcatcgctgccaaccaaacagcacgagcagacaacctcatccctggcacacgcgcgcaacagttggagcagatccgaaaggacattcgagactttcgatccagcgcaggattggacaaggtcattgtgctgtggaccgccaacacagagcgcttctgcgatgtggtcccaggtcgaaatgacacagccgaaaacttgcttcgtactatccagcttggccaagaggtgtcaccatccacgctttttgctgtggccagcatcctggagggctgcgccttcctcaatggatccccacagaacacactggtgccgggtgccctggagctggcttcccagcgccatgtgttcgtgggcggggacgatttcaagtccggtcagacgaaggtcaagtctgttctggtggacttcctcatcagctctggcctcaagaccatgtccatcgtgagctataaccacttgggcaacaacgatgggcagaacctgtctgcaccactgcagttccgctccaaggaggtgacgaagagcagcgtagtggatgacatggtgcagagcaaccatatactctacgcacccggagaggcgccagatcactgtgtggtgatcaaatacgtgccctacgtgggcgacagcaaacgtgccctggatgagtatacctcagagctgatgctgggtgggaccaacaccctggtgctccataacacctgtgaggactcgctcctggcagcacccattatgctggacctagtactgctcactgagctctgtcagcgtgtgaacttctgcaccgactcggaccctgagcctcagggcttccacccagtgctgtcgctgctcagcttcctctttaaggcaccgctggtgccccctgggagcccagtggtgaatgcactcttccgccagcgcagctgtatcgagaacattctcagggcctgtgtggggctcccgccacagaaccacatgctcttagaacacaagatggagcgcccaggcctgggcatcaagcaaggagaaatggcaaccatcagcccactgcagcataagagagagtccacacctgctgccaccaatggctgtaccggcgatgccaacggtcacacacaggcaccgacaccagaggtgtccactgcttaaatcaaatgacc

SEQ ID NO: 3376 - DNA, 1700 bp, Cricetulus griseus
  modified_base (16)..(16): a, c, t, g, unknown or other
ccaactggattctttnagtttaatccctctctcagtgtgttgataaaacacatcagaacactccacttcactgggcagttgcagcaggaaatatcagtgcagttgataagcttttggaagctggttctagcctggacatccgaaatgctaagggagaaacacctcttgatatggctgtacaaaataaaaaccagctcattattcacatgctaaaaacagaagccaagatgagagccaacaaaaagtttaagctttggagatggctacataaatgcgagctcttcctgctgctgatactgtctgtgatcaccctgtgggctgttggatatatcctggacttcaattcagactcttggcttttaaaaggatgtcttctagtagcattgtttttctgacatctttatttccaaggtttttggttggctataagaaccttgtgtacttaccaacggtctttctgctaagttccattttctggatatttatgacttggttcatcttattctttcctgatgtagcaggcagccctttctattttgctttcattttcagcatcatagcctttctctattttttctacaagacttgggcaactgatccaggcttcactaaggcttctgaggaagaaaggaaagtgaatattgtcacccttgcagaaactggctgtctggacttcaggacattttgcacatcatgtcttataaggaagcctctaaggtcactccattgccatgtatgcaactcttgtgtggctcgatttgatcagcactgcttctggactggacgctgcataggttttggcaaccatcatcattacctcttcttcttgctttccctttccatggtatgtgactggatcatttatggatctttcgtctactggtcaaatcattgtaccacaacattcaaggaagatggattatggacctacctcagtcagatagtggcctgttctccctgggttttgtatatcttcatgctagcagctttccatttctcatggtcaacgtttttattaataaatcaactctttcagattgcatttctgggcctaacttcccatgagagaatcagcctgttaaagcaaagcagacacatgaaacagacgttgtccctcaggaagacaccatataaccttggattcacacagaacctggcagatttctttcagtgtggctgctttggcttagtgaagccctgcataatagattggacctcccagtactccatggttttccatcctgccaaggagaaagttcttcgttctgtatgaagaaaagcacctccaaactcactcttgacttgtttttgtttctgttggtgctgtgaggtctgaaagtgaagtgagatgccgagctcaccaccgttcaaaactgtgggaacacagtcctcagcaagtgcgcaccctctgtcagacctagagagagagcctatcgagcaatctgacaggcatcttttaacaaagttccaaatatttccccaagaacatgagttaactttaaaaaaaaacataatagtcactgattatggataaaatagagtattttcaaatactgtattggctttttaaaaatagtactcttgaaacttgttaatttttgataagttatttgtcttttattgtatctataaatatgtaaagagtatttaaatagatgtacctgttttgctttcacacttaataaaaacattttttaata

SEQ ID NO: 3377 - DNA, 1700 bp, Cricetulus griseus
tggcagccaggatggcagatcgtgctgcgctggaggagttggtgcgactccagggagagcatgtgaggggcctcaaacagcagaaagcctccgctgaccagatcgaggaggaggtggcgaaactcctaaaactgaaggcacagctgggccatgatgaaggcaaacagaagtttgtgctcaaaacccccaagggcacaagagactacagtccccggcagatggcagttcgggaaaaggtgtttgacgtcatcatctgctgcttcaaacgccatggggcagaagtgattgacactcctgtgttcgagctaaaggaaacactgactggaaagtatggagaagactcaaagctcatctatgacctgaaagatcagggtggggagctactgtcccttcgttatgacctcactgtcccttttgcacggtatctggcaatgaataagctgaccaacattaaacgttaccacatagcaaaggtgtatcgccgggataaccctgctatgaccagaggccgttatcgtgaattctatcactgtgattttgacatcgctggccagtttgatcccatgattcctgatgcagagtgcctgaagatcatgtgtgagatcctgagttcacttcagataggcaacttcctggtcaaggtaaatgacaggcgcatcctagatggaatgtttgctgtctgtggtgttcctgatagcaagttccgtaccatctgctcctcagtggacaaactagataaggtttcctgggaggaagtaaagaatgagatggtgggagagaagggccttgcaccagaagtggctgatcgcattggggactatgtccagcagcacggtggggtgtgtctggtagagcagttgctccaggatcctaaactctctcaaaacaaacaggctgtggagggcttgggagacctaaagctgctgtttgaatatctaaccctgtttggcattgatgacaagatctcctttgacctgagccttgctcgagggctggactactatactggggtcatctatgaggcagtgctgctacagatgccaaccgaggctggggaagagcccctgggtgtgggcagtgtggctgctggagggcgctatgatgggctggtgggcatgtttgaccccaaaggacgcaaagtgccatgcgttgggctcagtattggagtagagcggatcttctccattgtagagcaacgattagaggctttagaggaaaaagttcggaccactgagacacaggtgcttgtggcatctgcacagaagaagctgctggaggagagactaaagcttgtctctgagttgtgggatgctgggatcaaggccgagctgctctacaaaaagaacccaaagttactgaaccagttgcagtactgtgaggaaacaggcatcccactggtagccatcattggtgagcaggagctgaaggatggtgtcatcaagctccgctcagtggctagcagagaagaggtggatgtccgaagagaagaccttgtggaggagatcagaagaagaacaaatcagcccctctacgtctgctgaaccaagcagactagcagaggaagcaggattggccttatttgaactaaaacaaaactgcatatgtacttaaatagtttgcacatttctgatccagcagaagactgaagggtggtcagaacagaggctttttgttttttttgtatttgtttttgttattat

SEQ ID NO: 3378 - DNA, 1700 bp, Cricetulus griseus
  modified_base (1633)..(1633): a, c, t, g, unknown or other
tgatgcggctgaagttggaggtggaggagaagaagcaggccatggttctccttcagagagctctggcgcagcagcgggacctcaccattcgacgtgtcaaggagacagagaaggagctgagccggcagctgcgacagcagaaggagcactatgaggccaccatccaacggcacttgtcctttattgaccagctgattgaagacaagaagattctgagtgagaagtgcgaggcagtggtagctgagctgaagcatggggaccagcggtgtcaggagcgcgtggcccagatgcaggagcagcacgagctggagattaagaaactcaaagaactcatgagtgccactgagaaaatccgccgtgagaagtggatcaatgagaaaacaaaaaagatcaaagaaatcacagtcagaggtctggagccggagatccagaaactcattgccaaacacaagcaagaggtgaggaggctcaggggcctgcacgaggctgagctgcagcagcgtgaggagcaggccgcacagcgccacctgcgccaggaagaagagctgcgggaacacctagagcgcgagaaggaggcgctggccaggcaggagcgtgaacgcgcccagcagaggtttgagcagcacctggagcaggaacatcaggccctggagcagcagcggcggcgactctacaatgaggtggctgaagagaaggagcgactgggccagcaggcagccaggcagcgggcagagctggaggagggcagagctggaggagagcagcgcgactctgactcaaaccctgagagccgagtttgagaagagccgggaggaacaagagcagaggcatcagatggagctggaaagccctgaaggaccagctggaagctgagagacaggcgtgggtggccagctgtgccaagaaggaggaagcatggatgctgaacagggaacgcgaaaaggccgagaccaggagatcgagctggtcatccatcgactggaggccgacatggcactggtcaaggaggagagcgagagggcggccgagagccgcgtgaagcgtgtgcgggacaagtatgaactggagctctccgagctggagcagtcagagcggaagctccaggagcggtgcacagagctgaaaggccgcctcggggaggccgagggggagaaggagcgcctgcagtccctggtacggcagaaggagaaggaactggaagacgtgagggtggtgaacacacagatgtgcggtgagagggccagcctggcccaggtggtccgacaggagtttgcagaccaactggcagcctcccaggaggaaaaccagagggtgaaggcggagcttgctgagctgcaggcccgccagcagatggagctagatgaggtgcatcggagggtgaagacggctctcgccaagaaggaggaggccgtgaacagtctccggaaacagcacgaggccgctgtgaaacgggcagaccacctagaggagcttctggagcaacacagacggccatctttgaatgctaagtgacatcacccttaggatgaaaaaccagcctgaagcagatgctcagcgctgcagctggtgtccaggttccatcccaagacacagggctaagggtaggatagcagccggtgtgagaggcaccctnatggaaccccagtgctcaggacattactgtcagcatgcctgcaggtgtttatagtaaaataagttag

SEQ ID NO: 3379 - DNA, 1700 bp, Cricetulus griseus
ccggtcaacctggagctgcaggaacttgctgctggactacagcttccagcacctgggcgtctcctcgcagggctgtgtcgatcatcccatagttttgacagaggccgtgtgcaacccactctattcccgccaaatgatgtcggagctcctgtttgaatgctataggatccccaaggttgcctatgggatagatagtctcttcagcttctatcacaacatgcccaagaatgccctttccagcggcctcatcatttcatccggctaccagtgtacacacattttacccgtcttagaaggaaggctagatgccaaaaactgcaaacgcatcaatctcggaggaagtcaggcggctggctacctgcagcggcttctccagctcaagtatccagggcacctggcagccatcaccctcagccgcatggaggagatcctacaggagcacagctacattgcggaggactatggggcagaattgcagaagtggcggtgccctgattactatgagaacaatgtccacaagatgcagctcccattctctaacaagctcctgggtagcacactgacggctgaggagaagcaggagcggcggcagcagcagctgcgacgacttcaggagctcaacgcccggcggcgggaggagaagctacagctggatcaggagcgcctggagcggctgctctatgtgcaggagctcctagaggatggccagatggaccagtttcacaaagccctcatagagctgaacatggactccccagaagaactgcagtcctatatccagaagctcaccttggctgtggagcaggccaagcagaaaattcttcaagcggaagccaacctcgaagtagatgtagtagacagcaagccagagactcctgacctggaacaactggagccctccctggaggatgtggagagtatcaatgatttcgagcccttgttctcagaggaagcgcctgaagtggagaagccagtcaccacagtccagcccgtgtttaacttggcagcgtatcatcagctgtttgttgggacagaaaggattcgtgccccggagattattttccagccgtctctcataggagaggagcaggcagggattgcagagactcttcattacgtcctggacaggtacccaaaggctgttcaggataccctggtccagaacgtgttcctcactggtgggaacgtgatgtatccgggcatgaaggccagaatggagaaggagctgctagagatgaggccctttcagtcctccttccaggttcagcttgcctcaaaccctgtgctggatgcctggtatggcgctcgtgactgggccttggatcacctagaagacagtggagcctgggtcaccaggaaggactatgaagagaaggggggcgagtacctcaaggaacattgtgcctccaacacctacgtccccatccgcctgcctaagcaggcctcacgtgcctcagagacccagacttccgggagaggatccggggccagtggaagtggagctggtgaacaggcctagcagaggggacgcagctttgtttggctactgactagatttctcctgggagtgcagcagaggacagcaggtgatctgcctcagtgaaggacagagtggcctctggcatggaataccacgggcgagctgtggcactgctttcctcagcagtgagagaagactggtggagactagaagtggacag

SEQ ID NO: 3380 - DNA, 1699 bp, Cricetulus griseus
ggagcgcagagcggtttggtcgttcgttggaggaagatcttccgttccactcggcgattgcggctgttgttcgagcgctaacagcggcgcggcggtcccagcaagggcctcagacttcggctttgggtgaaaaaaaatggcccgaaccaagcagaccgctaggaagtccacgggtgggaaagccccccgcaaacagctggccaccaaggcagccaggaaaagcgcgccctctaccggcggggtgaagaaacctcaccgctacaggcccgggaccgtggctctaagagagatccgtcgctaccagaagtcgactgagctgctcatccggaagctgcctttccagaggttggtgagggagatcgcccaggatttcaaaacggacttgaggtttcagagtgcagccattggtgcccttcaggaggccagtgaagcgtacctggtggggttgtttgaagacaccaatctgtgtgccatccatgccaagagagtcaccatcatgcccaaagacatccagttggctcgccggatacggggggagagagcttaagtcaaggcggtttttatggcattttgtagtaaattctgtaaaatactttggtttaatttgtgactttttttgtaagaaattgtttataatatgttgcatttgtacttaagtcattccatctttcactcaggatgaatgggaagagtgactgtgcagacctcagtgacgtgagcactgtggctcaggagtgacaagttgctgatatgcagaagggatgggtgatagtacttgcttctcaagatgcatgtttctgtatgttaatgacttgttgggtagctattaaggtactagaattgataaatgtacagggtccttttgcaataaaactggttatgacttgatccaagtgtttaaccatacatcactgtgatagaatgtgggctttttcaaaggttgaagatacaagttttaaccacagtgtaacagtttcctaaaaaaaaaaaaaaagaagtaaacctggcagctatagaatacactatgtgcatttataatagctattttatatattgtagtgttgaacatttttaaattaaatgttttacattcacaagtggtggggcgtcttgtcattaaggtgtgtgtaatttagtccagttggtgcttcttgacgggactgcatttgtttaacaacgtagaaaaatgctatgcgtatgtatgaaaccttgcagaagtcctcattctaccacatgttaaccctctagctgatgacacatacactaacggggattttatttataagggctctagagtaaaataacaagttattcacaccagcatcacctgttactgatctagttagtgcagtttttcattgtgttgtttggtcttatgcctagattgagttcagtttgtttcttttttaatattcaaggggaaaaacagtacaaggtttgtttttccttgtggagtctaaacatgggggtgggagtacagcttcagctactgcacctctgccaatgaagatgggttaggttacacctggttactgtcctgggaaaatcccttttatagagatggccttcaagtggtttttaaaagtatcctattgaagtttctaggtcaattatgtatgttgactaaatttacaaataaacttgtttattcaacgaagtgtcaaaacctaaattgaatacataaagcttttaatacata

SEQ ID NO: 3381 - DNA, 1699 bp, Cricetulus griseus
  modified_base (51)..(51): a, c, t, g, unknown or other
ccctaatgacttcgaaactggagggacgttctactccgcctccagtgagcncttcgagccatactatggtgagggtggggtcggatggagatggagatatcactcgccccagaaaacatcaatgcatttcggaattttgtcctggacaacacagatcgcaagggtgtccactttctcatggcagatgggggtttctctgtggagggacaggaaaaaccctgcaggagatcctcagcaagcagctgctgttatgtcagttcctcatggcgctgtctgttgtccggacagggggccacttcatctgcaaaaccttttgacctcttcacacccttcagcgtggggctcatctacttgctgtactgctgctttgaacgtgtgtgtctcttcaaagcccatcaccagcatcaaggacactgacatcaacatcttcagctacaagcccacactgcttactgccaaaactctggagaagatccgtcctgtgttggactatcgttgcatggtgtctggcagcgagcagaaattcctcctgggcttggggaagtcccagatctacacatgggatggtcgccagtcagaccgctgggtgaaactggacctgaagacagagctgccgcgggacacactgctctgtgtggaaattgtgcatgagctgaaaggggaggggaaggcccagcggaagatcagtgcaatccacatcctcgatgtcctggtgctgaatggcagcgacgtccgagagcagcacttcaaccagcgaattcagcttgctgagaaatttgtgaaggcggtttccaagcccagtcgacctgacatgaatcctatcagggtgaaggaggtgtacaggctggaagagatggagaagatttttgtcaggttagagatgaagcttatcaagggttccggtggcacaccaaagctcagctacacaggacgggatgaccggcactttgtgcccacaggcctctacattgtcaggactatgaatgagccatggaccatggcattcagcaagagtttcaagaagaagttcttctacaacaagaaaacccagcactctacctttcaactccctgcagattccattgccccgtttcatacctgctactacagccggctcttctgggagtggggagatggcttccatatgcgtgactcccagaagtctcaggatccagacaagctgtccaaggaggatgtcctttctttcatccagagtcacaatcctggaggatcttagggtttccagctgatgactgtcctgtcattcccaaggcagggacctgtgtctggttcattcacctcttggaaaggacctgggaatgatgttctccttggtgatgagggagatgggttcctctccattcccaaagagctcaaccaggctcttcagaggacacatccttggaactctgccacctgagaactgagggcacctgtggttgtttttaatcagaagtacctctcaagagctgttcatacaggtccctagggccccatgccagcatcaggctggtttccatagagatagggcactgaggcacctgtgaggttggaattgactccactgtaggtggtcccttctgccagctcctaaccctaagccagaagcagcagtgctaggatgccatatttccacccagttctgggcctatcagtgtgtcttgcagaatcttggatcattaaacatatttttactgct

SEQ ID NO: 3382 - DNA, 1699 bp, Cricetulus griseus
agggtcggagcttccaccatgggatgggcaggggatacaggctgcacgccgcgtccgcctatacgacctcggcctgtgtccgagcgccgcgtggtcaccgtgatcttcctcggcctgctactcgacctcctggccttcacgctgttgctacctctgctgccaggactcctggagaaccatgggcgcgaacaagaccccctctatggctcctggcagcgcggggtagactggtttgccacagtcatcgggatgccagccgagaaaaggtacaacagtgtcctgtttggaggtctcattggctcagccttctccctccttcagttcttctctgcaccactcaccggagctgcctctgattgcctggggaggcgcccagtaatgttgctgtgcctgacaggtatggccatttcctatgcagtatgggctgcctctcggagctttaaagccttcttggcctcccgggtgataggaggcatcagcaaggggaatgttagcctctccacagccatcgtcgctgacctgggctcacctccaacccgcagccaaggcatggcagtcatcggagtagccttctccctggcctttactgtgggccccatgctcggagcattcttgtctgtagaaatggtaccctggatcagcttactctttgcggtctctgacatgctgttcatcttctgcttcttgccagagacactgccccaggagaaacgtgctccctctgtcaccctgggcttccatgctgctgccaacctgctcagccccctggccctgcttcattttgcagctgtcacccaccatcaggatccgcctgctgaggacagactcagaagcctacgtcgattgggtcttgtctatttcctctacctcttcctgttctcaggcctagaatacacactcagcttccttgtacaccagcgcttccagttcagcagcctgcagcagggcaagatgtttttcttcatcggcctcaccatggccaccatacagggcacctacgcccgacggatcagccctggcaaggaagttgcagctgtgaagcaggcaatgttgctcctagtgccagcctttctcttcattggttggggacactcactgcccatgttgggcttggggctgctgctctattccttcgccgctgctgttgtggtgcccggtctgtccactttggtctccagctatggttctccaggtcaaaaaggcacaatcatgggcatactgcggagcctcggtgccctaggtagggcattgggacccatggtggctgcctcagtgtactggctggctggagcccgggtctgcttcactgtgtgcgctggactctttttactccccttctttctcctgcggaacctgaggcatccagcacagactttcaaggaggagtagctgagctaccacactctggatgccaagtggaaacctgggccagaaccatcctagcccactccttcctccaggtccaggaaggcttgccatacccccacactcccctgtatggcatcccagcaggaagcctgggcagctattaccctttttttcttactccaaagccttttagacttctgattgtttatatctgtcatccttctgaatcaccaaataaagcagctattttgtaccaaaaaaaaaaaaaaaaaaaaaaaaaaaaaaaaaaaaaaaaaaaaaaaaaaaaaaaaaaaaaaaaaaaaaaaaaaaa

SEQ ID NO: 3383 - DNA, 1698 bp, Cricetulus griseus
gacttcttcctccgctccgggcacatctggtaccgggctgaacccgaggattatgctgggccggactctccgagaagtttctgcagcactaaaacagggccaagtcacaccaacagagctctgcaagaaatgtctctctatcatcaagaaaaccaagtatctaaatgcttacattactgtatcagaagaggtagccttaaagcaagctgaagaatcggagaaaagacacaaacaaggtcagccacttggagatttagatggaattcctgttgctgtcaaagacaacttcagtacatctggcattgagacgacatgtgcatcaaatatgctaaaaggttatataccaccttacaatgctacagtagttcagaaactgttggatcagggagctctactcatggggaaaacaaatttagatgagtttgctagtggggtctgggaagcacagatggtgtgtttggaccagttaaaaacccctggagttactcaaagcaatacagagaaaggcagcggcatgatgagcatggtgattcccattggctgataactggagggagctcaggtggcagtgcagcagcagtggcagcgtacacgtgctttgcggctctaggatcagatactggagggtccaccagaaaccctgctgcgcactgtgggcttgttggtttcaaaccaagttatggcttagtttcccgccatggcctcattcctctggtgaattcaatggatgtgccaggaatcttcaccagatgtgtggatgatacagcagttgtgttaggtgtactggctggacatgaccccaaagattccaccacagtacaagaccctattaagctacccatgattcttggtgagatggatgtaagcagactgtgtataggaatcccaaaggaatatctggtaccagagttgtccagtgaaatacggtctctctggtcccaagctgctgacctctttgagtctgagggtgccaaagtgattgaagtctccttgccacacacatgctactcaattgtctgctaccatgtgctgtgtacatcggaagtagcttcgaatatggcaagatttgatgggctacaatatggtcataggtctggcattgatgtgtccactgaagccatgtatgctgcaaccagacaagaagggttcagtgatgtggtacgaggaagaattctctcaggaaactttttcttattaaaagaaaattatgagaattatttcgtcaaggcgcagaaagtgaggcgcctcattgtgagggatttcatgaatgcttttgactctggtgtggatgttctgctaactcccaccaccctgagtgaggcagtgccatacttggagttcatcaaagaagacaacaggacacgaagtgcccaggatgacattttcacacaagctgtaaatatggccggcttgccagcagtgagtgtccctgtggccctttcaaaccaagggttaccaataggactgcagttcattggacgtgcattttgtgaccagcaacttctgacagttgctaaatggtttgaaaaacaagtacagtttcctactattcaactgcaagacctcatggatgatggctcattggttcttgaaaacggaaagttaacttctgtttctctaacctaatcgtgatcaataaatcaagcaattggctgatagtgaggtgccaggaatccaacactgggcctcaggcttgct

SEQ ID NO: 3384 - DNA, 1698 bp, Cricetulus griseus
ctctctggaggatgaggagattgagaccttctacaagatgctgacccagcgggcggagattgaccgtgtctttgcagaggctgcaggatctgctgagaccctgtcagtggagaagctagtcactttcctgcagcatcagcagcgggaggaggcggcaggcccagcactggctctctccctcattgagcgctacgagcccagtgagaccgccaaggctcagaggcagatgaccaaggacggcttcctcatgtacttgttatcagccgatggcagcgccttcagcctggcacaccgccgtgtctaccaggacatggaccagccactcagccactacttagtgtcgtcttcccacaacacctacctgctggaagaccagctcacagggcccagcagcacagaggcctacatccgggctctgtgcaaaggttgtcgctgcttagaactcgactgctgggatggtcccaatcaggaacccatcatctaccatggttacacttttacgtctaagattcttttctacgacgtgctcagggccatccgcgactacgccttcaaggcgtccccctacccagtgatggcgcgtcacctgaaggccatcctggggcccatgctgttggaccagcccctggatggggtgaccatgagcctaccctcccctgagcaactgaagggcaagatcctgttgaaagggaagaagtttggagggctgctgcctgctggaggagaaaatggacccgagactaccgatgtgtccgacgaagatgaggccgccgaaatggaggacgaggcagtgcggagccaagtgcagcagaagtccaaggaggataagctaaagctggcgccggagctctctgacatggtcatttactgcaagagtgtccacttcggtggcttctccaatcctagcacctctgggcaggcattctacgagatggcttccttctctgagaaccgtgccctccggctgcttcaagaatcaggaaataattttgtccgccacaacgtgagccacctgagcaggatatacccagctggtagaagaacagactcttccaactacagtcccgtggagatgtggaatgggggctgccagattgtggctctgaacttccaaaccccgggaccagaaatggatgtgtacctgggccgcttccaggacaacggagcctgcgggtatgtgctgaaacctgccttcctgagagaccccgacaccgccttcaacccccgtgccctgactcagggaccctggtgggcccagaagaggctccgtgtccgggtcatctctggacagcagctgccaaaagtcaacaagagtaagaattcaatcgtggatcccaaggtgatagtggaggtccacggcgtgggccaggacgtagccagccgtcagaccgcagtcattaccaataatggcttcaacccatggtgggacacagagtttgagtttgaagtggccgtgcccgaccttgccctcgtccgctttgtagtagaggactatgacgcctcctctaagaacgactttattggccagagcaccatcccctggaacagcctcaagcaagggtaccgccacgtccacctcttgtctaagaacggagaccagcatccatcagctaccctctttgtgaaaatctccctccaggactaagcctggggattgggtgagatccaccctgagtgggtcaagctgtgtccacacct

SEQ ID NO: 3385 - DNA, 1698 bp, Cricetulus griseus
cgaggttgtctcgggccaggggtcgcgccggaagtggctgtgccgcgcgtcctggtgttggtaggaaactgcgagaggaattcagtcattgaagggggcgcggcaccactgagcgatcttcgcggccccctgcagcagccatggcgaaaggccgagtcgccgagcgaacgcagacgggggcgttgcactcgacctcggcggggcaccgggcaacggggacgcgtggttcctccactcctggcagcagagaccacctgaaggacaaaccatgtgcagaagctgggtcagcaagaatgtcactccttatactggtgtccattttcttatgtgcagcttctgttatgtttttggtatataaaaattttccacagcttagtgaagaagaaagagtgaatatgaaggttccaagagatatggatgatgccaaagctctaggaaaagttctctccaaatataaggacaccttttatgtacaagtattggtggcttattttgctacatatatttttttgcaaacatttgctattccaggttccatatttctcagtatactttcggggtttctttatccttttccactagccttattccttgtttgtttgtgttctggacttggtgcctcattctgctacatgctctcctatttagttggaagacctgttgtatacaaatacctaacagagaaagcagtaaaatggtcacaacaggtagagcgtcatagagaacatctcattaactacattatatttttgagaatcacaccatttctacctaattggtttattaatattacatctcctgtgataaatgtgccattgaaagtgttttttattggcacttttctaggtgttgcacctccctcttttgtagcaattaaggcaggaacaactctgtatcagcttacaacagcaggggaagctgtttcctggaactcagtatttattctgatgattttggctcttctttctattctgccagccatcttccaaaaaaaactaaacaaaaatttgagtaaaaattgtggggttttgtttaccaccaccgttactaccatcatcatcatcatcatctcaggattagcaggtgtatctatccatttgatgttttgaaatcatctcttcagtaactggaggaaggatttgagacagttaaaataacaccctgtattaaagtaaaataaggtacagtgaaatcaaataaaaaattcagaccacaaactaaatacttgagacaaaaggggggctttattttctttctcttttcagacagcactttccataggctagtgaatgtaccaaggatgagttatttaagtttttcttgcatattttttatcatggattagtctgataatttaaattctggccagtctgttttcatcctttttctaggttttacagtatttccaccatacatatataaaatgagaattatatgcctgtatcatattggtgttgataatgtatattcagataataatattttgttatagtgtctttattatctcaatggggttctaaaagtaagtactcgaagcgtatagtttttagacattaattattttatactgaaacatctggcagagatggttcagcagttaagagcatctggctactcttccagagaacccagggccaactcccagcacccacatggcaactcacaactgtctataactccagttccgaggggatctga

SEQ ID NO: 3386 - DNA, 1697 bp, Cricetulus griseus
tgacaagttatatcataggacgagtttgccaaccggatacaatgtacagaatacgaattcaagccttgaatagccttggagctggtcccttcacgccatacgaattaaattaaaaactaacgcccctccctcccggatccacctcggttggaatgtgttgcctttaaccaccagaaccttaagcttaaatggggagaaggaaccccgaagacactatcaacagatgctgttcagtacaaccttcagatggaggacaagaatggaaggtttgtctctctgtacagagggccttgtcatacatacaaagtgcaaaggctcagtgagttcacatcctacaagttctgcattcaagcttgtaatgaagctggggaaggtcctctctcccaagagtatgttttcaccactccaaaatctgtcccatctgccttgaaagcccccaaaatagagaaaataaatgatcacacttgtgaaattacatgggaatatttacagccaatgaaaggcgacccagttatttataatcttcaagttatggtgggaaaagattcagattttcagacagatttacaagggccctgatacttcattccggcattccagccttcagctgaactgtgagtatcgatttcgtgtgtgtgccattcgccaatgccaagaccatgtggggcaccaggacctggtaggtccctacagcaccacagtgctcttcatctcccagaggacagagcctccggccagcaccaacaaagacactgtggacggcgtgcggacccgccgcactcttagtgatgagcagtgtgctgctgtcatcctggtgttatttgctttcttttccattctgattgcctttatcattactttgtaatcaagtgaaaatataactttatttttaacactgtattacattttattttgtctatgtactaaaattatttctgtattgcttttacaaaatggtggcatttagcactggcattgactatatattagaaaaaaattggtttttggcattttcagtgcttatgttgttggacaaaggctggcacttcaggagaattaagccacagaaacattaagtttggggagggatatgccttctagtaggacacactttctaaaaggcagcatttatgattgttttgaccaattagcttgagtgtaacagtgataaccccatctgtttgtttcaatgatgattgccatgcgaaattttcaaattgactagaatttacactaacatgctctacgaaaccttgttcaagtccgatgctgtgaaagcaatctagtgctatatttctacctcctcatttgtcttaattatttggtaagtggattttgatgaataactggagggcttagcaaagtgtgtgtgtgtgtgtgtgtgtgtgtgtgtgtgtgtgtgtgtgtgtaccgcacactgcaaagttagtgcagaggagaaaacgatttttaatgtaatcttgattttacctcatatactgtacattccaaaaactcaactttttaaagattatagatacactaccaaacataccaccttaaaattgtataaggttgagcttcatacaagtgaaaaaatataatctcataagaatacataaatatgtagcaaaagtatctgtaaaatccatggaaaataaaagttgtatcattctttaaaaaaaaaaaaaaaaaaaaaaaaaaaaaaaaaaaaaaaa

SEQ ID NO: 3387 - DNA, 1697 bp, Cricetulus griseus
cctcgcctgtgacagacctgcgtgagctgcggaagaggcccgaggacatgaagaccaagatggagctgatgatcatggagacccaggcccaggtgtgtcgggcgcttgcgcaagtagacggagtggccgacttctctgtggaccgatgggagaggaaggaagggggtggtggtatcacctgtgtgcttcaggatgggcgtgtgtttgaaaaggctggagtgagcatttctgtcgttcatgggaatctctctgaggaagcagccagccagatgcaaggcagaggaaaagtcatgaagaggaaagatggtaaattgccatttaccgctatgggtgtaagctctgtgattcaccccaagaatccttatgcacccacaatgcatttcaactacagatactttgaggtagaagaagctgatggtaacacacactggtggtttgggggtggatgtgacctcacaccaacatacctgaacaaagaggatgctgtccattttcatcgcactctaaaggaagcctgtgaccagcacgggccagacatctaccccaaatttaaaaaatggtgtgatgactacttctatatagcgcatcgtggggagcggaggggcatcggaggcatctttttcgatgatctcaactctccatccaaggaggaagcgtttcgcttcgttaagacgtgtgctgaagctgtggttccttcttatgttcccattgtgaaaaagcactgtgatgactcattcacccccgaggataagctgtggcaacagctgagaagaggacggtacgtagagtttaatctcttatatgaccgaggcaccaagtttggtctctttactccgggatccaggattgaaagcatcctaatgtccttacctctaacggctcgatgggagtacatgcatttgccaccagagaattccaaggaagctgaaattctggaagtactgcgccatccgaaggactgggtacactgatgcagcagagtgttgttccagggcctggcggacacaggcgtgaacttcctgcgctgttgccactgtatggcaggcaatcctctgtgccttactctgtcccagccttctccactctgggcatcgcctctgtggcaggtggctttggatcttttccactgctgtggggtgacatagcagtgatggatggtgatgtaaaggtgccagctctgttggatgtaaaaagcatttgtccttttagaatcatgttctatgaccagttaatttgactttgggtttccaggtcttaagaaaagggaatgtaagtattataatatggaccaggaaactcttcattttatttgttgcttcaagttttagtttttgctacaggaatttatcaggggatatgttttatcttcattagttcattcatgttggccttcttggtaactttagaatgcagtttgaagcctttttttgtatgtaagtttcatgtgtctttctctgttgatcagaatattataaaaaaaaagcttatatccctggattctgatacttagagttttatatttcagatatttagatatgggagtttagactaagaacaaatgaaatatttaaatattatcctgggatatgttgaatgtatgtgattgtgtttggctcttttagggtaagaaaatctacagattctgccacatgtcttatacagatccagctaataaattttattttgaaataagaaaa

SEQ ID NO: 3388 - DNA, 1697 bp, Cricetulus griseus
cagcgacgcaagatggcagccaccacaggctcgggagtaaaagtccctcgaaatttccgactgttggaagagctggaagaaggccagaaaggagtaggcgacggcacagttagctggggtctagaggacgacgaggacatgacacttacgagatggacagggatgataattgggcctccaagaacaatttatgaaaaccgaatatacagccttaaaatagaatgtgggcctaaatacccagaagcacccccatctgtaagatttgtaacaaaagtcaatatgagcggcgtgagtagttcaaatggagtggtggatcccagggccacggcggtgctggcaaagtggcagaattcccacagcatcaaagtcatcctgcaggagcttcggcgcttgatgatggccaaagagaacatgaagctgccacagccgccagaaggacagtgttacagcaattagtcaccaaggccccggcctcccctccccaatccaacctaagtcttcattttccacagtagtgaattttctagattcatcttgtagacctcaaagtactggagaggaggctccactcggacttcatcctgagacactgttctgatactaatttcttgtccatttgaaatacctaagttgtgctgtgtaacatctgtcgagtgtaaccgctggctgcttagttgaacttctgggatcaagaaggtgtgttgaaatcagtttcctttgggagcggtgggcacagctaatgcaactgtgaacagacacattgtcacacaatcacttgctgctcacacatggcctgggtctgcctttgcccgccccgccctcctgccacagctgtgtggtggcccttagaatagatgggaaggcttcaggtagcagccgtgggactactgctgggcttgggggtgctttggcttcacccctgatttcttaagtcttaagtgatgccccatccaagccattgccgccccccccactcctgcccttggccaaagcttagattgtaaccctcccctccctctgaaattggccgtgggtgaggatttcagggcttcccgtctccccacctttatcaaggggtgctgctctccccctccttctcaattccctcgttgcccacaccaccccacacttgctgtggccagagtcgtgagatgaggttggaagagcctggtcttctcacttagctcttggccacacgctcacttgccaccagcctgggaagggggttccgggtcctcggccctgctgccaccatcagccgatgcactttgagctcaggtctcgaggtgaacagagcagtcagtcaagggaccacaaacctgccagcgctcagggtccttggtggctgcgcctagagaaaggccatgcggagagtcctcagcgcacagggtactgagtcggttccttttctcataatcgctttgcttttacacactgaagtggtttggacaggactccgtgtccacccatcaggtctgacgtggaacctgacagctggaacagaggccctaaccctgcggactcaggtttcagtcttgctgctcctcagaccctcggcagggacctggaggagctctgtgtccagatgggtgggcctggcctcctgcctcattgccaccgttccccacctctgttcaggaccactaattgttgaaatgtggatgcatactgaaataaaggcaatttgttgtgttgca

SEQ ID NO: 3389 - DNA, 1697 bp, Cricetulus griseus
ggtgaccagaatggagctgtggcccggggcctggacagcgctgctgctgctagtgctcctcctgctgtccaccctgtggttctgcagcccctgtgccaagtatttcttcaagatggccttctacaacggttggatcctcttcctggctatactcgcaatccctgtgtgtgctgtgcggggacgcaacgtcgagaacatgaagatcctgcgtctgctgctgctccacattaaatacctgtatgggatccgagtggaggtgcggggggctcaacacttccctcccacgcagccctacgttgtggtctccaaccaccagagctccctcgacctgcttgggatgatggaggtgctgccagaccgctgtgtgcccattgccaagcgcgagctactctgggctggctctgccgggctggcctgctggctggcaggagtcatcttcattgaccggaaacgcacgggagatgccatcagtgtcatgtctgaggtggcccagaccctgctcacccaggatgtgagagtctgggtttttcctgaaggaacaagaaaccacaatggctccatgctgcccttcaaacgtggcgccttccaccttgcagtgcaggcccaggttcccattgtccccatagtaatgtcctcctatcaagacttctactgcaagaaggaacgacgcttcacctcggggcgatgtcatgtgcgggtgctgcccccagtgcccacagaagggctgagaccagatgacgtccccgcgctggcagaccgagtccggcactccatgctcaccatcttccgggagatctccacggatggcctgggtggcggtgactgtctgaaaaggcctgggggagcgggcgaggcccggctctgagcttcctcctacccttcccatcttgtcccctcacctctgacccagcgcctcaggcagggccaggcccccttcctgggtccccactccctactctcctttgggaatcttcaacttctgaagtgaatatggatacagagtcactccacgccctttccctgcccacccatggactctccgctccggtccccgcctgccatcttgtcttgtgggacagctgccccccctcatgtcaagtggctcatcggataccagggtgggggacattccatcccatccctccccagtggtctctttgtggccttctctccctctccaccccacactggacaatggactcatgtgttctgtggaacaatccacccctcaccccaagtgagggccacacagactgagtgggcccatctgctagtgaggactcctcatcctgtggctggaagctgagcctgaacactcctcaccggctcacctggggatcttcctcaacactgtcaccctcagtggggctgtggggctgggctcttgtaactcagaagtctcacccctgcctgtgcccagggctgagcacactccagatgccaatttctgcttccccgcgattaattaacttttttttttttttttttttttttttttgagggactccctctctgagcagttttcatttcctcccagtggcattggccactcactccccctgcctccgactctagacccattcctaagacccaggaggtaggctgggggcagaaggaacgggtggaatccagttttgtgtggttggtttttattatctgggtaacagcaagcaactgagaataaagaaaaagagaga

SEQ ID NO: 3390 - DNA, 1696 bp, Cricetulus griseus
gacttcaggaccggcggcggcagcggcgggcagcggcgcaggggtgttttaactcaaatgggtgatgaaaaggactgaggaggaggaagaggaagaagaggaagaagggagcaccagtgaagaatcagaggaggaggaggaggaggaagaagaggaagaggaagaggagactgggagcaactcagaggaagcctcagaacagtctgcagaagaagtgagtgatgaagaaatgagtgaagatgaagaaagagaaaatgaaaaccacatcttggttgttccagagtcgcgatttgaccgagattctggggacagtgaagaaggggaagaagaagtgggtgaagggaccccacagagcagtgccccaacggaaggagactatgtacctgactctccagccctgtcacccattgagctaaaacaggagctgcccaagtacctgccggccctgcagggatgccggagtgtagaagagttccagtgcctgaacagaattgaagaaggaacctatggagtagtctacagagcaaaggacaagaaaacagatgaaattgtggctctgaaacggctaaagatggagaaggagaaggaaggcttccccatcacctcactgagggagatcagcaccattctcaaggcccagcaccccaatatcgtcactgtccgagaaatcgtggtgggaagtaacatggacaagatctacattgtgatgaactatgttgagcatgacctcaagagcctgatggagaccatgaagcagcccttcctgccaggggaggtaaagaccctgatgatccagctgctgagtggggtaaagcacctccatgacaattggatactgcaccgtgaccttaagacctctaaccttctgctgagccacgctggcattctcaaggtgggtgactttgggctggctagggagtatggctcacccctgaaggcctacactcccgttgtcgtaaccttgtggtatcgtgccccagaactgctgcttggtgctaaggaatactctacagcagtggacatgtggtcagtgggctgtatctttggagagctgctgacacagaaacctctcttccctgggaagtcagagatcgatcagatcaacaaggttttcaaggacctggggactcccagtgagaagatctggcctggctataatgacctcccagcagtcaagaagatgaccttcagcgagtatccctataacaacctccgcaagcgatttggggctttgttatcagatcagggctttgatctcatgaacaagttcctgacatattaccctgggaggaggatcagcgcagaagacggcctgaagcacgagtatttccgagagactcccctccccattgacccgtccatgtttcccacgtggcccgccaagagtgagcagcagagggtgaagcgaggcacgagcccacgcccccccgagggcggcctgggctacagccagctgggtgatgatgacctgaaggagacgggcttccacctcaccaccaccaaccagggagcctcagctgctggccctggcttcagcctcaagttctgaggtcagattgactgaccctggccagctagctggtgacaggcagatctgctgattcaggacaaccttgttttgcttcgttttctccgtgaagtttgttttgggtcaggttataaatttgtagaattaaatcacatttttccttctgga

SEQ ID NO: 3391 - DNA, 1696 bp, Cricetulus griseus
gaggtcagatttttctcatgaaagaaaaggaaggtccaagctgccacttcaagccctccaactacccagcactaaaatggcccgtcctgggacagcttgtcttttcatcaaagttccagaagatggaaacatttaaacctccgaaggatgttgacatgaagtcacttcatcttcagaagcctctagaatccacctggaaaaaaccaatagccaattcctatctggtcctcaacaatcaaatagcccctttaccccgctccagaaagagctgttcttaattatgaattcttaccgggacctgttctacccagagcggactgccctgaagaatggagaagaggtccgccatgtgtactgcctgcatgccataaaccacgtcctcaaagcgaatgcccaagtgttagctaacaacagtaggcgccggagccagaaacttggggtgggtgaggatgatgacttcagggaccaagggctaaccaggcctaaggtgcttatagtggtgccctttcgggaagctgcccttcgggtggtgcagctcttcatcagcctcctagagggggacagtaagaagaaagtaattgtaagcaacaaaaagaggtttcagggagagtatggctccaatccagaggagagaccacctaacctgaagaggcccgaggattatgaagctgtgttcgtgggcaacattgatgaccacttcaggattggggtggcaatacttcagaggagcattcgtctctacgcccccttttactcctccgacatcctcatcgcctccccctgggcttgagaaccatcattggtggagaaggagagaagaagagagattttgacttcctgtcttctattgagcttctcatcatcgaccaggctgacatttacctgatgcagaactgggaacatgtcttgcatttggtgaaccacatgaacctgctgcctttggagtcccatggggtggacttttctcgagttcgcatgtggagcctcaataactggtccaggtactaccgccagaccctgctctttggtgccctgcaggatgcccagatcaactccgtgttcaacaagcactgtgtcaatgcccaaggacaggtggccgtgaggaatgtcccaatgacaggctccatcagtcatgtgttggtgcagctcccacatgtcttccagaggatggaagcccaagatgtcacttcagtgatagatgccaggtttcactttttcataaacaagattttgcctcagtatcgggatgccgtcatgtcccacacgctcatctatgtcccctcctactttgactttgtgcgtctccgaaattacttcaagaaggaagagctgaacttcacacacatctgcgagtatacacagaagtctggggtttccagggctcggcacttcttccttaaaggagagaagcagtttctgctcctcacggaacgtttccatttctacaaaaggtacacaataaaaggcatcaggaacctgatattctatgaactgccaacctaccctcacttctacagcgaggtctgcaatatgctgagtgccgcgaggagaggagaggaggccacatggacctgcactgtgctctattccaaatacgatgcccagaggcttgcctctgtggtcggtgtcgagcgggcagcacagatgctgcagtctccaaagaacgtccaccttttcatcaccggagagagatgag

SEQ ID NO: 3392 - DNA, 1696 bp, Cricetulus griseus
ggcgactcggggacacgcacagggggcgctgtccgcgactcggggtgcgtggctgatcgtggcccacgtgcattcgcagcacgtcgtggggatctcccctcttgaggaggcgactgccgggaatccctgaaccggacccctaacttcgggcgaactttgtaggcgcgtctcccctcccccacgcggcgcgctggggcccccggggatgcggccccccggccgctgcgacgtcccctcggcgcgccccgcgctgccgctgctgctgctgctactgtcgccgctgctgcttggggcgccgcgcggcgtgggcgcggggagcagcgtgccagcggagctgcgggtccgtgtgaggctgcccgacggccaggtgactgaggagagcctgcaggcggacagcgacgccgacagcatcagcctcgagctgcgcaaacccgacggcactctcatctccttcaccgcggatttcaagaaggatgtgaagatcttccgagccctgatcctaggggagctggagaaggggcagagtcagttccaggggctctgctttgtcacccggctgcaccacaatgagatcatccccagtgaggccatggccaagctccggcagaaaaacccccgcgcagtgcggcaggctgaagaagtgcggggtctggaacagctccacatggacatcgctgtgaacttcagccaggggggcctgctgagtcctcatctccacaatgtctgcgctgaggccactgatgccatctacacccgccaggaagatgtccagttctggatggagcgaggtgtggacagttctgtgtttgaggccctgcccaaggagcagatggaattgcctcgctgtgggcaagtgagagaccgaggaaagccctgtgcctgccgctacagtctgagcctggcctggtacccttgcatgctcaagtactgccacagccgtgaccggccggcaccctacaagtgtggcatccggagctgcaggaaaaactacagctttgacttctatgtacctcagagacagctgtgcctctgggatgaggacccctgactgtggggagcaaagaacggctttggacccacaagttcttcattggccaccagagggtgtggcaaccctacctggggccttaggtcccttcctgtgcctctgatgctgaagccatgacctcatctgcatgacagtaaaaggatatcacccagcagggacaacttttgggcagccccaatgcctacctgtgcccatctgttctccagattaacagcctcccctcttcacgtcccccaaaatgtcccacatacatgcaatgaaaatgaactggcctaggcttcttttgtggaacttgttccaggggtgtgtgttcctgtatcacaccttcccattgcaagggaaccattgaccagagagggacttctggggactcacgccccagctcccgtgtctgaagtgccttttctgccccaggagcaatggggagcagggagatcgccgcccttgagaccacatgtgcctttcctgggacccaacttggcttcttcagcacacaccaattgttcctcccgttggactgaaggactttggcaaggttctggagcaggaagggagcatgaagtacaaggaaaacttgaattccagatttttaatacaaaatatttatcatttgtacaagaaataaaagtttttaaggtttcactcacc

SEQ ID NO: 3393 - DNA, 1696 bp, Cricetulus griseus
atggctgcctgtgcggcccgacgggccctggccgtgggcagccgctggtggtcacggtctctggtcacggcccgagggttgaggccgctgtgtgcggtcggtggagcagggacccttccgctggtggccacagcgacgacgcgaaggcatctatcgtcccgaaaccgtgcagaaggcaaagtgttggagacagttggtgtgtttgaggtgccaaaaacaaaatggaaaatatgagactgggcagctgttccttcatagcgtttttggctaccgaggggtcgtcctgtttccctggcaggccagactgtatgaccgggatgtggcttcttcggctccagaaaaagcagagaaccctgctggccacggctctaaggaggtgaaaggcaaaactcacacttactatcaggtgctgattgatgcccgcgactgcccacatatatctcagagatctcagacagaagctgtgaccttcttggctaaccatgatgacagccgggctctctatgccatcccaggcttggactatgtcagccatgaagacatcctcccctacacttccacggatcaggttcccatccaacatgagctctttgaaagatttcttctctatgaccagacaaaagcacctccttttgtggctcgagaaacactacgagcctggcaggaaaagaatcacccctggctagagctctctgatgtccaccgggaaacaactgagaacatccgtgtcacagtcatccctttctatatgggcatgagggaagcccagaattcccacgtctattggtggcgctactgtatacgcttggagaacctggacagtgatgtggtacagcttcgggaaaggcactggcggatattcagtctctcaggcaccttggagacagttcgaggacgaggagtggtgggcagggaaccagtgttatccaaggagcagcctgcatttcagtatagcagccatgtctccctgcaagcttccagtgggcacatgtggggcacatttcgttttgagagacccgatggctcccactttgatgtccggatcccaccattctccttggaaagcaataaagatgagaagacaccaccctcaggccttcactggtaggccagctgaggcccaggttgggctcctcagaacagctcttaacccataattgctgcagaactctaagtctctccctaattctttgtttggagggagattgtaacttttcttggaagactcacctaagactcctccaaggtcagccccgcccggccctgcctacaccacgttccaacaaagctgtcagggaactgtgttcagttgtcacgggttgtctggaatgtgagccatggtcaataaaccagtgctcacttggccacctgactgtaaacactgattagccaccagcatctctggcttcactaggcctggagaagagtgaggcaaaaccagtcaggtttcccggagctgtgagcttctgagcattgagcaaaagtctgtcagacacccaaaccacaagtgcaggaattcagccaagaagcagcttaagttatggacagtgaccaagcctagccgctttcccagcttctgtcagatcaacaggaggcagaattgggctgcattttgtcccagttctcagggttccttcaccacttgtcactgttagaggtcctttcattcttgcattattaaatctcagttccagtc

SEQ ID NO: 3394 - DNA, 1695 bp, Cricetulus griseus
agcttagactgttttaggatgaagcctttgctatggctaatgaccccttggaaggcttccatgaagtgaaccttgcttcacctacttctccggaccttcttggtgtgtgtgacccaggaacccaagagcagacgacctccccaagtgttatctaccggccacatccttcatctttgtgctctactcctctccaggctaatgccttagatctttctgatcttcccacacaacctgtgtactcatcccctaggcgtttaaactgtgcggagatacctaacatcagcattcatgttccggacccagcatcagctgttacctctggagtggcagtgggactcacgaagctaacatcaaggaaggacatcggcaatgcagagagggagtttttgcagggtgctaccgttacagaggctcctgctggcagtgatgacatctttgggttgagtacggatagcctgtcacgtttacggagcccatctgttctggaagttagagaaaagggctacgaaaggttgaaagaagaacttgcaaaaagctcagagggaagctcacaagatggtgagagaagcaaatgtcaagcaggccacggcggaaaagcagctgaaggaggctcaagggaaaattgacgtacttcaggctgaagtggccgcattgaagacactcgtgttgtccagctctccaacatcaccgacacaggagcctctggcagctggaaagacaccttttaaaagggggcatacaaggaataaaagtaccagcagtgccatttgtggcagccaccaggacctcaatgtgatacagccacttgtaaaagactgcaaagaggccgatttatctctgtataatgaattcagatcttggaaggatgagcctacaatggatagaacatgtcctttcttagacaaaatctatcaggaagatatctttccatgtttaacattcgcaaaaagtgagttggcttcagctgttctggaggccgtggagaacaacactctaagcatcgagccggtggggctacagcccattcgattcgtgaaagcttcggctgtagaatgtggaggaccaaaaaaatgtgctctcactggccagagtaagtcctgtaagcacagaattaaactaggggactcaagcaactattactatatttctcccttttgcagatacaggatcacttctgtatgtaacttttttacatacatccgatatattcagcagggacttgtgaaacaacaggatgttgatcagatgttttgggaaattatgcagttgagaaaggagatgtcattggcaaaacttggatatttcaaagaggaactctgacaccctgcgtggggccatgtgtgctcctccctgaacaactgaagagtggctgaacatttttatggttaatatttatttccgaggagagaggcccaagacttctgtcctcttacacattacactaagaagtgctgcgatttcctttaaagcaactgagatgtgtttgcctgtccctgaatggagcacactccgaagagctgcaggtgtgccagtgatggggattcagccctgcagagcaaaaccaccaaataaacatcagactgagtgtgtgtctcttccttagctctgacatggcatatagcattgcagaaggcagtagtagttttcacactgtaccctatgggaaacaaggaaggagctgtgtgaacaggactc

SEQ ID NO: 3395 - DNA, 1695 bp, Cricetulus griseus
ctaccctcatgtcctggtgaagaactgtgctgtggaatttaactttagggcagagggcagagccctactgctctattctcccagggttcacattcatccagcaccttcccctcagtgagcggatccggggcaccattggaccaaagagcaaagcagagtgtgagattctgatgatggtgggcctgcctgctgccggcaagaccacatgggccatcaagcacgcagcctccaacccttctaagaagtacaacattctgggtaccaatgccatcatggataagatgcgggtgatgggcctgcgtcgacagcggaactatgctggccgctgggatgtcctgatccagcaggccactcagtgcctcaaccgcctcattcagattgctgcccgaaagaaacgcaactacatcctagatcagacgaacgtttatgggtcagcccagagacggaaaatgagaccatttgaaggcttccagcggaaagctattgtaatctgtccaactgatgaggacctaaaagaccgcacaataaagagaactgacgaagaagggaaagatgtcccggatcatgcggtcttagaaatgaaagccaacttcactttgcccgatgttggggacttcctggatgaggttcagttcatcgagctccagcgagaggaagcagacaagctggtgaggcagtacaatgaggaaggccgcaaggccggcccacccccagagaagcgctttgacaacagaggtggtggcttccggggccgtgggggtagtggcggtttccagcgatacgacaaccgaggcccgcctggaggcaaccgaggaggctttcagaaccggggaggaggtggcggaggcggcagtggaggaggaggaggcaactaccgaggaggcttcaaccgcagcggaggcggtggctacaaccaaaaccgctggggtaacaacaaccgggataacaacaactccaacaaccgaggcagctataaccgggctccccagcaacagccaccgccacaacagccaccaccaccacaaccaccaccacagcagccaccgccgccacccagctacagccctgctcggaatcccccaggggccagcagctacaacaaaaacagcaacatccctggctccagcgccaataccagcacccccacagtgagcagctacagccctccacagcctagttacagccagccgccctacaaccaaggaggctacacccagggctacacagccccaccacctccacctccaccaccacctgcctacaactatgggagctatggcccctacaatcctgccccctataccccacccccaccccccactgcccagacctaccctcagcccagctataaccagtatcagcagtacgcccagcagtggagccagtactatcagaaccagagcccgtggccgccgtactacgggaactacgactatgggggctactcgggcagcacacaggggggcacaagcacacagtagcccgtgctcgggtgctgcagcctctggaggccgtgccagctgccgctgctagcgctgccgtggccccttgcagcccctctgcgtcctgtggtgctgggacagagttatcccagggctgtctccttctagcccacttcttccagaggggcttctcccttcatacaggccaggcatttttttcctctggattcaaacaggcgaccgtgaccctttt

SEQ ID NO: 3396 - DNA, 1693 bp, Cricetulus griseus
  modified_base (88)..(88): a, c, t, g, unknown or other
gaagaagtgaagcgtatgttgatcgggctggcaagagatcttcagggattgcctttgcactgaacacaaagaccagctacaccatgcngtttgactggatgtatccagcatatctcccagttcttcagagagctattgagcgatggtatggagaaccagcatgtactactcctatcttaaacttttggcagaactgatgcaaacaggtctcagcgtttgaattttgatgtatcctctcctaacggaattcttctcttcagagaagcgagcaaaatgatttgcacttacggaaatcagatcctgactcttgggagtctctcaaaaagatcagatttatccaatgaaactcaagggcatctccatctgctattcagctctcaaatctgccttatgtggaaattatgtcagctttggcgtctaagaagccgcttcgatgcagagagtctatgcaggctggccagaggctgttacactttatgcaacaaaacccagatgtgctgcagcagatgatgtctgtccttatgaacaccattgtctttgaagactgtcggaaccagtggtcagtatccaggcctctcctggggctcatcctgctcaatgagaagtatttcaatgagctgagagcaagcctgataaacagccagcctctccccaagcaagaagtgcttgcccagtgcttcaggaacttgatggaaggagtggaacagaacctgtctgtcaagaacagagacaggttcacacagaacctctctgtcttcagaagagatgtggcagaggccctgcgaagtgatggccatgcagaactatgcagcctggacatgatgagctgacctggctcctgaacatgtgctgtgcggcttttgtcaagcgactgcaaggcctgggtcccggactgcaatgctggccagcccagaagaatgtaacaagcaacaaaagccctacatttttataagtctgacctaattataaaaatgtatgatagtgcacataccatgtaaattcagtattcaaagcagaacatgtttccagtctatctgggttcccacaatgttgaaaggtctggaaactatatttaaccaaagaacataataaaccaagctagcacctagtttatggttctaagatcaaggttgtcaatttgaagatgcagccctcagtgtgggtcctgggttgagacaagtgccatttgaacgtgttgaattagtagttcttacatctggaaaatgccccaataaggactctgggctgtgggcatttagaaggagcctgggaacgctataaaacctcccccaggactgcacaggggcctctctgcctcagcaacatctgataaagttgagagacagtaacacaattaaatgacttacaaacaatgtttgctttccactggcataaatctgaagtggctcagtctagaagaattaagctgtgtggttgctgcctgcagaaagatgtctttaggactctggaagccccagtaaggagttctgggtgcaccagccttccacactcttaaccactgttggattgagacttcatccaaacatagaaaatgaagacctttacagtttgtgacccatcataactaaactattaatctgaaattgccactgtcaaacaggcttcctatctcagtgctctgtctgtgtggttcaggcttacaataaacactgtgccattatttctgataaga

SEQ ID NO: 3397 - DNA, 1693 bp, Cricetulus griseus
aggcatgctcaagagtgcagcagccatctcggtgcacctggtgtggccgctctggggaaggaaggctggagcctcactcacccggtgtttgcaccagactctcaccatggccaaacagctgcaggctcgaaggctgaatgggatcgatcacaacccctgggtggagtttgtcagactgtccaaagagtatgatgtcgtgaacttgggccagggctttcccgacttctcacctccagacttcgccgtgcaagcttttcagcaggccaccagtggggacttcatgctcaaccagtacaccatggcatttggttacccaccactgacaaagatcctggcaagtttctttggcaagctgctgggacaggagttggacccactcaagaacgtgctagtgacagtgggtgcctacggggccctgttcacagctttccaggccctcgtggatgaaggtgacgaggtcatcatcatagaacccgcttttgattgttatgaacccatgaccctgatggctgggggtcggcccgtgtttgtatccctgaggccgtgccctgctcctaagggacaattggaatacagcaatgactggcaactggaccccacagaactggctagcaagttcacacctcgtaccaaggccctggtcctcaacacacccaacaaccctttgggaaaggtgttctctaagatggagctggagctggtggctgacctgtgtcagcagcacgatgtcctgtgcatctctgatgaggtctaccagtggctggtctatgacgggcaccagcacatcagcatcgccagcctccctggcatgtgggaacggaccctgaccatcggcagtgcaggcaaaagcttcagtgccaccggctggaaggtgggctgggttatgggtccagataacatcatgaagcaccttcggactgtgcatcagaactctgtcttccactgtcccacccagggccaggccgcagtagcccagtgctttgaacgggaacagcagcactttggacagcccagcagttacttcttgcagctcccgaaggccatgcagctcaacagagaccacatgatccgtagcctacagtcagtaggcctcaagcccttgatcccccagggcagctatttcctcattgcagacatctcagacttcaagagaaagatgccggacctgcctggtgttgaggatgagccctacgacagatgctttgccaagtggatgatcaaaaacaagggcctggtggccatccctgtctccatcttcttcagtcagcctcatcagaaggactttgaccactacatccgcttctgttttgtgaaggatgaggccacactccaggccatggatgagaggctgcagaagtggaaaagagagctacatccctgagacgcctcaatcccgccctacacagtgaggcttagctgtgccctatcacagaaatagcactggagggcccagctctgtgactgggcatgcatccaggaaggaggccattgatttggtggttttggcaatctttccccacagggtctggactgctgtcttggattggggactttcattctactcctctataggttactttagggtcgtggttatttcttatctctctgcctgggacagtgcaggatggagtatcaggcatggagcccagcctcatcctcagcctttatgttattagaaaaaaaaaaaaaaaaa

SEQ ID NO: 3398 - DNA, 1693 bp, Cricetulus griseus
gtggaacttacctttgagcaacaggtatatcctacagccgttcatgtgctggagacctaccatcctggagcagtcatcaggattctggcttgttcggcaaatccctatccccaaacccccagctgaagtaagatgggagattctttggtcagagagacctacgaaggtgaatgcttcccaggctcgccagtttaaaccttgtattaagcagataaatttccccacaaatcttatacgactggaagtaaatagttctcttctggattattacaccgaattagatgcagttgtgcttcatggtaccaaggacaagccactgctctctctcaagacttcacttgttgacatgaatgatctagaaggtgatgactatgaagaaaaggacggctgtggaatagatggtcttaacaaaaagtttagcagtgctgccctcggggatgggccaaataatgggtattttgataaactaccctatgagctcattcaactgattctgaatcatctttcactaccagacctgtgtagattagcacagacttgcagacttctacaccaacattgctgcgatcctctacagtatatccacctcaacctgcagccatactgggcaaagctagacgatacttcactggagtttctacaggctcgctgtgctcttgtccagtggcttaacctgtcttggactggcaacagaggttccatctccgtgccaggatttagcaggtttctaaatgtgtgtgggtctgaattggtacgccttgagttatcgtgcagccactttcttaatgaaacttgcttggaggttatttccgaaatgtgcccaaatctacaagacttaaatctctcatcctgtgataaactgccacctcaggctttcggtcacattgccaagttatgtagccttaggcggctcattctctatcggacaaaagtagagcaaacagcactgctgagcattttgaacttctgtgcagagcttcggcacctcagcctgggcagctgtgtgatgattgaagattatgatgtgatagccagcatgataggagccaagtgtaaaaacctccggaccctggatctgtggagatgcaagaatattacagagaatgggatagcagagttggcttctgggtgtgtgcttcttgaggaactggaccttggctggtgccccacacttcagagcagcactgggtgcttcaccagactggcacgccagctcccaaacttgcagaaactctttcttacagctaacaggtctgtgtgtgacacagatatagaagaactggcatctaactgtaccagattacagcaactggatatattaggaacaagaatggtaagtccagcgtcattgcgaaagctcctggagtcttgcaaagatctttccctcctcgatgtgtccttctgttcccagattgataacagggctgtgttagaactcaatgctagcttcccgaaagtgttcataaaaaagagctttactcagtgacttcataactgtcctgtcactacaatcataaagaatgtaaagaaatgttctttaaaaatactgcaggcacttttcttttaggaatgtgtgactcgtgatgttattttgaattatgttggtcagtggtatgctttaatcaataattgtatattagaggaataatatggaaatactctaatttattttaaaggaatactttgaacaata

SEQ ID NO: 3399 - DNA, 1693 bp, Cricetulus griseus
gtctgctggggccgacttgggttcgtcgcagccatggggaagcgacaacaccagaaggacaagatgtacatcacctgcgcggagtacactcacttctatggtggcaggaagccagatatcacacagacaagtttttcgccgcttaccttttgaccactgtagtctctctctgcagccttttgtctacccagtctgcaccccggaaggtgtcgtctttgacttgctaaacattgttccatggcttaagaagtatgggaccaatcccagcaatggagagaaacttgatgggaaatccctgatcaagctgaactttgcaaagaacagtgaagggcagtaccactgtccagtgctgtactctgtgttcactgacaacacacatattgtggccatcaggacaacaggcaatgtctacacctatgaggcagtggagcagctaaacatcaaggccaagaacttgagggacctattgactgatgagcccttttccaggcaagacatcatcaccctgcaggaccccaccaatctggacaaattcaatgtttccaatttcttccatgtgaagaacaacatgaaagtcatagatccagatgaggaaaaggccaaacaggacccatcttattacttgaaaaatacaaatgctgagacccgagagacactacaggagctctacaaagagttcaaaggagatgagattttagcagccaccatgaaggcacctgagaagaggaaggtggaccaactgaatgctgcccactattccacgggaaaggtcagtgcgtccttcacctctactgccatggtacctgagaccacgcatgaagcagccgtcattgatgaagatgtactgcgctaccagtttgtgaagaagaagggctatgtgaggctacacaccaacaagggcgaccttaacctagagctgcactgtgacctgacaccaaaaacctgtgaaaacttcatcaagctctgcaagaaacagtattatgacggcaccatctttcacaggtccatcaggaactttgtgatccagggcggtgaccccacaggtacaggcacaggtggagagtcctactggggcaagcctttcaaagatgagttccgccccaacctctcacatacaggccgtggagtgctcagcatggccaactcggggcccaacaccaacaagtctcagttcttcatcacatttcgctcctgtgcttacctggataagaagcacactatcttcggacgggttgttgggggttttgacacactgacagctatggagaatgtggagagtgaccccaaaactgaccgtcctaaggaggaagtgtgtatatgtgcaaccacagtgtttgtggatccttatgaggaggctgatgcccagattgcccaagagcggaagaagacacagcagcaagtggatccagaggctaaggtcaagctgagccagtcccagcctgggaagcagggcccccagacataccgccagggggtgggcaagtacatcaacccagcagccacgaaacgagcagcagaggaagagccatcaaccagcacggctgtccccatggccaagaagaagcccagccggggctttggggacttcagctcctggtagcagcaggctggctcatgaatcctgttttaggcagtaatgacacttggattttgaaaactgcccgatgaggtcatcagaaaataaaggactttt

SEQ ID NO: 3400 - DNA, 1692 bp, Cricetulus griseus
ctgggactgtgctccgtggcgagctggataccatgtttgtgtggcagcgccccatgcttgctgtgccgatgctgccctagtggaaacaactccactgttaccagatttgcttgttggagtatgtgtagcttgtgtaatgttaataccagggatggaagaacaactgaataagattcctgggttctgtgagaatgagaaaggtgttgttccttgtaatattttggttggctacaaagctgtgtatcgcttgtgctttggcttggccatgttctaccttctcctctctttactaatgatcaaagtgaaaagcagcagcgatcctagagccactgtccacaacggattctggttctttaaatttgctacagcagtcgcaattattgttggtgctttcttcattccagaaggcacttttacaactgtgtggttttatgtaggcatggcaggtgccttttgtttcatcctcatacaactagtcttgcttattgactttgcccattcttggaatgaatcatgggttgaaagatggaagaagggaactcaagatgttggtatgcagccctattatcagctacagctctgaattatttgctgtctttagttgccatcatcttattctttgtctactacactcacccagccggttgttcagaaaataaggcatttatcagtgtcaacatgttgctctgcattggtgcttccgtaatgtctatactgcccaagatccaagaatcacaaccaagatctggcttgttacagtcttcagtaattacagtctacacaatgtatttgacatggtctgctatgaccaatgaaccagaaacaaattgcaatccaagtctactaagtagtattggcttcaataccacaagccctatcccaaaggacgggcagtctgtccagtggtggcatccccaaggaattataggactggttctcttcctgctgtgtgtgttttattcaagcatccgtacttccaacaatagccaggttaataaactgactctaacaagtgatgagtcaacactgatagaagatgggaatgccagaagtgatggatccctagaagatggggatgatgttcaccgagctgtagataatgagagggatggcgtcacttacagttactccttctttcacttcatgcttttcttggcttcgctttatatcatgatgaccctcaccaactggtacaggtacgagccttctcgtgagatgaagagtcagtggacagcagtctgggtgaaaatctcttccagctggattggaattgtgctgtatgtttggacactggtggcaccacttgttctcacaaatcgtgattttgactgaatcggacttctggcatgaaagtcccactttggtcattgtttatttgacattagcagtattcccaatttttgtaaagttgtatgtgtgttgtataactgtttatctcttgcatgaattagatttactctgccattttttccacatccttgctaagtgtattgatgatatgaatcgcaaagggagaattttgaataagatagtaaaattaggaaaggtggacaccgataggcatatcatctactctgtacatagaaaattaaagtgacaagaattcttgacagttggtttcaaaattgtgttagaccttatgctattttagaaacataactatggctgccttttgaaatacttggtgtgttg

SEQ ID NO: 3401 - DNA, 1692 bp, Cricetulus griseus
aggctgtagaatagagcacggcgaagggccgtgggctgggcaagattggagttcgcgcggctggcatcagtcagcttagcctcgcacgcggaaaacctgcagagaagaatccaagagtcagtttttcaaggagaaaaaactgggccaggagccaagatctgttctccaaaacgtaatattgtgtagatcatcttacccctagagatctcagtggcctcatctgtgaaaaaagaaaaaaagaaaaaaacaaaggtaaaacctttagcctgtctcaagatgaggtggaagatcatccagctacagtactgttttcttttggtcccgtgcatgcttactgctctggaagctgtgcctatagatgtagacaagaccaaagtacacaacactgagcccgtggaaagtgcaaggatagacccaccagacaccggactttactacgatgaatacctcaagcaagtgattgatgttctagaaacagatcaacatttcagagaaaagctccagaaagcagacatagaggaaataaggagtgggaggctgagcaaagagctggacttagtaagtcaccatgtgaggacaaaactcgatgaactgaagaggcaagaagtagcaaggctgagaatgctcatcaaagctaagctggattcccttcaagatactggcatgaatcaccaccttcttctgaagcagttcgaacacctaaaccaccagaatcctgacacatttgaatccagtgatttggatatgctaatcaaagcggcaactgcagatctggagcaatatgaccggactcggcatgaagagtttaagaagtatgagatgatgaaggaacacgagcgcagagaatatttaaaaacactgaatgaggaaaagagaaaagaagaagaatctaaatttgaagaaatgaagaggaagcatgaaaatcaccccaaagtcaatcatcctggaagcaaagatcaactaaaagaggtttgggaagaggctgatggattggaccctaatgactttgaccccaagacatttttcaaattacatgatgtcaacaatgatggattcctggacgaacaagaattagaagcactgttcacaagagagttggagaaagtgtatgacccccggaatgcagaggatgacatgatagaaatggaggaagaaaggcttaggatgagagaacacgtcatgaatgagattgataacaacaaagaccgattggtgactctggaagaattcttgagagctacagagaagaaagagttcttggagccagacagctgggagacattggggcagcaacagttattcactgaggaagaactaaaagaatatgaaagcattattgctatgcaagaaaatgaactaaagaagagggcagatgaactgcagaagcagaaggaagaattgcagcgccagcatgaccaccttgaggctcagaaacaggagtatcagcaggctgtacagcagctggaacacaagaaatttcagcaagggattgctccatcagggccagcaggagaactggagtttaagccacacacgtaaagtcctgacatctgccagaacttggaagaaaactgttaactcaacatctgtctcatctttcaacatcccttcttttatcttcactcaataaatactttaaagcacatttgaaataaaggaagagaccttttaagtgagaaaaaaaaaaaaaaa

SEQ ID NO: 3402 - DNA, 1692 bp, Cricetulus griseus
tggaccaggacctggttgtagccccagagattcttgtggattcttcggtgaacaacttgctgattggcaccacaggagtcatgttgcagagccctagagcaggtcatgacgatgccctcccctcctcgccgttgctacctccaatgcagaataacccaatccaaaggaactttagcggcctctcaggcccggacatgcacatggctgaaagcgtgcgctgtcatttgaattttgatcccaactctgcacctggggttgcaagagtttatgactcagtgcagagtagtggccccatggttgtgacaagtcttacggaggagctgaagaagcttgcaaaacaggggtggtactggggccccatcacacgctgggaggcagaggggaagctggctaacgtgccagatggttcttttcttgttcgggatagttctgatgaccgttaccttttaagcctgagctttcgctcccatggcaaaacacttcacactagaattgagcactcgaatggtaggttcagcttttacgaacagccagatgtagaagggcatacatctatagttgacttaatcgagcattcaatcagggactctgaaaatggagcattttgttattcaaggtctcggttgccgggatctgcgacttacccggtcagactgaccaatccagtgtcacggttcatgcaggtgcgctctctgcagtacctgtgtcgctttgttatacgtcagtacaccagaatagacttaattcagaaactgcctttgccaaacaaaatgaaggattatttgcaggagaagcactactgagagattgggagccctgcttcttgcactttggggttcagatacaagactggagtacagtttacagacttacatcgccattgaagtctttgctgccataactattttagtttttaatgtgtgaaaaaggggtcatcagtttgttcgggggtgggggaagtgtctgcaaggtgtcttgagtttattttgattctttggaaagggatatcttgaggatctagaagtgtgagttatctttctttaatgtgcagaataatcacaatgtgaatgaccagattctccgtaacgccccctcccagtcctttgctgctatccactgtgattcttatgcattaaagcacatttcctgtgtattcaaccctaagtaaaagttgaatgaaacataagaacaaaaattgctatgatgttaaatggtccaattgaataaacacatgggataaatattacatatacactgaaaaatgatttgttttcagtctcacactttaagaaaagagttattcaggattatgaatcgacaaaatcttggttaatggaatgcaaatatatcttgtataacacttttctaaattatttttttaaggatgtgataattgttttggttgtgagaagttgaatttttccgttgccttcatttcatcttgtggtttgtctcctttgataaatggccttacattaaaattgtaaacaaatatatacacaatttaaaaattgttgccttttctgtcattaaactctggtataaattggcataatttaaagccctgtaaagcccaaaccattgttagaacagtgagataaccctggtttcttatatgcagtgtatgtgtgtgtgtgtgagagagagtatgacagagagattgtttcagttaaatgttttatctatgatttc

SEQ ID NO: 3403 - DNA, 1692 bp, Cricetulus griseus
gggacagaatgatgccagcaacctggaacatcagtcttcaacttctaaacttctccccttttttcgttgggaaatactcttttccatctgttgcttattaatcctgtttacacattgggccttgagcaggaaccaggggtcagtgacgaggaggaggcctgggtgcttctggtacagcttgcagagccagcaccagagcccagctgatcacacgtcctagtgcctgcaccccaatggggctgagctttctgggacattattgacacatgtcttgggcagcatgcctgagtgtggaagccatagatcctatggatttggtctcttcccacagttctctgtaggttcagtatggccagtgtccatgttccttcactgtgggaacatgccctggggctgagtgcagaccccagtcaggacccctcccaccacaaaggcactcaggtggtgaaggggtctcatggacctgggttgggcccatgcaaggggctgtcctctaggccagagtccttggagtcaaacaattcagggaacagagttttggcctcttggtaaggtatgtcctgggatagtcctaaggtgcctcttgaacctcctgttctgtcaactgaaggctttgtcttcaagggtcccacagcaggaaggggccactgtcccatttctctgctttgaagggaactggctaactttttgtccatccaccccaccttgagtgcccagatgcttttacacccttgctgtgactggggccttgtctgcccctgtcaccccatgtcaagctactgaggttctcactcttgtttttcttctgttacatcattgttcactgtggtcatgaatcagctggttctggcagatgtttacctgtttatgtatatactccttttttgaactgtaaccttttcccttgagttacaagtcctgttatgtgcagctgtgtgactctagggacattgggagaaccagcagggtgggtactacccagaagtccctgctctacaagctcagactagattagtgtcacaaataaaatcttcctacctggggaaccaagagcctttccttggcacaagtcccaggtgccatctgctttttgggatgtgagccagtttcctttcttcataagagcaaggttgaaacctttttagcccttgccccttagagcatggaggtactggaaggtgaagttcatttcagagccatacaaaataatccccaaatcagcttcagaattagttcacaccactcattcccagtgtccccagaggctgtccatagcccaccctccaaggctgtttctgcaggacagagaaggcccaatagtcccatctgtgtggaacctgtagctctgggggaggaagtgtgatcatttgccccaccacttgtttgtacccgcctcttgtggttcctactgactcttctattgctgtgttccctgccgaatgggccattcagaatccaggaaggaaggtcttcccctctacatgcaaacatgggtgcttgtggctgctttcagtttggttttctgaggaaataggacaggatttggttttgcagagggtgcaagctcctttccatgcctgcccaggaggcatgcaaaggaagggcaagtttgagttctttgagttctactttgtatgttgttaagtaagtatctgcttggtactttgatttaaaataaaaacacttttgtaa

SEQ ID NO: 3404 - DNA, 1691 bp, Cricetulus griseus
tgagatccacaaactatgcgtgcagcctcataccgacgaggtggtgcctcaacactgacggaatccgagtctccctgaacactggagtcttttctcacaagtggccgagctctgccttgcatcgcctaccaagaccgtttgataatagatgtctgctggctcagcttctagttaactgcatactctccaggtctctgtgttttagcagcagcctgcactgcatcatctggcagtatgaaagctggtcagcagggaagaagttccagtttggctactctgtatcttgcacccaagaatcagagtgagaggtttgctttccttacagagtggtacgatcccaacgcctcactgctccgacgctacgagcttctgttttaccccgcagatggaactgttgaaatgcatgatgtaaagaatcgtcgtaccttcttaaagcggaccaagtatgacgacctgcgcgtggaagatttgtttataggcaacaaagtcaatgtcttttctcgacaactgctgttgattgactatggggaccaatacacagctcgccagctgggcagtaggaaagagaaaacattagccctgatcaaaccagatgcagtatcaaaagctggaaaaataattgaaatgataatcaaagctggatttactataactaaactccgaatgatgacactttcaaggaaagaagcaacagactttcttgtagaccaccactcaaagcctttttataacgaagtgatccagtttattacaagtgggcctgttattgccatggagattttaaaagatgatgcgatctgtgagtggaaaagattgcttggacccgcaaactctaacctagctcatacagatgcccccggaagcatcagagccgtctttgggacagatagcataagaaacgcggctcatggccctgattcttttgcatctgctgccagagaaatggaattattttttccttcaagtggaggctgtggaccagcaaacactgctaaatttaccaactgtacctgttgcattgtgaagccccatgccatcagtgaaggactgttgggaaagatcttaatagctattcaaaatgcatgttttgaaatctcagcgatgcagatgtttaatatggatcgggttaatgttgaagaattctatgaagtttataaaggtgtagtgcctgagtataatgatatggtgacagaaatgtgctctggctcttgcgtggcaatggagatccaacagaacaacaattctaaaaagacttttcgagaattctgtggacctgctgatcctgaaatcgcccggcatttacgtcctaagaccctcagagcaatctttggtaaaacgaagagtcagaatgctgttcactgtacagatctgccagaggatgggctcctagaggtccagtatttcttcaagatcttggataattaacactacagagaataaagacgacacagactgagacactcagacaagcgagtcatacacgtgaggaatgtgttcattcttttattgtccgttgttttaacctgactgacacaagatcaacaagagcactgtactcctggcaactattacatatgttagaacatggatttgcactgtagacaacatttaacaccagtctatggggtactgcattgctttttataaagttcaaaataaagatttttattttcaaaaaaaaaaaaaaaaaa

SEQ ID NO: 3405 - DNA, 1691 bp, Cricetulus griseus
  modified_base (1353)..(1353): a, c, t, g, unknown or other
cccgggaggtgaagctccttcagttaacagtgatggatgtgatgctgagccgagtactgtctgctgaaactgaggccctcgcaaaggaggggtacagaaagctgactgaaggccttttgcagtccgctgaagtcgattccaaactgatctggatgctccagaattccgacaagttgatgtctcacttggctgccaagtgcctctcatcgctcctctatttccagctgagagcgaagatggcattgagtaatccctggatcactttttgccaaaagcatctctctgaatcccctgagagtagagaagcagtgcattgcctctggattcttacagttgtaataaaagaaatctttaaagatacacattcagcattttggaaacttccagaatccctctaacgtagtcaacagcctggtgtgcttcctggagctgcttgaacttctcacagcctccagaatccacctgaaactacactttaagagccaaaggatgctatttttgaaaccctgtgctctagatattcttgcctggcctattccagcttttgttaaaaggaaattggttatagtcatcaaaaagtgccttctaggtaaaatgggggaagacctctgccgtggatctgtgcctgccctgatgtcacctgaccattttctggacggtgacgtgctggccttggctgatgcacttctgcatgccgtgcgcctggggttgtggaaggacttgtctgtgtctggaaagccttcccgctttggaggggatgaagttcaacctggatgccaaccaaggattggccctgattacgtcaccctgagagcagcaagcttgattacagtgaaatccttagaaatcaagttccagaactgtacgtcagccgccgaaatgagagctgacttgcagaagttcatgtccgagttactgaccttcttgaagtctcaccttcggcgccctctacgattatacaacccatgtgaatggctgttcagggtcttcatagagcaggacgatgacatggtggaggctgccaaagcgtccctgagcatctacctccagctgaccagaggacaggatgacacttctggaagactgacccaagaaaatgaagcatggatccactacacacatagaaatggctgtaatccacactgtattttcttattcttattaaagaacatagtgtttgattctacagttcttcttgacttcttgatttcctccgaaacctgtttccttgagtattttgttaaatacttaaagttactgcagagggactggggtcactttctggccatctgcaagttctttgatgcagccaaattacaatgtggagtacatactcatggtgctgtcaccctnacttgtccaagactcaagagccagccacacaatacagcatgctctggcttctcctgttggccacagaaatgcttgcccacaggtctcctgggcttccaatgcctcctctgaaccccagagccaggtggtgatggccaggcaagctcacacagtgccagctcatggcccaccctcccagaccccactgagtctggtagattatgagagctctgaagattctgatgaggaagccacaaatcagcatttagcaaactacagacagacatcttcacatcaagaaatgagcagggaaactcaaggcctgcctagaacaagtcagaatcgaaaagaacgtagcc

SEQ ID NO: 3406 - DNA, 1691 bp, Cricetulus griseus
aaccgaggatggatggaaaagatgtgactcttgtagccaagagctccaaagtgagaatggccagtacaccatcaaccacagcattattttgaataatggtgaagaagaaatattcaataatgagtgtgaatatgcagccaagaagaggaagaaggaacattttggaactgacacagctgctcacagtttttatcgtgaaaaatggatctatgtccataaagaaagcacaaaagaaagacatggctactgtaccctgggagaagccttcaaccggctagacttctcaagtgcaattcaggatattagaaggttcacatacgtggtcaaactgctgcagctgattgccaagtcccagctgacctcactgagtggagtggcgcagaagaactacttcaacatcctggataaaatcgtgcaaaaagttcttgatgaccatcagaatcctcgccttatcaaagaccttctccaagacttgagctctacactttgcatccttgttagaggggtggggaaatctgtcttagtgggaaacatcaacatttggatttgccgcttagaaactgttctcagctggcaacagcagctgcagaatcttcagatgactaagcaggtaaactctggcctcacactcagtgacctgcccttgcacatgctgaacaacatcctgtaccgtttctcagatggctgggacattgtcacgctgggccaggtgacaccaaccctgtacatgctcagtgaagacaggcggctgtggaagaaactatgtcagtaccactttgctgagaagcagttttgtagacacttgatcctttcagaaaaaggtcatatcgaatggaagttgatgtattttacacttcagaaatattatccaactaaagagcagtatggagacactttacatttctgtcggcactgcagcatcctcttttggaaggactcgggacacccctgcaccgctgctgaccctgacagctgctttacacctgtgtccccccagcatttcattgacctcttcaagttttaatggtgccctcagccatgtgcccttgtccgcagttgtcccttgtgctctctgtgtgtcgtgtagttggtgtaagtattctttgacacaaagtgatgacagggtctgtgactgactgtacctgtgcggcccttcttccggaagaaccccgagaggacacggaagacgctctggcagttgtgcggcatcagtgagagtggacatctcaaagccactcacgcttctttcctgaaactcttctcagcatatcaaatttgcaattttgtatatttttaaatctggatcagaaaaggttttggatattcagccccacattctgtgttgaactgacacaaacaacagaaatatgtttcttagttgtcaaatgatagttttccatcttctaataattgggatgaagaacaaaacagttggtccttgtaaatacattatgcagaatatttattttcttaaaatgtattttcacaacctctgtggctgtgcccaaatgagtcctcattgaataccagatggaacccctgccatgaggccatcatacatccttacatggatgtgggctccaaaccaccacagagcctctgccaaggagttggaaacagtccagagaggcctgaacttgatgtgtagaaattactttcatgagtaaagtaataaaccatgtttatctact

SEQ ID NO: 3407 - DNA, 1691 bp, Cricetulus griseus
cgccatgctcggtgcctggcgtctcctcggcgctctgcgcctctgctcctctgtttcctgccccaggcccgcgcgtctgccaaactgcgcgtgcgggacgccctcggggtacaggacgcgagtggggagtgcgtaacggtgcagggatgggtccgttcagtcagatcccagaaggaagttctgttcctgcatgtaaatgacggctcctctttggaaagccttcaggttgttgctgattcaagctttgatagtagcagtgaagctacagctgctattcattcctactttaaggacaatggctttgtgcacattcatacaccagtaatcacatccaatgactgtgagggagctggagagcttttccaagtggagccttcaagcaaaataaaggtacccgaggaaaatttcttcaatgttcctgctttcttaactgtctcaggacaacttcacctagaagtgatgtcaggagcttttacccaagtatttacctttggtccaacattccgagctgagaattctcaaagccgaagacacctggcagaattttatatggttgaagcagagatttcttttgttgaaagccttcaggatctcatgcaggttatggaggaactcttcaaggctaccactgagatggttctctcaaattgtcctgaggatgttgaactgtgtcacaaattcatagctcctggtcagaaggacagactagaacatatgctaaaaaacaacttcctaatcatttcttatacagaggcagttgaaatcttaaagcaagcaccccagaacttcacctttacacccaagtggggtgttgatctacagactgaacatgagaagtacctggtgaaacactgtggcaacatcccagtctttgtcattaactacccgttagcactcaagcctttctacatgcgggataatgaagatgctcctcagcacacagttgctgctgttgatcttctggtccctggagttggggagctctttggaggaagcctcagggaggaacggtaccacatcctagagcatcgactagccagatcaggacttaggaaagcctaccagtggtacctggaccttcgtcagtttggatcagtgccacacggaggctttggaatgggatttgaacgttacttacaatgcatcctaggagttgacaacatcaaagatgttatcccttttccaagatttactcattcctgtcttctgtagctgaaagaaaatattccttttcagggtctgaattgattaatgaagttgctgttctgaattgaagcagtcttcattgggtgatgaaaagaaatcatatttaataactgttgatctttagttataaaagttaaggacatattagtcattaaactcttcagtcaccattctagttcatttatattaaatatttataaatactgtaatagtcaacaaaataggttttttattgatacctttgaagttatttttaaatttgtcttgttcctttcccagtgaaatttggaagaaaggtatctttaatccaagatggggatagaaatatggccaaacctatgcaatggataattctccagtgtggtgtaatctagtagaatgagacaagtgccaatttgggagctagagatctaacagttccaatactttggacaaaaccacttatttgtgtaaactgaagcatcaattttcttcagagctgttac

SEQ ID NO: 3408 - DNA, 1691 bp, Cricetulus griseus
gagacgctggaggcccttaacgccgcggtgggtcctggcagccccgtgtggttcaaggaaacgaacgcccggcacctgcgtgtccgagacttcttggcgccgcggagcgcgctacaggcgcgcttcaggggacgggcaggtgccggaacgcgtgttcagtgcggtcacctgcctgcagggccccggggtggcccccgtgctgcgctgcgcgccaacacccgcgggtttatcgctccagttacagcgccccgctgtcttcgagcgtgtgctcggggccctggcctcctacgctactcccgccaagcccgcctcgccaggcccgcgacttgttctgcattgccccgcactgcgctgcaacccgagcgcactccgcctgagccagctgcgtgctgtgctcgtggccgatcacctaacgcggacgctgcgagctcacggggtatgtgtgcgctcagtgcccacggtgcgggacccgcacatggcaacattccttcagaaacttcgggtggactggcccaccgcctcgaagagcacctcgactgaaaccctgaggacctgtgtgcttgcagaacttaattctgtttctgaggaggagacactgccccctggcgtcctgggccggctgtgtctgaaggaactagtacagcggagacctgtcgcgggctatgaccccggcatagacaactgtttggtgactgaggatatgctctctgtgctatcagagctgcaggaggctgtgcaccattggccagagggcggctacccaggcctggatggggatccagactctggtgtagagggctgcatggttgttcatgtggtgagttgtgaggaggcattccagcaacaaaaattggatctgctttggcaaaagttggatgaccaggctcctcacaagcagaagcacctggtctgtggcccagtgaaagtagctggtgtacctggcacccagatgactgcccccgagtactacgagctcagatatgctcaggtgtgtaaggcctcagcactgaaacatggaggggacctggcacaagatccagcatggaccaagaactttgatgtcctgtctgtggccaccatcaaatttgagatgctaagcacagctccacagaaccagctcctcctggccgacagcaccatctccacaaagggcacaaagagtggcacttttgtcatgtataactgtgcccgccttgccacactcttcgagggttacaaacaggggatggaacgaggtctgtatcccgcttttccacttgtgagcagcctggacttctcactgctccatgatgagggagagtggctgctgcttttcaacagtgtccttcccttcctggacctgctgagccagtctgtgagcctggccagcaccccagggctccacatcactgtccgcacggaaatggtgtgcaagttcctggtgcaactcagcatggatttcagctcatactataaccgagtgcacattctaggggaacctcggccacacctctttggtcagatgtttgcccgcctacagctactaagggcggtacgtgaagtgttccacacaggcttggctctgctgggcctccctccactgagccacatctaagggcccagtaactgggaatgtttacaaaatcatcaaaccggggaaaaaaacaaacctcacagatgttgggcaacttaaaaccaaaataaataagttt

SEQ ID NO: 3409 - DNA, 1690 bp, Cricetulus griseus
ggttgcagctgatcagaagcatgttcagcattaaccccctggagaacctgaagctctacatcagcagccggccacccttggtggttttcatgatcagtgttagcgccatggccatcgccttcctcaccctgggctatttctttaagatcaaggagattaagtccccagagatggctgaggactggaatacttttctgctgcgctttaatgatttggacttgtgtgtatcagaaaatgagacactgaagcatctctccaatgacaccaccacccctgagagcaccatgaccattgggcaggccagatcgtccacccagccaccccaggccctggaggaatcaggccccatcaatatctcagtggccattaccttgaccctggaccctctcaagccctttggagggtactctcgaaacgtcacacacctgtactccaccatccttggacatcagattggactctcaggcagggaagcacacgaagagatcaacatcaccttcaccctgcctgctgcctggaatgccgatgactgtgccctccatggccattgtgagcaggtggtgtttacagcctgcatgaccctcacagctgcccctggagtcttccctgtcactgttcagccacctcactgtgtccctgacacatacagcaacgctacactctggtacaagatcttcacaactgccagagatgccaacacaaaatatgctcaagactacaatcctttctggtgttataagggagccattggaaaagtctaccacgctttaaatcccaaactcaccgttattgttccagatgatgaccgttcattaatcaacctgcatctcatgcacaccagttactttctttttgtgatggtgataacaatgttttgctacgcagttatcaaaggcagacccagcaaattgcgtcagagcaatcctgaattttgtcctgagaaggtggctttggctgatgcctaatctcacaactctccattttctgagagaccaagaaccatgatcattgcctgctgaactggccagggcctggccactctgtgaatatacgatcttgcaatgttgggttattccagccaaagacatttcaagtgcctgtaactgatttgtacatatttataaacattgatctggaaattggtcctgtgatgcacgtgctttgccctggatgcagcctgaccctatccccctcactgggggcaaggagggcacggacatggggcctagtcctcagctgcttcttgctggtaaatttcaggactggagtgtcagactgggccactggagacctccgaccccagcagcactggcttatcctcaggtgtcctagactgggggtgcagtcagaagtcagtgacttcctgtaaaatggttgtttcagatcatattgatctctttccttttgtcccttcaccatatggtatgacttgaatcagttttgattctatttgtaagttctcatcatttggaacctgatgtttctgttgtgttcttggcagtgcaaggaacccagcctcctgtgttttgaccctcctgcaggcactttgggacttgaggacagcagatccatctcccgtccctttctgcatgatggtctagctaatctctgatggcatccctccctcattgattttctgtgtttgaagtatgtgcatatgtgctttacagaataaaacatctagggttta

SEQ ID NO: 3410 - DNA, 1689 bp, Cricetulus griseus
gcagacggccagaagagcagcccagccgagcctcgcggggtcactccagcccaaggaccccgggtgtgggatccccgaggcccccaaccacctcccaggacccccaggaggacgcgccgcgctccctgctgccgccgcgcgcgttccaggtctctggaggtcacgggcacaatgctttgggtcctggtgggggctgtcctccctgtcatgctgctggctgcccctccacccatcaacaagctggccctgtttccggacaagagtgcctggtgtgaagccaagaacatcacgcagattgtgggccacagcggctgtgaggccaagtccatccagaacagggcgtgcctaggacagtgcttcagctatagcgtccccaacaccttcccgcagtccacagagtccctggtgcactgtgactcctgcatgccggcgcagtccatgtgggagattgtgaccttggagtgtcctggccacgaggcggtgcccagggtggacaagctggtggagaagattgtgcattgcagctgccaggcctgcggcaaggagcccagtcacgagggcctgagtgtctatgtgcagggtgaagatgggctgggctcccagcctggaccgcacccccacccccacccgcaccctggtggccagaccccagagcccgaagaacctcctggagcccctcaggttgaggaagaggttgctgaggactgagggcccccaactcttcctcccctcttgtcccctgtggaatgttgggtcccaccctccagggaagagggaggggagaggcagaagccccctcatcccctttggcactggatggacttggaatgctgcccggttgtcatggagatctgaagggaggggctggagccaagctgcacaatttaatatatgcaagaagggggaggaagaagcagacatcctcagggctcttttttggaaggtgaagtgtggtcttttgctttcgctgaggatgagaaagaccctcaaatagggcaggtccaggccagggtccacacaactcctcatggggcaggatccccagggatgggcagagggtgggtaccatggcagccggagggtccaggctgggaagactgctggcagaggcaggaatctccaaccctgtaggtttccctaaaggcgtccttcacaccccacatccaggaaaagcatcccgttgaatggagtgtgttaggagtcaggctggggcaggaccccgcttactcaggtgccagagtgtcactgaagaagaaagaacatccttcctcagagatcttggcactctgcctgccatgttctagaccctttgggaagcagatgcagccagccccactgtctttggggctggtttttctgaacgaggtggtgcttggtttatctccatcacctgggaccatagtggacaggaggcccctgcatagggcccctgctgaccttggctttctctagctcccattctcccctttcctccttcccggctgcactttaacactagggctgggcaggtagtgaggaagagccctctgtcccccgatactttggcaccattgtttgtgtccaggggctgccagctcccctgcttgggggtgccccagcccatggctgttcgacgagagccttagagcttgtaactagtagccatctcccccaaaccagagtgttttcatgaataaataccttcaatgc

SEQ ID NO: 3411 - DNA, 1689 bp, Cricetulus griseus
aggttctccaaaccagcacccatgttcctagatgactcctttcgaaagtgggctaggatccgggagtttgtgccaccttttggaatcaaaggtcaagacaacctgatcaaagccatcttgtcagtcaccaaagagtaccgcctgacccctgccttggacagcctccactgccgccgctgcatcattgtaggcaatggaggggtccttgccaacaagtctctggggtcacgaattgacgactatgacattgtggtcagactgaattcagcacctgtgaagggctttgagagggacgtgggcagcaagaccaccctgcgcatcacctatcctgagggtgctatgcagcggcctgagcagtatgaacgagactctctctttgtccttgctggcttcaaatggcaggacttcaagtggctgaagtacatcgtctacaaggaaagagtgcgtggattcgcatcctcaatccatacttcatccaggaggccgccttcactctcattggactgcccttcaacaatggcctcatgggcagggggaacatcccaacccttggcagtgtggcagtgaccatggcattacatggctgtgatgaagtggcagtcgcaggctttggctatgacatgaacacacccaatgcacccctacactactatgaaactgtgcgcatggcagccatcaaagagtcctggacgcacaacatccagcgagaaaaggagtttctacggaagctggtgaaagctcgcgtcatcactgacctaagcagtggcatctgaatgggcccaacactgggccatagaggctcacaccaggaacaagcagctgccacccacacaggagtcttccgacccagagaaggacagtgccaaggggcccgagggccagtgaggccttggcaaggcaaccgaagctgtgcctgttccaggccaacatcaaagaccagcactctgcctcaaagcctgggtccgtgaagccagagggctaggaggccactggctgtgaccagcaggcccagcatgcaggaggtgggacatttgggagcaagagtgctgccagaatcatttttccaatcagtgtttggtgtattatcatttcgtgaatttgggtgtggggaggggagggataatttatttttaaataagatgtcacatttggtccacatgctgtgcagaaagaggcccactagagggcccaccaggcagtggtaccagtgagatccctgaaggatggaagtgccagaccatgcttcagggacacagggaggtggatagcatttcatctagtctgccatctccagctcatgatacactttggcctttcctttggggggagatggagtactccctctccaccagcccccagtgtcccacaggggaaacccagagccatccctttaaagccaacaggacagctcttggacaggagcagagagaattcaggaggcaggcccagcccagcctgaggggaatggctcctctccatagctgtccctgatccatgggagcagtgctccttcctgacaaactgtcaggtggtctgggtttcttgatgagactgccggctccatgggtcctacccaggaccagagggaagtgaggctcaaggaccttacccaggctgcagcagctgtcccaggcagccctcatggaagcaataaagctctcccctgaacctaaggaaaaaaaaaaaaaa

SEQ ID NO: 3412 - DNA, 1689 bp, Cricetulus griseus
gtcctcgcgccccttttcctccactttcctcctctcccgggctgagggagccgctctccgcgcggtgcattgtgggcatcgaggtcgagcccgtcgctgccgtcgccgccgggggagcaagaagaggctgcgaccgggcagaaaacgccggagtcgccgccggagaggagtcgactggcccgccgccgccccagtgaggcccgcccacccgttcgcctggccccctgccccggtcaccatgcagcctgcttctgcaaagtggtacgatcgaagggactatgtattcattgaattttgtgttgaagacagtaaagatgttaatgtaaattttgagaaatccaaactcactttcagttgtcttggaggaagtgataattttaagcatttaaatgaaattgatctttttcattgtattgatccaaatgattccaagcataaaagaacggacagatcaattttatgttgtttgcggaaaggagaatctggccaatcatggcctaggttaacaaaggagagggcaaagctcaattggctgagtgtggacttcaacaattggaaagactgggaggatgattcagatgaagatatgtccaattttgaccgtttctctgagatgatggatcatatgggtggtgatgaggatgtagatttacctgaagtagatggagcagatgatgattcacaagacagcgatgacgaaaaaatgccggatctggagtaaggaatgttgtcatcgccaggattttgagacagagaaataacttctgcaagatttcataattgagaaaattcctgagttgatagctctaaaggcagatgctgtgtttgccttctttaacccatttttctaacctttttttttttttttcttttttttcttttttttttttttttaaggtcttcactaagggttgataatgtaccattgtatggggcaatttaagtcagctaaggcaatatccttatgcatgaacatttcccaggattccatgaagcagttgaaatcctaggcagcaactgatagagcagctctgatgagtaaacatatttcacctaagtcttctttcttcataacagttacttatgtgttaggaagctctcagcttagggaaagaactagttttagatcctagaccatggacttgaagggggctgaaacaaattggctgatatcttaaactgataccctgccattcttccagtgtacctttcagaattattccactaaagtttatttttcaaaaaaaaaatgtactttacattattgtatgtgatcacttgtcagtgttcaagtgtattttagctaaaactagtgaatgccctaacttagatggtttttgaagcctatacatttggtattgtttggcccttgatctcttacatctcttagcatggaggacgaagaaagctgtacattgttgcttgagagtctgtacatgttagaccagatttgtatttgcactgtcagtatggcaaatgagtggaaaatgttaatacactattggaattttttatttcctattttgatttcagcttatgccctggctggaaaacctcaatttatgttcatgacagtggggatttttttaaatgtctacattctttctaataaactgttggaagatttcttggctctccttctaagttgtctggtttgctgtgatttcatgtatttaccacttactggaa

SEQ ID NO: 3413 - DNA, 1689 bp, Cricetulus griseus
gagcttgtggccagcctctgcagccctgaaacagtacccacgcgactttacccaggtgctgcagagctacacagctgctggctaccgagtcgtggccctagctggcaagccactgcccattgcgcccagccttgaggccgctcaacagctgaccagggacactgtggagcaggagctgagcctcctggggatgctggtcatgcggaacctgctgaagccacagacgactccagttatacaaactctgaggaagacaggcatccgaaccattatggtgacaggggacaacctgcagacagcagtcactgtggcccgaggctgtggcatggtgggcatccaggagcacctggttatcatccatgccacccaccctgagcagggccagcctgcctccctgcagttcttgccatccgagtcctctgcagtcatgaatggggctaaggccacaggctatcccatggagctggaaccccagtcccgtcacctggccctcagcgggcccacttttgctgtccttcagaagcacttccccaagctgctgcccaaggtcctggtgcaggccaccgtctttgcacgcatggccccggagcagaagacagagctagtgtgtgagctgcagaagctacagtactgtgtgggcatgtgcggggacggagccaatgactgtggggccctgaaggcagctgacgtgggcatctcgctgtcccaggcagaggcttcagtggtctctcccttcacctccagcatggccagtattgagtgtgtgcccactgtcatcagggagggccgctgttctctggacacgtctttcagcgtcttcaagtacatggccctgtacagcctgacgcagttcatctcagtcctgattctctatactatcaataccaacctgggagacctacagttcttggccatcgaccttgtcatcaccaccacgatcgcagtgctcatgagccgcacaggccctgcactgacattagtgcgagcgcggccaccaggggcactactgagtgtgcctgtacttggcagtttgctgttgcaggtggccttggtggctggcatccagctggggggctactttttggtcatagcccagccctggtttgtgcctctgaacagaacagtgcccgcacccgacaacctgcccaactacgagaacacagtggtcttctctttatctagcttccagtacctcatcctggctgcagctgtgtctaagggggcacccttccgccagccactctacaccaacgtgcccttcctggtggccctggcgctcttgggctctgtcctggtgggcctcatcctggtccccggcctcctgcaggggccactaggactgaggaacattgcggacagttccttcaagttgctgctgctgggcctggtcgccttcaactttgtgggagccttcatgctggagagcgtgctggaccagtgcctcccagcctgcctacggtgggtccggcctaaaagggtctccaagaagcaattcaagcagctagaacgggagcttgctgaacagccgtggcccacactgcccatcagctctttgaggtagtacaggcctggagaccatgctggacactggatcgcccccgccctgaactgtaactggacccatctctagagacagcacccatcacctcccacatctcctaagttggctgttgtcacattcctgcccgg

SEQ ID NO: 3414 - DNA, 1689 bp, Cricetulus griseus
cgcggcgccggttccgccccgtcgggtgtttgtggtggggctgcggagtcgccgatcccgccggaagcgccaggacaatggggacccgggacgatgagtacgactacttattcaaagtggtgcttattggggactcgggtgtgggcaagagcaacctgctgtcacgattcaccagaaacgagttcaaccttgagagcaagagcaccatcggcgtggagttcgctacccgcagcattcaggtggacggcaagactatcaaggctcagatctgggacactgccggacaggagcgctaccgtgccattacctctgcgtactaccgtggtgcggtgggcgcactgctggtgtatgatattgccaagcacttgacttacgagaatgtggagcgctggctgaaggagctacgggaccatgcagacagcaacatcgtcatcatgctggtgggcaacaagagtgacctgcgccacctgcgggccgtgcccactgacgaggcccgggcctttgcagaaaagaacaacttgtccttcattgagacctcagccttggattctaccaatgtagaggaagcattcaagaacatcctcacagagatctaccgcattgtgtcacagaagcaaattgctgaccgcgcagcccatgatgagtcccctggcaacaatgtggtggacatcagtgtgccacccaccacggatggacagaaacccaataagctgcagtgctgccagaacctgtgaccaccctgccccagcgtgcgtgcacgtcctcggcccttggccaacccctccagtgtcctcccggcccctcccttgtctctctaggacaggctgctcccaccctccaagtgagctcctcctgccagcccactggcccaggaggagcaggagtcaagtggcctctcctgtcctgcctgctcaagagaagctagaagccccttgcttatgtacctgctcttgggtattgtgggcatcttgactgggtgtggggaggttggtaggatggacagggccagccagaggtgaggaagatgagtggaaggagccggcttctgttttccctggcagactccagggagcgatcacctccttccctctctggccagttgacccagctggccatgcatccctaccccaaaccctcactaagctgatacccgaagagccaggcatcaggggctgggcaggtggacactctgggctctgcctcctgcctataccaccatagccagcgccagcacggcctccagcattcccaggcctgcgcactcctgctcctgcctgtagatttatgctgggagaagaccctcctgcccgcccctctccattctcctctgcacgcagcgctctcccctgcccgtccccccttctctgtcttgtctacctgtctggtcaggaacctgtctgcaagtgaagcaatatctccatgttttgtatatacaactgctcttgtagcctttggtttttgttattgtagagaaacacagattctttatacactttgtaaaatttacgccaaaccccagctctcgaactcttattctccctgtagcccctgcactgttgcccgttactaaaatgtataagccaacttctgtacagaaacctgccaaaataaaaatataaattaaaaaaaaaaaaaaagagagatcacctgcctttacctcccaagtggtgggattaaaggcatgtacca

SEQ ID NO: 3415 - DNA, 1689 bp, Cricetulus griseus
tcagaggcctgggtcgatcagttcacaaggtcaggaaacacgtctgccctggatgtagaatttgaacgagccaagtcagctatagagtctgatgtcgatttctgggacaagttgcaggcagagttggaggagatggcaaaacgggatgctgaggcgcacccctggctttctgactatgatgacctcacatctgcttcctatgacaagggataccagtttgaggaggagaacccctgcgtgaccaccctcaggctttcgaagaagggcttcgtcggcttgagggagggggacctgcccaatgccgtgctgctgcagtatctgggtaccacccaggctgagaatgagcaagagctcctggctggtgaagaaggggcgagtggggcaggactgggtcccagcaagcgtgtcttgggatccctgttgtctgactccctgtttcttgaagtgaaagagctcttcctggcagctgtgcgtctggaccctacatccattgaccctgacgtgcagtgtggcttgggagtcctcttcaacctgagtggggagtacgacaaggctgtggactgttttacggctgccctcagtgttcgtcccaatgactatttgttgtggaacaaacttggggccacactggccaacgggaaccagagtgaagaggcagtggctgcgtaccgtagagcccttgaactacagcctgggtatatccggtcccgctataacctaggcatcagctgcatcaacctcggggctcaccgtgaggctgtggaacactttctggaggccctgaacatgcagaggaagagccggggccctcgggggtgaggggggcggccatgtaagagaacatctggagtaccctgcggttggccttgtctatgttaggccagagtgacgcctattggggcagctgatgctcgggatctgtctgccctcctagctatgtttggcctgccccagtgacagtgggatgggctgccctgtgagtgtctgcctagaggggttctcgctctggatgtgactccctctcctccagtgggcctaccaaggggttgggctgatgaccacaagcggtacgacctctcaggagctgcctcgatgtaggggtgcatagtctgtgtcctaggtcctacataattgtagggagtgagctgtctctgtcccttggtaattcaagggctgtatatccagctaaagatctctttctgctcatcatgccctttcttggtgctgcattttgggtaggacccaatgacatagggaaattgttgtcatcagctgccatttatgttagggtctaacacatttgtaagtctctccttgcccttctcttactgggaattggtaagagtccagcttcctcgggcagtcgtgtgtaagagggttcactgttaccataagccttcttgaaacatttgtaggggacagcattgaaaaatcccctcccccatattgcctccacaaggtgaagatcaagggacactgatggaacagctggagtcttctccgctgtcctctgtgtggggagacacacacgcccccacaagtgactgctaagcctcttttgccttgtcttcaggagctaatgatcagatgtgttgtttttttaaactgccatgatcccaaggttccatcaatttattttctttgtatgcatatgtgtaaatgatttaaaataaaactgtaaaatatttg

SEQ ID NO: 3416 - DNA, 1688 bp, Cricetulus griseus
gaaacagaccatttgcagttatcttgattgtgagcgttcttgtgaatctgacattctaaagaataccaactataagggattttttcagctaatgtgcagtaaaagttgctgtatttacttccataaaattttgttggaaaaagttcaagaacttaaagtacccaggagaaaatgatcagagttttagtgggaaaaaatgtttgaaagaaggatgtgctggtgacatggtaaggatgctgcaatgtgatgtacctggaattgtcaaaattttgtttgaagtggtgagaaaggatgaatatgtaaccatacgaaaatttaggagcaagttaacaagaaattgatgtctctggaattaactgacactgatataagatcagaattcgaattttaaaaattaaacaacaaaaggttaaagcgtatttaaacaaactgaatgcagaaaccaatagagccttaacagctgaggtgtacttcttacagtgtcgtagagattttggtttactgcacctggagcagacagaaaaggagtgcctcaatcagcttgccagggtaactcacatggcggcaagcaacctagaatcacttcaattaaaggctgccgtggatagctggaatgccattgtggcggatgttagaaacaagattgcatacctcaggacacagtacaatgaacaaatcaataaggtgaagcaaggatttgccttgagtaccttgcctccagtccagccttcccccaccaccaccaagtcctgagatactgatacagcagttcttaggaagaccccttgtgaaggaatctttctttagacccatacttactgttcctcaaatgcctgcagtttgtcctggagttatctctgcagctgtacagcctagacccaccctgatgcctggtataacctttacaagatttctcaaatgattgagcccaagaaatctgagagtgaaggaaaatctgcagcagcagatgataagagtgcatcacccagccacacttcatcacagcctaaggctccccagacccccaaatcatcacaagattctaccacatgggaaggagacaaagatgtggataatgaagaggaagaagaggagccctgtgtaatctgtcatgagaatttgtctccagaaaacctttcagttttgccttgtgctcacaaattccattctcagtgcattagaccatggttgatgcaacaggggacatgccccacctgcagactccatgttttgctaccagaagatttccctggcccaccccaacgggcagttacccaagatctgatacaaggcaggtagctatacctaagatcagttttagatattgaaatttagttctgtctttttaatgagctaattgattgaatagtattatgcagcagtatgcatatgtaaacacatggcctgtaaagatgatccttggttcatatttacagtctcaattttattaattttcaaatgaaaggtttgactcagcaactattttttgtgtgtatttcagtgtaaatgtatctgaagttactgtgaatctctatttaaaacttctatgcctgtaattgtatgctaaacttctttttgtattttgaaaataaactgaaaatgtgaagaaaaatatttttaaaatgtcagcatatgagtgggtgagatgactcagcaggtaaaggtgcttgttgcaaagcctgatgacc

SEQ ID NO: 3417 - DNA, 1688 bp, Cricetulus griseus
agcaaagctgaatttccggttcagcccttcagcatgagaaggaaggttataccatctacaagacgcagctaggtgaggaccatgagaagaccagggagagctctgagtacctcaagtgcctgacccagcaggctgtagccttgcagcgcaccatgaatgagatctaccgcaatggctccagtgctaacatcccaccccttaagttcacagctcctagcatggccagtgtcctggagcagctcaatgtcatcaatggcattctcttcattcctctcagccaaaaagatttggaaaacctgaaggcagaggtggcacggcgacaccagctccaggaggccagcagaaacagggataaggctgactgatcctgagccagcaagagcccagcaagaggacatgggctcccctcagactgccaaggaggatccttctctaagcgtacagggataaaaaaaggagagaaacatggacagtcagcagccccattacccagtgatgcagacagactccaggagaagggggcatgccctgcagattgggagacgaagctagtcctccactttccacccttgccccacccccagtatttgcctggggccccagcctggcctgcctgcccccaaaagatagtttgcactggttcaatgaatattcaatgcagaggcctaattgaagagaagagaatgaagtgtgtaggcatcaactccagctaggggcaaatgccccccgcctcccgtcctcaagcaggtgtgtttgtccatgcctgtgggtgtcttgctccgtccttccagatgtacatagcccagcccagtcagttgtgagaggatgacgtgcagatgcgatttctcaggtcatttgtatgtttgacattacagctgctgcttttgttgccactacccccaggtccagcctggcttaaagtccaggttgaagtaaaaaaagatgggggcttttctgtgtcctgggaggggggagccggatccctggtagggtgcaaggtaagacctgcagtggctttactgtgattggacctggcctacctgtagcctcagggtgaggggatgcggcctgcagtggtggaccccccccatacatctatgtgcctggccttggccaagcgggaggcagcactgccataggctttgacttgccttcctgctcctataccccaggtgggcaaaacctagggggccaacagtctgaatgtatctttctccccattttaacctgagctgcctaatgcacagtgggggtagttacaggggcagggacccagggctgatcatggattccagggaaagtgccatgcacaggagtgatggtcacctctgtggagccaggctccttacttggtctttgccatatataagcacttctacaaagaggctctggggtgacagggctcctactacctgactgctatctctccctgcctgcgttgcttctctttgtctgctgtccctgaaggagatggccaccctttgagcctgggggagctgttctaggcagagcccctgcttggggttttgctggagctgctgatggatagtatctgtccagggaccttgtttcaaagggaatgggcgtaagccagcaaggcatccccacagttatcaagaacgttttcttgtttttaaaccatcacgtcttcatttcacattggaataaagtgagtttttgaaacctgc

SEQ ID NO: 3418 - DNA, 1688 bp, Cricetulus griseus
ggcggcggcagctgtgagggggttcccggaagatggtgctgattaaggaatttcgtgtggttttgccatgttctgttcaggagtattcaggtttggtactagctttactctgttgcagaagcgagtaagaatgaaactggtggtggagaaggaatcgaagtcttgaagaatgaaccttatgagaaggatggagagaagggacagtacacccacaaaatttaccacctgaagagcaaaagttcctgcatttgtaaggatgattgctcctgagggctccttggtgtttcatgagaaagcctggaatgcttacccctactgtagaacaattgtaacgaatgaatatatgaaagatgacttcttcatcaaaattgaaacatggcacaaacctgacttaggaacattagagaatgttcatggcttagatccaaacacgtggaaaactgttgaaattgtccacatagacattgcagatcgaagtcaagtcgaaccagcagactacaaacctgatgaagaccctgcgttattccattcagtcaagaccaagagaggccccctgggacctaactggaagaaggagctggcaagcgcccctgactgtcctaagatgtgtgcctataagctggtgaccatcaagttcaagtggtgggggctgcagagcaaagtggagaacttcatccagaagcaagaaaagcggatatttacaaacttacatcgacagctcttttgttggattgacaagtggattgacctgacaatggaagacattaggagaatggaagatgagactcagaaagaactagaaacaatgcgtaagaagggttccgtccgaggcacgtcggccgccgatgcctagatgagtcccctgtaggtcagagacattttcaaactgtctacggagtcaaggccaagtgaggggaacaagtgcagcaggtgacgagtgaagatgcagccagtgtctctcagtgttgatgtttccggtgtgtgcctgtatatatgtacatgcaaaacatggaagggatcagtacagtttctccaaagtgctgtacctatcttcagcaaaaatactaaagaatattttccatatatatacctggaacagattttaataatcatcattgtgatgcccttggtggataaatggactgccatgtggtgccatgtggtgccggctggcgtgcttcatgaatgccaggtgtggaccagtgtgtgtagcctttggttatgtttctgcttttttcaagtcgccccacattcacttgtaattcatcccatcagcaacagactcctacagaaagatgtcttcacattcttagatactacagtggatctggaaagtaaactctggatgtatttataactatttatttctgggtggccactatcttccagccaaatccaacgatatctgtcaagtaaagagtaaaattaaagctctttgctagtttgccctaggggtggggaaatcctttttttaaaattgccactttttattggattttttgtattttgaatttcaagtatttttctacatcaaatctagcaaaaaaacagtgatgacggtttgtgatttataataaacactagacaatattcaggctctggttaagcaaacaaggtgataaaagaagtacaccctcacggtattgtcggttgtgcagaggacttctgtggagttttgtttctggaat

SEQ ID NO: 3419 - DNA, 1688 bp, Cricetulus griseus
cagcggctcagctcctggagagagagttgaagaaaacggagggcagccacctgtgcctgctggctcccattaggtcggctcctgcagcggtgcttggcagccttggtgaaggccctgcccggcagagatcatgtattgcctccagtggttgctgcccgtcctcctcatccccaagcccctcaaccccgctctgtggttcagccactccatgttcatgggcttctacctgctcagcttcctcctggaacggaaaccttgcacaatatgtgccttggttttcctggcagccctcttccttatctgctatagctgctggggaaattgtttcctgtaccactgctccgattccccacttccggaatcagcccatgaccctggtgttgtgggcacctaacagctgccgaaatagctttctgaggaagcagaagacgggaggggagacattgacataggtcataaagcattggagtttcaaatcccgcagccctgcgggtgccacattcctaatggagccttttgacctgtgatgttttatccttataatgtgaataatggcactgaccggtgcttctgttgtagcgtcctgtagttgtgggtggtcttatggttgtgtattctgttaccatctgacccttggtatgacctgggcagatacaatgctagtctcattgtcacctccatgacccttcctcgtcaggatcttcctccgtccctccacagtcccttttcctggtttccccttggttctctcccacccctgtccttttggggggagcacctgtccaagacagggcttgtttttgcacttatctcaaatttgaagagattgctgacgcccgagagcctcgctttttcacccctctttccctgttgagcaggtgagacggaatcatgtctcaactgctcattgtccacaaacctccagtattttctctgcctcatttttaagaaagaagcaatggagagacatagttctttggcctgggtgtctggcctcttgccttccagcccagcctctctccctttgctcttcctcctgcctctctcagccgtcctaaggggaccacctcttgtctccagtgcatgctcttcaggagggaggtatgcagtattcttgtagacccagtggtccccagctgagggaacgggaaagtattatgtgtttcatagcagccatgattcccttcataggtgtttgggtattttttgatgtgctctgtatatgtgtgcactgtgtgcacgcacgcgtgtgagagatgtgtgtgtgtgtgtgtgtacacatacaaatacatatgtatattccttttgaagaagctttactgaatgtgttctgattttgaggtttagtagtagtagctagctgtagtaggtcccactgcagtttttatttagcatggggattgcagagtgaccagcacagtggactccaaggtggttcagacaagacccagggagcagtggccatcatcctcccgccaggagccgcgtcgttcctgcgcacatagactgtacactatgaagaatgcacaggaagacttgatgacttggtacttgttttatttcctctgcgcttcagtaacaagtgttggcaaatgagactttctcctggcctctgcccactggggagcagcatggttgttcttccagtcggaaatttataaactttaaaaaaaaaaggaaaaaaaaaa

SEQ ID NO: 3420 - DNA, 1688 bp, Cricetulus griseus
  modified_base (124)..(124): a, c, t, g, unknown or other
  modified_base (142)..(142): a, c, t, g, unknown or other
gccttgacacacagtactgctcagagtgatagcacatcttacatcaatgctgtggggaacgacgaacgctaatgggaccatagtgccaccacagcagatgggcgtcaggtccttgtggttcttntgggcgaaggtgcagctntgggaccaatggaaaccttcagctaaatagttactattatcccaatccaatgcctggaccaatgtaccgagtcccatcgttcttcactctgccatccatttgcaatggcagctacctcaaccaagcacaccagagcaatggaagccaactcctttttttctgcctcagactccatatgcaaatggactggtgcatgacccagtcatggggagccaagccaactatggcatgcaacagatggcaggatttgggagattgtatcctgtatatccagcacctaatgtagttgccaataccagtggttctgggcccaagaagaatgggaatgtctcatgttacaattgtggtgtaagcggacactatgcacaagactgtaaacagtcatccatggaggccaatcaacaaggaggcacttacagactgagatacgcacctcccctccccccttctaatgatacgttggattctgcagactgaacgagcaaagcttgcctacttaatgcactcaagtgcggggagtcatggggtgtggaggggaggaaaggaaaggtattttgtttctttgtctgtacatttcctaaatttctatgcagttgggagttttcattctctgtaccaatgtccaaaataacacagaatgcgatgctcctgttacatgtgtgtggtctgtcacatctgaacagaggctgtgggtttctacagaaggcaggggtctgctctctaacctgtgtctcatagcaaagtcacttttataaccgtttaccactatgcttgattataatgtgaaagactgaattccaagtgtgttgagacggttttaatcatgtcattgtcatggcactaagtttaatgctgctgggttgttttggttttttgttttgttttaagccaatctatgtactaaaattgcttccaggaattttttgatttcctgaagtgcactgaggttatctgggcgattggatgtatcatcagtgactgccgcacctgacattgtgagacaaagaagaaaaaaacttgaagaaaaaagctagttcaacacttcaaaagtagcgtttatatttctagcaccgatgtacattctgagactttcaggggtgggcactatggggagagacgggggagtgtgaccgggtagacaaagctttaatttagaaagaaaaaagttcaagtaaaggaaattattttgattaaatatattttatttgatctgggtatttttggaccacattattaaattgttaagctgcggttgagttgttcaggggagagtacctaagccttgtacaggcctgttgtgactcacttgccaggtgtactttatggagtttattttatgatttcaaatactgtactgtacataggaggtgtgttaccttctccttatttgtatgtttaccatatactttgatatttgaaatgttatgtactggaaaggccacttatatttctaggacagattggattttatgcaacctttttccttgtaattaacagcaataaaaaaaatgaaaaacaaactaaaaaaaaaaaaaaaaaaaaaaaa

SEQ ID NO: 3421 - DNA, 1688 bp, Cricetulus griseus
gaggccgttcccgcagaagggctggtgtccatattaaagaagaggaatgacacaataggggaccaccctgcccaaatgcagcagaagccagctaagcggagagtgcgattccaggaaatagatgatagcctggatcaagatgaagtgggcagcggctcctgcatcctgctcatcctgctgtgcgtagccactgtcttcctcagtgttggaggaactgcactctactgcactgtgggcgacatgcagtctcctgtgtgtacagactttgcggacaacgtggacttctattacactaagacacagatgtaggcaccttaccttatggtttcaacaccgtttttagttaatcttgggagctgtgtaattttagctttggacattattctagattctgttctccatttgtgaaatggttgtgtgggtgcgtgttatgtctgaagcagtaaccacaagtggatatccagtatagagtaaaagatgaccttttattcttttaatttgactacaatgtgcaggcacaaatctctggagaaggcttacctgtgaactagataaactgtaggaatgttggccttgaattgagagactgacagatctgaggcaatgaatttgacaggcctgaaggcaggcaccatgacagaactcccaagtctcagatgagatttccctgtggcttctgtgctgagtaaggggtagttcctactgtatgggtgctcgtggaaggtgaacccttactttgttgaatgaaacaggccacctcatgagactgagtagtcgcaggctataccctcaggggtgtggactatgtgttcctatcatggatcactgtggacccagtcatggggtcaggaagcagatattcaatcataccttaagtagacaagtttaaataccttgttttgcttaaatctgtcattaggtggcctttccttatttacggtacagtgatctaatgtttaggaagcctcatttgactttttatattctaggcaatgtcttttttaaaaatcatgaattatagttttttagcaagtgatctttatgttcctcttttcctgttagaatcatttggaaggaaatgggagaaattgctttgtagttgttactggctggcacagtacctttctttgtgtttctgcttatttatttggaacttgtgaatttaagggcttttgtatgagttgagagtgcgttgctgagcatgtatttggtcatcccaccgctacctatttaattagatacttagtgttttgattttgtactatttcagctccatatgttttaggcttatttttaaattgacatttttatttttacttacaacactgtgtggcttatctcttaccatgtcaccgtaaattgtaatattttcaatggttatagatcagagttatttatttagaagtatacagaatactgaaatttagattccttatgcctaaggctgattttattagaagattattttaatgccctattataaatttgaagaccttgtattcacatcctgtgtaaaatgggtcccatcatcagggtacttctgccagaggctctgtggaaggcgctagtgaggttgcctatgtgggcctcctcatgatacacagacatgttccattttcgtgatttctagctgctgggatttggtgacccccgtttctgccgattttacatcaaaaaaagttaaaatc

SEQ ID NO: 3422 - DNA, 1688 bp, Cricetulus griseus
gcaatggccagtacggcgaggcctcggcgtctgtaacgagccggcctcccggggatggcccccaaggtctcagactctgtggagcagctccgcgctgccggcaaccagaacttccgcaatggccagtacggcgaggcctcggcgctgtacgagcgcgcactgcggctgctgcaggcgcgaggttctgcagaccctgaagaagaaagcgttctgtactccaaccgtgcagcatgctacttgaaggatgggaactgcacagactgcatcaaagattgcacttcagcgctggccttggttcccttcagcatcaagcccttgctgcgaagagcatctgcatatgaagccctggagaagtacaccctggcctatgttgactataaaactgtgctgcagattgataacaatgtggcgtcagccctggaaggcatcaacagaatcactagggctctcatggactcacttgggcctgagtggcgcctgaagctgccccctattcctgtggtgcctgtttcagcccagaagagatggaattccttgccttcggagaatcacaaagagacagctaaaaacaaatccaaagaaactacaaagagcagagtgccttctgctggggatgtggagagagcccgagttctgaaggaagaaggcaatgagcttgtaaagaagggcaaccataagaaagctattgagaagtacagtgagagcctcttgtttagtagcctggaatctgccacgtacagcaacagagcgctctgccatttggtcctgaaacagtataaggaggcaataaaggactgcacagaagccctcaagctggatggaaagaatgtgaaggcgttttacagacgggctcaagcctacaaggcactcaaggactataaatccagccttacagatattagcagcctcctacaaattgaacccaggaacggccctgcacagaagttacggcaggaagtcaaccagaacatgaactaaaacccccagagggcaacaggacccctctacctgaccttcccagagaagctacgggcctcccctgcatccacccccatacccagcatgcccctaagggagtacaaaaacaaccccactttggccccttggagaggtagcagccttccacctgagaagcttcgcttgttcaaattaagtccattacagacaagcacaggacagttttttttttttttgttttgttttttcagaaaggttcacactggagttttttttttgttctatttttaatttagtgttgacaggctaaagtgctggcttacctagacccaaagcggcctgttgagctggttctccaaggctgccatctccccaagggtacagctgctatctgcaccctgtccttggcacagcgtcctgtgttgagccccagtgcctttagtccaggccctttgtgggaaggcaaagcctgacccttggaggctctgtgctgttgccttctgtatggagctacctatgctgttcaaagagcccgaattcctcctgggatggggagaagagaggcctccttgagattagtgtccctccagtctgagcaggaactgacctttcccccaacagcagcccctcaggctttgttgtttgtcgtttgttgttgttaatatgttgaagttaattgaactgattttattgaactgtgtgttgctgttgcattaaaaggttttcttcta

SEQ ID NO: 3423 - DNA, 1688 bp, Cricetulus griseus
tcggcgggagcggcggcggcagacgcgtgtggcgaccggcgcgggaaagcggcttcctagttggggaagcgttagccccgggggtgctcgtgtgcagtagtcctagtggcttttctgttctcttctgagatcagcagctgtcaccggtgtgctactggaaggccccttcagcgagcttctaggagcttgagacggtcacaatcccctccaactctcagctggaaggaaagatggttgaagcagatcgcccagggaagctcttcattggcgggctcaatacggaaacaaatgagaaagccctggaagcagtatttggcaagtatggacgaatagtggaaatacttttgatgaaagaccgtgaaaccaacaaatcaagaggatttgcttttgtcaccttcgaaagcccagcagatgctaaagatgcagccagagatatgaatgggaagtccttggatgggaaagccatcaaggtggagcaagctaccaaaccatcatttgagagtggcaggcgtggaccacctccacctccaagaagcagaggccctcccagaggtcttcgaggaggaagtggaggaactaggggacccccttcacgtggaggatacatggatgatggtggctattccatgaactttaacatgagttcttccaggggaccacttccagtaaaaagaggaccaccaccacgaagcgggggtccccctccgaaaagatcaacgccttcaggaccagttcgaagcagcagtggaatgggaggaagagccccagtgtcacgtggaagagatagctatggaggccctccacgaagggaacccctgccgtctcgtagagatgtttatttgtccccaagagatgatggatattctacaaaagacagctattcaagcagagattacccaagctcccgtgacaccagagattatgcacctcctccaagagattatacttaccgtgattatagtcattccagttcacgtgatgactacccatcaagaggctatggtgatcgagatggatatggtcgggatcgtgactactcagatcatccgagtggaggttcctacagagattcatatgagagttatggtaactcacgcagtgcaccccctacacgagggccgcctccatcttatggaggaagcagtcgctacgatgattacagcagctcacgtgatggctacggtggaagtcgagacagttattcaagcagcagaagtgatctctactcaagtggccgtgatcgtgttggcagacaagaacgggggctcccgccgtctatggaaagagggtaccctcctccacgtgattcctacagcagttcaagccggggagcaccaagaggaggtggccgtggaggaagccgatctgatagagggggagcagaagcagatactagaaacaaacaagactttggtcaaggtcttcattcaaagaaacaaaagatggaaagtcttctgtcgtaactacccaaggactactaagaaaagttgtgttacctttttaaatttttctgttttaagttcccctttatcatttttgtgttcttgtgaggataaaagtaaaacatgattaattttgatattatgaattgctttcaacaagcaaatgttaaatgtgtaagactcgacttgtactagtgttgtaattttccaagtaaaagtgtccctaaaggcaaaaaaaaaaaaaaa

SEQ ID NO: 3424 - DNA, 1687 bp, Cricetulus griseus
gagcgtccgcgccggagctgagccagcatggggaaggtgaatgtggccaagctgagatacatgagccgcggcgacttcagggtcctgaccgcggttgaaatgggcatgaagaatcatgaaattgttccctgcagtttgattgcgtctatagccagcctgaaacatggtggctgtaataaagttttgagagaattagtgaagcataaacttatagcttgggaacgtactaaaactgtccagggctatcggttgacaaatgctggttatgattacctagctttgaaaacactgtcttctagacaggtagttgagtctgttggaaaccagatgggtgttggcaaagagtcagatatttacattgttgcaaatgaagaagggcaacagtttgcactgaagcttcacaggctgggaagaacctcctttcgaaatctgaaaaacaagcgtgattaccataagcacaggcataatgtttcttggctttatttatctcgactctcggctatgaaggaatttgcctatatgaaggcattatatgagaggaaatttccagttcctaagccaattgattacaatcgacatgcagtgatcatggagcttattgatggttatcccctgtgtcagatacatcatgttgaagaccctgcatctgtttatgatgaagctatggaactaatagtcaaactgggaaatcatgggttgattcacggagatttcaatgaattcaatctcctattggataaagatgaccatatcaccatgattgattttccacagatggtttctacttcccatccaaatgctgaatggtattttgacagagatgttaaatgcattagagagttcttcatgaaacgttttggctatgaaagtgaactctacccaacctttagtgacatcaggagggaggattctcttgacgttgaggtctctgccagtggttacacaaaggagatgcaggcggatgatgaactgctccatccattaggtccagatgataaaattactgaaacagaagaggaatctgacttctcattctctgatgaagaggtgttagaaaaacaccaagttttgacgtcagaattggaaaatgaactgaacccaggagataaatcagatgactgttgtcaccgctcatctggagactttaagcaagtaaaggaagatggtttatcagagcagagtgctgatgtatccagttttgaagtgactgaattaaatcaagctttagaagaaataaaaaccacaggttcttacccacagttctgttactgggttttctgaggagagcaatggtactgaaaatggtggccagacaggtccatggagaagccctgctggctctgaagagtgtgaggataaatgccccgatctgattgccttgtcgtcaatgaacaaagagtttaggcctttcagagatgaagacagtatgaagagtgttcctcagcatagaacaagaaccctgagtgttacatctacaggcagtatcctcagctgttcaacaatccctccagaactggtgaagcagaaggtaaaacgtcagctgacaaggcagcagaagtcagctgccagacgccggttgcagaaaggagaagccaatgtgttcaccaagcagcggagagaaaacatgcagaatattaaatccagtttggaagcagccagcttttggggagactaatgtatttctgat

SEQ ID NO: 3425 - DNA, 1687 bp, Cricetulus griseus
ccaagtttgcagaggccctgatcacctttgtcagtgacaatagtgtcttacacaggctgattagtggagtaatgaccagcaaagaaattatattgggactttgcttgttatcactagttctgtccatgattttgatggtgattatcaggtatatatcgagagtgcttgtgtggatcttaacgattctggtcatactgggttcactaggtggcacaggtgtactgtggtggctatatgcaaagcaaagacggtctcccaaagaaacagttattcctgaacagcttcagatagctgaagacaatctgcgggccctcctcatctatgccatttcagctacagtgttcactgtcattttgttcctgataatgctggtcatgcgcaaacgtgttgctctcaccatccgcctttgttccacgttggctggcaaagtcttcatacacttgccactgctagtcttccagcccttctggtacttttttttgctcttgtcctattttgggcttactggataatgacacttcttttccttggcactaccggcagtgctattcagaacgaacaaggttttgtggagtacaaaatttctggacctttgcagtacatgtggtggtaccatgtggttggcctgatttggatcagtgagttcattcttgcatgccagcagatgactgtggcaggagctgtggtgacatactattttactagggataaaaggaatttgccattcacacctattctggcatcagtgaaccgccttattcgttaccaccttggtactgtggcaaaaggatccttcatcatcaccctagtcaaaataccaaggatgatcctaatgtatatccacagtcagttgaaaggaaaggaaaatgcttgtgcacgatgtatgctgaaatcttgcatttgttgcctttggtgtcttgaaaagtgcctaaattacttaaatcagaatgcatacacagccacagctatcaatagcaccaacttctgcacctcagcaaaggacgcctttgtcattctggtggagaatgctttgcgagtggctgccatcaacacagtgggggacttcatgctattcctaggcaaggtgctgatagtctgcagcacaggtttggctgggattatgctgctcaactaccagcaagattacacagtatgggtgctgcctctgatcatcgtctgcctctttgctttcctagtcgctcattgcttcctgtccatttacgaaatggtagtggatgtattgttcttgtgttttgccattgatacaaaatacaatgatgggagccctggccgagagttctatatggataaagtgctgatggaatttgtggaaaacagtaggaaagcaatgaaagaagccggtaagggaggcgctgcggatgccagagagctaaagccgatgctgaggaaaaggtgacgtgtctctggagactggaagaatggactcagaagaggctgtttacacgaggatcgcccattcagcagctgttgcgtctgcgagggagacaggatctcattactccaacagcagccatcaagaaggttctccaaccatgaacagccaaacggatttgccaccgtgggggtgggctaattaatgattaatcagaagcatttgatagtaatctgccttgcagccacatcttcaaacttcacgttgctttctcttctggccttgtaatgtttg

SEQ ID NO: 3426 - DNA, 1687 bp, Cricetulus griseus
ggccgccccgcaccgaggagaggaaaatgccacccaagcgcatagctaagagaaggtcacccccagaagatgccatccccaaaagcaagaaagtgaaagtctcacacaggtctcataaaacagaaccgggcttggtgctgacactgggccagggcgacgtgggccagctggggctgggtgagagtgtgctggagaggaagaagccggccttggtaaccgttctgcaagatgttgtgcaggctgaggccgggggcatgcataccgtgtgtctgagccaaagtggccaggtctactccttcggctgcaatgatgagggtgccttgggaagggacacatcagccgagggctcagagatggtccctgggaaagtggaactgcaagagaaggtggtccaagtgtcagcaggagacagtcacacagcagcccttaccgaagatggccgggtcttcctctggggctctttccgggacaataatggtgtgattgggttgttggagcccatgaagaagagcatggttcctgttcaagtgcagctggacatgcctgtggtaaaggtggcctcagggaatgaccatttggtgatgctgacgactgaaggagacctctataccttgggggtgtggggaccagggtcagctgggccgtgtgcctgagttatttgccaaccgaggtggccgtcagggccttgagcgactcctggttcccaggtgtgtgctgctaaaagccaggggatgtcggggccgtgtgcggttccaggatgccttctgtggtgcctatttcacttttgccatctcccgtgagggccatgtgtatggctttggcctctccaactatcaccagcttggaactccgggcactgcatcttgcttcattcctcagaacttgacatccttcaagaattccactaagtcctgggtgggcttctctggtggccagcaccatacaatctgcatggattcagaaggaaaagcatacagcctgggcagggctgaatatgggcggctaggccttggggagggtgccgaggagaagagcatacccaccctcatttcccggctgcccatcgtctcctcagtggcctgtggggcttctgtgggatatgctgtgtccaaggatggtcgtgtttttgcctggggcatgggcaccaactaccagctgggcacagggcaggaagaagatgcctggagccctgtggaaatgactggcaaacagctggagaaccgagtggtcttaactgtgtccagtgggggccagcacacagtcttactagttaaggacaaagaacagagctgatgacgtctttgtgggcctggcttctggccccaaccccacttcacaacaggaaaacgaccagctacaaattccaggggttttggtgcccatactctgaaaagttgggaactccatcaagccccccttcccatgtgccactttttctgttcctaacatcagtttaaaaggagacagatggtacagtcatcagatccagttgtcatggacccatgcctagggagatctggacaaaggcttcacaaggctggggtgatcctaagccaaatatttggctctaaacaggagtccatgggcaaaaaacagtggcccacttgaaaaaaaatccaactagctgttctcccaaaagcacaaagcaccccactgtctcttgggcatcacctgtgcattccccatc

SEQ ID NO: 3427 - DNA, 1687 bp, Cricetulus griseus
ccgggcggtgcgtggcctcgctgccgggagccgcgccccaggtattttctccagaaagaaaacaaaattgataccttgcatcctggaagttcatttaggaatttgaaattagggacttctttcaaatttggacatggctagtcgaggagcaacaagacccaatgggccaaatactggaaataaaatttgccagttcaaactggtacttctaggagagtctgctgttggcaaatcaagccttgtgcttcgctttgtgaagggccagtttcatgaatttcaagagagtaccattggggctgcctttctaacccaaactgtgtgtcttgatgacactacagtaaaatttgaaatatgggatacagctggccaagaacggtaccatagcctagcaccaatgtactacagaggagcacaagcagccatagttgtgtatgatatcacaaatgaggagtcctttgcaagagcaaaaaactgggttaaagaacttcagaggcaagcaagtcctaatattgtgatagctttgtcaggaaacaaagctgacctagcaaataaaagagctgttgacttccaggaagcacagtcctatgcagatgacaacagtttattattcatggagacatcagctaagacatcagtgaatgtaaatgaaatattcatggcaatagctaaaaagctgccaaagaatgaaccacagaatccaggtgcaaactctgccagaggacgaggagtagaccttactgagcctgcacagccagccagaagccagtgttgtagtaactgaactccagtgtgaacttcctaaatggaaaaaatcgtggtgtgggagcatttagccggcccaatgtgacttccaaaaagagacttatggtagaatcaagtttctaatactgaattattttgagtgttttgagcttaatttttaataacatgcatgtgttcttccattactcctaaaatttgagtgaaaagaagtcatgtgtaaccccatcttgttttaggaatataaaaactgatgaatgcattttaatggatagtggtcccttcgtgtgagctcttcaacaaagtggaaacaaaccaggtgtctgatttctctttaatcactgttggccattacatagaggtctgtctggagcagggagggagctctggttccttttggacatgattggtcagtgcactaacaattatgtacattcaaacttgattttaaatatgatcttcagctgtactgtaaatagagtactgcattgtagtctccatgtttattattttctgtaatatttaagaattgcctaagcgtatacaaaatgtacagttactaaaacagctaattatttctttattccccctatgaaaggaaggggctttgctgttcttacatggctagaaccataataaacactgtacctacaatttgtaacataagtattacaatgttattagtaataatcttgaaaccttgtttttcaaagtccattttattttgatcagtatgttgcactaattattttaggtatttccattatatgaaatctaccatgtgtcagatgatttaatctgtttaagtgtcaatctgctagcagaacttgtacattttacaataactcaaaattagtaaggaaaacagttcaccagggtttagttttatattgaggtgctcaggttggaataaagtggtataaaaagc

SEQ ID NO: 3428 - DNA, 1686 bp, Cricetulus griseus
ggcgggcgaagttgatgcccggcggcggggcgagcacggcgtctggccggcttctggcggcggcgttccggagcggtccagcgggctcgagcggaggccgaggcggagcaggtggccccgggccagggagtggaggccccgcgggcaggatgagcctgagcccgaaggaactctcgagcctgcttaacatcatctctgaggaggcgggcggcggcagcactttcgagggcctgtccaccgccttccaccactacttcagcaaggccgaccacttccgcctgggctcggtcttggtgatgctgctgcagcagccggacctgctgcccagcgcggcgcagcgtctgacggccctctacctgctgtgggagatgtaccgcaccgagccgctcgccgccaacccgttcgccgccagcttcgcgcacctgctcaacccggcgccgcccgcccgcggcggacaggagcccgaccggcccccgctctcagggtttttgcctcctataactccaccagaaaagttttttctttcccagctgatgctggcacccccaagggaactcttcaaaaagacacctcgccagatcgcgttgatggatgttggaaacatggggcagtctgtggacattagtggccttcagttagccttggcagaacgtcagtctgaactgccaacccagagtaaagctagcttcccaagtatcctcagtgacccggacccagattcctctaattctggatttgacagctctgttgcctctcggatcacagagtctttggtcagtggactaaaaccgcctattgaaagccacttccggccagagtttatccgcccaccaccacctctccacatttgtgaggatgaactggcctggctaaatcctacagaacccgagcatgccattcagtgggataaatcaatgtgtgttaagaatagcactggtgtggagatcaagcgaatcatggccaaagccttcaaaagccctttgtcttctccccagcagacacagctccttggtgagttggaaaaagatcccaaacttgtttatcacattggccttactccagcaaaacttccagacctagtggaaaacaaccctttagtcgctatagagatgctgcttaaactaatgcagtcgagccagatcacggagtatttttctgtcctggtcaatatggatatgtccttacattcaatggaagttgtaaatcgactaactacagctgttgatctacctcctgaatttattcacctttacatatcaaactgcatttctacttgtgaacaaattaaggataaatatatgcagaatcgtttggtgcgtcttgtatgtgtgtttctccagtctttgatccgtaacaaaattattaacgtgcaggacttgtttatagaggtgcaggccttctgtattgaatttagtaggatacgggaagctgcaggcctattccggttgctgaagacactggatactggggaaaccccttcagagaccaaaatatcaaaataatacctcaccagaacttccccttctattgctcaactgtatttgggttcgtttttaaacctgttgaaattcttgagtggattgcttgctttatctaaaaatataaatgacactatttacttaaaaatttaaataaaataatttacaaaaaaaaaaaaaaaaaaaaaaaaaaaaaaaaaaaaaaaaa

SEQ ID NO: 3429 - DNA, 1686 bp, Cricetulus griseus
cctcgggttcggtgttatgaacacctatcagttatcattgaagtttgaaaggtgcttggattcagaagtggtcacctttgagattttatctgatgactattcaaagatcgtcttcttgcataacgacagatacattgaatttcactcacaatcaggtttttactacaaaaccagaattcccaagttcggcagagacttctcttaccactacccatcctgcgacctgtacttcgttggtgctagctctgaagtgtatagattaaatttagagcaagggcggtacctgaatcctctccaaacggatgctgcggagaacaatgtttgtgacataaatgccgtgcatggcttgtttgccacaggaacaatagagggtcgagtggaatgctgggatccaagagtaagaaaaagagtcggagtgttggactgtgcattaaatagtgtcacagcagattcagagataaacagcttgcccaccatctctgcattgaagtttaattaaggatcaccagtacgggcttcccattaagtcagttcatttccaggattcattagatttggtcttgtcttcagactccagaattgtcaaaatgtggaacaggaactccgggaaaatatttacttcattggagccggaacatgacctgaacgatgtttgcctctatcccaactcaggaatgcttctcactgccaatgaggcccccaagatgggcatctactacattccggttttacaaatttgtcaccaagaaagaccttgaaaatttaggactcacacatctaattggatcaccttcctccgggcatatatgcatggattcttcatggatatcagactctaccacaaggtgaaactgatggtaaatccattcgcttatgaagaatataggaaggataaaattcgacagaagatagaagaaacacgcgcacagagagtccagttaaagaaactgcccaaagttaacaaggaactggctcttaaattaattgaagaagaagaggagaaacagaaggccacactgaaaaagaaagttaagagcctcccgaatatcctcacagatgaccggtttaaagttatgtttgagaaccccgacttccaggtggatgaagagagtgaagagttccgacttctcaacccacttgtctcgaggatcagtgagaagaggaagaagcagctgagactcttggagcagcaagagcttcaagccaagaatgaagaagaggaagaaccagaaggaaaacccagtgatgcggaaagttcagagagttcagatgatgagaaggcctgggttgaagaagtcaggaagcagcgcagactcctgcaacaggaggaaagagcgcagcggcggcgggagcagctggaggaggaccaggagacagtcctgaagccccagttctatgagatcaaagcgggagaagagttcagaagcttcaaagagtctgccaccaagcagagactgatgaacaaaactcttgaagatcgtttgaaacttgaagcaaagcacgggacgttgaatgtatcggacaccactgttggcagcaagcagttgacatttacactcaagaggtctgaacagcaaaagaagcaacaggaggctgagaaactgcatcgtcaggagaggaaaaagctgcgacggtctgctggtcacctgaggtccagacccagaagaggccggccctttcactgac

SEQ ID NO: 3430 - DNA, 1685 bp, Cricetulus griseus
gagacttaagggtttggagacacaaaacacaggatcataccaacgtaactcccgggcaagttgccttccccgggaccgagggataccacgaagagcatcggatcacgccgccccggaaccgcttgagcaacggccatggcgactctaagccccggcagccagaacgtcaccgagtatgtcgtccgagtccccaagaacacaaccaaaaagtacaacataatggcttttaatgcagctgataaagtcaactttgctacctggaaccaggcccggctagagcgagatctgagcaacaagaagatctaccaggaagaggaaatgccagagtccggagcaggcagtgaatttaaccgaaagctccgggaggaagcaagacgaaagaagtatggcatcgtcctgaaggagttccggcctgaggaccagccttggctgcttcgggtcaatggcaaatcgggcaggaagttcaagggcataaagaagggcggagtgacagagaacacagcctactatatcttcactcagtgtgccgacggtgcctttgaggccttccctgtgcagaactggtacaatttcacaccgctggcccgacaccgcacactcactgctgaggaggccgaagaggagtgggagaggaggaacaaggtcttaaaccacttcagcatcatgcaacagcggaggctcaaggaccaggaccaggatgaagatgaggaggagaaggagaagcgcagccgcaagaagcccagtgagcttcgcatccatgacctggaggacgacctggaaatgtcctccgatgccagtgatgccagtggcgaggaaggcagcagagcctctaaggctaaaaaaaaggccccaatgaccaaagggggcaggaagaagaaaaagaagaagggctcagatgatgaggcctttgaggacagtgatgatggggactttgagggccaggaggtggactacatgtcagatggctccagcagctccccggatgagacagagggcaaacccaaagtgccgcagcaggaggatggccccaagggtgtggatgagcagagtgagagcagtgaagagagtgaagaggagaagcctcctgaggaagacaaggaggaggaggaagagaagaaggtccccactccacaggagaagaaacgcagaaaagacagcagcgatgagtcagatagctcagaggagagtgacattgacagtgagacctcctctgcactcttcatggcgaagaagaaaacaccccccaagagggagcgcaagccgtcgggcggtagttctaagggtaccagtcgaccagggactcctagtacagacgcagcaagcacctcttccaccctgcgggctgcagccagcaagctggagcaagggaagcggacaagtgagaccccagcagccaagcgcttacggatggatgctgcccctcagagcctatctgggaagtccacacccagcggcggtgatgtccaggtgacagaggacgctgtacgccgctacctgactcgtaagcccatgaccacaaaggacctactgaaaaagttccagaccaagaagaccgggctgagcagcgagcagaccgtgaacgtgctggcgcagatcctcaagcgcctcaaccctgagcgcaagatgattggtgataagatgcacttctccctcaaagagtaatgctaataaacagagcagaccca

SEQ ID NO: 3431 - DNA, 1685 bp, Cricetulus griseus
cggtcattgtctgaaggagccattgataatgcattgctgccatgcagtaggcaggccttggaagaactccgtgggcagtacattaaagcggttaaaaaaattaaacgtgacatgcttcgatacattcatgagagtaaggaaagagctgcagaaatggtaaaggcggaagtgttgcgggaacggcaggaaactgcccggaagatgcggaagtactatctcacttgccttcagcagatcctgcaggataatgggaaggaagaaggagctgagaaaaagatcatgaatgctgctagcaaactcgctacgatggcagagttgctgggaacaattgcagagtcagactgcaaagtgaggtgtgcacaggcgggtcactcagtagcatttcccttgacttcagagatgctgatggacgttgaaaaatcagaaaggagcggtgtgaatcagaatattccaaattacattgaaagcaaaccaaatgttggaaaaactataccccaaaagtatgtgtgagcaagttcctaggaggaggactgtgtcgcatttacagaggcggttagaggattcagaacacagagagataaagcccgtggcttcctcggcttcgccttcaaactatcagtgtggagaggggagttgcaggcccccagacatcttggcaaaaaatgttgctcctgagtttgttccacacaggggcaaggcggttttgatttgcacaaaaagaaagacccacccagtggagctggctctgaaccacttccttattcagccacccccttcctcggaagtgctgaaaagaaatcttcacctagatgcatctcaggatccatacacacaagccttagaggccccagtgaagtgccaaggctcaaagcagctatgtgtgattctctaacagaaactgagagccccaagtctgagaagagtcagggtgtggacactcaggaccctcccgtgaaggatggaggggtccctggcggctctccaggcccggttcctgacagtacttcaccccgtggcagtcgtgctgtgttgtttctagctgagaggtcacaaaggacgtgggagatgcagggggactctgttcaattgaaacatttctcagcagccccttgtcttccagatgcccaggaaagtaatatggcttgttggggtggctacaccccagatctgcccagagaaaccctgcactcccagccagggaggatgggtgtgactcggggacaatcatctcagctgagccctgatgtattaaagccagatctcagaaagctgagtggcacagggccatcttcagtgtgccagaagccttcgagaaagttagctgctcccccgactagccaacaagatagtggctttgacagcccgtttgccaatctaaactgatcatgtgccatatttcagaagaatcatactattcacacaagaaactgatgggaatactttatactgaaaaatcaattatgaggtctgtcagtttttatgtgtctgatacccttgaacctgagtaaagtttctcatcatgcagttacttgaagtttggagttgccttaatcttggggggcctggaatgatgtgctgtgtgatctgcctctctgtgatttattcagttgctagccctctacttttatatttataagctgacttattttgcagtgttaaagtatttaataaaattgtgtgtaatc

SEQ ID NO: 3432 - DNA, 1685 bp, Cricetulus griseus
cggaaggttggagatgtggatcagagcccggcgtcgccacccactcctgctcgcgatcccgcgggatctccagtccggctgcgcacgggcactttctggttgaccagagtcgtgctcctgcaggccctcgctttcatttactttgtggccttcttggtggcattcaatcagaacaaggccctcattggagatcggggcctgctgccctgcagactgtacctgaagaatgtccagcagtacttccatggcaggattggctgggatgcctggagctatactccaacaatcttgtggctgatggactggtcaaacatgaacttcaacctggaccttcttgctcttgttgggctgggcctctcattctttgtcctggtgactggctgtgccaacatgatactcatggctaccctctgggccctctacatgtccctggtcaacgtagggcagatctggtattcttttggatgggagtcacagctgctggaaacaggattcctgggaatctttctgtgccctctctggacgttgtcccgcctccctaggcacacccccacatcccgagttgtcctgtggggctttcgttggctgatcttcaggatcatgcttggagcgggcctaatcaagatccgtggggacaagtgctggctggacctaacctgcatggacttccactatgagactcagccagtgcccaacccgatggcttactacctgcacaggtcaccctggtggttccatcgctttgagaccctcagcaaccacttcatagagctgctcgtgcctttcttcctgttcctcgggcgccggatgtgcattcttcacgggggactgcagatccttttccaggtaatcctcatcatcagtgggaacctgagcttcctgaactggctcaccatcgtgcccagccttgcttgtttcgatgatgcagctttgggattcctgtttctctcaggacctcgaggcctaaagtaccaagtcctgaagatacaaaaggaagatacacagggggtccagcccaagccaagatacggctgcacggtgcggcgagtggtcaacttctctctgggcatcctggtggcctggctcagcgtacccgtgattatcaacctactaagctccaggcaggtcatgaacacctccttcaacccactcaggattgtcaacacctacggggcctttggaagtatcaccaaggatcggactgaggtgatcctgcagggtacaaccagccctaatgccagtgcacctgacgctgtgtgggaggactatgagttcaagtgcaaacctggtgatccctggaggcggccgtgccttatctctccataccactaccgcctggactggctaatgtggttcgcagctttccagacctatgagcacaacgactggatcatccacctggcgggtaagctcctagctggtgactcggagaccctgtccctgctcgccctcaacccctttgagggcagggctccccccaggtggatccgaggagaacactaccgttaccggttcagcctccccagtggccagcacgctgcccagggcaagtggtggatacgcaagcgaattggcccctacttccccccactccaacttgaggatttgaaggactactttaagactcgggaatggccgatgccggaactccatctagacacaccctagaaataaagaaccagaga

SEQ ID NO: 3433 - DNA, 1685 bp, Cricetulus griseus
accttgtggaatgggctgactttcaactttgaaactatattgcaggctcatgatagccctgtgagggccatgacttggtcacataatgacatgtggatgttgacagcagatcatggaggatatgtgaaataattggcaatccaacatgaacaacgtcaagatgttccaggcacataaggaggcgattagagaggccaggttttgatcattccaacaacttctcagggacctctgatgggactgaatccaagaggaatgcagggccctccaggacctcgggaaaatcagggtcctgctcctcaagggataatgattggccacccgcctcaagagatgagagggcctcatcctccaagtggattgctgggacatggccctcaggaaatgagaggtcctcaggagatgcggggcctgcaggggcctcctccacagggatccatgttgggccctccccaggaactgcgtgggccctcaggttcaacaaggccagcaagggccacccagggctctttgggacctccaccccagggtggcatgcaacggaccccctggaccctcagggacagcagaaccccagagagacgtcatgagcagagtggtggccccgagcatgggcctgagagggggcctttccggggtggccaggactgcaggggtcctcctgacaggcgtggctctcaccctgacttccctgacgacttcagcagaccagatgacttccaccctgacaaacgctttggccaccggttaagggaatttgagggacgaggaggacccttaccacaagaggagaagtggaggcgagggggccctgggcctcccttcccacctgatcatagagaattcagtgagggggatggccggggtgcagcccgaggccctccaggggcatgggaaggccgcagacctggagatgaacgcttctcccgggaacctgatgacccacgctttcgagggcgcagagaagaaagctttagaagaacggagcccccccaacgacaatgaaggccgtgctcccccaaagaggaaagggacgagctttcctggtcctgatgactttggtccagaagaggtttttgatgcttctgatgaagcagcccgaggacgtgatctcagagggcgaggccgtgccaccccacgagggggatccaggaaatgcctactccccactccagatgagttccctcgcttcgaaggaggaaggaagccagactcctgggatggaaaccgagagcctggaccaggtcatgaacattttcgtgatgctccccgccctgatcacccccctccacgatggccattcaccagctagcagagagcgctcctcttctctccaaggcatggatatggcctccctaccacctcggaagcgcccctggcatgatgggtcgggctcttctgaacacagagagatggaggcccaaggaggcccctcggaggaccgaggaagcaaaggccgagcaggcccaggaccttcccagagagtgccaaaatccgggcgttccagctctttggatggagaccatcatgatggataccacagagatgaaccttttggtggccctccaggcagcagttcatcttctcgagggggccggagtggcagtaactggggtagagggagtaacatgaactctggccctccaaggcgaggcacttcaaggggtggtgggaggggtcggtag

SEQ ID NO: 3434 - DNA, 1684 bp, Cricetulus griseus
  modified_base (413)..(413): a, c, t, g, unknown or other
gagcggggcgagtgtggcgagcaggacccggcgggcgcgctcccccagcctctctctctctcctctctctctccctccccgccacgaaccatgtcgggcaggtcggttcgagccgagaccaggagccgggccaaagatgatatcaagagggtcatggcggctatcgagaaagtgcgcaaatgggagaagaaatgggtgactgttggtgacacatccctaacgaatctacaagtgccaaaagttgatgacaaaaacaagaataagaagaaaggcaaggatgagaagtgtggctcagaggctaccactccagagaacagctcgtcaccaagaatgatggacatgcacgacgtgtggacctttctcctaaccaccatgagaggtgtctgccaggctccattttctaagagtttctnaggggagagctcctgtttctttttctgttttcaagggagctgtctatttcctatacttcgcgaagaatcaaaatgttcctgaattttaaatacctcatgcaaaaatatctcctgaaataagggaagaaaaaaaaactttgaaaaatcttaatgttgaagttagcaatgctaaaatgtttctgtcttaagaaaaaaaaaattcttgtacttagcaattttgcccctcaggcggtcagttctatgaagaactgtgttctgcatctttgctgggaagcaaccagatgcatgacctccaacatatctcaaggtcaaggcggctttgcctccagattctagagttagggtaacatttttcttttgcagcaaaactccattttggtaaaagatgaatttgaatatttatttctttttctgggaaatgagaggttacaacatacacagctgaaggagaacccaacacatgcatccacggagccagcaggcggccagggccgcctgcacctcttctgtccactgcagcctccggacagtgaagaggagttgacacagttgaggatgaggacaacgatgaggtccacggtacccaggctgtcattagtttttctctgaagtgcctgaaggtaggaatgggccgttgatggggaccatccggatgccccccccgccgacggccatgccaggcaaagagccagcagccctgcactgcacgctggccacaaaagccttccatgtggagcggtcagactgcaaaatccaatgtgcttccttccccgccacggtcctctctctggagccaatggtccccgtccctgaacccctcaccctcatccccgccacagaatcttaagacctttcatctggccgagccaggggctggggatctcaagcaaatgccttccgtggacatcaggccccatggcctaaagggctcccagggcaaacttccccaaaacttgaaggcggggatggtggctacacacatccacaaagtgctggcacttaatacccacaaaccctgaaggctattgaccgattcttagagggtggtgactgcccatcatcagacggtgtcatggtttggaatgttaattattgccgaggacctggttagagatataaagacctttttttttttcactgttacctatttttttcctcttacaattttttttggtgtgttgtacagcagtataatttttcacttatttattccatcgatagatattgtttgtacaatgtacaatggtttcatttcagaaaataaaaaaaat

SEQ ID NO: 3435 - DNA, 1683 bp, Cricetulus griseus
ccatcagcagccaaggtggttgtggggaacaggatttctactacgactgtggcatgtattcccatttgcagggtaacctgacggtgtgcgactgctgtgagtcatttcttttgacaaaaccaatctcctgcaaacacttaataaaatcacacagttgtcctgtgttgacagtggcctcttgccaaagaccagagggctattggtctgactgtggcacacagtcagcccactcggactatgcagatgaagaagattcctttgtctcagacagttctgaccaggtgcaggcctgtggacgagcctgcttctaccagagtcgtggattcccctctggtgcgctatgcttataacctaccaagagtcagagactgaactactgtgtctataaccatttcccccaatcaaccaaatcatagtgctcatagagcaagctgtctgtcttttgacctttcatctgggaagcacttctaaaatcactgactggtgtcactcagaagagaaggaaggtggcagtttatttctcaaataagacatttgtgaagaatggtgcctaaattatacattgttagaaaaaaatgtgatgtccagcgatgtgtggtctagcaaagttcaaactatttactgaattaagcacaagatataagacagctgttaatatttgtaattgaaatagtgaatttataaactagagaaaaagtcttagctaactttacctaatgtttcatcattaatctcaggatgacttacttcagggccaaaaaagggattgtctcccagctagagctatgagagttcaaacaagcattaccttcacgtgttttctatgtccataaatcaaaggttttgttcaaatgattgataaatctaaaacctgaagatgtttaaaagataatattaacagctgttagactttttaaaaaatatcagaacatttgtgtttgttcattatgcattgctttggtgaaatgacactgatttttttttccgtcagtattttacagtcacagtactaggaaaaagcaaaaggctaatggctatttgggtttagtagagatgacaactactaagtactattgaagtttcaatagtatccaagaggtttgatggctcgatgttatgtcttttttttttttttttttttttacaattgtctgatcaataaagacttaacaatgtattaagtcagtagcaaatccactgccatgttagttatcctggttaagcaaaaacttaagctagattgcagtttgatgattaaactgtacatactgtgcatataatgaatttttatcttatgtaaattatttttagaacacaagttgggaaatgtggcttctgttcatttcgtttaattaaagctacctcctaaactatagtggctgccagtagcagaatgttaaattgtggtttatatacgtgttttgtgtgtgtgtggtttgtttggtttgggtttttgggtcattgtaaatagtcttggttgttacattgtcagtggaataaaacagaatctttgtatatcgaaatcatgtagtttgtataaaatgtgggagggatttatttactgtgtgttgtaattttgtaaggtcatctatttacaacttaaataaaatagtttgtatatttacatatatgatgaatattcaatcataaatttgtaagaaaatccctatttaaaaggacttt

SEQ ID NO: 3436 - DNA, 1683 bp, Cricetulus griseus
gtccatccggtgatgtccactccatctgagttaacttgtaaagagagtcctcccagctggtccactgacagtagcctgggacctgtgctcccagagagctccaccccaccaaggtgaggttgccttgccagaccctggcaccaggtcctgagcttggaccctctactgcggagttgaaattagaagcccttacccagcgtctggagcaagaaatggacgctcaccctaaagctgattactttggagcctgtgtgaaatgcagcaaaggggtgtttggagctggccaggcctgtcaggccatgggggacctctaccacgatgcatgcttcacctgtgcagcctgcaagcagtctgccgacaggtgttttctttgtggacatctgatcatggacatgatcctacaggccctagggaagtcctatcaccctggctgtttccgctgtgtcgtctgtaatgaatgtctggatggggtgcctttcaccgtggactcagagaacaagatctactgtgtccgagattaccacaaggtgctggccccaaagtgtgcagcctgtgggcttcccatccttccaccagagggctcagatgagaccatccgtgttgtgtccatggacagagactaccatgtggagtgctaccattgtgaggactgtggtctagagctcaatgatgaggacggtcaccgctgctacccactggaggaccacctgttctgtcactcctgccatgtcaagaggctggagaaaggaccctcacctgcagccctccaccagcaccattcctagtcagagacacagtgggatgcagggccagggtcgtccagggaggtgtctgtagggtacttctggggatccccagagctggagctcaggaagaggagggacaggaggtcaagttcctgtgtgtggtgtgagaagggtaccttggttccaaccacagcagtgtgcactccccatcaagtccatgtgttttccaagtgctctttcccattgccataccctcaccaaatcactcaggaagatgctctagtttgcacatggcacacaacacaaggttgggcctgtgtaactggacacatcctactccatggaaaactgcattacaacaagaaagaagcactgtatatgctttgtacacttggagtttgcttggtaaaccagagccaagctttgacgtctgggaggctgggcctccctgttgtgcctctgcctctcctctcctaaggcagctgagcggtggcagaggcctgccctgtcctacacagccagctctgagagaactggtgcaggcaccagacgtcttgtccactgcttggtgctgttgcttctttgcttcctctagtctgtgacattggagttgcttccttaaggtgagtctgagggtccatatgctgggagagagctccttttgaaaggagagtttttgtgtgtgagatctcaaagctagcaccagagggagtgcctgaggacgtctcagaggtatctctcctgcccacttctcagcacagacattaattcggtttgaagaaaccaatataaggtacactgcttttgacttgtttttttttattttcttcattatttctctccacctttttccacacacaaaacatacctcacagatagttttcactaaatcaccatcaaggaggaatcactcaaaaaaaaaaaaaaaaaaagttaa

SEQ ID NO: 3437 - DNA, 1683 bp, Cricetulus griseus
gtcccgtgttagaaatggctgccgccggatactctggcgatcctgaatgctaccattctcccctggcgtcccgctatgccagcctcgagatgtgcttcctgttcagcgacaggtacaagttccagacgtggcggcagctgtggctgtggctggcggaggctgagcagaccctgggtttgcctatcacagatgaacagatccaagagatgaagtcaaacctgaacaacattgacttccagatggcagctgaagaagagaagcgcctgcggcatgacgtgatggctcacgtgcacacgtttggccactgctgtccgaaagctgcaggcatcattcaccttggtgctacctcctgttacgttggagacaatacagacctgattattctgagaagtgcatttgacctgcttttgccaaagcttgctagagtgatctcaagacttgctgattttgctaaggaacgagctgatctgcccaccttaggtttcacacactttcagcctgctcagctgaccactgttgggaaacgctgctgcctttggattcaagatctctgtatggacctccagaacttgaagcgtgtccgcgatgagctccgcttccgaggagtgaagggcaccactggcactcaggccagcttcctgcagctcttcgagggagatcaccagaaggtggagcagctggacaagatggtgacagaaaaggcagggtttaagagagctttcatcatcactggacagacctatacacgaaaagtggacattgaagtgctttctgtgctggccagcttaggggcatcagtgcacaagatttgcactgacatacgcctcctggcaaacctgaaggagatggaggagccctttgagaagcagcagattggctcaagtgcaatgccgtacaaacggaaccccatgcgctctgaacgttgctgcagcctggcccgtcacctgatggcccttatcatggacccactacagacagcttctgtgcagtggtttgaacgcaccctggatgatagtgccaaccgacggatctgtttggctgaagcatttctcactgcagatactgtattaaataccctacagaacatttctgaaggattggtggtgtaccccaaagtaattgaacggcgcattcgggaagagctgcctttcatggccacagagaacatcatcatggcgatggtcaaagctgggggcagccgacaggattgtcatgagaaaattagagtgctttcccagcaggccgctgctgtggttaagcaggaagggggtgacaatgacctcatagagcgcattcgggcagatgcctacttcagccccatccactcacagttggagcatttgttggacccctcttctttcactggccgagcaccccagcaggtccacagattcctagaagaggaggtatatcccctgctaaaaccctatgggagtgtgatggagctgaaagcggagctcaggctgtagagtagaagagaagtaaggaaaatcattgagagcttgctagttatgttgttgagaaattaattctgcagtggagagccacaccgtaatcctagcactcaggaaccaaaggcaggtatggatctctgtgagttcaagaccatcctgatctacagagctagttccaggacagccaaggctacacagagaaaccctgtctcatacaaacaagcaaaca

SEQ ID NO: 3438 - DNA, 1683 bp, Cricetulus griseus
caaaggtcactctcagagctattcctaaggtaattacacaatgtggtccatcttcgacaattgaatataattgtccaccaactcgtgaaagtgttcatattagaagagagagtgaaaatcagaatagggagagttgtgacatgtctttaggtacaattaacaccaggaacagcactttgaatattcctttttcaagttcctcttcctcaggagacattcaaggtcgaaacacaagtcccaatgtttctgtccagaaatccaatcccatgaggattactgacagtcatgggaccaagagccacatgaaccctcctgtcacatccaacatgcatggagtagcaaggccaactttaccacacccatctgtatctcatgggaatgctgaccaagggcctcctgtacgtcaggctaactcttcagttgcccagaggtcaagacatcccctgcaagacagcactggttccaaaatccgccaacctgaaaggaatcgttctggaaatcaaaggcacagtaatgtactttgatccaagtcttcctcatcttcctctctctgctggtggcagcatgattcttggacgtcagcaacctgccacagagaagagagggagtattgtccgttttatgcctgacagtccgcaagtacctaatgataattcaggtcctgaccagcatacgctgtcacaaaattttggtttcccctttattcccgagggtggcatgaatccaccaataaatgcaaatacttccttcattccacaggttacccagcctagtgccactgctcacaacataagccatatcttgggtcatgactgcagctcagctgtttaaatccagagaaactaagtgtgaatgtttgggttgaagcaacaactgttgtaaatgcacctgcacattgagagagcttgtgtgcatatttgtctttgttctggataaccatttttcaattagcttctgattataaggaagtcatgtcagagaggatgcatacactggggttgtcaaaacaatgacctttcatttctgagtgatgtgctttctttaatcatctaaatgatttacctttccaaattttgattatgtagtcttttcttccctaagtactaatgaacaagaagttgaagagatcttggcacatgctggatggtaggaaggagctgagatagctttcttacatagacttctttcttaattatacttttaataaactacctaaatttcatgtcttgttcttcaaagtagagaaccatattgtcctttaatgtgccaagatcatgtatagcaaaagtcttcctgagacaatgagccttaaaaatacaaagctaagacaaaatacagaaatgctttccacttagtacttggattttgcattaggccaaagaatatcagcagttttactgtggattttcctagggtcagttagtgactagtgcttcatcagttgacttgatgtagtattctctcttcattctatttatttggtcttgaaataaattaatttacaatcacttaaatattagaattgctcagtaaatattgtgtttagaagacacatttgagtcttttcagatacttctgaatagtttaagctgtctcagtattttcacttactatttatattaataattgcattgtaaattgcattattattcttcataacaattatagtaagaaaatgaattc

SEQ ID NO: 3439 - DNA, 1683 bp, Cricetulus griseus
gaagatggcggcgcgcaagggccggaggcgcacatgtgaaactggggaacccatggaggctgagtcctgcgatccaggatccgaaagcccatcgcaggtctacctgcccggcaaggggccgccactgggagaaggggaggagctggtaatggacgaggaggcctacgtgctgtaccatcgagcgcaaactggcgccccttgtctcagctttgacatagtccgagatcacctgggcgacaaccggacggaactccctctcactcttttcctgtgtgcaggaacccaggctgagagcgcccagagcaatagactgatgatgcttcggatgcacaatcttcatgggaccaggccgccaccctcagagggcagtgatgatgaagaggaggaagatgaagaggatgaagaggagcggaaaccgcagttggacctggccatggttccccactatggtggcatcaaccgagttcgggtatcctggctgggggaggagcctgtggttggagtatggtcagagaagggccaggtggaggtgtttgcactgaggaggctcctgcaggtggtagatgacccccaggccctggccattttcctccgagatgagcaggcccatgtgaaacccatattctcctttgctggccacatgggtgagggctttgcccttgactggtcccctcgagtgcctggccgcttggtgactggcgactgtcagaagaacatccacctctggacgccctcagacggtggctcctggcatgtggatcagaggccatttgtgggccacacacggtctgtggaggatctgcagtggtcgccaactgaagacacagtgtttgcctcctgctcagctgatgcctccattcgcatctgggacatccgagcagccccaggcaaggcctgcatgctcaccacagccactgcccatgatggggatgtgaatgtcatcagctggagccgaagggaacccttcctgctcagtggtggggatgatggaaccctcaaagtctgggacctacgacagttcaagtctggctctcctgtggccaccttcaagcagcacatggcccctgtgacctctgtcgagtggcaccctcaggacagtggggtctttgcagcctcaggtgctgacaaccaaatcacacagtgggacctggcagttgaacgggacccggaggcaggggaggcagaagcagatcccgggctggcagcactcccccagcagttgctgttcgtgcaccaaggtgagactgatctgaaggagctgcactggcatccgcagtgccctggggttctgatcagcaccgccctgtcaggcttcaccgtcttccgaaccatcagcgtctaaggtggccggcacttggcctcaggccttgactcttcgtgggaattggatctgttaactggcttcagtataagatttctctcagtgttgactcctggcttgacccttagacctctgacccaggtcccagttctggctgttgatcgactccaggaattttaagggttttgccatgctgggccaagtctgggtctgggttgtttcagtggaatttagttttccctttgctttctggccagctaggtctggctgggatccacgttgggaactgtgtgtggtcccctcactgtgctgaccactactgtactggagaagggtctggggcttctgctgcagtaaaggac

SEQ ID NO: 3440 - DNA, 1682 bp, Cricetulus griseus
ctctgaagaccctgaggaatcttgggaaaacttagtttctgatgaggatctttctgcactgtccttggagtcaacaaatgcagaagacttggagcctattaagaacctcttcagaaagctgcagagcacacccaagtaccagagactgctgaaggaaagacagcagctgcctgtgttcaaacaccgggatttaattgtggaaaccctaaaaaggcaccgggttgtggtcgtggcaggtgaaacaggaagtggcaaaagcactcaggtcccacatttcctgttggaagatttgcttctaaatgagtgtggagcaaggaaatgtaacatagtctgtacccagccccgaagaatactcagctgtgagtttggccaccagggtgtgtgatgaattgggctgtgagaatggacctggaggacattgatactggaagaacaaaagaaaataaggtaccatgaaagcagtcagatgagttccttggtggagacctttgtcagtaaagctagtgccctgcaacgacaggggagagccgggcggatccgagacggcttctgttttcggctgtacacgagagaaagatttgaaggttttctggactattctgtacctgaaatcttacgtgtgcctctggaggaactatgtcttcacattatgaaatgtgatcttggctctcctgaagactttctttccaaagccttagatcctcctcagcttcaagtaatcagcaatgcaatgaacttactcaggaaaattggagcctgtgaactaaatgagcccaaactgactccactgggccagcaccttgctgctttgcctgtcaatgtcaaaattggcaagatgctcatttttggagccatatttggctgtctcgacccagtggcaacactagcggcagttatgacggagaagtctccttttatcacaccaattggtcggaaagatgaagcagaccttgcaaagtcatctttggctgtggcggattcagaccacctcacaatctacaatgcatatctagggtggaagaaagcaaagcaagaaggaggctaccgttctgaaatcacatattgccagagaaactttctcaatagaacatcgctgttgacactagaggatgtgaagcaggaactaatgaagttggttaaggcagcaggattttcatcttctagctgggaaggaaagaaagcctcacagacgctctcttttcaagatattgcccttcttaaagctgtactggccgctggcctgtatgacagtgtggggaagataatgtacacaaagtcggtggatgttacagaaaaactggcttgcatggtggagacagcccaaggcaaagcacaagtccacccgtcctcagtaaacagagacttacaaacttacgggtggctcttataccaggagaaggtgagatatgccagagtctatctgagggaaactaccctcataaccccttttccagtcttgctttttggaggcgacatagaagttcaacaccgagaacggcttctgtctgtggatggctggatctattttcaggccccagtaaaaatagctgttatttttaagcagctaagagttctcattgattctgttttaagaaaaaaaacttgaaaatccaaagatgtcccttgaaaatgacaagattctacaaatcattacggaattgataaagacagagaataattga

SEQ ID NO: 3441 - DNA, 1682 bp, Cricetulus griseus
  modified_base (164)..(164): a, c, t, g, unknown or other
gagtgcttcaatgcaacaaagctgctgacatcccatggcatgagcatccagattctgttgaatgcaacagagtttaactatctctgcccagccatcatcaatcaaattgatgctcggtcttgtctgattcatacagcaagtgagaagaaggcggaaatccctanaaaagcctattcttacaaatagcctggcttggtggcttcgtagccatttccatcatcagtttcctgtctctgctgggggtcatcttggtgccactcatgaaccggtgttttcaagtttctgctgagtttcctcgacttccactgataccctgggccagtcagatgacctcatcaccaccatcacgactaccatcacatctgcaccaccaccaccaccagaaccaccaccccacagccacagccagcgctattctcgagaggagctaaaggatgccggcattgcgacattggcctggatggtgatcatgggcgatgggctgcacaacttcagtgacggccttgcgattggtgctgctttcactgagggcctgtccagtgggctgagcacctctgttgctgtgttctgtcatgagctgcctcatgaactaggtgactttgctgttttgctaaaggctggcatgactgtcaagcaggctgttctctataatgccctgtctgccatgctggcgtatcttggaatggcaacaggaatattcattggacattatgctgaaaatgtttctatgtggatatttgcgcttactgctggcttgttcatgtatgtcgctctggttgacatggtgcctgagatgctgcacaatgacgctagtgatcacggatgcagccgttggggatatttcttcctgcagaatgctgggatacttctgggtttcggaattatgttactcatttccatatttgaacataaaattgtgtttcgtataaatttctaattaggttctaagccctagcatagacaagcactgctgtttgtagttggagtagatgacagaaatatgttcatatgctgtgatacacagcatgtaaaactagtggattttgtgatttttgtatcaaattttgccatttactatgcttataaagtcagttacgttgggaaacataaaggtacgttttaatatttaagttattctgttttggaaatataaattctatgtgcgattcaccagtattaccagtttattgtatgttttggcatgacatgttctgtgtatttttagagaaagtatctttaatactcttttgtacaactttaatattagttgcctgctggagttagacccctgcaaatgtatttagttaatccaaacaatgtgtcagttgacagaaactaggattttaaatctgtgtatggagataggccagatgagtaactagcgtgtgtcaccagaagacttggttttcaccaacggatgttacactcaaagttacgtgattgtgtgttctggttgtctaggaccccaaatggcaggtattaaaaccttgatccatgtgaggacgttaagacccattctgaatatattttgacttcttggattcaaaaagcacttgctctctttcagtgctttaaaatgtcattgtaagcaaccgtccttttatgtatggcattgtagatgcattagggctgtctgtagcactgtctagatgtttcttaaaaaaaataaaattgtcaactca

SEQ ID NO: 3442 - DNA, 1682 bp, Cricetulus griseus
gctcagctcagcatgctgcgcgccgctctcaccactgcccgccgcgggccgcgcctgagccgcctgctgtccgccgccgccaccagcgccgtgccggcccccaaccagcagcctgaggtcttctgcaaccagatcttcattaacaacgagtggcatgacgccatcagcaagaaaaccttccccactgtcaacccttccacgggagaggtcatctgccaggtcgcagaagggagcaaggaagatgtggacaaggcggtgaaggccgccagggcagccttccagctgggctcaccctggcgccgcatggatgcatccgacaggggtcggctgttgaaccgattggccgatctcatcgagcgggacaggacctacctggcggccctggagaccctggacaatggcaagccttatgtcatctcctacctggtggatttggacatggtcctgaaatgcctccgctattatgctggctgggctgataagtaccatgggaaaaccattcctatcgatggcgacttcttcagctacacccgccacgagcctgtgggcgtgtgtgggcagatcattccgtggaacttcccgctcctgatgcaagcatggaaactgggcccagccttggcaactggaaatgtggttgtaatgaaggttgccgagcagacaccactcactgcactctatgtggccaacttgatcaaggaggcaggcttcccacctggtgtggtcaatattgttcctggattcggccctactgctggggctgccatcgcttcccatgaggatgtggacaaagtggcattcacaggctccactgaggttggtcacctaatccaggttgccgcagggagcagcaatctcaagagagtgaccctggagctggggggaaagagccccaacatcatcatgtcggatgctgacatggactgggctgtggagcaggcccactttgccctgttcttcaaccaaggccagtgctgctgcgccggctcccggacctttgtgcaggaggatgtgtatgatgaattcgtggagcgcagcgttgcccgggccaagtctcgggtggttgggaacccctttgacagccggacggagcaggggccgcaggtggacgagactcagtttaagaagatcctcggctatatcaagtcaggacagcaagaaggggcgaagctgctgtgtggcggtggtgcagccgctgaccgtggctacttcatccagcccaccgtgttcggagacgtgaaagacggcatgaccattgccaaggaggagatctttggaccagtgatgcagatcctcaaattcaagaccattgaggaggtcgtggggagagccaatgattccaagtatggactggcagcagctgtcttcacaaaggacctggataaggccaattacctgtcccaagccctccaggctggcaccgtatggatcaactgctatgatgtgtttggagcccagtccccatttggtggctataagatgtcagggagtggcagggagctgggcgagtatggcttgcaggcctacactgaagtgaagacggtcaccgtcaaagtgccacagaagaactcgtaagcaaggtagtgccagcttcctcacccagcacctgaaagcccagcaagaccctgagaaaaaaacagccatgcacacttgcctctgagaagaaaactgttcaccaaagtgtc

SEQ ID NO: 3443 - DNA, 1681 bp, Cricetulus griseus
ggatgtggaccagtacatgctgggcatcctgatttacattcagaactcagactatgaggagatcaccatcgaccccacgtgcagctggaagccagttcctgtgaagcctgacctgcacatcaaggaggagcccgatgggccagtgctgaagcgctgccgcactgtgagccctgcccatgtgctcatgcccagtgtgatggagatgattgcagccctcggcccaggcgctaccccctttgcccctttgcagcccccttcggcccctgcccccagccgactaccccagccagggttccaatttcctggggcctggaaccttcccagaatccttcccatctgctacacccaccaccccaaaacctcgctgagttcacccaggggccacccccaatgtcctaccaatctgacattcctggcagcctcctgactgcagacaagtctgccccttgcctcccaggccagacagctacaccatccaaatcctccccctccgtcccggcagcccctgggccaaccaaacacagggcccatcggcgaactggccttcaatcctgccacgggcatgatggggcctcccagcatgactggggcaggagaggcctcagaaccagctctggatctgctcccagaactgaccaatcctgatgagctgctctcctacctgggtccacctgacctccccacaaacagcagtgatgacctgctctcactctttgagaacaactgatcctgtgttaacccctggcctggcgaggacatactcacagatatcaccacagccttcccttctcacccagccccacaggatgcctggtggttctccctgaatctcctcatgcacacaccctgacctggagcctgccactgcccgcccctgatgaactggaagcagccgtgtgctccaaggggccccaggccagtggtcctcacagcctccctctgtcaagctcactgctacagaatggttcttgcgaggcgccctgcagccgtgtgtgcacaaccctatcccagactcatggccttgcacttgtccttccactgcctgctcccacccagcctgcatcctgtccagcactgacccttctgtttctgcttgtcctcagaagagctggctggcgaggctggctcctacggactcttggtctgcagctccagtggcttgagccttgcagtctcagaaccatacagagcaccagactgtgggggcctggcgctcccacccagctgaatgtggtccagggattcccccctccaccctgagcttcaggtggtggctggggtggggacaataaagcacaacaatgtacatagtgtagaaatgctaacagctgggaaagggaggggacagctatttaagtcagcatggtcctctgtggactgactggtgtggcctactgagtgcagacagctcagaggagggtggagtgtcagcccctctaggggtgggctttcagactcagctctgtgtaaattctccagtgagctgctccccccgagttcctcttttctgtgaaagtgaagaattagtacagctgtgttttttaaaccacctcatctccaccctgcggcccacacccaggtgggggaggccattgcatctactggcaaagcgcctgggcctgcaagcagggcgctagcctgttgtgtctcctgtctgtgcgatctattaaaggactccctc

SEQ ID NO: 3444 - DNA, 1681 bp, Cricetulus griseus
ctcctctccacggccgttcgcgccaccatggacctctctgccatctacgagagcctcctgtcgttgggcccagacctgtcatccgaccacggagggaccgacccctcggtcttttggagcataaactcgtctgactccatcccagccggggtcacttcccgcctgaccggccgctccaccagcctggtggagggccgaagctgcggttgggtgcccccacccccgggttttgcacccttggctccccgcccgggccctgaactgtcaccctcaccgacttcgcctactgcgactcccaccaccgcctcccggtacaagaccgagctctgtcggacctactcggagagcgggcgttgtcgatacggggccaagtgccagtttgcccacggcctgggtgaattgcgccaggccaatcgacaccccaagtacaaaacggaactctgccacaagttctacctccagggccgctgtccctatggctctcgatgccacttcatccacaaccccaacgaagacctggctgccccgggccagccccatgtgcttcgacaaagcatcagcttctcgggcttgccctctggccgcagaacctcgccgccgccaccaggctttcctggcccttccctgtcctcatgttccttttcaccctctagctccccaccaccacccggggaccttccactttccccttctgccttctctgctgcccctgggacccctgtgactcgaagagaccccgttccagcctgctgcccctcctgccgaaggtcaacccctaacaccatctgggggcccttgggtggcctggctcggagcccatctgcacactccctgggatccgatccagatgactatgccagcagcggcagcagcctgggtgggtcagactcacccgtctttgaagctggggtgtttgggcctcccccacccactgcacccccaaggcgtctccccatcttcaatcgcatctctgtttctgagtgacaaatgcctaactagtgtgggtcagctagatctcaagacattccaaaatgcattaacccactcccctggtgctgtgctggggcaggtccctagtttgcaaattcagtgtttgggtgtattggttcatgaggtacctaaaatgtagcatttttgtgggggacagttgacagttggtcttccaggcccaactcttttgggttgcttctgagatagggcttagtatagagcccaggctgtctttgaacttgagataatccttccttagattcctaagttttggtgttatataggcatgcaccagccccctccccaactctggtctcctggaatcttaagtgctgtgaagagctggctcccacaaccccatcccagtttttactagacccggagtttcagtgtctggtggttgaagcctcccctgacggagaatcctggtgctcaaatttccctccgaaagcaaatagccaaagccattgccaaatcccttctccaaccagtgggccctttatttatgacgacttttatttattgtaataagattttatagtatttatatatattgggtcgtctacttcgtgttttctttttgtaatattaaaatggatactgtattaagtatactataatatattaagtaatatattgctaccttacaggtctatttttgtggggttttatggaatttttaaataaaatc

SEQ ID NO: 3445 - DNA, 1681 bp, Cricetulus griseus
ggattaaaatattatcaattcccaagaaagtgtaactgtcagcaccacaaacatcagtcctgtgccgccaaaatcttttgccataaaccatgacaccgcatactgtggcagagatgctgtgaaaattttactggttcttttggatgaagatgcagccagtgctcccaccagaaacagagcagagcttttatataatgatgagagtacagttccacacaatggaacttctattcttacgctctttaggtctcccacacaagtgaataatacatcgattaagcccctcaaagaagcgaatctgtaagtcagtgcaagacaagaaaaaaaaaaagaatgaaggcaagaccttaattaggtcacagttttgcttgcacttaataaaagatgactacatcatgagcaagaataaatggaatgttaatttatcgtcaaagccattgcatgttcttcacttggaaaatgatgtttctgaaggtgcacattcctctgttggaagagcaagaattgaaagaagttctgaaaatgtgcatctggacggaagtaaagatgacaaaataccaagaaaatctacagaaaataaaatatcaaaaggaaacaggtggatttagacagtaacaatattcactgtgagaatggaaatgaactaaatgtattgaggtgcacatgttaaccactgttcgtaaataccagcaagtcagaattatgcagaatttttatgaagtttaatgcacaagtcaaagcatatcatttagattattacatatctttaactatatttaaaagtacacacatttagggcaatacacaagtcacgtcaacattaagggcttttctctccacttgcaatgaattgtttttttcttgaaagggtggcgtggaccaataggtatcagacttgccagcagggtcggtagactcttcccagcatacacctgagcactgaaagagaacaaacagcaactacaattaccacacagggttaagaaaaattgtggacctatcataatgaattctgaataaatcaaaccacaattactgacttttaaaaattctccattttgacagggtcacctgatatgtggtagatgtgaaccatggccttactcgattttgttatggtcagatccaaatcagttaagctcagagcttttttatagaattaaaatgtaggaattgaatttgtaaaagctactcactgtcaaaatctctccttcctataggaaacttagctgagttttcttcatccccaatttctctcttttcttgtgttgactcagtattctgaactccattctcagctgggaaagctactgatcctttcagagcgaggtaaggctttagagccagattcagtggcagaccatgatttatgagattctgtttggagcctgtgttctgtgaagagaaggttggtttgtattccagctgtcttcttcagaatagagctaaaatacagtggcacaacattcttgctgataaagtctaagatactctacactgtttttcacttctaaaatatctcatatacaagaaacaaagatttttttaattagatgggcccatacctggtatgtataaaattatactagttaccttaatgcagactgtgactctgcatgtattccccatttataaaattaaaataccaagtttacttttatgttgatttataatttataaa

SEQ ID NO: 3446 - DNA, 1680 bp, Cricetulus griseus
  modified_base (1628)..(1628): a, c, t, g, unknown or other
  modified_base (1636)..(1636): a, c, t, g, unknown or other
  modified_base (1670)..(1670): a, c, t, g, unknown or other
cctacgggaacccgtacctcctcgtgcgctatgacaacctgtctcggaccatcatggcctcctatccaggagcgcaaagacagggaagagcgtgaacggctgctgcgctcccagactgactcactctttggcgattctggtgtctatgacacacccagctcctacagcctgcaacaggccaatgtgttaacagaaggtccccgtggctctgtgctgcgctatggctccagggatgacctcgtggctgggcctggcttcggtggtgcccgaaatcctgccctgcagacgtcattgtcctcactgtcgagctctatgagtcgggcaccacggacatcttcttcctccctgcaggctgaccaggccaacaacaatgccccaggaacccggcctggcagtggttcgcacaggtcacctgcccatcagggcctgccttccccaccaggcactccccgatcgccctcttacacaggctccaaggccgtcgccttcatccacacggacctcccggaccggccaccctcactgactatgcagagggatcaccctcagctgaagacccccccaagtaagcttaacgggcagtccccgggcatggcccgtctggggcctgctgccagccccatggggcccaacgccagccctgcccggcacacgctggttaagaaggtgtccggcgtgggtgggactacgtacgaaatctcggtgtaagaactgagcaccactcatctgctgtgactccacggggaccaggacccccacagtagctccccaaccccatcaacttctctgccccagagagaggaggctacccaagcctggtgtggacacatcaacaggaaagaaagtcccgtctccacagcttgtactccggcctctgcctgtccatccacttacctactcacaggcagatggatccaaggctgtggactgtgatggggacctggactgcctcctccatcagccagtctcagccctgcaccctattgccctcagtccccaaggccagtccccaacggtcccatgggcccactctatcctttctggatgggttgctgtagtcccatgctcccagctgctcctaatacatggcctttcactgacctagctggtagcttgttgcttggcaaggcctgtgctttgcagggagtgtaaccctggcctgctctgggttgtgatggatggatggatggatggacagataatctagctgtatcaggggtcccagctccctgtgttcctgtcttgcctggctggtgggtttatgtccctgtgtctgtatgctgtgctgccgtgccacgtctgatgtgttagtgctcggctgccactgttctttcatcaaagccttaacttctgctttatgctcttgtgggaggtgatgggggggatggtaggccagagcagggaggggccagatgctgccccagggactgggtggggcctggagccccctccctccctctcaggccttccctgccaaactggagagtcctcaccccaaagcatacagagttcccagcactggctcagccagtgctgctggaaagcacatcagggaaggtcggttctccccctggcgtcagggacccgagtaagcacatggcagcgtccgcttgcattgtctgttttangtttttanatttacatctatttgttcactaccaaaaaaaaanaaaaaaaaaa

SEQ ID NO: 3447 - DNA, 1680 bp, Cricetulus griseus
  modified_base (1198)..(1198): a, c, t, g, unknown or other
ggccgagctccgcggctcaatctgcggggcgcctctggagcttctccatctttccggaccaggacgcggctgccggggagaggagggcgcaggacgcggcgatggctccgtggggactcccggggtccgctgtgctctctgctgcgatgttcttgggaggcgccatgagttcgccgctggtggccccggacaacactggcagccgcacgttacaatcccgagcagagacgactccatcatcacccaccaacaatgctgggaatgggcacccggaatatatcgcttatgtgcttgtccctgtgttcttcatcatgggtctccttggtgtcctcatctgccacttgcttaagaagaaaggctatcggtgtacgacagaggctgaacaggaagttgaagaggaaaaggtaggaaaagatagagtagaatgacagtataaatagaaaatagtagacaccgttgggcaaattgtccactacatcatgaagaatgaagcaaatgcagatatttgaaagccatggtagctgataacagcatcggcgaagttgaaagccctgtgacccctagcaccccagggagcccacctgtgagtcctgggcccttgtcaccaggaggcaccccggggaagcatgtctgtggccaccatctgcacacagtgggaggtgtcgttgaacaggatgtgtgccaacgctgtaggcacaagcgatggcacttcataagacctaccaacaagtccaaagaagcccggccacggcgtcacggggaggtcactgtcctctctgtcggcaggtttagggttacaaaagtggagcacaagtccaaccagaaggagcggagaagtttgatgtctgtaggtgggactgagagtgtcaacggggatgtgcctgtgacgcctgtgaagagagaccgaagtggcacggagtagcagcattggctttcttgaagagttctaagatcctccaaacttgcaagatatgaagttgactagggaatatttttatatcttttatacaatttctatcatgaagtcattgggcatgtggctcaaacccaaaagggaatatttttgctattctgaacacagaattcagtttggtttgaagaagttttgggattgaaagtctgatgaaaatttcagttcaatttcccatcgggaaagagctcacgtcctttaaatggtgatgggctaatatgtaaaaanaacaaaaaaaacaagaatatgcaaagatatttaaaattgtatttatataccaagagtacattttaaacattttaaagtatttgagaagttgggtgactggcttccagagatgccaaaaattcagcattcgatactttgaacacatccgatttgtgttggtttacactgtcgggtgagaatcctgtgtgttcccagcacaggcgttgtttatggatccctcctcctttctcttccttagaaggactggagatcctggaggagctcactgtccacaacactaatgatggatagcttcttggtgtgatgaatgaatcagttgccacctcgatagtaaaaaaaaaaaattgtaaaggaaaattttcattgtttccagtgtcaatgtatttttaactgtctggtttgtactttttatgaattttgtactaccaagcaaagttaaaaataaaagggttaaaccagtgtgcttgaatgagctacatctt

SEQ ID NO: 3448 - DNA, 1680 bp, Cricetulus griseus
gggaaactccaggctgcggcttcggccggcttgacaggcgaggtctccgccggctgcgtgttcccctcacctcgctcggcctcccggtcgcgcccggccgccgccgttccgccgtccttttctcgagtctccccttccctatgttccggggccggagtccgggaagcaaagaccctcttgctcagtccccatcatgtccgaagtgaccaaagatctgctggagctggtgtggggcaccaagagcagccccgggctgtcggacaccatcttctgccgctggacgcaagggtttgtgtttagtgaatcagagggatctgcattagaacagtttgaaggtggcccctgtgctgttattgcacctgttcaggcatttcttttgaagaagcttctgttttcctctgagaagtcgtcctggcggattgctcagaggaagagcagaaggaactctttgtcataccttatgtgattattttagaaagtgcttgtgacagctctggatcaggcattgaaaacataaagaattcaattgaagatgcaaatgagcctttgatagaccccgtgtacgggcatggcagccaaagcttaattaacctcctactgacgggacatgcagtttctaatgtatgggatggtgatagagaatgctcaggaatgcaacttctcggtatccatgaacaagcagctgtaggattcttaacattaaatggaagctttacgatattgtaaggttggttcttacttgaaatctccaaaattccctatttggattgttggcagcgaaacccacctcaccgtgttttttgccaaggatatggctttagttgcccctgaggcaccttctgaacaagccagaagagtttttcaaacctatgatccagaagataatggattcatagctgactcccttctagaagatgtgatgaaagccttggaccttgtttcagatcctgagtatataaatctcatgaagaataaattagatccagaaggattaggaatcatattattgggtccatttcttcaagaattttttcctgatcagggctccagtggtccagaatcttttactgtctaccactacaatggattgaagcagtcaaattataatgaaaaggtaatgtatgtggaagggactgccgtggttatgggttttgaagaccccatgctacagacagatgacactcctattaaacgctgtctccaaaccaaatggccatacattgagttactgtggaccacagagcgctctccttcactcaattgagttacctgagtatttacattgaagattgtaaaaaacgggtgtttaagtggggattcatgactggctacattaagctaaacactggtattgttgattaactgtaaataacaattaaaacacattttcagtgtttaaggtatgtttaaattatttgttctaaagctttatgttaaaggttatcctattttaatcctttctgtgaaatttactagcaaaattaagctttaattgaagttcatcacttctgcagtcaggtaattggttgttatttaccagattataaacacaatattacagcacttttataataagactcagatacaaaaacctgccggggatctcattccattcagattcatgttattgtattatttttagcagcctctacaccaaatatgcagaagttaggttttgtt

SEQ ID NO: 3449 - DNA, 1680 bp, Cricetulus griseus
aggcggctggccaccaagtcagggggtcgtgaggttccgtgcggaccagcccacagcggctcattcggagaggtgggtccccctcggagaggtgaaaggctccgctgcgacacgcccccaccccccgcggtgcaagtggttcagcccgacaacttttcattcataaaaaagacaagactccgcgaggctccagtgagtcagaaccgcagccgccgacgcggaccccaccgagcatccagcccagggcatgtaccgagacttcggggaaccgggaccgagctccggggccggcagcgcgtacggtcgccccgcgcagcccccgcaggctcaggcgcagaccgcccagcatcagaagttccaccttgtgccaagcatcaatgctgtgagtggcagccaggaattgcagtggatggtgcagcctcatttcctgggacccagtggctatccccgacctctggcctatccccagtacagtccccctcagccccggccaggagtcatacgagccctagggccacctccaggggtgcgtcgtaggccctgtgagcagatcagcccagaggaggaagagcgccgcagagtgaggcgtgaaaggaacaagttagcagcagctaagtgcagaaaccgaagaaaggaactgacagacttcctgcaggcggagaccgacaaattggaggacgagaaatcgagcctgcagcgagagattgaagagctgcagaaacagaaggagcgccttgagctggtgttggaagcccatcgccccatctgcaaaatcccagaaggagataaggacacaggtggtaccagcagcaccagcgggcagcccaccagccccctgccgcccggtaccttgtatctccctttctccagggcctgtacttgaacctgaagccctgcacacccccacgctcatgaccacaccgtctctgactccctttactcccagtctggttttcacctaccctagcacaccagaaccttgttcctcagcacatcgaaagagtagcagcagcagtggcgacccctcctccgaccccctgggttctcccacactcctggctttgtgagacacccaaccacaccccttgctggtgctaccccagcctccttttccccactgatccagcaggcctggaccataaccatgctccaaaccagcaggtcctttatctctcagattagaacaaacatattatgctttgatgtagagccagcttgggggggtccccaaagctgctcattgtttctctagagctggcctatcataatttgcacaaaattagagacaaaatatgtcccctttaggccagagaaatcctggcagcccagtctttgtagatccccagtggtcctttggagccctttcccttccttgcagaccactctcatgctatgtcactttcttcatacgatccagccagccctacacccagacaggtgtccttttactagtctagaacactaactcacacagctccactgccagcagcgacagggcatcctgcaggctcctcctgaatggcacaactcaggaggcactggtggcttctgtgatgagctgagctgcactcccaagctttgagaagcctctacttccagggtatccaagcctccacatcaagggcagctgctatttatttcctaaagagactaattttataccaaccttcaaatgaataa

SEQ ID NO: 3450 - DNA, 1679 bp, Cricetulus griseus
gcaaggactctgtacggcagataattttctcctcccttttcagcccccaagggaacaagccgacgacagccggatgagcttgttgggaaagctggtctctatggccgtggctgtgtgtcggatccccgtgttggaatgtgcggcctcctggctccagcggacgcctgtgatctactgcgtgagactagccagggccctagtggacgactactgctgtttggttccgggctcggttcagacactgaagcagatcttcagtgccagtccccgtttctgctgccagttcataacctccgtgactgcactctacgacctgtcatcagatgacctcatcccacctttggacttgcttgaaatgattgtcagctggattttcgaggacccaaggttgattctcatcacgtttttaaatactcccatcgccgccaacctgcccataggattcttagagctcacgcccctcattgggctgatccgctggtgtgtgaaggcccctctggcttacaaaaggaagaagccttgcctttccaatggccacattggtcacaaggtcaccaaggactcaggcacaggcacagacagagactcgaacttgctgtactcgaagctgcacctgagcgtcctgcaggtccttatgacgctccagctgcacctgactgagaagaacctgtatgggcgcctgggactcatcctgttcgaccacatggtcccgattgtagaggagatcaacagactagcagatgaactgaaccccctcaatgcttcccaagagatcgagcttgcactggaccgcttggcccaggcattgcaggtggccatggcatcgggggccctgctttgcacgagagatgacctgagaacattgtgttcccggctaccccataacaacctgctccagctggtgatctcgggcccagtgcagcagtcgccacataccgctctcccccctgggttctacccccacatccacacacccccactcgcctatggggctgtgccagcccaccctgctgcccacccagcgctgcctacacacccagggcacaccttcatctcaggcgtgacgtttccattcaggcccatccgctaggtcggcccttctgagccgccaagcggctgtgtgccttgcacctgggccaaggaagccttcagagaggggtgctggtcccctggacaaggacccctgggaggcagcaggtggtccctccagctggcagaaccatcttggtactgatgtcccaagttgctgttgcctggatgcctcctacctggacatgttaaatatccagattggatgggtgacagggagtgcactgggccccctgcagagagccctgtgggtgtttttaaatataccagtcccagagtgatggtgtcactcatgcacagacaccctcagctggccaccagggaatgctggcatgtaagccgcccttcgggtccatttgccctgcctcaggaatgtgacgtgtctctgccaccaatgcaagttttctgcagctccatgagctcagagtgctgagggagagacccacgcttgtatgcagcactgggcactgctcagggacacctgttgggattccccatcaccttggaaaggatcttctgtgttttattttggggggtatctctaaattttcctttcatgtgttcaaaataaatttttttctaaacagttt

SEQ ID NO: 3451 - DNA, 1679 bp, Cricetulus griseus
accacggctccccggggccgctttccgtcctaccctccggcctcatcttcttctctggccgcaggccactccagtccgcatctcttcacctttccgcccacccctccgaaggatgtctccccagaccccgtcgctgtccaccccgggatcggccggctccgccaggcaagatgagaaagagtgcctcaagtatcaggtgccgcttcctgagagcatgaagctggagacatcccactcccgaggcagcatgaccaccctgggaggggcctcgtcctcagcccatcaccctatcaccacctatccgccctacgtgcccgagtacagctccggactcttcccacctagcagcctgctgggaggatcacctaccgggttcgggtgtaagtcgaggcccaaggcacgatccagcacagaaggcagggagtgcgtgaactgtggggcaacctccaccccactgtggcgacgagatggtactgggcactacctttgcaacgcctgtggactgtaccataaaatgaatggacagaaccggccccttatcaagcccaagcgaaggctgtcagcagcaaggagagcagggacatcctgtgcaaactgtcagaccaccaccaccaccctctggaggaggaacgctaatggggacccggtctgagcatggtcaccgccatggggtagagagggagagccctgctccatatgcacgaggagtttccaagtccacaaagaatccctctgaccccttctacttgcgtttttgcaggagcagtatcatgaagcccgaaagcgacagatctgtgtttttgaaggcagaaagcaaaatgtttgcttctttttcaaaggagctcccggtggtgtctgtgttccaaccactgaatccggatcccatttgtgaataagccattcagactcatattccctatttaacagggtctctagtgctgtgaaaaaaatattgctgaacattgcatataacttatattgtaagaaatactgtacatttgaggaagactttattgtacctggatagctgtaagaaaggcatgaaggacgccaagaattttaaggaatatggggaaaataaagtatggagggagatacagaagaaactaagtcttgatgtccaaaatgggcacgctgtcagttttgttttcccttttagtttgttttgatgcattaaaaaaagaagagagagaaagaaaaaaaaaaaaagagaaagaaaaaaaattaaaaaaaaaaaaaaaaaaaaaaaagaaaagaaaaaaaaataccaagaaaaaatgttgtaggcaaatcatttgttccgggctgtgagcctttgcaaaggaaatttcagatctgggcaatcagtgtgaaatctcaccaattgccagtgaggatttaagaatgtcatgtctaggcctccatgctctgtgaaccagtccctgtaattgttgtttgtatgtataattctgaagcaccaaaataagaaaagatgtagatttatttcatcatattatacagactgaattgttgtataaatttatttactgctagcgttaagaactgtctttttttttcttccagtttttaattgttttttttttttttgttttttagttttttttgtttaaaataaaataaaattaaaatattttaaaacaaaaaaaaaaaaaaaaaaaaaaaaaaaaaaaaaaaaaaaa

SEQ ID NO: 3452 - DNA, 1679 bp, Cricetulus griseus
caagttttcaatttgagtattctctaaatgaaacgtgggtaaagccttatataaagaagagagactccaatcaacaatatcaataataagttggaaaagaacgatgctgtccttaaacaacctgcaaaatatcatctatagcccgacaatcccctatgtcggcaccatttctgaacagctgaagcctggctctttgattgtagtccgtggacatattcctaatgatgtggacagattccaggtggacttgcagcatggcaacagcctgaagccgagggctgatgtggccttccactttaatcctcgcttcaaaaggtccaactgcattgtttgcaacacgctgacaaatgagaaatggggctgggaggagatcacctacgacatgcccttcagaaaagaaaagtcctttgagatcgtgatcatggtgctaaagaacaaattccaagtggctgtgaacggaaagcacactctgctgtatgcccacaggatcagcccagagaagatagacacactgggcatctacggcaaagtgaatgtccactccattggattcagcttcagctcggatttacagagtatggaaacatctaccctgggcctgacacagataagtagagaaaatgtatataagtctggcaaggcacatttgagcctgccatttgaagcaaggttaaacgcctccatgggccctggacgaactgttgtcattaaaggagaagtgaatacaaatgccaaaggcttcaacgttgacctagtggcaggaaaatccagggatatcgctctacacttgaacccacgcctgaacatgaaagcatttgtaagaaattcctttcttcaggatgcctggggagaagaggagaaaaatattacctgcttcccatttagttctggaatgtactttgagatgataatttactgtgatgtccgagaattcaaggttgcagtaaatggtgtgcatagcctggagtacaaacacagatttaaagagctaagcagtattgacacattatctgttgatggtgatatccgtttgctggatgtaaggagctggtagctaccatgattgtcaaaaccctaaaatacaaaacggcttatgtgatactggccatgtcaaatgcatctggctttcaccacattgtttatgttgttaagttgagctcatacaacatcaagttttatctggtattctcaggcctggccatgcagtacctctatgttcagaggaacaaatctggggcaatcccagcttactgctggtgaggctctgcacatggggtcccggcctggaaaaaccacactcaacaaatggttaaagtgcctattctaatataccagttaatagggatagaaggcatatttcttgtgtatattctctgagctgtgcatagacacagaggtgcccagaaccagtgtggtccctgttttctggcactcaggcatccatgattttacagtagggtctttctgctgacattgcattaaccccattagggggcatttgtagttaaggtcagaaaaatatactaatggatggaaaacattacttccccagtaatccttttcataatcagcatccaatcatatcttataagactgtataacacttatttagtcgtcattgctttaagctttataaaataattaatatgctgaacatggcagaaaaattgaggcaaaaa

SEQ ID NO: 3453 - DNA, 1678 bp, Cricetulus griseus
  modified_base (358)..(358): a, c, t, g, unknown or other
aacattgagctgtttgactaagctgtccctgcgattcaatggccgtgtgctcttcatcaaggatgtcattggtgatgaaatctgctgctggtctttctatggccagggtcgcaagctggcagaggtgtgctgcacctccatcgtgtatgccacagagaagaagcagacaaaggtggaattcccagaggcccgaatatatgaggagacactcaacgtcctactctatgagacccctcgagtccctgacaattccttgctggaggccacaagccggagccgcagccaagcttcccccagtgaagatgaggatgcctttgaactgcgggaccgtgtccgccgcattcacgtcaagcgctanagcacttacgatgaccggcaacttggccaccagtctgctcatcgagactaatgagacccttaggaagtcagagcacaagcctgctctagcatatagtggtgctggcctgctggaggtcaaggagcccggcagaggaaaggtcacacctgccctacctggtcctcgctcccccactcacttccagatgccaccccacttcctgcctggcagggagctactttagggtgagtgcactgacttccacctcctgtggagaacattccccaggcccttggcttagtgcccttctctctgctgaagagctccttcagttcctcagctgaggcccatgggaacagttctgtcctatgggaaaggaggctcctggtgctgcaaggatccaattttgaacagaaagagcagccttcttttttcttaaggtgtttaagcataggtatgacctgtattttttttttcttaaatctagaagttagcatggtggccttgcctataatcccagctacggagaagccgaggcaggaaaacaagttatagactagcctggacaacttggcaagtggttctgtttagtgacgagtctccaaatacatagtaaccagggcaacttaagccttttgaaaggcctctattcttttgggtcacttgaccatggaggtaccaaggtctagactggatgtgaattattcctctggctttggtttctcccttcttgctggtcctggccctcctaactggattctttccagaggaatgttgtcactggaggaagctgtttgcaagcctgacaaagtgtgtggccatcaacagtgctcaggacagaacacagaatgtcagcttcatcccttgaccactctcataactgccaaacggctgcacatagctcacgtctcagagcctataggcagatgccagggttagggttgggctctcacaaggccctgacagtgacatgatagagcaagggaaacgtgacttagtaatcatttggtgttaatcacagtcttgaatgtataaacagctctgagatgctcaggtcaagcaccttggtgatcagcagctactagttcttccagaactcactggaagtgagatgacaatccatttttttgaccaaatttaggctttagctttgaggctttcccacaaactttggaatgttgttgtatgaggccactggtctattttctcagctgtccccaagaagccctttagtattcagagtcccagctccatgctacatatttccagtttgttccttgacctccatatcccctttagcctcgaagtaaacactaacttctaataaattgtgttacactg

SEQ ID NO: 3454 - DNA, 1678 bp, Cricetulus griseus
ttttctgcacttaggtttattgtagggaagaagaaatccccacccattcttactcaccagagacagcatatgcgaaagtggaacagaagagggagaagcacaagggaaagccgaggggaaggaatctaatctctctggttaggacgcttgtggattccatatgtaagcatggaccaaggcacagcatgctattgtggctgggtttttggcaggtgtgtcaatgatgttttacaagagcacaaccatttccatgtacttagcttccaaactggtggagacaatgtattttaagggcatcgaagccggaaaaggttccctattttcctcaagcagatactatcatctattccatctctacagcaatttgcttccatgcagccgttatggaagttcagaacttgcgaccatcttactggaagttccttttaaggctcaccaagggcaagtttgcactcatgaaccgcaaagcactggatgtgtttggtactggtgcatctagagaatttcacaatttcatccccagactagacccacgatacacagttgtcacaccggagctgcccatagacttttcctgaagatgattgtaacttatggactgtgtttcaccattttctcccgaagagttaattatattcaacacagaaggggcccaagctgaacctcagtgttacttcaatgagagatgctttttctttctttccgtaccaatcagaaatacagaagctttttagaaaggcattgcttaataattaagcttcctctgtagccagaatctgattctggaccatgtagtgttgacatgatgatatattattgattaaatttatgtccacaaagaatattgaataatctatgtagaaatataataagagtatacttaaaaattactttaaaaaagaatgtctttagttcattccaatagaattcttggtcaaagctaagactatttctccacttcaggatttacaaaacatcacgggtacatggattcaatctgtgatttctaagctttgaatggatttctgtagctatggagtactgtagatgtggagacccctccatgggaattgtggagaaagtggtcactcttatttcagggatgtaaacatgggtctcatattatttgggccaatgtcatggtggtatccatgctcttttgttacagctgacagtcccatctctcttaggaacaaatggaaaccaacatgtgctgcagtgggaaaagtatgtctcagtgttcacaggagtgttacacctgaatattgtcaagcagatacttaaaggccaatctttacacctcctacaggcatagtaggtttgttttcacttccagtgagtgaactcttcatagctcagtttgaatgccattggtgttttagaaggggttaagatcctatggaatgaaagagctttgggccagtttgacagttggtaacctttcaaatgtctcacctaaaaggggtgttttacaactacaaatgtgaaaaatgcagtgattgctgggagttctcttcttcctaattggattcctgttcattaaccagttcacactggagttaagggacaacagacagttggtgctgattatggaagcagtcccggacagctgactgatatatgatcactgggtttttctggggaaagctgtacttttttaggttaataaaaggctaaa

SEQ ID NO: 3455 - DNA, 1678 bp, Cricetulus griseus
gagagccgccctcgagcggagcaaggcgattgagaaaaacctcaaagaagatggcatcagcgccgccaaagacgtgaaattactcctgctgggggctggagaatcaggaaaaagcaccattgtgaagcagatgaagatcatccatgaagatggcttctctggagaagacgtaaagcagtacaagcctgttgtctacagcaacaccatccagtctctggcagccatcgtccgggccatggatactttgggtgtggagtatggtgacaaggagagaaaggcggactccaagatggtgtgtgatgtggtgagccgtatggaagacactgaacccttctctgcagaactgctttcggccatgatgcgactctggggcgactcagggatccaggagtgcttcaaccgatctcgggagtatcagctcaatgattctgccaaatctacttggacagcctggatcggattggagccgctgactaccagcctggatccactgctttgaggatgtcacggccatcatcttctgtgtcgcactcagcggctatgaccaggtgctccacgaggacgaaaccacgaaccgcatgcacgagtctctcatgctcttcgactccatctgtaacaacaagtttttcatcgatacctccatcattctcttcctcaacaagaaagacctctttggcgagaagattaagaagtcacccttgaccatctgcttccctgaatacccaggctccaacacctatgaagatgcagctgcctacatccaaacacagtttgaaagcaaaaacaaatcacctaacaaagaaatctacacccacatcacctgtgccacagacaccaacaacatccaggtggtattcgacgctgtcacagacatcatcatcgccaaaaatctccggggctgcggactctactgacccctggcctcctgcccagcctgctgctgacttctcccctgaacccagagctctgctgccactcgatgctctgtgcactgaagaaaaacccagaggctggccctgggggaggaggaggcaccctttgagcatccccaccctaccccactccagctgcatgacacatgggaacagggttgggcagaggtgtggagtgccacacacatgccagagaccactgcctaccatctgggtgctgctcgctggccatctgtgccccatgtcagatgacagccatgtaaggaggaagcagatgcaagagaagcagaaataatgggtcctatccaaagtcctgggcccactagtgggagcagggaaccctgtgaagggcagctttcttcccttccccaggccaaaatgccaccagcagaaacagtgcccttcctagcagctcctggcctactcctcctccctacgttagcttcctgcgccagccacagctgcctgccctgcacaggggaagcagccttccacttcttggtcttctccctgacttctgacttgacccctgtggcctatgtgcaccttctagtcccaggccagaggctgggcaccccatgttccccttagcagagccttcttaggtgcagtgtcccccctcctggcccattgccatcacctaccctcattaactgtaattttgtaagagagtgacttgttggtttaataaatacctagttattgtaataatttattggctctttctacaaaaaaaaaaaaaaaaa

SEQ ID NO: 3456 - DNA, 1678 bp, Cricetulus griseus
gggatgcggcgtgagtggcagctgcggatcgagaggaccgggccggcggagcccgggcgtccccggggagaggcccgcggcggggcagcgcgacggccggagccggacttcaccccgccgagccccgcttggagggggtctgcgccccgtcaccatgacgacgccggcgaatgcccagaatgccagcaaaacgtgggaactgagtctctacgagctgcaccggaccccgcaggaagctataatggacggcacagagattgccgtttcccctcggtcgctgcattcggagctcatgtgtcccatctgcctggacatgctgaagaacacaatgaccaccaaggagtgcctgcaccggttctgctctgactgcattgtcacggccctgcggagcgggaacaaggagtgccctacctgccggaaaaagctggtctccaagcggtccctacggccagaccccaacttcgatgccctgatctccaaaatctaccctagccgggaggaatatgaggcccatcaagaccgcgtgctcatccgcctcagccgcctgcacaaccagcaggcgctgagctccagtatcgaggaggggcttcggatgcaggccatgcacagggcccagcgtgtaaggcggccaatgcctggatcggatcagaccaccacgatgagtgggggggaaggagaacctggggagggagaaggggacggagaggatgtgagctccgactccgctccagactccgccccgggccctgcccccaagcgaccacgtggagcgggtgcagggggcggcagtgtagggacagggggcggagctgccggtggggtttgcgggggtgctggttctgaagactctggtgaccggggtggcaccctgggagggggaaccctgggtcccccaagccctcccggggcccccagtcctccagagccaggcggagagatcgagcttgtgttccggccccaccccctgcttgtggaaaagggagaatactgccagactaggtacgtgaagaccactgggaatgccacagtggatcatctctccaagtacttggccctgcgcattgccctggagcggaggcagcagcaggaaaccatagagcccggagggcctggtgggggtgcctcggacacaggcggacctgatgggggtggtggggagagcggggttgccggaggcggcggcggcgagggtcctgaggagcctgccctgcccagcctggaaggtgtcagcgagaagcagtacaccatctacattgcacctgggggcggagccttcacgacgctgaatggctccctgaccttggagcttgtgaatgagaagttctggaaggtgtccaggccactggagctctgctatgcccccaccaaggacccaaaatgacatcataaggggacagcaagaggatggggaccacagggtgtcgctgtgtcccggctcactctgccagcttcatctcccaatgccccccagcctgacagcaagaggacacaaacaaggacagatggcttttatacaaagtatctatatcagattcttctatattgtacagcacagggcctatgcccactactgccttttctactggccctaactgcccaccctgcaggtgacgggaaagtgaacacagcccctccccgccctcctacctaccaacaacaacaatttgcttacttactt

SEQ ID NO: 3457 - DNA, 1678 bp, Cricetulus griseus
caggatctaactcaggagcagaccgagaagctgctgcagtttcaggacctgacgggcatagaatccatggatcagtgtcgccttgctttggagcagcataactggaacatggaggctgcagtccaggacagactgaacgagcaagagggtgtgccgagtgttttcaatccacctccttcccgacccctacaggttaatacagctgatcacaggatctacagctatgttgtctcaagaccacagccaagggggctgcttggatggggttattacttgataatgcttccattccggtttacctattacacgatacttgatatatttaggtttgctcttcgttttatacggcctgaaccctcgcagccgggtcactgaccctgttggggacattgtttcatttatgcactcttttgaagagaaatatgggagggcacaccctgtcttctaccagggaacgtacagccaggcacttaacgatgccaagcgggaactgcgatttcttttggtttatcttcatggagatgaccaccaggactccgatgagttctgtcgcaacactctgtgtgcacctgaagtcatctcattgataaacagcaggatgctcttttgggcttgttctacaaacaaacccgagggttacagggtctcacaggctttacgagagaacacctatccgttcctggctatgattatgttgaaggatcgccgcatgactgtggtgggccggctagaaggcctcattcaacctgatgacctcatcaaccagttgacgtttattatggatgcaaaccagacttacctggtgtcagaacgactagaaagggaagaaaggaaccagacccaagtgctgagacagcagcaggatgaagcctacctggcttctctgagggcggaccaggagaaagaaaggaagaagagagaggagcgagagcggcgacgccgaaaggaggaggaagtgcagcagcagaagctggcagaggagagaaggcggcagaacttgcaggaggaaaaggaaagaaagttggagcgcctgcctcctgagccacctgcagatgaccccgagagcgtcaagatcattttcaagttacccaatgactccagagtagagagacgattccagttttcacagtctctatcagtcatccatgacttcttattctccttgaaggaaagtcctgagaagtttcagattgaagccaatttcccaagacgggtcctgccttgtgtcccttcagaggaatggcccaccccccccacactgcaggaggcgggactcacgccacacagaggttctctttgttcaggacctgacagacgaatgactacttttctgcctccttcccctccccaaccccggaacagactgctcacagtttacgaataactttgtttctgtttgttttgtaatgataacgaccaaaggaatgaggctgacttaggtgttatttttttttttaaattttatttgataaagagcagatgccctggggctccttagcccaaggcagtgtaataaaggtgccctgggctaacttgcgcttatttttgccactgctcctctcatatcccagagaggtcatttgaatttcctgaagaaatctagtgtacttctaaatttttttcattaaaggtttacattgtattgtaggttaacattaaacgttttataacaaaaaaa

SEQ ID NO: 3458 - DNA, 1678 bp, Cricetulus griseus
gcggcggcacgcccgaaggccgctcgtcatcccaacggacaccgcaggccgggcagaggacggccctagcgcggtcacggcggcggcggcagcggcggcggcggcggaggaggagagccggcttcggcagcgcaaccgcctgacgatcgaggacgacaagccggccgccgagcgctgtctggagcagctggtcttcggcgacgtcgaggacgacgaggacgcgctgctgcggcggctgcggagctcgcggggtcacctacatggaagctccgatgactctgaagtggaagatgaagccaaagacactcttccttctcagaagaagccagtttgggtggatgaagatgatgaagatgaggaaatagttgacatgatgaacaatcggtttcggaaagaaatcatgaaaaatgccagtgaaagtaaactttcaaaagataagcttcaaaagagacttaaagaggaattccaacatgcaatgggaggagtacctgattgggcagagactgggaggaagcggagaaaatcttcagatgatgaaagtgaagaggatgaagatgatttgttgcaaaggactgggaatttcatatccacatctgcttctcttccaagaggaatcttgaagatgaagaactgccggcctgccaatgctgaacggcctaccactgctcggatctcatcagtgcagttccatcctggtgcacaggtggtgatggtctctgggatagataatgctatctcactatttcaggttgatggcaaaacaaaccctaaaatccagagcatctatttggaaaagtttccaatctttaaggcttgtttcagtgctaatggagaagagcttttagccacaagtattcgcagcaaggttctttatgtctatgatatgctagctggaaagttaactcctgtacatcaagtgagaggtttgaaagagaaaatagtgaagcgatttgaagtctccccagatggatccttcttgctcataagtggcattgctgggttttctcatttgctatcaatgaagaccaaagaactgattggtagcatgaagattaatggaagaatttcagcatccacattctcttccgatagtaagcggatatatacgtcttctgggaatggagaagtttatgtgtgggatgtgaattcaaggaagtgcattaacagattttttgatgaaggcagtttgtatggattaagcattgctacgtcaaagaatgggcagtatgtggcttgtggttctaagagtggagtggtaaacatatacagtcaagattcttgcctccaacaaacaaacccaaagccaataaaagctataatgaacctggtcactggtgttacttccttggcattcaatcccactacagaaatattggcagtggcttcaagaaaaatgaaagaagctgtcagattggttcatcttccttcctgtacagtattttctaactttccagtttttaaaaagagtactgtttctcgtgttcaaaccatggatttttctcccagaagtggatacttcgccttggggaatgagcagggcaaggccctgttgtataggttacaccattactcagacttctaaagatgtttttcttgaaattcaattgaacccatttcagtacatcttcccagaaattttcaaatgtgtaggataatatatagataatgacttatggaa

SEQ ID NO: 3459 - DNA, 1677 bp, Cricetulus griseus
gtcggaggtgggcggctttccctgagtggctgctgaagccggagctcggacgggatgtttcgtctcaacgccctttctgcattggcagaactagctgtgggctctcgatggtaccatggggtatctcagcccgcacagaccaaacgaagactgatgatggtggctttcctgggagcatccgcagtgactgccagtactggtctcttatggaagaaggctcatgcagagtctccgacttgtgtcaacagcaaaaagactgatactggtgataaagggaagactaaacaccaagaggaagtctccaaccatgaggaaagggctgcagatgctgggaccgagtcttacccagaagagaagaagaagaagcgttctggattcagagacagaaaagtgatggagtatgagaatcggatccgagcctactccacaccagacaaaatcttccgatattttgccaccttgaaagtaatcaatgaacctggagaaacagaagtgtttatgaccccacaggacttcgtgcgatccataacaccaaatgaaaagcaacctgaacacttgggcctggaccagtatataataaagcgctttgatggaaagaaaattgcccaggaacgagaaaagtttgctgatgaaggaagtatattctacacccttggagaatgtgggctcatctccttctccgactacattttcctcaccactgttctttccactcctcagagaaattttgaaattgctttcaagatgtttgacttgaatggggatggagaagtagacatggaggagtttgagcaggttcaaagcatcattcgctcccaaaccagcatgggcatgcgccacagagatcgtcccactactggaaacaccctcaagtccggcttgtgttccgccctcacaacctacttttttggagctgatctcaaagggaaactcaccatcaaaaactttctggaatttcaacgtaaacttcagcatgatgttctgaagctggagtttgaacgccatgacccggtggatggaagaatcactgagaggcaatttggtggcatgctgctggcctacagcggagtgcagtccaagaagctgaccgccatgcagagacagctcaagaagcacttcaaagacgggaagggtctgactttccaggaggtagagaacttcttcactttcctgaagaacatcaatgacgtggacactgcgttgagcttttaccacatggctggagcatctcttgataaagtgacgatgcaacaagtggccaggacagtggcaaaagtggaactctcggaccatgtgtgcgacgtggtgtttgcactctttgactgcgacggcaatggggagctgagcaataaggagtttgtttccatcatgaagcagcggctgatgagaggcctggagaagcccaaggacatgggcttcacccgtctcatgcaggcaatgtggaaatgtgcacaagaaactgcctgggactttgctctgcccaaatagtgtcccacctcctgcactctaacaccctggactccctggagtggcccttcatgatgctgctgctgctgcttctgggagtagtgtccccgccctgtctttctgggagtgacctctgtgctcagtgggcttccctctccgccttcccagaccccgtcagtgttctgctaggctccaagtttgcagtcagat

SEQ ID NO: 3460 - DNA, 1677 bp, Cricetulus griseus
ggcagccgctatcaccgcgtttgcgcatgaggatctggttgccgctgcagccgcctggaattgtgggggttgtgtctgcccctcggctgcggtggaaagccgaaggccctgattatggctcctcagcacctgccttcaactagagtggctcctctaggactgctgcttgggttgctggtgacttcctgcttcactttctgcctcagttgtcggaactcaaaggattttgcgctcaccaacacagagaagaatatccacaaagaatcagagacaaaggaagccagagaagaggagctagacactgaggtgctggaggtgtttcagccgactcacgagtggcagactcttcagccaggtcaggctgttcctgcaggatcccatgtgagaatgaatctacagactggagcaagagaggtgaaactccaacaagaagacaaatttcaaactaatatgaaaggatttaaaaaaggcaaaaggctagacatcaataccaacacctacacatctcaggacctcaaggatgcgctggccaaattcaaggagggagcagagacagagaattcaaaggatgagcaggcaaggcaggccacagtaaagcagctcttccgccccattgaagagctgaagaaggaatttgatgagctgaatgttgttcttgagactgacatgcagattatggtacggctgataaacaagttcaacagctccagctccagcctagaagagaaggtcgctgcactctttgatcttgagtactatgttcatcagatggataatgcacaggacctgctatcctttggtggccttcaagtggtgattaatgggctcaacagcacagaacccctggtgaaggagtatgctgcttttgtgctgggggccgcgttttccagcaatcctaaggtccaggtagaagccattgaagggggagccctgcagaagctcctcgtcctcctggccacagagcagcctctcagcgccaagaagaaggtcctgtttgcactgtgttccctgctgcgccatttcccctatgctcagcagcagttcctgaagctcggggggctgcaggtcctcaggagtctagtgcaagagaagagtgccaaggtactggccgtgcgcgtggtcaccctgctctacgaccttgtcactgagaagatgtttgctgaggaggaggcagagttgacccaggactcatccccagagaagctgcagcagtatcgccaggtgcagctcctcccgggcttgcgggaacagggctggtgtgagatcactgcccagctcctggcacttccggagcatgatgcccgggagaaggtgctgcagacgctgggcgccctcctggccacctgccgggatcgctaccgtcaagacctccagctcagcaggacactaggcagtctccaagcagagtaccaggcactggcctccctggaactccaagaaggtgaagatgagggctacttccgggaactgttggcctccatcaacagcttgctaaaggaactcagatgaggctgccgacaccaggagtggactaggatgacgctagtgagagcttgggtgggctcttcaggggccgtcagccaggagggagggtttccctgctggggcatgagcttcatctgggcagcactggcttggccattaaacagggacaataaaactagtaaaaaaaaaaaa

SEQ ID NO: 3461 - DNA, 1677 bp, Cricetulus griseus
cacagttgactgagatcattaacagtttgattgctcctctcaacttgtctccaacttcatcgcccctctcctctaaatcctgtagtcacaaatgtctggctaatggcatttcaaggagtgcttcagagaatttagatgagctctcttcctccagtagctggttacttaatcagaagcacagtaagaaaaggagaaaagacaggacaagattgaaatctccatccttggctatcatgagtacagctgcccgaacaaggcccccttcagagtttccataaaagaaactctacagattgagcccctacattttactggactcctatgatatagataacattgtgattcccatgtcattagtagcaccagctaaattagagaaactccagtataaagaaatacttactccacgctggaggatggttgttcttcagcctcttgatgaacatcagccttattatgccaagatgaaagaaaggatcagactgaggggcaagcacagccttccacgatgaagtcttctgtagcactacaccagaaaaatggccaccctccaaaaatgcagttagatggaatggaagagtataaaacctttgctataggagttactaatgttaaaagaaataggtgacagggaacatattaagaaaactatgtaactgtgaggaaaagaggggaaaaagaaacctaaaccctcttgtggatctcccacttcctctggtcacaattcagaaaaggaggatccatctttaactgttcatgaaacaggccagagaagcttctttttccttcctgaatcacagaagtagctagcttttcacctacacaaatgctagtaacttgtgtttgccgataatacagatcgaaagcactaagatattaactgctgcaatttgatgacaaatcacattatggggtaactgttaaggtaaaagccccctccctgacaatatagttgggtttgcatcaagtgacaactactctttgtttctattctcatggcagttcactaaaattgcctcaatttatgagaatgtactagtgtgtatacagaacatatacatacacacttgcacacacgtagtcttaaaactgcatgtatgaactactctatgcaatgaaagttgacataaatatatagcacaggtgtggactgataacagatatctgaaagttttgactatggagagggagttgttttttcttttattctaaaaattgtttaaccaatataagttatttatgaaaattcttatatcaaataatacagtattcatttatttgaaatcattgttctttcttggactaaccacagactttctgcttactcctaaaagaattaagagaagcaacttaagagtttaatatattgatacatttttgaaaactatcgtctttgaaaattcaccctgagttttacttgctttatgtacctctttccagacagcaatttaaaatgtaagacagcatacaaatcataatatggttgtaagtctagctaatgtatagctagaagcttctaatttggtttcttcttgccattgcttattcaaatacctactcttaataggctcctagatcaagaattcaagtttttcaaagactaagactttaatgtagaatgcagaggagtatacattaaagaaaattctttttggagctataataccattttttttt

SEQ ID NO: 3462 - DNA, 1675 bp, Cricetulus griseus
gtctctacccggactccgccatgttgagtcttgtggggcgtgtggcctcggcctcggcctctggggccttgcggggactcagcccttcggcggcgctaccccaggcgcagctactgctgcgagccgctcccgccgcggtccatcctgccagagactatgcggcgcagacgtctccgtcgccgaaggcaggcgctgccaccgggcgaatcgtggcggtcatcggcgccgtggtggacgtccagttcgatgagggattgccgcccatcctaaatgccctggaagtgcagggcagggataccagactggttttggaggtggcccagcacttgggggagagcaccgtccgaaccattgctatggatggtactgaaggcttggttaggggccagaaagtcctggattccggggcaccaatcaaaattcccgtcggtccagagaccttgggccgaatcatgaacgtcattggagaacctattgatgagagaggcccaatcaaaaccaaacaatttgctcctattcatgctgaagctcctgagttcatagagatgagtgtggagcaggagatcctggtgactggtataaaggttgtggacctgctggccccatacgccaagggtggcaagatcggactcttcggtggggctggcgttgggaagacagtactgatcatggagttaatcaacaatgtcgctaaagcccatggtggttactctgtgtttgctggtgttggtgagaggacccgcgaaggcaatgatttgtaccatgaaatgattgagtctggtgttatcaacctaaaagatgctacctccaaggtggcgttggtatatggacagatgaatgaaccacctggtgctcgtgcccgggtagctctgactggtcttaccgttgctgaatacttcagagaccaagaaggtcaagatgtcctactgtttattgacaacatcttccgcttcacccaggctggctcagaggtgtctgccttattgggcagaatcccttctgctgtaggctaccagcccactctagccactgacatgggtacgatgcaggaaagaatcaccaccaccaagaagggttctatcacctctgtgcaggccatctatgtgcctgcggatgacttgactgaccctgcccctgcaactacttttgcccatttggatgctacaaccgtgctgtcccgtgccattgctgagttgggcatctatccagctgtggatcctctggactccacctctcgaatcatggatccaaatattgttggcaatgaacattatgatgttgcccgaggggtgcagaagatcctgcaggactacaaatctctccaggacatcattgccatcttgggtatggatgaactttctgaggaagataaattgactgtgtcccgggcaagaaaaatacagcgcttcttgtctcagccattccaggttgctgaggtcttcacgggtcatatgggaaagctggtgcccttgaaggagaccattaaaggattccagcagattttagccggtgactatgaccatctcccagagcaagctttctatatggtgggacccattgaagaagctgtggcaaaggctgataagctggcagaagagcatgcatcttgagggttgaagatgtgatgtcctatgcgaagagtatttaaagttttcaataaagtgtacacccctca

SEQ ID NO: 3463 - DNA, 1675 bp, Cricetulus griseus
  modified_base (448)..(448): a, c, t, g, unknown or other
cttttttttttttctttttcttttcttttactttcttttctttcgcacacagctcataccaacgccatggcccccagcatgggctcctcagtcaatgacgctttaaagagagataaagatgccatttatggacaccccctcttccctctcttagcactgatttttgagaaatgtgaattagctacttgtaccccccgcgagccgggggtggcgggcggggacgtctgctcatcagagtcattcaatgaagatatagccgtgttcgccaaacagattcgcgcagaaaaacctctattctcttcgaatccagaactggataacttgatgattcaagccatacaagtattaaggtttcatctgttggaattagagaaggtacacgaattatgtgacaatttctgccaccggtatattagctgtttgaaagggaaatgcctatcgatttggngatagatgatagagaaggaggatcaaaatcagacagtgaagatgcagtgagcaaggtgatggctttggacaacagtgtagcttcccccagcacaggtgacgatgatgaccctgataaggacaaaaagcgtcacaaaaagcgtggcatctttcccaaagtagccaccaatatcatgaggggcgtggctgttccagcatctaacacacccttacccttctgaagaacagaaaaagcagttggcacaagacacaggcctcaccatccttcaagtgaacaattggtttattaatgcccggagaagaatagtgcagcccatgatagaccagtccaaccgagcagtcagccaaggaacaccttataacccgtgacggacagccaatgggaggctttgtaatggatggccagcagcacatgggcatcagggctccagggctgcaaagtatgccaggggagtatgtagcccggggtggtccaatgggtgtgagtatgggacagccaagttatacccagccccagatgcccccccatcctgctcagctgcgtcatgggccccccatgcatacgtacattcctggacaccctcaccacccaacagtgatgatgcatggaggaccgccccaccctggaatgccaatgtcagcatcaagcccctcggttcttaatacaggagacccgacaatgagtggacaagtcatggacattcatgctcagtagcttaagggactatgcattgtctgcaatggtgactgatttcaaatcatgttttttctgcaatgactatggagttccattcttgacatccctaattcttcatagggactcttaaaatgcaggaaaaccaactagaagtcaatttgggggacatgcaaataactatataagacattaaaagaacaaagagtgaaatattgtaaatgctattatactgttatccatattacgttgtttcttatagattttttaaaaaaaatgtgaaatttttccacactatgtgtgttgtttccatagctcttcacttcctccagaagcctcctttacattaaaagccttacagttatcctgcaagggacaggaaggtctgatttgcagggtttttagagcattaaaataactatcaggcagaagaatctttcttcttgcctaggatttcagccatgtgcgctctctctctctctctctctctctctctctctctctctctctctctctctctctctctctcttctc

SEQ ID NO: 3464 - DNA, 1675 bp, Cricetulus griseus
cggcggcatggaccgtctcccggcttcggcgggctcccgcggggagctgggccgcctactgcaggcggtgctaacgagccgtggccaggctaacgcggtgtttgacatcctggcggtgcttcaatccgaggacccggaggatatccaggaaggagtacgcacatgcagccgactcttcggtaccttgctggagcgggaagagctgttcgtgggctcgctgccgcgcgaggacacggtcctggcaggatcccaggaagccacacacaaatacaaagtgtggatgagacaccgctaccacagctgttgtaaccgcctggaagagctactgacccatccctccttccaggtcaaggagctggccctcaagacactcatgaagtttgtgcagctggaaggagcgaaaccccttgagaaaccccagtgggaaagtcactacctcttccctcgtacactcttcagggcagtggtaggaggcctgctcacacccgaggaagaccacagcctgcttatctcccagttctgtgagtacttggaatatgatgacatccggtaccacacaatgcaggtggccacaagcactgtggcccgaaccaccagccagcaacctgaggtgtcactcaccttctggaacaatgccttcgtgttgctatctgctgtgaacctgcccctccaggagtgcaacctcaccaacttctatgtgaagcatgcacagacatcagacaaatggaaggtcattcacttgaaggaacacagaaaagctttccaggagatgtggcttggcttccttaagcacaagctgcccctcagcctctacaagaaggtactggtggctatgcatgactccatcctgccccacctggctcagcccaccctcatgattgacttcctcacaagtgcctgtgatgtgggtggtgccatcagcctcctggccttgaatgggcttttcatcctaatccataagcataacctggaatatcctgatttctaccagaagctctatggcctcctggatccatccatctttcatgtcaagtaccgagcccgtttctttcacttggccgacctcttcctttcctcttcccacctccctgcctacttggtggctgcctttgcaaaacgcctggcccggctggccctaacagcaccgcctgaggccctgctcatggtcctgccctttatttgcaacctgttgcgcagacaccctgcctgccgagttatggtgcaccgcccacaaggccctgagctcagtgctgatccatatgacccaatggagaaggatcctgccaggagccatgccttggaaagctgcttgtgggaacttcaggccctccagcagcactaccatcctgaggtgtccagagctgccagtgtcatcaaccaggtgctgtctgacccagaggttagcattgcaccactcctggaacttactgcatatgagatctttgagcgggacctgaagaagaaaacacctgggtcggtgcctctggagttcatcccagccaaaggcctgctgggccgacaggatgacctctgcgcccagttcttcactctcagctgacctggatgttgcttcatctcctaagaattttttttttgtgtccgagacaggatctcactgtgtagcccaggctggcctgtaatgtaaggtcctcctgcctcagcttccccagtgctg

SEQ ID NO: 3465 - DNA, 1675 bp, Cricetulus griseus
caggtcagcctaggatcaggagcgccgcagggccggagctaaggattcaggaaggaagacagggcaaaaggggtccggggtgcagagttcgtcagggatccgtgaggtcgaggatcgcctcccgccaccctgtcgcgcatgggcttcccccgcctgtgggccgcactgctgagagcctggggacggtggacggcgtgtcctggtccgcgcgtgcccggcctgccccctatggctgcaaacaaggtgccaccagcgctggcctcacaccaacaagacaggaaggtccgaggtggctgggtctgggaggagacaccgcatcctcccaagagggtcaagagccttgaggatgaagaggctccacgcaagctgccaaagcgcaaaattgtgctgctcatggcctactccggcaagggctaccacggcatgcagaggaatctggggtcctctcagttcaggaccattgaagatgatttggtatctgccctagtccaggcaggttgtatccctgaaaaccatggcacagacatgaggaagatgtcctttcagcgatgtgctcgcacagacaaggggtgtgtctgcagctgggcaggtagtatccctaaaggtgtggctaattgatgacattctggacaagatcaacagccaccttccatccaacattcggattctgggattgaagagggtcacaggtggcttcaactccaagaacaagtgcgatgccaggacctactgctacatgctacccacctttgcctttgctcacaaagaccgggatgtacaggatgagagttatcgcttaagtccagagaccttggagcaggtcaaccggcttctggcctgctacaagggcacccataacttccacaacttcacctcacagaaggggccaagagagcccagtgcacggcgctacattctggaaatgtactgtgaagagccctttgtacgggagggcctggagtttgcagtgatcaaggtgaagggccagagcttcatgatgcaccagatccggaagatggttggcttggtggtagccattgtcaagggttatgcccctgagagtgtcctggagcgcagctggggcgaggagaaggtggatgtacccaaggcaccggggcttggcctagtcctggagagggtgcactttgagaagtacaatcagcgttttggcagtgatgggctccatgaacccctggactgggcacaggaggaagggaaggtggctgctttcaaggagcaatacatctatcctaccattgtcagcactgagcgggatgagcggtccatggcccagtggctcagcactctgcctatccacaacttcagtgccactgcacttggagcggccggcacaggtgccaaggtccccagttccctggagggcagtgaaggggacggagacactgactgaaactacagctgctggccactgctgtgagggttgaggctggagtctctgcacttgcctgtctcttgggacaggaaagccaagaattctggggccagtttgtggatgtagcctggcttcataacctcaggatattaaatttctcattctaggaattagctgcctctttcagcccatgcattgtgtgtatacaccttagcatgaaaggacactaatttttaaaaaaaggaatttatttttcctattaaatatgttttgcttagtgaa

SEQ ID NO: 3466 - DNA, 1675 bp, Cricetulus griseus
gatggcgtctcagccgccgccgcccccgaaaccctgggagacccgccgaattcccggggccggctcgggcccggggacgggccccggccccgctttccaatctgctgatttgggccctactttattgacaagacctggacaaccaacacttaccagagtgcccccacctattcttcccaggccatccccagcagacggggagcagcagtgtaaacacttttaggcctgcttacagttcattttcttctggatacggagcctatggaaattcattttatgggagctatagcccttacagttatggatacaatggtctgggctttaaccgcctccgtgtcgatgaccttccacccagcagatttgtccagcaagctgaagaaagcagcagaggtgcatttcagtccattgagagcattgtgcatgcattcgcgtctgtcagcatgatgatggacgccaccttttcagctgtctataacagcttcagggctgtactggatgtagcaaatcacttttcccgcttaaaaatacactttacaaaggttttttccgccttcgcattagttaggactataagatacctgtatagacggttgcagtggatgatgggcttaagaagaggctctgagagcgaggacctatgggaggaaagtgaaagaactgtggcctgccttggtgccgaggaccaagcagctaactctgcaaaatcctggccaatattcctgttctttgctgttatccttggtggtccttatctcatctggaaacttctgtctacacacagtgatgaagtaacagacaacatcaactgggcaaatggtgaggacgaccatgtagttgctagagcagagtatgattttaatgccgtgtctgatgaagaaatttctttccgtgctggggatatgctaaatctagctctcaaagaacaacagcccaaagtgcgtggttggcttctggctagtcttgatggtcaaacaacaggactgatacctgcaaattatgtcaaaattctgggtaaaagaagaggcagaaaaacaatagaatcgagtaaaatacccaagcagcaacaatcttttaccaacccaacgttaattaaaggagtcactactgccaactctttggatgaacaggaagctgcctttgaatctgtttttgttgaaaccaataaggttccaggtgcacctgattctacagggaaaaatggagagaaacaagatctttgatgtctttcatgtttgcttgcaggtgaataatactttagagtacttttaaaaattatttcttacagaaaaattaatttgcagttgaatgaaagcatttgctcatggccgtccaaggcattttgctgctaaaattatttagtcacactagtatgctggtctagtaatctggctacacttgaccatttattggaccatgaggacatttgtttcacctagctttagattatggagattgttgtcagtttcatcttatctaaatccctaagcttattggaacagtaaatttgatgaacactagaatacacaagttgcctcagaagggatcattaatgctttttaaagttctgagttaattgatttgaagtcttcaaaaattgagtgataacatctacttacaagaacaggacaaaaaggctagaattttataatatcctttaagtaaactaaataataaa

SEQ ID NO: 3467 - DNA, 1675 bp, Cricetulus griseus
atcgcggtacgctcacgcgagaaaatggaagacccctggcaggagtgcatggattatgcggtaaccctcgcaagacaagctggagagatgattcgggaagctctaaaaagtgagatgaatgtcatgattaaaagttctccagctgacttggtaacagttaccgatcagaaagttgaaaagatgcttctctcttctaataaaggaaaagtacccatctcacagtttcattggggaagaatctgtggcagctggggaaaagaccgtcttcacagacaagcccacgtggatcattgaccctgttgatggaaccactaactttgtacataagttcccttttgtagctgtttcaattggctttgttgtaaaaaaacagatggagtttggagttgtgtacagctgtgtggaagacaagatgtataccggcaggaaaggaaaaggagccttttgtaatggtcagaggcttcaggtctcacaacaggaagacattaccaaatcactcttggtgactgagttgggctcatccaggaagccagagactttacggactgtcctctccaacatggaaagctttgctccattcccatccatggaatccggagtgtcggaacagctgctgttaatatgtgccttgtggcaactggaggagcagatgcatattatgaaatggggattcactgctgggacatggccggagctggcatcatcgtcaccgaagcaggtggagtgctgatggacgtgacaggtggaccatttgatttgatgtctcggagaataattgctgcaaataataaaacattagctgaaagaatagccaaagaaattgagataatacctttacaaagagatgatgaaagttagttggcacagaacagtgtccattccatcacacttgctgaccctgggatgtttgaaatgtatgatgtcactgatttcaatttgtctttgagaccctgatttgaaaatgggaacatttttaaagatgactcatgcaaaattggatggagtatttgattgttgaaagaaaatttgcatgtaagactatcttagggaaaatatacaggaagcataattaatgaactagccattgaataatcaccagtccacatgagacccttcgattttaatgtacaatttatatgcacaattctcaattagaaagttttctttttgtaaaagtgtttctctttgttctaaaagccatacttaattgagtttgtgagactgtaacaagcaggttctctccttgcagagagccctcttgttttataatggtgaactttttgatttctttccaaacttgttgcttaatttcatcactgctgtctatatattctgtgaggatcttgggcctctcaaactcaagaagaaaaattaatggttcctatttcttttaaagtattaatttattgtctagccttggtccttggatatgaacaaatattttgtttttagtatgtttgaaccttgcatttgataaaatgaagtgttcttgtaagtttcaaggcaggaaacatattatagtgtgggtgatttaatagattaaatctctatgatattctgatgtgggcactgtaatgtatttctgctgttaactacaagatttaaaacgtcacacaatatgtaagttctattataagacaggttgtttttacaattaaatttattttaagtaaag

SEQ ID NO: 3468 - DNA, 1675 bp, Cricetulus griseus
  modified_base (1607)..(1607): a, c, t, g, unknown or other
taacgggagccccccaagaagtctacaagtggccatggaggacagcagccgagtgtctcccagcaaaggcaccagcaacattaccaagctgaatggcatggtgctactgtgtaaagtgtgtggggacgtggcctcaggcttccactatggcgtgcaggcgcatccccaagagagagaagcaacggatgctcgctgagatgcagagcgccatgaacttggccaacgaaccaactgagcagcctgtgtcctctagagacctcacctaccccacatccccacctcgggttccataggcccctcgacccctcctgcgccagcccccactcctttggtgggcttctctcagttcccacaacagctgacaccacccagatcccccacgccctgagcccactgtggaggatgtcatatcccaggtggctcgggcccatcgagaaatcttcacctatgcccatgacaagttaggcacctcacctggcaacttcaatgccaatcacgcatcaggtagcccttcagctactaccccacaccgctgggaaagtcagggatgcccgcctgcccccaacgacaacaatattttggcggctcagcgtcataatgaaacactgaatggtctatgccagggcccctcctcctaccctcctacctggccctctggctctgcccatcacagctgccaccaacccaacagcaatgggcatcgtctgtgccccacccacgtatactcggcctcagaaggcgaggcgcctgcgaacggtctacggcaaggcaacaccaagaatgttctgctggcatgtcccatgaacatgtatccccatggacgcagtggccggactgtgcaggagatctgggaagacttctcaatgagcttcacacctgctgtgcgtgaggtggtagagtttgccaagcacatccccggcttccgtgacctttctcagcatgaccaggtgaccctgttgaaggctggcacctttgaggtgttgatggtgcgttttgcatcattgttcaatgtgaaggaccagacagtgatgttcctgagccgcacaacctacagtctgcaggagctcggtgccatgggcatgggcgacctgctcaatgccatgtttgacttcagcgagaagctcaactccctggcgcttaccgaggaggagctgggccttttcaccgctgtggtgcttgtctctgcagaccgctcgggaatggagaattccgcttcggtggagcagctccaggagacgctgctgcgggctcttcgggctctggtgctgaagaaccggccctcggagacttcccgcttcaccaagctgctgctcaagctgccggacctgcggaccctgaacaacatgcattccgagaagctgctgtccttccgggtggacgcccagtgacccgcccggccggccttctgccgctgcccccttgtacagaatcgaactctgcacttctctctcctttacgagacgaaaaggaaaagcaaaccagaatcttatttatattgttataaaatattccaagatgagcctctggccccctgagccttcttgtaaataactcttcccccacccccatcaccatgctccccacccccctatttaaaccactcttcnctctcccaccctccctcccacgccccccgatttcgttctgttccctgtctcaaatccaatagttcaca

SEQ ID NO: 3469 - DNA, 1674 bp, Cricetulus griseus
  modified_base (6)..(6): a, c, t, g, unknown or other
  modified_base (1388)..(1388): a, c, t, g, unknown or other
  modified_base (1404)..(1404): a, c, t, g, unknown or other
catgcngtccgagaagcacctggtgtcagtgtgtgccgacaacaaccatgtccgaacgtggacagtgacacggttcagaggaatgatctccactcagccaggctccacccctttagcgtcattcaagatcctgtccttggaggagacggaaagccatggcagctattcctctggaaatgacatagggccttttggagaacgagatgatcaacaagtgtttatccagaaagttgttcccatcactaacaagctgtttgtcaggctgtcgtcaactggaaaaaggatatgtgagatccaggctgttgactgcaccactatatcgtcgttcaccgtgagagagtgtgagggctccagcaggatgggttctcggccgaggcgctatttgttcacaggccacacaaatggcagcatccaaatgtgggatctgaccacggctatggatatggtcaacaagagtgaggacaaggatgccggtggccccactgaggaagagctgctcaagctgttagaccagtgtgacctgagcacatcgcgctgtgccacccccaacatcagtcctgccgcgtctgtgcttcagcacagccgcctccgagagtcaaactccagccttcagctccagcatcatgagaccatccatgaggcagctacttatggtgccacgcggccttaccgagagagccctttgttagctagagcaaggaggactgagagtttccacagttacagggacttccagactcttaatctcaacagaaacatagacagagtccttccagaaaatggtcacatgggtccaacgcaggctgaagtgaaaggggcagcgggggaatgcactatgtctgagaggaagtcccctgggacagagctcagatgtgtgaaagaattggatggtgggttagaagtccagaaaacagccgacgggttgtcagagtccaagaaaagatcctcagaggatgagatcgagcagaaagtggagttccgcaagaaagggtttgaagcaggaggattcctcggaagaaagaaggttccccacctggcatcctcaccaagtacctctgatggagggaccgactctcctggtacggcatccccgtctccaactaagaccactccgtcacctcggcacaaaaaaagtgattcctcgggccaagagtacagcttgtgaactcaccacagtgcacaataattttgatagatttacatgaagaacaaaattgcctgggttttagtaaattggcttttacatcaaaactttataagatacagcttgacctggttcatgttttctgggccgactctcctgaggcaggagcagagcacactctccgctgctataggagccactgtgtttctgcagggtctcacaggactggaatggtagatttggngttaaatgtttccacncgtaaaactgtgttctgactttattttaaactctgagggcaaaagaaaagctctttctacattttcttcatctaatctggatggtttacacatttctgcaatggagaaaatgtaaatttaaacccacgagcatttgctagtgaatgatgtgtaattccctctcccagaagtataatgaagttggaaaaattctttaaaattaactatattgtcagtggtttcacaaaaattcccttgtatttatttgtcaattaaatggaatgagaaagg

SEQ ID NO: 3470 - DNA, 1674 bp, Cricetulus griseus
gtgggaggaggtgttgtgttccttggacttcgttgttgggatttaatcaaattttgggagtctccaccgcggccgtcaccatgtcggtcccaagcgcactcatgaagcagccgcccattcagtctacggctggggccgtcccagttcgcaatgagaaaggtgagatttcaatggaaaaagtgaaagtaaaacgttatgtatctgggaaaaggccagattatgcccctatggagtcctcagatgaagaggatgaagaatttcaattcattaagaaagctaaggaacaagaagcagagcctgaggaacaggaggaagattcatccagtgacccccgacttcggcgtttacagaatcgcattagtgaagatgtggaagagagattggctcgacaccgaaaaatagtagaacctgaagtggtaggagaaagtgattcagaagtagaaggagatgcctggcgcatggaacgagaagatagcagcgaagaagaagaggaagaaattgatgatgaggaaatagagcggcgccgtggcatgatgcgtcagcgagcacaggagaggaaaaatgaagagatggaagtcatggaattagaagatgaagggcgctctggggaggagtcggagtcagagtctgaatatgaggagtacacagacagtgaagatgaaatggagcctcgacttaagcctgtcttcattagaaagaaggaccgagtgacagttcaagaacgagaagctgaagcattgaaacaaaaggaactggagcaggaagcaaaacgtatggctgaggagcggcgcaagtacacactaaagattgtagaagaagagaccaagaaagagctggaggagaacaagcggtctcttgctgcactggatgcgctcaatacagatgatgaaaatgatgaggaggaatacgaggcctggaaagtcagagagctcaaaagaatcaagagggacagagaagaccgagaagcgcttgaaaaggagaaagcagagattgaacgcatgcgaaacctgactgaggaggaaaggcgagctgaacttcgggcgaatggcaaagtcattaccaacaaagccgttaaggggaaatacaagtttttacaaaagtattatcaccggggtgccttcttcatggatgaggatgaagaggtctacaagagagattttagtgcacctactcttgaggaccatttcaacaaaaccattcttccaaaagtcatgcaggtcaagaattttggacggtctggtcgtaccaagtacacccaccttgtagatcaagatacaacttcctttgactctgcatggggccaagagagtgcccagaacacaaagttctttaaacaaaaggcagctggggtacgtgatgtatttgagcgaccatctgccaagaagaggaaaaccacctaggtttcaactacttattccaactctgggacacaaggacatctggtcctcagttttctttacccattatttacatagttcttgtatagagccttctggacttcctgccataatgtgtgtttgaaggtgctttgtgagaagtttggaatcatcctgagaaacccacagaaaagcactagccaggtagggttagaggctttccactttaaaacagtttctgagaaatcttaggtttctctaccatggcttcccatattgacttgggactattctgagt

SEQ ID NO: 3471 - DNA, 1674 bp, Cricetulus griseus
ccgcccagcgggtgcaggtgcggacgcaccggccatcaacgcgcgcggctgcgcagcgggcaccgtagacaccggcctctggctcccctggagcggggcagccacagaacccgaggccatgtcccacgaaaagagtttcttggtgtctggggacagctatcctcccccaaaccctggatatcctgtggggccccaaccccctatgcctccctatgttcagcctccttaccctggagccccatacccacagcctgccttccagccctccccctatggtcagccagggtatccccatgggcccagcccctacccacaaggtggctacccccagggaccctaccctcaaggaggctacccacaagggccatacccacagagccccttcccccccaacccctatgggcagccaccacccttccaggaccctggctcaccgcagcatgggaactaccaggaagaaggacctccatcctactatgacaaccaggacttccccgctgtcaactgggacaagaacattcgacaggccttcatcagaaaggtgtttctggtgctgaccctgcagctgtcagtgaccctgtcgactgtggccgttttcacttttgttggggaagtgaagggctttgtccgggagaatgtctggacctactatgtctcctacgccatcttcttcatctccctcattgtcctcagctgctgtggggacttccggcgaaagcatccctggaaccttgttgctctgtcgatcctgaccgtcagcttgtcctacatggtgggcatgatagccagcttttacaacacagaggcagtcatcatggcagtgggcatcaccacagctgtctgcttcacggtggtcatcttctccatgcagacccgctatgacttcacctcgtgcatgggcgtgctcctggtgagtgtggtggtgctcctcatcttcgccatactctgcatcttcatccggaaccgcatcctggagattgtgtatgcctcactgggcgctctgctcttcacctgtttcctggcagtggacactcagctgctcctggggaataagcagctctccctaagcccagaggagtatgtgtttgcggctctgaacctgtacacagacatcattaacatcttcctatatattctcaccatcattggccgtgccaaggagtagtacaagccctggctcaggtggcatggatggctgagacccatgtccctggcatgacaaagccatccgtgcttccctctctctgattccccaggcatagcctgggacagagggagcccctctcaccctcgtgtatgtacaccgcaaatacttcacgtttggaccctctgtggccacagcatggtccttccgagccctcttgcccttgccaagggtgatggggctgcgtttctgtaccaccttctgtccattcattgttgcatgagccctgtctgccagcccatcccacaggggagaaggaacactctaagaggtgagggtgcacgtcttcccttccctcccagctcccctggcttagagtacccctgttccctcatcaccctgccttctgagggacttgcagggtggggcttcattcttgtgctgacccctgagagcagaaaggatggcatgtctcaggggaggagcctctcatgctgccatcattaaaattccaataaaggatcccttct

SEQ ID NO: 3472 - DNA, 1674 bp, Cricetulus griseus
ccggcgcccggctcttccgacccacccggacgcactatgacagatcaggcctttgtgacgctaaccacaaacgatgcctatgccaaaggtgcactggtcctgggctcatctttaaaacagcaaaggactaccaggaggatggttgtactcaccaccccacaggtctcagattccatgagaaaagttttagaaactgtctttgatgaagttatcatggtagatgtcttggacagtggcgattctgctcatctaactttaatgaagaggcctgagctgggcatcaccctgacgaaactccactgctggtcacttactcagtattccaaatgtgtgttcatggatgcagatactctggtcctcacaaacattgatgatctttttgaaagagaagaattgtcagcagcaccagatccaggttggcctgactgcttcaattctggagtctttgtctatcaaccttcaattgaaacatataaccagctgttgcagcttgcttctaagcaaggtagttttgatggtggggaccagggcctactgaatacatattttagtggctgggcaacgacagatatcaggaaacacctgccatttgtgtataacctgagcagcatttccatatactcctacctcccggcatttaaagcgtttggtgcaaatgccaaagttgtgcacttcttgggacaaatcaagccatggaattatacttacagtccccaaacaaaaagtgtcaaatgtgaatctcaagatccaactgtgagtcacccagagtttctgaacctgtggtgggacatcttcaccacgagtgttttacccctgctccaacaccaaggccttgtgaaagatacctgctcctatctaatgatggaacatgtctcaggagctttgtcacacctgtccattggggaagccccagctacaccacaaccgtctatgtcctcagaagaaagaaaggagcggtgggaacagggccaggctgattacatgggagcagattcttttgataacatcaagagaaaacttgacacttacctacaatagaagcactgccatttccccgtggacacatccacgtcttaggcacatatctgatacttatagtatgtgaagtctgtttcagttgttagaggctttcactatacctcaccagatgagggtttgggcaggacaaaagatgagaaatggtcagatgttatgaagtagtaattctgttatatggataagttctgtttaaccctcgactttttccagaaactctaatttcttcagttgccaacatatatggcaaaggaaagccaacattaagttactaagatgcttctcaagttgaagaacttgaccctccatctatctcacttcaaaacaaaatatgacattgtcccatatttgcttgttatacccctcactagaccggcaatttagaattgcccaaagcctgtcagagagttaattccatttccaggctaaaacagcctttattaacacagtggagtgatttataagtctaccagctagtgttagttcacctgttttctatgcaccatgaagacagcatgcagacttactttttttcagttctgtctacttgaaaattgcagtgtgctctctctgatggttaaccatatataacaaataaagacttattagacataaaaaaaaaaaaaaaaaaaaaaaaaa

SEQ ID NO: 3473 - DNA, 1673 bp, Cricetulus griseus
  modified_base (1621)..(1621): a, c, t, g, unknown or other
ttctgagcgaaggaatggccttcgtgaaaagattttcactggggccgtaccaaatttaatgcaaagagaagttaagttagtacgagccgaaagaagttgggcgtgtgtttgaggccgcgtcttccgggacttgtgctttgcagtttccttcccgacccagggtgaaactcctgagcctgagaccagaagtgcatgtcaagatggaagtgaatcccccgaaacaggagcacctgctggcgctaaaagtgatgcgattgactaagcctactttgttcaccaatattcctgtaacatgtgaagagaaagacttgcctggtgatctctttaaccagttaatgagagatgatccttcaactgtaaatggtgcagagattttaatgttgggagaaatgttgactttaccccaaaatttcgggaatatatttttgggggagaccttttctagttacatcagtgttcataatgacagcaatcaagttgtaaaagatatattggtgaaggcggatcttcagacaagttctcagcgtttaaacctttcagcctccaatgctgctgtggctgaacttaaacctgattgttgtattgatgatgtcatacaccatgaagtcaaggaaattgggacacacatattggtgtgtgctgtgagttacacaactcaaggtggagaaaaaatgtactttagaaaattcttcaaatttcaggtcctcaaaccattggatgtgaaaaccaaattttacaatgcagagagtgacctcagttctgtgactgatgaagtctttcttgaagcccaaattcagaacattacaacctcacctatgtttatggagaaagtttccctggagccatcgataatgtacaatgtaacagaattaaattcagtgacccaagccggggaatgtgtatctacatttggatccagaggatatttgcagccaatggatacacgccagtacttatactgcctaaagcctaagaaggagtttgcagaaaaagctggcatcattaagggagtgacagtcattggaaagttggacatagtgtggaaaacaaacctaggtgaaaggggaagattacagaccagccagcttcaaagaatggctccaggttacggagatgttaggctctctttagaggccatcccagatacagtgaacctagaagaacctttccgtattacctgtaaaatcacaaactgcagtgaaaggacgatggatctggtcctggaaatgtgcaataccaattctatccactggtgtgggatttctggaagacagctgggaaagctgcatccaagctcctcactctgcctggccctgactctcctgtcttcggtacaggggctccaaagtatctctggcttaagactcactgacacattcttaaagagaacatacgaatatgatgacattgcacaagtctgcgtggtctcatcagctgtggaagtggaagcctaaagaaaatttctgatgttaaatatcttgtttaattacagaactgctctctatattttgtcagcttttgtgtaaattatctattagcaaaaaaaagtatatgttattttaaatttgttttctgtaaaacagttaaatattaaatatttgttgtaaaaacattttttttntttttttggtttttgagacagtagtttcgggctggagagacggctcagaggt

SEQ ID NO: 3474 - DNA, 1673 bp, Cricetulus griseus
cccgcccgcagcgcctgctccgcgcgtcggccgccagggtcccgcgcagcccgggagcggcgggcgcagtgcacgctctgccgccgacgggtcccgaccggagccgcgatgccgggcagctcgagacagtcgggtcgcgaggcgggctcagccctggtctcgctgcagcaggaagaccaggaaaatgtcaaccccgagaaggtggcgccagcccagcagccgcgggcgcgggcggccctcaaggccgggaacgcgcggggaaacgcgccacagcagagactcaagactcggcgggttgcacctcttaaagacctttctataaacgatgaacatgtcgccgttggtccttcatggaaagcaaccagtaaacagccggccttcactattcatgtggatgaagaagaggagactcagaaaatgccagctgaacataaagaaacacagtgtgaagatgccctggcttttaatgctgctgtctctttacctggagcaagaaaaccactggtacctcttgattatccaatggatggtagctttgaatcaccacatgctatggacatgtctattgtcttagaagacgaaaagccagtgaatgttaatgaagtacccgactatcatgaagatattcacacataccttagggaaatggaggttaaatgtaaacctaaagtgggttatatgaagaagcagccagacatcactaacagtatgcgggccatccttgtggactggctagttgaagtgggagaagaatataaattacagaatgagactctgcatttggctgtgaactacattgatcggttcctctcttccatgtctgtgttaagaggaaagcttcaacttgtgggcactgctgctatgctgctagcttcaaaatttgaagaaatataccccccagaagtagcagagtttgtgtatattacagacgatacctattccaagaagcaggttctgagaatggagcacctagtattgaaagtccttgcttttgacttagctgcgccaacagtaaatcagtttcttaaccagtactttctgcaccagcagcctgcaaactgcaaagttgaaagcttagcaatgtttttgggagaattaagtttgatagatgctgacccatacctaaagtatttgccatcactcattgctggagctgcctttcatttagcactctatacagtcacaggacaaagctggcctgagtcattggtacaaaagactggatataccctggaaagtcttaaaccttgtctcatggaccttcaccagacctacctcagagcagcacagcatgctcaacagtcaataagggaaaagtacaaacattcaaaataccatggtgtttctcttctcaacccaccagagacactaaatgtgtaagaatgaaagacttatttggctaattttaattggtttgttaacatttggtgctgccaactgtcaggataataagaataaattgatttggaaatctttgcaagtcaaagttaatttgagataaaaataagactgataatgtcacttagaaaggctaacttggtttattgttcagtgggggtagaaaaagcttcctaaaactgaaatatttcagggaaactgatcttcaaattctgacattggttattctaagcaactgaaccaattgctgacttggtcaataaaataagacaaaa

SEQ ID NO: 3475 - DNA, 1673 bp, Cricetulus griseus
agctccagacaacttgagaccagagcgagcgagcccccgcacctcagtgcagccatgagcgccgaggtgaaggtgacagggcagaaccaggagcagtttctgctccttgccaagtcggccaagggggcagcgctggccacactcatccatcaggtgctggaggcccctggtgtctacgtgtttggggaactgctggatatgcccaatgttagagagttggcagaaagcgactttgcctccaccttccggctgctcacagtgtttgcctatgggacctatgctgactacttagctgaagccaggaatcttcccccacttaccgaggctcagaagaataagcttcggcatctctcagttgtcactctggctgccaaagtcaagtgtatcccatatgcagtgttgctggaggcccttgcccttcgtaacgtgcgccagctggaagaccttgtgatcgaggccgtgtatgcagatatcctgcggggctccctggaccagcgcaatcagcggctggaggttgactacagcatcgggagagacatccagcgccaggacctcagtgccattgcccgaaccctgcaggagtggtgtgtaggctgtgaggtcgtgctgtccggcatcgaggagcaagtcagccgtgccaaccagcacaaggagcaacagctgggcctgaagcaacagatcgagagtgaggttgccaaccttaaaaaaccattaaagttacaacagcggcagctgctgcagccacttctcaggatccagaacaacacctgaccgagctgagagaaccagctcctggcaccaaccagcgccagcccagcaagaaagcctcaaagggcaagggactccgagggagcgccaagatttggtccaagtcgaactgaaaggacttgtttcttccctgggaatgtggggtcccagctgcctacctgcctaccccttaggagtcctcagagccttctgtgcccctggccagctgataatcctagctcatgacttttcatctcctccacccccaagcataagccacatcccctatagggagaaggccagtccaggtcacgtcttgttggtacttgttatgtgttccattgcctctcttccctgacacgcttgctctcatcttcactcggcactgtgtctgcccattacccacgtcatcaaccaggttggcagtcctatggagggtgctttctcttcgccacccacgcccacccctgcatgcctaacctgcagttcctccttccctgtgcctattgggctgcacctgaaaagctattgggaagggtgtcctccaccttcatcccagccttagagttctggagccagtctgccattctgggagtcgctgaacacttttcatcccagaatcccatcacactacagttgtttcttgtcctgtctcatctccttgggcctgggaatactgttgcttcagtgaccccagagccccagaacagctatttttgagatgttaagaaatggttctttgttagctaatcatcttaggaaacccaatggaaatcctggaatgatttgtatttcttcttgtgattttggtggggaagggaatatagattgtataattaaaaaaaaaaggtatatatgaataggtctatatataacatgacacagaaataaatctaagagaaatctgtgtacaaaaatgccaggaa

SEQ ID NO: 3476 - DNA, 1673 bp, Cricetulus griseus
gggttggaggagacagaatggagaccgcgatcaaagatccggggctggaccacggcccgacgctcacctcgtcctgggtcgcggcgtgcgggtcgctgacccaaagcctccttacccggattgggccaggtgcccaagacttgaacttcgagcagctgttggcaccgccagctctaggctcggatctggtgagtctgaagaacaacctgagtccccgagatgaaaacccctgcttcctttacctgaaatgtgggcctaatgggggcgaagagatcctttcagttggcattctgagttcagcaaagaaacatggaagtataacctgggagaggagtattgtggaaccagtagggcaagaatgtctgcactgccctggatgacagtgaacatgaaaagattctgttagtaacaaaaaattcctaaaattggaatctcccacacatgcttagtaaaataaagttgctgtccttcggtgaaaagcagtgtgtgctcatcagtaaagttgtggtgcacgtgagaccaaggtcagcaaatccttcaccaagctcttctgctctaggatcacggatagaccttgacagtatccaaaccataatggagtccatggggtcaaagttatctcctggagctcagcagctgatgaatatgattaggtttcagcagcagaatcgtcttcccattggagatcagcttcagtcagtgctgggaaccacaggacacaagcatctaattgcactgcagtcttcaccttcttcaggagttgtagacaaggcatcctctacaccttttccttttagaactggattgacaccttcagccatcactgaaaatttaaaggctcttattgataaaggcacacagccacctggagaaggaaataccactaaccatgatgagtgtcaccttgtgccacaaaatcattcccttcttgaaaatgatcttaaaaacgcagtgtcttctttcttaccaaagaaggcaagtggcaactcaaacgtgcccaattctgagttgctgccttttctccagaatttatgtagtcaggtcaaccatctccgagtgggacataatgccaggtggcaagaaaacatctccaagccccgagagagcattgtcggtgtttcgatggaagagcagcctatttgctcctacttggaaaagattctttctaaaaacatggaactgatggaaaagaagcttatggaccacattgatgagaggatctatcagctccaggagcacatagatgctaaaatggctttgttagtggacttgttgcaaaatcccaactccccacctccagggatacctctaagacactatgactccagagaaagactttccaatggagagagatgagctatcgacatacacatctattacagatatttattacatatttattacagagtcaaaatacaaaaaggttatgaaaatcaagtctttaatgtcctttgaaggattattgtcttacatggtgacctcagtgctcgttttcattgtacttgttcctgtagattcaggtctgtgcaccagcagctactctgatacagtcataagttattttgcttgctatatttttcactcttataaaaatgtatatttgtattattcaagtgtttgggatgtgtaaggacttgtaatgcaattcattagtttgtattgtatattacatg

SEQ ID NO: 3477 - DNA, 1673 bp, Cricetulus griseus
  modified_base (314)..(314): a, c, t, g, unknown or other
atggcagttctggtcattgcatgccaccggctgaccctagagtacagatcgttctgtcagaagggtctgcacctagtgggaggaacgtgccaagggacagcaggcttcagggccaggggcctgctcttctgcaggtggagaggatgaggctccgggccattctgggctgtgtgaagcctggggttcccagggctcagagactgtgatggtgcaccaagcaaccacatcttcctgggtggccggctcagggagcagccggccaacacacaaagacgctgcagattcggagaacagtgacatacaaagccttttanccctcacatcagaggagtacacagatgatatcccactgttgaaagaagcatgagggctgccactggcttctctcctctctgcccgtctctctcctcctgtggtttttttttttccttatcatctttgtcctttctggcttgacccttggataaaagaacctcctggtgcctccttccctctccccatccattaacatgctctctggggatcacaagcccgggctcatctaactggaggacaaaagggtcatgttctccatcctcctgaaactagttttgaggtctgttcttggagtttcccacctactgctgctggcatcttcaacttcttcctgtgtttctctttctaaagtgatttcttaactatcagccatgtgctgtggctttgggggcatctggactttgtcccatacagagggactgggggacttaattgccttgaggtggagcctgggtagaaacagggtcagtggcaggtgccaggctgttgggtagaaagatgcttagagcaagtgggaaggagttttgctgcctacttaactgggtttacctccaggggcatcctgcagacttgtccagaagagacagtcggcaccaaaggacttttacacaggggccagaatggtgaaatgaataaaaataagaaattccgtccctctatgccttagttaaacaggtaggctttatctgcccagttctgtattttgtgtggtcttccccattcatcttgccctcttccccacccccagctttacagttctgtagagaagccaggctacaagacagacaaaggtatacttttcctgctttgtgagtggctgaatggggatagatggcgcctttttcttcccaaaacccatcagagctcctgaaaacacttggcttcctacgtaacattgtctcctctgttcctgaggaacattccagaatagaaaatggaatatgttgcagacatttctagattcttagcagagctcaccagggaggatgtggggatagaacacttagattgccaagtagggagaggaaatggctgtgggctgcatggctgtatgcacactgtcctggcttcttaaggttgtgcaccactatgggatcctttgcagaatggtactcatataatggtttaaaacaacacatgcataattgactgtgcaggatgtcaatcaatctgggtttgctttattttattttttatatatattttttggtatcctgtacattgcagtgggtatgaagatagtattttaatatttgtacaaagtttaatttaattttaattgttctatgtatataactgcatttctaaataataataaaagttcttatgaaggcaaaaaaaaaaaaaaaaaaaaaaaa

SEQ ID NO: 3478 - DNA, 1673 bp, Cricetulus griseus
ccaacttctggtttttacattgctcagcttccagagagcttgtccaggtgagggctcttcagttattttagtgcaaacatgcgtctcatagtagtctcaccctgagtttagaaatctggagaacgtgggacgctgtgacttgtagacttgattcccatcagattccataagggtctctggctggcctggtaacttctgtattggaaacgaattttctaccaggtgggggtaggtgctcacccctaccctgtaatgatcttatttgagaagcaagagctacacatcttgagaatgaacgtggaagccagaagcatgattgctgctttattagaagcaggtggggaaggaagtgggtagggaaatggaagctagcttaacagctcctctggacgacatgatggccccatatattccacaggctgtgaattggcttcttccatctgctgagctgggatgaggcaacacctactttaagaaaccactgaaatcttgtgctgtctaatgcatgccttgagtgtgtttgttgtttaaagactcttcatggtggagggctgctggtggtgtcatgtgcccaggtagcctgaacacccattccccgtgtgtacttgtgggctatgagatgcccctcttgattggcctttggtcccagacagactaggtctgtggatctaatagggaggctggagcactggggaaatggcaccaagatggaaaaaacatggcctcgggaagccccctttattcttcgggagataattagcaagggaggcattgcttgcaagatgtgtcagtttccagaacctcctaacttgttcgtcagattgctgtcaactttgttaggattgtgagtcactgacatcaaggaaatcaagaaatggtgccaccctctggccagtgctgagctagcggtgacttaaggaagactttttgtatctctggcctgttgatatgtagctaaggcaatctcaggggggttgtctactttacctttatgctgaggcctggctgatggcaaagcccttgaaccccacagccatgatgtaaaataaatgccctcttgtgaacttttttctcaatagcactgtttccagtgaaaaagagctctactttgctctcccttagctacctcggtgccttctgcataaagcccttctgcataaaatacatcactcagcccgcaggcactagctaagtggctggacaggcctgggcgggccatcggcctcctgttcatacagtctcatcccaggggccgggctcctctttcccactggcattttattcttgctggggcattgtggcctgcagaagtcttgggactggtcttgtaactatgtcccccctgaaggctgagttggtcaacttgggctagtcccaggtgatagaagggagaacgcaaacgaagcagaagagccaattgccaagatcggacctctcagtgtgacctgacaggaagaacttttaaaaagctcaacattctcaagtggcttgatgtagggggttgtccaccttggtgtgggacaggcccattttcgcaccacttgggttgtggttagtaccagttcttcgaggaagacgtgctggagactgccagaatccctctacatcgttttacgtgcttgtgtccaagtgtgaattgtaaatggtttagtgtttgcattaaacaaaatgga

SEQ ID NO: 3479 - DNA, 1673 bp, Cricetulus griseus
gtcaatgtgcttttcttcacacccctttgattgtgaaaaatccaaagaataaatatggtaaaacacctgaagacgtaatttgtgaaagaagcaaaaacaaatctgtggaactgaaagaaagaattagagaatacttaatgggtcactactatgttccacttctgagggcagaagacacttcttctcctgtcattggggagctgtggtcctcagaccagagagctgaagcctctaatactgaccatggtagaagtagccccagagatcctgtgatgacattgagagctttcgtggggcctctgagtccatccaaggcagaagatttccgaaaacgctggaaaactccacctcgaaagaaagcaggcttcttccacaacatcagaaagtctgatccagaacgaggcattgagagagtgggaagggagctagctcatgagctggggtacccctgggttgaatactgggaatttctgggatgttttgttgatctgtcttctcaggaaggcttgcaaagactagaagactaccttacccagcaggaaataaacaaaaaggctcaacaacaaataggagaaaatgaaggctgccttcaggacagagcctcagtttttggcagtggaaagaagtacagcaactccatctccgtgggagcatttctagatggggatgatgacattagtttggaagaaattaaaaatcagcaaaatatagctcaaagtcagaatcagcctacaatcaataaatttcaaaactctgaatgtggttcccttcccttgggacaaaaggtggaccatggagaaacctcagttggatcttgccccaataacagcaaaaatgggctttgtcctcctcttctcaaccacaggactgcaggtggaatgggactagaggccaccagtgggcaagaggcccttccactacctgtttctgctttgactctagagtttgataaactgaatttgcagggtctaggagatagcctgcttgagacgccaaataaaaaagtgactcactggtacctcctcctgcaataccgagacttgaaaataaccaagacagaaccaacagtgaagtgtcagaggcaatggctggaatgtctttggatcccaacagttccgagcttaaggttcaggatggtcagaaaccagtgttctcatctgccacaggaaattccaccaggggactcttcctttctggaggggagccatcaaaactagatcgggatgttttagcagctcttgagtgtgcctgtattgaccctggtctgtacccagctgtccacagatggaaaagcactgtcctgtgctactcaccctcagacagacaaagttggccaagtcctgcacttaaagggaagttcacagctgagctgctggaccttggttgctctcatagctgcagttcaggacgaagcagtccagctggtagcagccccagcaagcctggccacaccacctcctcccctggccttcacagccccgggcggtacagtccggcacatgggacccacttccaaaggatggcacacatggcccgccttgcagctctgtagagccagccctgagttcaattcccagcaaccacatggtggtctgagttggagaacagcctggtctagatagtgagttccaggccaaccagttaacttttttttttttaaactcttatttctt

SEQ ID NO: 3480 - DNA, 1673 bp, Cricetulus griseus
ctgagctgaaaccgattcttcaggagatgatggaagagattgacaatgatggcagtggctctgtctctctagctgagtgggtccgggctgggtctaccactgtgccgttgcttgtgcttctgggaatggatatgactctgaaagatgatggggcacatatatggagacccaagagattctccagaccagtctactgcaacctgtgcgagctgaacattggccttggcaaacagggcctgagctgtaacatctgtaagtacactgttcatgaccactgtgccaagaaggccctgccttgtgaagtccgcacctatgccaagtctcggaaagacattggtgtccactcacatgtgtggattcgaggaggctggtgattcgtgggcgttgtttccatctacccgagggtcctgtatgtccggacaagatccgaaaactaaagacaacagatgatacaagcctgagcaccattgaggctcttcggattgaccctgttcctaacacccacccacttctagtctttgtcaatctgaagagtggagggaagcagggacagagggtgctttggaagttccagtatatgctaaaccctcgacaggtgttcgacctgaaggatggtcctgagtatgggctcaggtttttcagagacattcctcaattccgggtattggtgtgtggtggagacggcacagtaggctggattctagaaagcattgacaaagccaacttgccggttgtgcctcctgttgcggtgctgcccctgggcactgggaatgatctggcccgttgcctacgatggggaaggggttatgaaggtgagaatttggcaaagattctcaaggacatagagataagtaaggtggtgtatctcgatcgatggtccctggaagtgataccccaagaaaatggacagaagagcgatccaatcccctctcaaatcatcaataactacttctccatcggtgtggatagcttcgattgctcaccagttccacgtcatgcgagagaagtatcctgagaagttcaacagcagaatgaaaaacaaactgtggtacttggaatttgcgacatctgaatccatcttctccacatgcaagaagctggaagagtctttgacggttgagatctgtgggaagcagctggatctcagtgaccagtcccttgaaggcattgcagtactgaatatcccaagcatgcatggtggctccaacctctggggtgataccaggagacctcatagagatacttgtactatcaaccaggcactaggcagtgtggccaaaataatcacagaccctgatatcctgaaaaccagtgtgcaagacatgagtgacaagcggctggaagtggtaggaatagaggatgtgattgagatgggccagatctataccagactcaagaatgctggacaccggctggccaagtgctccgagatcacattccggaccacaaaaaccctccccatgcaagttgatggggagccctggatgcaggcacctgtacaatcaagatcaccccacaagaaccagatgcctatgcttatgggcccagctcagaatacctacagcttctttggctttggagctgagggttaccttctgccctgagcctacctccctgttccaaataaacgacagcagataacaaaaaaaaaaaaaaaaaaaaaaaaaaaaaaa

SEQ ID NO: 3481 - DNA, 1673 bp, Cricetulus griseus
ctgtcagtatgcagcggttgctccttccgcccctgaaagccttcgtggggagccgcagtgtcgggctcctcgtccctgggcctgcgtccagagcacagtggggttgcagctttggcagcaggcgtcctctgaggccagggcaatatggcaccattactgaagtggctttgcaatctggaaaaggtacagtgccccttccttcgaaagcagctgagcaggcagtgggccgatggctgcttgtgtgcagtgggacggtagctggagcagttattcttggaggagtaactaggctgacggaatctggcctctcaatggtagactggcatttaataaaggagatgaagccacccacaagccaagaagaatgggaagcagaattccaaaaataccagcaatttccagaatttaaaatcctgaatcatgacatgacactggcggaattcaagtttatctggtacatggaatactcgcaccgaatgtggggtcgagctgtaggccttgcgtacatcctgcctgctgcctatttttggagaaagggttggcgtcagccgtggcatgaaaggacgagttcttgccctatgtggcttagtttgtttccagggtctcttgggttggtatatggtgaaaagtggattagaagaaaagccagagtcctacgatatccctcgggtcagtcagtaccgcctcgcagcccacctggggtcagcacttgttctgtattgtgccagcctgtggacctcactctcactgctacttcctcagcacaagttacctgaaacccaacagctcctgtggctgaggcgctttgctggtggcacagcaggcctggtcttccttacggctctctcaggggctttcgtggcaggactggatgcgggccttgtttacaactccttccctaaaatgggagactcttggatcccagaggacctccttaccttctcccccatcctgaagaatgttttcgagaatcccaccatggtgcagtttgatcaccggcttctgggaatcacgtctgtcactgccattacggcgctctatttcctgtcccggagagtcccccttcctcgaaggaccaagatggcagcagtgactctgctcgctttggcatacacacaggtggccttgggtattagcaccctgctcatgtatgttccaactcccctggctgccacacaccaatcaggctccttggctctgctcagtggtgccctttggctcatgaatgaactcagaagagttccaaaataattctgaagagcacttcctaggactgaaactgccttgggaattcatcagcaagcacaagaacttcatgtcacatggtttccaaattggtggagtctctcaagactattttgagatgggcactggatcaagaatgtcactaaggtgtgcttacaccagaggttgtattaacacatgccatgtgtgtacaaatgcccatggaggccagggaagtgctgagtcccggagagctggagttttaggtgattgtaaactgcctgataagagtgctggtaacaaaacacggtcctctggaagagcagcaagcactctcagcaactgagctgtctctccagccctggagtgaatattattaaagttaaatgtttatatatatatatatatatatatatatacacatacatacacacacacagacacacaca

SEQ ID NO: 3482 - DNA, 1673 bp, Cricetulus griseus
ccgggagaaggcaaacaggccttcaagagctgctgagggacaaggctgtcccttccaatgcttcgtgggaacaggccatgaagatggtagtcactgacccgcgttacagtgccttgcccaaattgagtgagaagaagcaggcacttaatgcttacaaggcccacatggtcgcaggcccagcagtacctcatggacaaccccagctttgctcaggaccagcagctgcagaacatggacaaagaagatgcactgatctgcttttgaggagcacatccgagctttagagagagaggaggaggaggagcgggaacgggcccggcttcgggaacggcgccagcagcggaagaaccgggaggcttttcagaccttcctggacgagttgcatgagacagggcagctgcattccatgtccacctggatggagctgtacccagcagtcagcactgatgtccgctttgccaacatgctgggccagccgggctctactcctctggacttattcaagttctatgtggaggaattgaaggcaaggttccatgatgagaagaagatcataaaggacattcttaaggacccgggcttctgtgtggaggtgaacacagccttcgaggacttcgcccacgtcataagctttgacaagagggctgctgcgctggacgcgaggcaacatcaagctgaccttcaatagtctgctggaaaaagcggaggcaacggggagagggagcgagaaaaggaggaggcacgaaggatgcggcgcagagaagctgcctttcgaagcatgctgaggcaggccgtgcctgctctggaggctgggcgactgcctgggaagaggtccgtgagcgctttgtgtgcgactcagcctttgagcagatcaccctggagtcggagcggatccggctcttccgagagttcctgcaggtgctggagcagactgaatgccagcacctccacaccaaaggccgaaagcatggcagaaaaggcaagaaacaccatcgcaagcggtctcactcaccctcagagaacaggacaaagacagggaactccggcaggcagagctccctaaccgctctccaggctttggaatcaaaaaggagaagacaggctgggacacatcggaaagcgagctgagtgagggggagctggaaagacgaaggcggacactcctacagcagctggatgaccaccaatgaccccacgaactacttcctgccttgggacttcgtgaggcagtggctccagggccatcctcaccatctgcctcagacttcttcgtatgtctggtctgtgtccactttccctaaagtaacccatcccaacacactactgttagcacctctcaaggttgctcttggtgttcaagggtcccctagttctcagaaactagtacagtccttgcccttagccccagaccagagatgggcagtctatatcacatggggtgggtgatgccagtagatacagtgtgagaagggatttccgggaaagagacaggctggtggacacagcctgggtggcagagggcagggtcctcaccctttagcatcagtgcctgctcttgcctgacctggccctggggctccaccattgcttcctctacccctgggacccgatgtatgtgttctgttttgttttttaaataatatttataactaaaaaaaaaaaaaaaaaaaaaa

SEQ ID NO: 3483 - DNA, 1672 bp, Cricetulus griseus
gaaatgactacatcatcaatgggtccaagatgtggattagcaatgccgaacatgcagatatctttctggttttcgcaaatgtagaccccacctctggttaccgaggcatcacctgcttcttagtagaccgagatacagaaggttttcatatagcgaaaaaggaaaacagatgggaatcagagcttagagcattgcagggctctgtttgaagccccttgtcccggttctcaggcctggcttttgtttctttctctgtccagtctactctaaaactattttgaagcttctctacacatttatatttctcatcccagtttctgagtacacagaagtttcactgtgccagaatctgggaagatgaaaacatttgaagtattggtactgctgacggaaatagtcactttatattcctactaaatctttgtactgtggtatgagtcagaggaacgtttgctacagtcggcaatttttattcaatactttaaagatttagtggtaagttgctaaacaaggtagaaactgataaaatttatttggaaaattgagatctcctagttctaatatcaaagaaatagtagaaaataaagatgtaacttgtagaccatataattaagaacaacaaacgcccaaaatattattttcaccaccaaaagcagtatgtttggctgctataattgacctgtatgaaagatgcattacatgatggctttagcagggcatttaaaaacatgtcctgtattggttttcaactataaagtttaaataatttggcttaatcatctgaaaataattcagttataatattcattaaatcatgcactatttttaagtagtatggtttattacacggtactttatttccccctcaaatttagttattggactttatcctaaatagtagttcattgagaaatttgattttggttttagtaatctcaagaaaaatgttttactcctataaggaaataatatcacaatctcataaggaatggagaataggagactagatagtctgaaaaggtacatccagtacaaatatatgtagtcatttatatagtatattaagtaattttttaattgtgaagacaaatatctatgttttacaatgcaaatgacaaacaggcaaaaacctaatcaaaatatccaactggtgaagccattgatctattaggatttttttagtcagtaagaagacccccttccagttgcagaccctgagtcctctggagagagaagtggacagcagacaagtgagtttcacatttcctgaggaacaccacattagatgtgtaaaaatagccccaaggctcatgcagttgctgaaattaatcatctgataaatagaaagtattttcgtgctttttgcacaaggataatgtttattaagaaaacctgacattttctaagtaattttgctttgcacagtcatgtttattgagctgaattaatttccacaatgcaaatcatagttaaatattcgaggttgtgtaaatacagttgagataggaattacattaaaacagtaggaagaaacaggacaaatttagaccttgaatccaaagagataaagtctacttgactttcaaatgggaaaatgatgaaagcccctcagccagcctttcagaacataaaggcagatgggtctgataagaaaagcaagggatggatccag

SEQ ID NO: 3484 - DNA, 1672 bp, Cricetulus griseus
gtccggggctgaatgggcgcgagcgcggcgccgggggcgggctggggcgcggggcccggggctggcggcgagccagcgctccctccctagcatgcgcacggaggcggcgggcggcgcggaacggcggccccagaagccgcgaagccaagcagcggcacctgcctgccgagcaatgccaactgagttcgcctctgtaaagctgcgaagagattgctcaaagaactccctgcaatggtacacccaaacccagaacaagatgagaagacccagctcgctattaaaaggcattgtcaagtgtacagtggttgtgtttgtagtgtggctcctgtacatcttcaaggtaaattacactgttgaagaatgtgacatgaaaacgatgcattatgtggaccctgaccgcataaagagagctcagagatatgctcagcaagtcctacagaaggaatgccggcccaggtttgcaaagaaagccatggctcggttatttgagcacaggtacagcatgaacttggagccctttgtgcagaaggtccccagggccagtgaagctgaactcaaatatgaccctccttttggattccggaagttctccagtaaagtccagagcctcttggacttgctacctgagcgtgactttcctgaacacttgagagccaagcactgcaagcgctgcgtggttgttggcaacggaggcatcctccatggactagagctgggccacgctctcaaccagttcgatgtggttataaggttaaacagtgccccaattgagggttattctgaacacgttggaaataaaactaccataaggatgacttatccagagggtgcaccactgtcggacgtggaatactttgccaatgacttgttcgtcagcgttttatttaagagtgttgatttcaagtggcttcaagcaatgttaaaaaatgaaaccctgccattttgggttcggctcttcttttggaagcaggtggcagaaaaaatcccactccaggcaaaacacttcaggattctgaacccagttatcatcaaagaaactgcctttgacatccttcagtactcagagcctcagctgagattctggggccaagataagaatatccccacaatcggtgccattgccattgtcctagccacacatctgtgtgatgaagtcagcttggcaggttttggatatgacctcagtcgacccaggactcctctgcattactttgacagtcagtgcatgagcgccatgaactctcaggtcatgcacaatgtgaccacagagaccaagttcctcctgaagttgatcaaggagggtgtggtgaaggacctcagcgggggcatccattgtgaattttgagcacaacaaacctcaattagaagcgcagctgagaactgtggcgaacaagcgccacttgcaagtcaccccacagctactttgactcttgcagctgctgtttttaaactggtgatgaggtgggaggagaggggcctctgtccctttggtgatggccctggtccccgagtctggattctgctgctctgtttggtagaactgaaggcagaggaatttcctgcttcctgaatgaagggcttactcatcaccactggcagccttcagaaggggtgtgtgtgtgtgtgtgtgtgtgtgtgtgtgtgtgtgtgtgtgtgtgtgtgtgttcttctg

SEQ ID NO: 3485 - DNA, 1672 bp, Cricetulus griseus
ggggcaagatgaaaatcgtcaagaacaagaacaagaacgggcgcatcgtgatcgtgatgagcaagtacatggagaacggcatgcaggcggtgaaggatcaagtcgggcgaggccaccgagggcgaggcgcgctcccccagccacaagaagcgtgctgccgccgacgaacgccacccccaggccgacaggacttttaaaaaggcggcggccggtggtgcggaggagaagaaagcggaagtgccctgcaaacgcagggaggaggaggctctggtgtccgcggaccctcagccccaggacctagggtcccggaagctctccccgaccaaggaggcctttggtgaacagccgctgcagctcaccaccaagccagacctgctggcctgggacccggcccggagctcacacccacccgcccaccaccaccatcaccaccaccaccaccaccaccatcacgcggtgggcctgaacctctcccacgcgcgcaagcgctgcctctctgagacccacggcgagcgcgaaccctgcaagaagcggttgacggcccgcagcatcagcaccccgaccctggcctggggggcagcccggccgccgaacaccccgccacccgtgtcccccaccgccgcgtccctgccgcagcccgaggtcatcctgttggactcagacctggatgagcccatagacttgcgctgcgtcaagatgcgcagcgatgctggggaaccgcccagctctctccaggtgaagcccgaggctccagcggcggcggtggccgcagtggtggcgccggccactgccgcagagaagcctccggccgaggcccaggacgagcccgcggagcccctgagcgaattcaagcccttctttgggaatataattatcactgacgtcaccgcgaactgcctcaccgtgactttcaaggagtacgtgacggtgtagtgggaaggagtcgcaccggttgggactcagcgcctagaggctcccacggagaagacgccccagcagccgtggccagggcccgcgctgctctcccgggatcccgactgagttgccccatttctcacagtctccttccactcggtgcctgcggccttgccgccacctccccttccctataggagaccccgagcccctccccgtggacctccagaactggccctgcagccccgaggcggtctcaagagttatagtattatattttaaccgtgctaacttgtcaagtgctgactctaccccggtttgtacgtggtgttattcttgaaatgtattgtttgagctcagaaggcccgaccccccccttcgggctgatatatatatatatatatatatttatttgtaggtatttatatattgaaatataaaaacctagatttatggagttttcctctagatcatgttatattctatatcagacaaactattttcagttggccttttcttctcccttcatccagtatttttgatttcatttcctcctctccaggaactgcgacaccagtaaccttggtatatattttttgatacttgtacacatgggtgtgttgtttctatgtgcaaaaaaaaaactatagaatgtctgaactataagcttccaactattacctgcttgaatgtaatattaatggagacgttgaaaggtatatataaactaagttttaaggttgaaaaaaaaaaaaaa

SEQ ID NO: 3486 - DNA, 1672 bp, Cricetulus griseus
caggctctgaagacaagatccccaaaaagagattctctgaggtgcaggaggagagaagagaacaggctcagcggactgttttgatacgttgcccaaataatgtcaatgagaaaaagtttcttaagtatttatcccagcatggaccaattaataatcatttcttctatgagagctttggtctccatgctgttgtagaattttgccaaaaagacagtgtagactcattgcagaatggaacacataccccaaaacagagaacagaccctgtaattccatttaagtcacgtttcttgaacttaaagctaaagaattcatctaaccagatacctcaacagtcgtatgcacagacaaacaagcagttgcctccttcaagcaagaaactctttgaattactgaattatgcagaaaacatagacgatcagctgaacactcttctgaaggctttccagctcacagaggagaatgtcaggctccgccatctaacctgctctctcattgaggacatagctgctgcatattttcctggctgtgtcatttggccctttggctcctcagtgaacacatttggcaaattgggatgtgatttggacatgtttttagatctagatgaaattggaaaacttgatgttcacaagaatgcaggggattttttgatggaatttcaaatgaaaactgttccttcagaaaggattgcaacccagaagatcctgtctgtaataggagagtgcattgacaattttggccctagctgtgtgggtgttcagaaaatactaaatgctcgatgtccactattgagattctcccatcaggcctctggatttcagtgtgatttgactgttaacaacagtattgctttgaaaagttccgaactcctttatatatatggctccctggattcaagagtaagagccttggtgttcagtgtgcgatgctgggctcgagcacattcattaacaagcagtattcctggtacgtggatcacaaacttctccctaacagtgatggtcatctttttccttcagagaagatcccccccaattcttccaactctggattccttaaaatccctagcagatgctgaagatagatgtatcctaaatgggcacaattgtacatttgttcgggacttgtataaaattaaaccttcaggaaacacagaaacattagaattgctactgaaggaattttttgagtattttggcaatttcgctttcaataaaaattccataaatattcgacagggaaaggagcagaacaaacctgactcctctcctctgtacatccagaacccttttgagacatctctcaacataagcaagaatgtgagtcagagccagctgcagaagtttgtggatttggccagagacagtgcctggatcttggaacaggaagataagagtcaaccttccctttcaagtaagcagccctgggggctggccaccctcctgctgccacctggggcagtctccacacctctctccaagaagaagaaaaagccaatgaatgaaaaagtcaaaggcttgttagcatccataaaaagtagcactacagacagttccaagggcacccacggaaagagagcaatcagtacacaggtgtgatggcaacagctttgggacttctgagaagagctgctgtgaaactttgacaggccttaacttttatctgatgt

SEQ ID NO: 3487 - DNA, 1672 bp, Cricetulus griseus
atcagccctgggtccctgcccctgtaactcagccaaggcctgtgacattcgctgctgctgtgaccaagactgccagccagaagtcagagagctgttccagcagtcctgcttctccagcgtgttcggaggggacgtaaaccctcccttccaccagcgctgtgcagttggcaccactcatgagaccccggactggtttcctttcctgtgtgtgcagtcaccccctcaactcacctttccttggtcacttctatcacggtgccatttcccccagacacgactctgcctttgaagcccatctgcacctccatctaagagactatgctgatgccacttacaaacaaggcgatcccatcatgaccacacaggggtattttaccgtcccccaggtgtccctagctggacagtgtctgcacagtgctccagtggctttcctgaggaactttgatgtaaatgtaccatcgatctggaagtgtaccaagaacaagatggaacgtgaagatccgcactgcggaggtctggtcacaccaacagtaacctatgaggaagccgctgacctggacaagctcatctccaatccagacacgcttttaaacagtggatcagcccccagaaatgtgactgtggaagaacattatgttttcagatggcaaaataattctatcattgaactagacatcacaatcatccgggcagaaatccatgcccaccagaaaggaacaatagcccagaggtttacagtgaagtttttaagccataacagtggtgatgagaaggaatcttctggaaatccaggttaccagcttggcaagccggtccgagccctacatgccaacgggatgaatgtcactgcattacacctctggcagccagctggaaggggcttgtgcgcttcagccgctctcagacccattttatttggagaggacgtactcgctggctgccttctggaggttgggattaatgagaactgtacgcagctcagggagaatgtccttcacaggctggatttgttggcacaagcaacccatgtctcgaggagaggcaactcggactacagtgatctgagtgacggctggctggaggtcatacgtgttgacgcccctgatacaggtgctgacctgcccctaggcagcgcaaatggcatctgcctggaaattcctgcccagctcaccatccggatcctcattgctgaagctggctctgtggaaggggtggctcagcaggagatccttggcgtggagacaaggttctccacagtgacctggcagtaccagtgtgggctcacctgtgaggacaaggccgatcttctccctctcagtgcatctgttcagttcattaaaatccctgcgcagatgccccctcccccaacgagattccagatcaacttcacagagtatgattgtacccagaatgagctatgttggccccaacttctgtaccctctgaccgagtactaccaaggggagccccgttcccagtgtgttgccaaaggcctgatgctgctgtctctcctcatgttggccacattcctcagtcatccttggattagaatgtgcaaaggccagtgctcaactcccatctaccattaagctttctcaaagactcggagcatccactcagtgactccctgtaggcctgtgtgtctctctgaaacccttttgtttgagacagg

SEQ ID NO: 3488 - DNA, 1672 bp, Cricetulus griseus
tggagttagaggatgacatccagaccatcagtgacaaagtgctgatgaaggaagtagagctggacagggttagagacacagtgaaggccctgactcgggaacaagagaagctcctggggcagctgaaggaagtccaagcagacaagaagcagaatgaggttgagctccagatgatccaagaggagagcttaactatagagctgcaggaggtcaagggccagcaagaagagcaaggtgctcagggttcaggcaactgaaggacaaggtggcacacatgaaggatgccctggcccaggcacagcagaaagtggctgagctggagcccctgaaagagcagcttcgaggagtccaggaacttgcagcctcaagccaacagaaagctgcccttcttggggaagaattggccagtgcagcaggagccagggaccgcaccactagccgagctacaccgccagcaggctggaagtggctgaagtcagtggccgactggctgagctcagcctgcacatgaaaggagggaaaaagtagccaatggagcaaggagcgtacagggctgctgcagaatatggaggccgagaaggacaaaaatcctgaagctgagtgcagagatccttcggctggagaagacagtacaggaggagagaagccagagccacatattcaagactgagctggcccgagaaaaggactctagcctggtacagttgtcagagagtaaacgagagctgacagagttgcgctcggccctccgtgtgcttcagaaggaaaaggagcagctgcaggcggagaaacaggaattgctggagtacatgaggaagctggaggcccgattagagaaggtagcagatgagaagtggaatgaagatgctgccacagaggatgaggaggccactgcaggactgagctgccctgcagctctgacggactctgaagatgagtccccagaggacatgaggctcccatcctatggcttgtgtgagcatggaaacacaggctcttctcctcctgggctccgggaggcatcttcccttgttgtcatcaaccaaccagcacccattgcttcccacctctccgggccaggggaggacagcagctctgactcagaggctgaagatgagaagtcagtcctgatggcagctgtgcagagtgggggtgaggaggccaatcttctgctccctgaacttggcagtgccttctacgacatggccagtggctttgcagtcagttccctgtcagaggccagcactggggtctctgccacccctccatggaaggaatgtactatctgtaaggagcgctttcctgctgagagtgacaaggatgccctggaggaccacatggatggacatttctttttcagcacccaggaccctttcacctttgagtgatatcactcctccctagtatgtatgtatacacacacacacacacacacactttttttttttctttctttctttttttaatgccaccccacacccaagtcctcaaatggaaaagaaaaatgtatttgtgccttttgtgagggatgggggggacaagggatcccaggtacccccatttcccaaaaccctcaccttctgcaggcccccacagcaataagaactcccccttctcccttaaattgtcctctcacctgtagtttggacaaatatatttatatgatacgtgt

SEQ ID NO: 3489 - DNA, 1672 bp, Cricetulus griseus
aatgtaagctgtcattgcaagcaaatgcttatccaactaaagctgagcttggtgctcaattttggaaaatcactgccttcctctcaaggtttagtcagggagcttccagcaaagaattgaaaatccagagtcttcggggcaggcaactgcttctggtggctctaaccaagttgtgtcaaagtttggggccttatgttaaggaacggaagcagctactggaggcaccatcagtactacctgagctgctgcagcaggccacgatacaaatgggtgccatgctgcagctgtgcttagtgcctgggataacaggccgctgcctgccttcaatcctcctctcagctgtccccacacttttagaagtagacctgagccaacacctcagggaaggacagccccatgctcaagtggtggatgcagatagaacactgctttctcacatgactctttaccaggatgtctacgttcagttgctggaggaattgccagccctgtcagggaatactcagtctttccaggcagccttgcaatttctaactttgttccttttggccccagagctgcattccaaggagagctcttgtttttgcttccatcttttattctgtgcggtaaagttcttacagggccaggcattcctgctccagtcactcaagatattgagcctcacttagaagccctgctcactcagatgtttgagactgggacaatagagcactttgggattgtactgcagtctattcttcaaggactggacatcactcaggcgtggaagtctgatctgcagattgttttgtgtgccattagactactcaatctactactcaaatgcccactcaatggagaaaaggcgactttgctgtggcatacgtgcccccagatcgtcactgctctaatgctgcaacaccgagaggcttgtcaggaacagcctgtggccctagtagtggttgagcctattcttgatgtcctggctattctgctgcggaaaggggaggagaccatcagcaaccctcaccatgttagtctggcttttaacatcttgctcacagtccctctggaccacttgaagccactggagtatggcagtgtcttcctgaagatgcacaatgtgctattctccatcttgcagtgccactctaaggtgatgctgaaggccattccatctttcttgaactcgtttaatagactattgttttcagttatgcatgaaggacggcagaaagacaaaggaagcatggatgacctgccagtggttcttgagtgtgcacgcctggtggaaaggatgtttagccacattgctactcgagctgaggagttcacctcgttctccccattcctggtgtcccactatgtgacagaggcacagaaggtaaccttgtaccctgctgtgaagaacctgctccaggaggggatttatctcatcttggatctctgcatggagcgtgatatccagtttctgcgggcctcactgcagcctggagcacgagatgtctttaaggatctgcacagcgactacctcaagtaccacaaggccaagcatgaaggagagaaaagatacacagcctaggccacaccagaagcacagttaccaggacgccttgcagaggcatcatggttatgagctatagaggatgtaaggcttctgaagttcttatgcacatgtcaaccaccatgg

SEQ ID NO: 3490 - DNA, 1671 bp, Cricetulus griseus
aagtgaaagcgaaagagaagcgactgaaagaaagaactgagcacaagcggctcgccaagtgagggagctccaaggaaccctctcttcatccggggatctccagcgcagctgtggagaaggcagccacccaagagcctgagagcagcctccatgggcttggagcccagctggtatctgctgctctgtttggctctctctggggcagcagggactgagccccccacagcgccccccacagcagacggaccgtggcaagccaccgacatagtcctagactgtttcttggtgacggatgacaggcatcgaggagcctttggcagcagtggggacaggcagaaggccttgcttgtgctgaagcaggtgccagtgctggatgatggctccctagaaggcatcaccgatttccaagtgagcacagtggccaaagatgacgcacccattatctttgaggcctcagtggactcggtacagattccccaggcagaggccttgctgcatgctgactgcagcgggaaggtggtgacctgtgagatctcccagtatttcctccaggccagacaagaggccccttcagagagagcagcttggttcatcagcaacatgcaggtgtctaggggaggacccagtgtctccatggtgatgaagactctaggagatgctgagaccgcagctgtctggcaccctacactgaacctacccctgagtccccagggtactataaggactgcagtggagttccaggtgacatcagagacccaagccttgagtcgtctgctggggtccaccgtctccctgcactgcagtctctccatggcaccaggcctggacctccttggtgtggagtggcggctgcagcacaaaggcagtggccagctggtatacagctggaagacagggcaggagcagggtcagcgcaagggcgctacgctggagcctgagcagctacacgcggctggggatgcctctctcaccttacccaacctcactctaaaggacgaggggacctacatctgccagatcactacctccctgtaccaagctcaacaaatcatcccacttaacatcctagctccccccaaagtagagctgaacttggcaaacaaggacctgccgccctccctcatctgcagtgtcgctggctattaccctctggacgtggtggtgacatggatccgagaggagctgggtgggattccagcccaagtctctggtgcctccttctccagcctcaggcaaagcaagatgggaacctacagcatctcttccactgtggtgactgagcctggccccacaggtgccacttacatctgccaagttacccacgtctccctggaagagccccttcgagtcagcatgagggttttcccacacacagagcagagaacagccttcggagttgtctttgccagcattctcttccttcttgcactgttgtttctgggacttcggagacagcgagtttctttgccaaggcccaccaagactatgaggcactctgggtagctgctctcttgcctccaaataaaaagtggagttcccatgttctagctaccaaagggcacccgtgctgaggtgtgggactggaaaaggcctgaaggagacaccctgtgtgggagtgaggtactcgtcctggtctgtacaggtctctgccctccttccctgttgagaaga

SEQ ID NO: 3491 - DNA, 1671 bp, Cricetulus griseus
gctcgcttgctagtcccttgcctctgtcgccgccactgcggggccatggggacccgctttctgctgcggagtttctgggccgcgcgtctggcgctgccgcctgccggccgccgcctccgcccggcgtcctccgaagctcagcgtcgcagctatgcccgcggcccagctggcctcccggccgacctactccgcggggacagcttcgtgggaggccgctggctcccggccccgccaccttcccggtgcacgacccggccagcggcgccacgctgggcaccgtggccgactgcggggtgcccgaggcccgcgccgctgtgcgcgccgcccacgatgccttctgcagctggaaaggggtctcggtcaaggagaggagttcattacttcgtaaatggtatgacttaatgatggaaaataaggacgaccttgccaagatcataactgctgagagtggaaagccactgaaagaggcccagggagaagttctgtattcagcccttttcctagaatggttctcagaggaagctcgtcgtatttatggagacatcatctatacctctgccaaggataaacgggggctggtcctcaagcagcccattggtgtggccgcaatcatcacaccgtggaattttcctagtgccatgatcacccggaaagtgggggccgctctggcagctggctgcactgtggtggtgaaacctgcggaagacacaccctactctgccctggccttggcacagcttgcaaaccaggcgggaatcccccccagggggtcctataatgtcattccctgctctagaaccaaagccaaggaagtgggagaggcactatgtactgatccactggtgtccaaaatttcctttactggttcaacggcaacaggaaaggtcctgctgcaccatgcagcaaattctgtgaagcgagtctccatggagctgggtggccttgctccattcattgtctttgacagtgccaatgtggaccaggctgtcgcaggagcaatggcatccaagtttaggatgggcagacttgtgtttgtgcaaacagattcttagtacaacggggtatctatgattcctttgtaaagaagtttgcagaagcaatgcagaaaagcctgcgtgtgggtaatggatttgaggaaggaataactcagggcccattaattaatgagaaagcagtagaaaaggtagagaagcatgtgaatgacgcagttgccaaaggggccgaggttgtgacaggcgggaagcgacaccaaagagggggaaatttttttgagcccaccctgctcagcaatgtcaccaaggacatgctctgcatcactgaagagacctttgggcccctggcgccagttgtcaagtttgataaagaagaagaggccattgccatcgcaaatgcagctgatgttggattagcagggtacttttactctcaagacccagcccagatctggagagtggcagagcagctggaggtgggcatggttggcgtgaatgaaggactgatctcttcagtggagtgtccctttggtggggtgaagcagtctggccttgggcgagaagggtccaagtatggtattgacgagtatctggaggtcaagtatgtgtgttatggaggcttgtagggttcttcacctctttaaaaaataataaagctacttagatctgtagggacatt

SEQ ID NO: 3492 - DNA, 1671 bp, Cricetulus griseus
gcccctcgccctattttcttcggggtggaatagggttagcaggaaggcctccttctggaataagacccccatctggaaatgttcgagtggcaactgcaatgccaccagcaacagcaagaccaggttctcgaggcggtcccttagggactggtggagttttgtcatctcagatcaaagttgctgatcgtcctgtaacccaacaaggtttgagtggaatgaaactgggatgaaggtcccagaggctaaatttagacaatcttactatcttggacttcttaggagcaaaataagtgaaactttcaaggacaactagcagactacaacatgttggtagataaactcaataccaataactgaaatggaagaagtaaatgaatgactacaacatgcttaaaagctcaaaatgatcgagaaacacagagtatggatgtcatatttactgaaagacaagcgaagggaaaaacaaatcagaagtgtagaagaagaagttgaacaagaaaagcaagcagcagatggcattatcaaaaaatatgtctcctgaaaaacaagtcaagtacatagaaatgaaaaccacaaatgagaaactgttgcaggaattagacgcacttcagcaacaattagattcattgaacataaaaaaggagagcctagaaaccgaaatagcacactcccaggtaaagcaagaggctgtattgctgcatgaaaaactttatgagttagagtcccatcgagatcaaatgattgcagaagacaaaagcatgggatcgccaatggaggagagggagagattgcttaagcaggttaaagaagataatcaggaaatagccagcatggagagacagttaacagatataaaaggaaaaataaatcagtttagtagaagaaattagacaacttgacatggatttagaggagcaccaaggtgaaatgaatcaaaaatacaaggagcttaaaaaacgggaggaaaatatggatgcttttatagagacttttgaggaaacaaaagaatcaggaactggaacggaaggcacagatagaagccaacattgtcgccctgttagagcattgcagtcggaatataaatcgtatgaaacagatatcctccatcaccaaccaagagctaaagatgatgcaggatgacctcagctttaaatcaactgaaatgcagaagtcacagacaacagccaggaatttgacctcagacagtcagcgtctgcagctggatctacagaaaatggaacttttggaaagtaagatgacagaggaacagcagtctctgaaaaacaaaattaagcaaatgactgctgacctggagacatacagtgacctggcagctttaaaatcgtctgccgaagaaaagaagaagaaattgcatcaagaaagaacagtgttatcaacctacagaaatgcctttaagaaaacaatggagaagctgacaacagattatgaggcactgaaaacacaactgcaagagaatgagacacatgctcagcttacaaatttggagagaaagtggcagcacctcgagacaaaataattttgtgatgaaagagttcatagcaaccaagagtcaagagagtgattaccaaccggttattaaaatgtgatgaagcagatttcagaatacaataaaaccatcatggatgctctacacaatgaccaacagaagct

SEQ ID NO: 3493 - DNA, 1671 bp, Cricetulus griseus
ggaagtgcgggcggaggatcccgagctggatcccgagccgggagcggggctcggggctcgctggggcggctggctcccgcgatggcaagtctgtggcacggaggcctgctgcggctgggctcggggctcagcctgtcctgcctggcgctgtccgtgctgctgttaccgcagctgacaggcgccgccaagaattttgaagacgtgaggtgtaagtgtatctgccctccctataaagagaaccccgggcatatttataataagaacatatcccagaaagattgtgattgccttcatgttgtggagcccatgcctgtgcgggggcctgatgtggaagcatactgtctacgctgtgaatgcaaatacgaagaaagaagctcagtcacaatcaaggttaccattataatttatctctctattttgggccttctacttctgtacatggtttatcttaccttagttgagccaatcctgaagcggcgcctctttggacactcacagctgttgcagagtgatgatgatgttggggatcaccagccttttgccaacgcccatgatgtgctggcccgctcccgcagcagagccaacgttctaaacaaggtggagtatgcacagcagcgctggaagcttcaggttcaggaacagcggaagtctgtcttcgaccgacatgttgtcctcagctaactgggaatcagaatcaaggtgactagaaaaaacacgacagacaactggaaagaattgactgggtgtcagtgggttttaatgcctgttgtttttacaaacccttactggatggaggcaggctcaaagttggaagcagacccacatgcttagtattttttcttgttaatgtattaatagagacatttttaaagcacacagttccaagtcagccagtaaaccttttcctacttgtgacttttactaataaaattaagctgcctgtgagttatcgtcaagtcctgtgcctggaacaagctctctttctcaccacacagcaacttggttatcaagataatttccaggtgtgcttttgcctctgtttttctatggcgggagaaggaagggaagccttgggagtgcttgacatagtttctctcaagtctctttactagacagacttgtaaatacaccagaccttctatttcactgttagtatttccagtgtggccagctcatcagtgtgctagcctccacacatgacttttgcactgactacatcactaagattctggttggcttgtggctgtgtttcttggtaagctggatttaaaatgcctggtggctctccacaaaatgcagacttgtttcgtgcgatgtgatgtctgatgcaacacatccaagaacaaactggccgtttgctagtttactctaataactaaacacagtgtgtgtggtcttcctcatcttcttctagtatctctaaggacttgaacatttagaataaagacattttctcttaagcccaagcctccctggatgaatggcatacacatactggtcagcatttcctgtcgtgctgagaggcagctatttgaactaatgtgggcagctttgaactaggactggagttcggattgcctctctctcagaagtctaacagttattggataactggcttttttcttcctacatcctctttggaatgtaacaataaaataattttcaaaaccc

SEQ ID NO: 3494 - DNA, 1671 bp, Cricetulus griseus
attcaggcaaggttatgtcgcttaaaaaagaaagcccaggcagaagccaacgccacagctatcagtaatctcctgccgttcatggagtatgaagtccacactcaactgatgaacaagctcaaactcaaaggaatgaacgctttgtttggactgagaattcaggtcacagtgggtgagaacatgttgatgggcttagcgtctgccacaggggtctacttagcagctttaccaatgccgggaggcatccagatcgctgggaagacccccagtgatggctcctatgagcagcacgatcgtctcacatgcagaagaaaataaacggacacaattgtggacatcggaaatacagatgttcacatcggtaagagtggtcagactgagcagcctcaacctgactaaccaagctctcaataagaacttcaatggcctgtgtgagaacttgctcaagagcttgtatttcaaactccgatcaatgacccctgctgcctgtgccatgtgaactttacagtgtctctgcccgaagacgagttaatccaggttacagtcacagcagttgcaataacttttgataaaaaccaggccttacagaccacaaaagcccatgttgaaaagtcactacagagagcctctacagataacgaagacctgctgcagttcccgctggagctctgctcagactccctgccttcccatgctttctcagccactaaagctgtgacggttgagaaagcaagtcccatgggtgatggaaatttccggaatcgctctgctccaccttgtgcaagttccacagtcggggttgttaagatgactccgctttctttcatccctggagcaaagataacaaaatatctcggcatcattaactatgttttttattcgagaaaccacttctctccgggaggaaggaggggtcagtggtttcctccatgccttcattgctgaagtgtttgccatggtaagagctcacgtggccgcactgggcgggaatgctgtcgtgtcctacatcatgaagcagtgtgtcttcatggagaatccgagtaagaaccaggcgcagtgtctcataaatgtcagtggtgacgcagtggtctttgtgcgtgaatctgacttagaagtcatgtcaactcagcagcctactgtcaactgccagccatcttgtactggagaagttacaacctgaagacagcctcatgactggctgtcacatcaaggagggaggggtacctcatgactggcggttgttttgtatttaattgtctagaagaggcttggcttcaactggggagagaccattgtgaattgtattcaagtagtgaaaataccgtcgacctaggaagagcaggattgttttctaataatactatgttgcactcttactaatcttagggactttggtgaggtacactctttggtatagaacttggaaatgagacttgaatatgctataaagtgttgaatgtatgtattaagtcttacctatgccaagtacccactgctaatgaaatatcaaattccttgttagcccaataaaattaccttataaaatttaggattttattctctcagaacaacaaattattctaaagatgaaaaatcatcttattgttacacaggtgtcaatatttttctgtattttgtttataattttattttttaataaaaatttataaa

SEQ ID NO: 3495 - DNA, 1671 bp, Cricetulus griseus
agaagaagatggacccctgaaaggcaaaggtcaaggggcagctgcagctgatgccaaaggcaaaagagaagaaagcacctcccttgctggagggagcccctttccgcctgaagccccgcagcatccacgagctgtctgtggaacagcagctgtattacaaggagatcacagaagcctgtgtgggatcctgtgaggccaagagagcggaagctctgcagagcattgccacggacccgggactctatcagatgctaccacgcttcagtaccttcatctccgagggggtccgtgtgaatgtagttcagaacaacctggccttgctcatttacctgatgcgcatggtgaaggccctgatggacaaccccacgctgtatctagagaaatatgtgcacgagctgatcccagcagtaatgacctgcattgtgagcagacagctatgtctgcggccggatgtggataatcactgggcactccgggactttgctgcccgtctagtggcccagatatgtaagcatttcagcacaaccaccaacaacatccagtcccggatcaccaagacctttaccaagagctgggtagatgagaagaccccatggacaactcgatatggttccattgcaggcctggcagagctgggacatgatgtgattaagacactgattctgccaaggttgcagcaggaaggggaacggatccgcagtgtcctggatgggccagtactgagcaatattgaccgtattggagcggaccatgtgcagagcctactcctgaaacactgtgccccagtactggcaaagctgcgccctccacccgacaatcaggatgcctaccgaggagaatttgggtccctggggccccttctctgctcccatgtggtgaaggccagggcccaggctgctctacaagctcagcaggtcaacaggaccacactcaccatcacacagcctcggcccacactgaccctctcacaggctcctcagccaggccctcgtacccctggcttattgaaggtccctggctccattgccttgcctgtccagacactggtgtctgctagagctgctgcccctcctcagccttctcctcctccaaccaagtttatcgtgatgtcctcatcttccagtgcctcatcaacacagcaggtcctatccctcagcacctcagcccctggctcaggctctaccactacctctcctgtcaccaccacagttcccagcgttcagcccatcgtgaagctggtctccactgccaccactgcacccccaagcacagcccctgctggtcctggcaatgttcagaaatacattgtggtctcccttcccccaacaggggaaggtaaaggaggccccccttctcatccttctccagtccctcctccatcttcttcaccatccccacttgggggcagtgccctctgtggggggaagcaggaagctggggacagcccccctccagctccagggactccaaaggctaatggctcccagcctaccggacctggctcccctcaacctgctctgtgataatgtcacatctgctgatctcccgttctgcagatttctacacacacaaagaacgtgtgagggaggagggaggaggctgtgtccctagtgattttctttttagatactgtacagtaagttcctcagaataaaagttggatttgtaagt

SEQ ID NO: 3496 - DNA, 1670 bp, Cricetulus griseus
gaagcattttcagctgttccagtaagttcacacacaagtgatgcagattatggagcacctgactctactttccgccagtgaactcataccatatgcagaagtactaacatcgaatatgaaccagctactgaattcaggggttccacggagaattcttcaaactgtcaataagttatggatggttcttaatactgtgatgccaagaaggctatgggtaatgactgttaatgcactccaaccttccataaagttatacgacaacaaaatatacccagaatgatttgatgatagatcctctcattgtcttgaggtgtgaccggagggttcacaaggagacagcagagcaagataggccttcccagaacaatacagtaggtttgcttggacagactgatgccccagaagtcaccagagaagagctgaaaaatgcattactggctgctcaggatagtgcagctgtccagattctcttagagatttgtttgcctactgatgaggaaaaggcaaaaggtgccaacccagacatctccctcaggaatactcaaagtgtcattaccaccaacactccaaataaagaaatggaggaaggagaagacaacctgctctgtaaccttcgtgaagtccagtgccttatctgttgcctgttgcaccaaatgtacatcgcagatcccaacattgctaaacttgttcactttcagggctatccatgtgaacttctgtctctgacggttgctgggatcccatctatgcatatctgtctggatttcataccggagcttattgcccagcctgaacttgaaaaacagatatttgctatacagctgctttctcatttgtgtatccagtatgcattaccaaagtcacttagtgtggctcgattagctgtcaatgtcatgggaactttgctaacagtcctaacccaggctaagcggtatgctttctttatgccaactcttccaagttggtctccttttgtcgagcatttcctccactgtacgaggatattatgtctttgctaattcaaataggccaagtgtgtgcctctgatgttgccactcagactagagacattgatccagtcatcacacgtcttacaacaaataaaggaagaaaccaagttaaatgactgccttggagttacgagatagaagagtaaatttctatttatccttttttaaatttatttttaattaattgctgtattatctaattctcagaggagcaaagaatgtaccaaattaaatgcattttagagcaataaaccccaatagagctcttggttcattatcaggattataactcatattttactttgaggagatctttgagtaagaaaatacagtgtttgaacctcaggaaaattataatgtggaaaatactgtgttgctggagtttgcagtcctctgttaggaacttcatgattaagtatgcattcagataactataatcattttttaaaattaagtagccaacatagaaggtacttcttttgctctctgagaaatacctcaatcattagcttcatcctttccgccagcacacagttaaatctcattttccttctttgttactcctgaccctacctcatgaaggtgttctattaaaacaagtttatagccgtttccaatcatgaagtgcatagatgtatcatgcatgatggaatatatata

SEQ ID NO: 3497 - DNA, 1670 bp, Cricetulus griseus
ctatgatgatcattcatctgaccggcgggtatatgatcgtcggtactgtggcagctacagacgcaatgactatagccgggaccgtggagatgcctactatgacactgactttcgacattcctatgagtgccatcgggagaacagcagttaccgaagccagcgcagcagccggaggaaacatagacggcggaggagacgtagccgcaccttcagccgctcatcttcacagcacagcagccggagagccaagagtgtagaggacgacgctgagggccacctcatctaccacgtcggggactggctacaagagcgatatgaaattgtgagcaccttaggagaaggtacctttggccgagttgtgcagtgtgtggaccatcgcaggggcggagcaagagttgccctgaagatcattaagaatgtggagaagtacaaggaagcagctcgcctagaaatcaacgtgctagagaagatcaatgagaaagatcctgacaacaagaacctctgtgtccagatgtttgactggtttgactaccatggccacatgtgtatctcctttgagcttctgggccttagcaccttcgatttcctcaaagacaacaactacctgccctaccccatccaccaagtgcgccacatggccttccagctctgccaggccgtcaagttcctccatgataacaacttgacacacacggacctcaaacctgaaaatattctgtttgtgaattcagactacgaactcacctacaacctagagaagaagcgagatgagcgcagcgtgaagagcacagatgtgcgggtggtcgactttggcagcgccacctttgaccatgaacaccatagcactattgtctccactcgccattaccgagccccagaagtcattcttgagttgggctggtcacagccgtgtgatgtgtggagcataggctgtatcatctttgagtactacgttggcttcaccctcttccagacccatgacaacagagaacatctagccatgatggaaaggatcctgggtcctatcccttctcggatgatccgaaagacaagaaaacagaaatatttttatcggggtcacctggattgggatggaaacacatcagcggggcgctacgttcgtgagaactgcaaaccactgcggcggtatctgacctcagaggcagaggaccaccaccagctcttcgatctgattgaaagtatgctagagtatgaacctgctaagcggctgaccttaggtgaagcccttcagcatcctttcttcgcctgccttcggactgagccacccaacaccaagttgtgggactccagtcgggatatcagtcggtgacaatcaggccttggacccccctgcttcttgtgtagcagtgggtgtccagtccaggacactggtgcttttttatacaagagaacagagccagaactcaccccctctcctgcccatggctcctttatacctgtgaatatgtgaaatagtgtatatatgacagatcttgtacctatcactacaaaccctgccttgtatatactgctatttacactcttcagcctcatctgcccctcatgtggagttggatggggggcagaatgaggtagccaggtggtgtctaccccatgttttataagggattttgtacagtctttgtgaaataaaatgacatgcttcatct

SEQ ID NO: 3498 - DNA, 1670 bp, Cricetulus griseus
  modified_base (1634)..(1634): a, c, t, g, unknown or other
tccgattcgttgcttagcagagcggcttcccagacccggcgcatcagaaagccgggggagtcccatggtttggctggtggcaatgccgtccaggcagagttccctctatggtctggctgctcatggcctctggctcttgggccttgtcctcctgatggatgcatctgctagacctgccaaccactcatccactcgggaaagagcagccaacaaggaggaaaatgagatcctacccccagaccacttgaacggggtgaaactagagatggatggacacctgaacaaggacttccaccaggaggttttcctggggaaggatatggatgggtttgatgaggactcagagccaaggagaagccggaggaagctgatggtcatcttttccaaggtagatgtgaacactgaccggaggatcagcgctaaggagatgcaacactggattatggagaaaacagcagaacacttccaggaggctgtcaaggaaaacaaactacactttggggctgtggaccctgatggtgacggctatgtgtcctgggatgaatataaagtgaagtttttagcaagcaaaggccacaatgagagggaaattgctgatgccatcaggaaccatgaggaactcaaagtggatgaggagacacaggaagtccttgagaacctcaaaggtcgctggtatcaggccgacaatccacctgcagacctgctgctgactgaggaggagttcctttcattccttcaccctgagcacagccggggcatgctcaagttcatggtcaaggagattgttcgggacttggaccaggatggtgataagcagctgtctctgcctgagttcatctccttgccagtgggcactgttgagaaccagcaaggccaagacattgatgacaattgggtgaaagacaggagaaaagagtttgaggaactgattgattccaaccatgatgggattgtgaccatggaggagctggagaactacatggaccccatgaatgaatacaatgccctcaatgaagccaaacagatgatcgccattgccgacgagaaccagaatcaccacctggagcctgaggagattctcaagtatagcgagttcttcactggcagcaagctgatggactatgcccgcaatgtgcatgaggaattctgagcatgcccctcaccctcaactggggccaggccaccagtctcctgtctgacccttcctatatcttgagggagaggcctgtggtctagtgagacctgtggttgacttgggtcccagggtggttctgaaatgctctacctaccctgtgtctgggaactaccatgatccctaagagtgctgtcccagaaccttctttcttctgctgtgttcgtatgctctggctcagcccctgccacagcatggcccagacttattaaaaatgtgcttaataggctatgtgtcctttccagcatgtgtctgaggcagcagcccttctgtaccagttataggctaagctatatttgcttgatcaaatctctctcagttgctaacattctacttctgagaactgtttggggtgtttggttcaggtgaaggtcaggcagatctttgaatttgagaccagcctggtctacaagagctagttccaggacactttttttttttnttttctttctttctttctttctttctttcttgttgt

SEQ ID NO: 3499 - DNA, 1670 bp, Cricetulus griseus
taagatggcggggaagaagaacgttttgtcgtctcttgcagtttatgcggaagactcggagcctgaatctgatggcgaggctggagtcgacgctgtgggcggcgcggctgaagagaaaggtggcttggtatctgatgcctatggagaagacgactttctcccgccttgggggtgatgaagatggttatgaagaagaggaggatgagaacagcaagcagtcggaagatgacgattcagagactgaaaaacctgaggctgatgacccaaaggataatacagaagcagagaagcgggatccccaggaattagtggcctccttttctgaaagggtccgaaacatgtcacctgacgagatcaagatcccaccagaaccacctggcagatgttcaaatcacttacaagacaagatccagaagctttatgagcgcaagataaaggagggaatggatatgaactacatcatccaaaggaagaaggagttccggaaccccagcatctatgaaaaactgatccagttctgtgccattgatgagctgggcaccaactatccaaaggatatgtttgacccccatggctggtctgaagactcctactatgaggctctagccaaggcccagaagattgaaatggacaaattggaaaaggccaaaaaaggagcgaaccaaaattgagtttgtaacgggcaccaagaaaggcaccacgaccaatgccacggctgccaccaccactactgccagcacagctgttgcagatgcccaaaagagaaagagcaagtgggactctgccatcccagtgacgacaatagcacagcccaccatcctcaccaccacagccacactgccagcagtggtcactgtcaccaccagtgccagcggctccaagaccaccgtcatttctgctgtgggcaccattgtgaagaaggccaagcagtgaccagagtacaccccaggactgtcaagattgttgctcaggatgaacaatagtgtgacagaaactggggctgctcagaggggtagcccagggagctaccatggtcattcccaatggtatgcctggtggtgtgggcaggtaggagctcactgaaggagtcagttggacacatgccccttcctggtgtctgctttcctgacccggaaaccggatctcagcaattctcaggcaatagcagaggcctctgctctcttgggtgcagttatgcactccccacactgcctctgatacacacccaggcctttgaaatcaggccagtgaacagaggcctgggatgtgattcccaacctgcccagggcaggagcaaggtgtgggcacctggccaaggccgccccagtccctcggtgcccggtgagtgtggccagcaggatccacgcagtgggggagatgaatcacctcctgctccggccagggcggagctcattgtttatgtgagagccctgctcttgggagggttctgccaccccacccttcctctgctgttatctctgcccagcagcagcccctgggtagcaccggtggccactcttagggcccaaacaggttcaccagcccaagatgccacaggggaaagcttgccttttgtgccctctggcagctctccttcccactcagcggaaaggctgagtgtcaaaggaggaagactggctgggaagggtctcattgcttccctggggacc

SEQ ID NO: 3500 - DNA, 1670 bp, Cricetulus griseus
  modified_base (315)..(315): a, c, t, g, unknown or other
  modified_base (320)..(320): a, c, t, g, unknown or other
  modified_base (593)..(593): a, c, t, g, unknown or other
  modified_base (922)..(922): a, c, t, g, unknown or other
agcctatgtatggcatggaaggcctgttcccctacagccctgccctgtcgcaggccctgatggggttgtctccaggctcacttctgcagcagtaccagcaataccagcagagtctgcaggaggcgattcagcagcagcaacagcagcagcagaggcaactacagcagcagcagcagcaacagcagcagcagcaacaacaaaaagtgcagcagcagcagcagcagcagcagcagcagcccaaagcaagccaagcggtggcggcggcggtggcggcggcggctcataccactgcctggcgtgcgagagcgcgctctncgggnggaagcgctgagtcagcatcctcgagtcggccttgcacaaacacagaacaatcacgagagcagcaagaaacgccaaagagcaccctagtttattacctcactctgcctgcttccccgatcctagcaccgcatctacctcgcagtctgccgctcacccaaaaaaacaaaaagaaaaaaaaggaaaaaaagaaaaaaaaaaaaaaagcttaaaaaaaaagaaaaaagaaaaaaaaaaaaaaaaggtgtgtgtgtgtgtgtgtgtgtgtgtgtgtntggggctttgcttccaaacaccaacagacataatctccctcgcccccaaagtgtgaagtccttctccctcactctcttccttatgtttcaaagggaactttgaagactgtgaatccaggttccgttggccaccttccgggcttcttccccagtgctgaggccactcattgactttgcaaaagactggagcattccaagatctgaaatctttctttttttttttttcttttttttttttcttttttcttttttcttttctttcttttttttttttttgtttttccattatttttatcttgtttgtaactctatgaaatatatatatatanattttttgccatctaactgttgtatgttactgtgtctgtatctatgaaaaatgtttgttttgggttctctgtgtgataccaattaacaatttaacactagctttacctgtcattctgctaggtcttcttgaaaaccgtttttttaagatgatattgcttggtaatagtgcaatttctatcctccccacccccgacctcaagttcccttggaactctgccagccctttcccagtggttttgtttgttctattttgagctactatcatcctccctctgtaaggcagagtgactgtcagtgtttcactgtgccacgccttgacccgtgggtgtgtttggcaacaataaggtcccacccacacacacacatttgtcttttttttttaatttttttaaattcattgttgaaacctgagttatcaggcatggcaggaagttgcaggagagagaggcagtgacccaagccagtgcacttgatgttcatgacatatattttttttaattaataaattaaattaaacattttaaatagaagcataaaattgagttggttgtttgtttggcgctgagatactgcccactgtgaaacaaagctttgactagttttttgttttgttttacttttcttcaggggggaggggggcaagtttgggtaggaaagaaagcataaatgaacgtgaccctgaggtaaagaaggtatatgaacagcctttgcaatgtacacaaaaaacaacaacaaaaaaaaaaaaaa

SEQ ID NO: 3501 - DNA, 1669 bp, Cricetulus griseus
gtgctggatctggacgaggacgaggacgatttggaagtgttcagtaaggatgcctcactgatggacatgaactccttcagcctatgatgccaacatctcctttgtcaatgataaccaaatcaagtttgaagatgaacctgatttaaaggatctcttcattacagttgatgcacctgaaagccacgttactacaattgaaacttttatcacttacaggatcataaccaagacatctcgtggggaatttgattccagtgaatttgaagtcaggcgacgttatcaagatttcctttggttgaaggggaaactggaggatgcacatcccacgctcattattccaccattaccagaaaagtttatcgtgaaagggatggtggaacgattcaacgatgacttcatagaaacccgcaggaaggcattgcataagtttctgaacaggattgctgatcatccaactttaacgtttaatgaagatttcaaggttttcctcactgcacaagccccggaactatcgtcttataagaagcaaggacctggcttgctgagcaggatggggcagacagtcagagctgtggcatcctccatgagaggagtgaagaaccggccagatgagttcatggaaatgaatagcttcatcgaaacatttagccagaaaattaatttaatagacaaaatatctcagagaatctacaaggaagaaagagattattttgatgaaatgaaagaatatggccccattcatattctgtggtcagcatcagaggaagacctggttgacacattgaaaggcatcgccagctgcattgaccagtgctgtaaggccactgagaagcggatgactggcctatcagaggccttgctgcctgttgtccatgagtatgtgctttacagtgagatgttaatgggtgttatgaaaagaagagatcaaatacaaacagaactggattccaaagttgaagctttgacctacaagaaagccgatgctgatctgcttacagaggaaatcggaaaacttgaagataaagtggaatgtgctaacaatgccctgaaagcagactgggaacgctggaagcagaacatgcaaaatgacctcaagtcagcatttacagacacagccgaggagaacatccgatactatgaacagtgccttgctacttgggaatcattcctcacatcacagactgaccttcccttggaagaggactctgaagataaaatttaatcctattgacaactcctgtatgatctttgagagacagtgtctatcaaccaaagttttttttttctggattggctgtgccctttataaagtggatgacaaatgattttgccctggctggaaaaccaacaacttacaaactcaggtattccaggtcatcaacgtgaatttgtgatataaatatatctacctagatatatagatctgttatatgatgtatattctatagatctgttatatggatagatatttatctatgtctatgtggatagaaagagatttagtgtgttttaattttgttcttaaatttatgtgccattaattgcatatagagggttttttttcttacatatttgactgtggaacattacatttttcaatatgttgtaaagacttggttttaataaaatctttattaagaaaaaaaaaaaaaaaaaaaaaaaaaaaaaa

SEQ ID NO: 3502 - DNA, 1669 bp, Cricetulus griseus
tggaccggcatggatggtgactcgcaccgaagggcacgaggaaaaaccgctgcccccggcccagtccctgacccaggaaggcggtcctgcagctggcaaggcctctggtgcagacgagcgtgacacaaggaggaaggcggggccggcctggatggtgcgtcgctctgaggggcacgagcaaacaaccactggccatgcccaagccgcagggcccgaaggtggcaaagggcgcgccgtggcagatgccctcaataggcaaatccgagaggaggtgacgagtacagtgagcagctcctacaggaacgagttcagagcatggacagacatcaagcctgtgaagccgatcaaagccaagccccagtacaagcccccagatgacaagatggtccacgagacaagctacagtgcccagttcaaaggggaggccaataagcccactgcagctgacaacaaggccatggatcgcagaagaatacgaagcctctacagcgagcctttcaaggaatccccgaaggagccgggtccaacccaccagtgatgcacaaaagaatcaaggtcctgtagccaaagagccacacaaggatcaaagccccggagtcccagggcttccgaaaggccaagagcctccaaaggacccaggccccatggtgccagaactgccaaaggatcaagtccctgtggtcccagggtccttaaaggaccaaagccctacacccccaggccctccaaaagaccaaggtgctgtattcccagggcccgtgaaggatctaggcccaatggccccagcaccagccaaggatcaagaccacatggcatctgagcctttaaagaataaagattctgtcatcttagcaccagccaaagcccacagccctttgctgccggaacctctaaagaaccagagtcatgtggtcccagcaagagttgaggatccgaagtcccccagcaccagcacccttgaaggacccaggtcctgtgggccctgaacctgggaaagatggagctcctgtggtccctgagcgtaagaaggaccagaatgccacagtcatggcacctttgaagagtgaagctcctgtggcccctgagtccatgaagaatcaaggcttagcatacccagagccagtcaaagatacaggtacagatacagtggtccccagacagatgaagggttatgattctgtgtttgtagcacctgtgaagaaccaaggtccagtggtccctgagccagtgaagagccaagaccccattatcccagcactagccaaggatcaaggtcccatggtcccagagcctccaaagaatcaaagcccagtggtccttggacctgtaaagaatcaagaccctataatcccagtacctctgaaaggtcaggatcccccggtgccagccccaacaaaggaccaaggtcctacagcccctgaccctctgaagactcaagctcccagaggccctcaattgtccacagtctcaccttcacccccagtcatgatcccaacagttccccatgcagaatatattgagggatccccttgattcccctgaaatgccatgaaggagctggcgatggaagtgcttccctcctggggaggcaaagacacatatttaatctgcatgaaactgtgctgtatagtcttgcaggaatcaaaataaaaccggctcttctggctca

SEQ ID NO: 3503 - DNA, 1669 bp, Cricetulus griseus
gaagtccagctgctcctgcagcagccctcgctcctctgggctcagcagcagcaattcagcaactcctcacctcagcactcctgactgctgggacagagtccctgggggatcctctctggaggaagtgtcagtcagctcgccaaaggcatctgcagagccctgctggctcatccgactctgcatctccactgtggtgctgcccaaggaggattcctgctcgggtagcgatgctggctctgccgtgggaagcacctatgaaccatgccccatgcgactggaggctcttcaggttttggctcacctggcaaggggctatttttcgacacagcaaatgccatattgatgtcactccaagataagtcactaaacgtgcgtgccaaagcagcctggtccctgggcaacctaacagatactctaatcgtcaacatggacacaccagacccaagtttccaggatgagttctctgggctcctgctcttgaaaatgttgcagtctgcgattcatgcctccacggacaaagacaaggtcaaaagcaatgcagtccgggcccttgggaatttgcttcattttctccaacccactcacatagaaagacccaggtttgctgaaatcattgaggagtctatccaggctctgatttctactgttgtaaacgaggctgctatgaaagtccgatggaatgcttgctatgcaataggaaatgtttttaaaaaccccgctcttccacttgggtcagctccatggacctcccaggcctacaaggccctgacatcggttgtgatgtcatgcaagaacttcaaagtgcgcatcagatctgccgcagccctttccatcccaggcaagagagcacagtacgggtctctagaacagttcgctcagatctggaatgcgttggtcactgccttgcagaagagtgaggacaccacagacttcctggaattcaagtactgtgccagcctaaggacccacatctgccaggcgctgctccacctcttgagcctcgccagtgcctctgacttcccctgcatacaagactctcttgagcggaatggggatatgatccagttctacatcctacagttcttaaaatcaggagtagagggagatgatcctggagcagtccacaccccacaggaaagggaccagatggtcagagtggccctgaagcacatacacagtgtgcaggcgctgcctggagacacagccaaaagggtcatcgtgatcttcttagaagataccctggctattcattgtgactcctcaggaggacaagtggcactccttggctcatcagatcagtgacttttcccaccctcccttccgcagtcataaatgggaatccgaggccaagcttgtccatttgaacatggagtgcaattctagggcaggcgcgtcctgtcggggtttacttagaatgggttactggcttacttaactctttctcaaagggctcagccactttggagagtggttccattaccggccattctgaccctgacaaccaaggcatgaggaatcagggtgcatgcagtgtgggcacagacaactggaggtcttgaggtgtttagtctcagaaagaaagaagatagacttagaaaataggatctactagaatttgtattttcaagactagttttctagcaaagccaggcacagtggcgcacacctt

SEQ ID NO: 3504 - DNA, 1668 bp, Cricetulus griseus
cttcaacggcacggagcccattgtcctagacagtctgaagcaacattattttatcgaccggacggagagattttccgctatatactcagttcctgcggacgtcaaaactgctgcttccagatgacttcaaggacttcaacctactgtatgaggaggcgaggtactaccagctgcagcccatggttcgcgagctggagcgctggcagcaggaacaggagcagcgacggcgtagccgggcctgtgactgcctggtggtccgagtcacccccgacctgggtgaacgcattgcactcagtggcgagaaagccctcattgaggagggtcgtccctgagacgggtgatgtcatgtgcaactccgtcaacgctggctggaaccaggaccccacacacgtcatccgtttcccctcaatggctactgtcgactcaactctgtgcaggtcctagaaaggctgtttcagagggggttcagcgtggctgcctcctgcgggggtggcgtggactcctcccagttcagcgagtacgtgctttgccgggaggagcggcgaccgcaacccaccccgactgccgtccggataaagcaagaacccctggactaggccctgcctcagggcccacctgagaccccctcagtcctggggcagccccatggacatggaaagagtgctgaggagtcctgcctgttttgcgctccacagtatttaaaacacaactaactgtggccgcacaggtcggcaaggccaacaaggaccgtcgctgcttttacctggtgctcagttctcagtctaatgttgagcaaaccttgcaaaggatggcctgccagcattcaggcccaggttcatgctgagctggggctgtggggacagacgtggctggcagcggcaatggtgctgccagaaatggagcatggcccccaaggggcagggcggcagggaggagggctatggaggcgaaagtgactctgtgacttttatctgacactctgctacggcctgtgtcccaggctgtacttggtgcacacctgacctgccaatgtccaggagcttccaatcccaactgactgtgtccacatctgggttcttggagaagtctccacccatccagtcagcatggggccaccacagcttatctcaggaatgggcccttctaccaagggacccatctgtcaccgtcaatctctgggtccccagctcagggagccaccctctggcccaactccagatttcccacactcacgcacatggagttttaattaaatttactcaactagcctgtcagtaaggcagagacccaatcgtacccagtgctcttaactccaaactccaacaaggactgggcctaagaggtcctcgcagacctgctgtctcccagaccacaggcccaaaagatggacaccctggccttgtcacatctaccctagctcctcccagctggagggactgcagagaactgatggaggggtgccctggccggcacctccttgtgtataatgcctgtagacttgtatatgagtattattgtaaagatgctgatgtacaattgtttgtgtttgtgtaaacactattgcgttcctggttcatgccataaagaacgctagaaagcaaaaaaaaaaaaaaaaaaaaaaaaaaaaaaaaaaaaaaaaaaaaaaaaaaaaaaaaaaaaaaaaaaaaa

SEQ ID NO: 3505 - DNA, 1668 bp, Cricetulus griseus
cgggagcctcggccgcaccagcttacatgtgagcatgagtcttctcatgatcagtgagaatgtaaagttggctcgtgaatatgcattactgggaaactatgactctgcaatggtctattatcagggagttcttgaccaaatgaataagtatctatactcagtcaaagatacatacctccagcagaaatggcaacaggtttggcaggaaataaatgtggaagctaagcatgttaaggatatcatgaaaacacttgagagctttaaactggacagcacccctttaaaagctgcgcagcatgaacttccggcttctgaaggagaagtgtggtccttgcctgtacctgttgaacgaagaccctcaccaggacctaggaaacgccagtcttctcagtaccatgaccctaagccacacagtaaccgcccaggcacaggcgtcagagcgcatcgtccatctgcacagagtcttcacaatgacagagggaaagctgtgcgtagtcgtgaaaagaaagagcagagtaaaggaagagaggaaaagaacaaatcacctgctgcagttacagaacaagaggcaaataaatttgacagcactggatatgacaaggacttagtagaagctttggaaagagatataatttctcagaatcccaatgttcgttgggatgatattgctgatttagtagaagctaaaaagctgcttaaggaagcagtggtgttaccaatgtggatgccagagttctttaagggcattaggaggccatggaaaggagtactgatggttggtccacctggcactgggaagacccttcttgctaaagcagttgctacagaatgcaagacaacattcttcaatgtctcttcgtcaaccctgacttctaaatacagaggagagtctgagaagcttgtccgtcttctgtttgaaatggctcgattttactctccagctaccatatttattgatgagatagattccatttgtagtcgtcgcgggacttcagaagagcatgaagcaagccgaagggtgaaagctgagctgctggttcaaatggatggtgttggaggagcctcagaaaatgatgacccttccaaaatggttatggttctggcagccacaaatttcccctgggatatagatgaggctttacgacgtcgtcttgagaaaagaatctacattcctttaccatcagcaaaaggcagggaagaactattaagaataagtcttcgagagctggaattggctgatgatgttaaccttgcaatcatagcagaaaacatggaaggttactctggtgcggacattaccaatgtatgcagagatgcatccttgatggccatgagaaggcgtattgagggtctaactccagaagaaatccgaaacctttcaagagaagaaatgcacatgcctaccaccatggaggattttgaaatggctttaaagaaggtttctaagtcagtatcagctgcagacattgaaagatatgagaaatggatagttgagtttggatcatgctaacttctcacatgtaaactgtgagaaatctgccttaagtctttgaaacataattaaatgtagtatttcattgcactgagtgctatatttttttaaactttaataatggtgagatttttaaattcttctgattctgaataaaggcattgtttttaagctgc

SEQ ID NO: 3506 - DNA, 1668 bp, Cricetulus griseus
agcgggaggtggcgccgagcgggaacgagcggtgcggggagcggccggggaggcggatctgggacaatgtctggggaagtgccacccaacattaacatcaaagagcctcgatgggaccaaagtactttcgttggccgagccaatcacttcttcactgtcacggatcctaggaacatccttctaacaaacgaacaactagagaatgcaagaaaagtggtgcatgattacagacaaggaatcattcctgccggcctcacggaaaatgagttgtggagagcgaagtacgtgtacgattcggctttccatcccgacactggtgagaagatgatcctgataggaaggatgtcggctcaggtccccatgaacatgaccatcaccggctgcatgatgacgttttacaggaccacaccagccgtgcttttctggcagtggataaaccagtccttcaatgctgttgtcaactacaccaacagaagcggagatgctcccctcactgtaaatgagctgggtacggcttatgtgtctgcaacaaccggtgctgtagcgacagccctgggactcaatgccttaaccaagcgtgtctcaccactgataggacgttttgttccctttgctgcggtagctgctgctaactgcattaatatcccgctaatgaggcaaagggaactcaaagtcggcattcctgtcactgatgaaaatggcacccgcttgggagaatcgaccaacgctgccaagcaagccatcacacaggtggtcatctccaggatcctcatggcagcccccggcatggccatccctccatttatcatgaacacgttggaaaagaaagcctttctgaagaggttcccgtggatgagtgcaccaattcaagtcaccttggttggcttttgtttggtgttcgccacccccctgtgctgtgctctgtttcctcagaagagttccatgtctgtaacaagcttggaggatgagttgcaagccagcatccaaaggagtcaccctgaattacggcgcgtgtactttaacaagggcctgtgaagccaagatcaagccctggaggctcctcctgccatctgggaacctcccgaagccacagcagcgaggaaatctagtgtgtggttgtcagtcgttggaaaggttacctgttcaaatggatctgaagctctcagccttcccccatgtgctggaatcttctgtagagatgagccttgttgccatcagtgcttctgtgtaaatggcagtgagagccaggagttcaaggcagggctccacaggtgcctaacggacattgccgtgagaagccacaggccttgaggcccaccccacccagctcttgccccagtgcatgtttagctgtgagtgtgaaaactcagtagctagttggcagactgacagactctccaagtgtcagcctgggcatagtgagaaatgcatagaagatatggagctgggctctttgaaacttgtttttgaagtttgggcctcttaatgcttttgtataggaatactcactgtgtgttttaatcatgaattttaaaaaaaaaaaaaagaacaaaggaatgaaaattggcaatctttgctgatcttttaaaaagacttttttttacctgaagacaaaatttctctaacgtgggagagagttgtgtgtgtgactgactagcagctatcagt

SEQ ID NO: 3507 - DNA, 1668 bp, Cricetulus griseus
  modified_base (12)..(12): a, c, t, g, unknown or other
gacgacgacgcncccgcggggcccgcctgaggaggacgcggcggcggcggccaggccgcgggaggccgcggagggatggaggagcggaaggaggagggcgaggcggagattcaggagcacgggcccgagcactggttctccaagtgggagcggcagtgcctggccgaggccgagcaggacgaacagctgtcccccgagctacaggaggaggcggcggctgccgcgcagcccgagcacaagcagcagaagctatggcatctcttccagaactcggccacagccgtggctcagctctacaaagatcgagtgtgtcagcagccaggactttctctctgggtccccttccaaaacgcagccaccgccgtcaccaacctctacaaagaaagcgtggatacccatcagcgaagttttgatattggaattcagattggctatcagcgacgaaataaggatgtgctggcctgggttaaaaagcgcagaagaactattcgtagagaagatttgatcagcttcctgtgtggaaaggttcctccaccacgaaactctagagctcccccaagactgactgtagtgtcccctaacagagctacttcaacggaaactagctcatctgtagagactgatttgcaacccttccgggaagccatagctctgcatggtcttagtggtgcaatggctagtataagcgtgcgttcgagtaccccaggctctcctacacatgtaagcagtggaccgaatgctagtcgaaggagaaatggactccatgatgtcgatttgaacactttcataacagaagaaatggcactccacttggacaatggtggaactagaaagcgtacctcagcccagtgtggcgatgtcattacagactcaccaacccataaacgcaacagaatgctctaaactgcagacattttcacacccaccatgctgcttgaaagccactcgatcctcaacatatactattattgcaaaggaaacatgaggccatcttccctggttcactgtttaagacaagtgaattctctattggttgccataaaaggaagttctaggtatttatagtagatgcctcctgtaactatggctttctcaaactataatcctagcagaggacatgagataattgtgtagtcattagcaagatcatcataggcaaacatatatccgttccaaggctaaaagtgaccttaactgtatttattctcaaagggaaaggaaataacagatgtttatttggttatagaatgctttcttatttttattttttggttccatttcctgctgtgttgagtatttttgcttaaacagtattgccaggttcttacaattgtctaaaaccttgatctggcttataaaccagatctgcaggcttccaattttgcagccacactgaaacacacacctggtttccttagtgatagtgtgcaatttctgattatcagattatgcccagttttcagttttcaaaacagtcctaactctggtgattgtgagatgtaaagaggtgctatgatggtcatgcaagtaatacttaatactgaatcaatacacagaactttattggattcactttgtgtgtgttagtgctctgaaaatagcaatattattaacctgtccccagaataaccctgtaggcttcattttttttttttttgtttttttgtt

SEQ ID NO: 3508 - DNA, 1668 bp, Cricetulus griseus
ccaagcaaatcgatggtggcgagttttgcgttgctgcagtgtttgggacttccaggtcgtggtttgcaaacaacgcaggtctgaaacgagaaaaagaatcagtccaacaagtcgtagttgaatccctttacatcatcagttgctacgggaccttagtggaacacatgattgagccccgaccgctcagtactgctcccaaaataagtgacgatacaccgctggagatgatgacatcaccccgtgccagctggacacttgttagaacgcctcagtggaatgaactgcagccaccctttaacgccaatcaccccctgctcctggcggcagaagcagtgcactattaccagctcctgcttgctggctcacttcccccaggaagtcctggccccattactcgacatgggtcctatgacagtttagcctctgaccatagtggacaggaagatgaagaatggctttcccaggttgaaatcgtgacacacactggaccccacagacgcctgtggatgggtccccagttccagtttaaaaccatccacccctcaggccagaccaccgtcatatcctctagctcatctgtgctgcagtctcatggaccgagtgacacgccacagccactcttggatttcgatacagatgatctggatctcaacagtctcaggatccagcccgtccgctctgacccagtcagcatgccagggtcatcccgtccagtctctgatcgaaggggcgtttccacagtgattgatgctgcctcaggtacctttgaccggagcgtgaccctgctggaggtgtgtgggagctggcctgagggctttgggctgcggcacatgtcctccatggagcacacagaggagggcctccgggaacggcttgcagatgccagtggcggaatcaccaagccgagatgttgtaggatcagaacttcagcgagagggaagcatcgagactctgagtaacagctcaggctccaccagtggcagcatcccaagaaacttcgatggctaccgatctccgctccctaccaacgagagccagccgctcagcctcttccccatggcttcccataggcaccagccacctgcttctgactggctggtcaaccccaccttccctaagcttagtgacaacagctgctcatcctatctggacgagaagagacctccagaacacttgggcacaccctgacctctgtcgctcctgtcattgggggctgtggccaagagactgcagaaactcagtcccttctctctttgcacataatgtcccgcatcggatccgcttttgtattttttaactgtacccacagggggactggaacagtggccagatcttagggcctgggtggggagaagttgaatggtccagccaggcattttggtggacaatgtcagccctaacccactccaggctatgatgcacactgcccccaggtatccctgctcagtttcctccaagacaggagtgaactgaagcccagagtgatagggaaggaagagggaaagaggctccctttggcccttgcttccctgttggctcatggggagaatttgtctgtcttatctttaagcccttgtaccctggtcctgtactgttcggtgaaggaaccgtggttactgaggccatgtaaaaagtgcacgtcttgtccaataaatcacgctgcaattg

SEQ ID NO: 3509 - DNA, 1667 bp, Cricetulus griseus
agctctcacgtctgcgggtggtccatccaggtgagatgcggctgctgctgctgctgtgcctctggtggctctgggggccgctcagtgccctggcccagggcgccccagcggggacagctcgggctgaagacgtggtggacttggagttttctaccgagcgaccgctccgtctcgtgagtccctcgttcctgtctgtcaccatcgacgccaacctggccaccgacccgcggttcctcaccttcctgggctctccaaggctccgcactttagccagaggtttatctcctgcatacttgagatttggtggtaccaagactgacttccttatttttgatcccaagaaggaaccaacttttgaagaaagaagttactggcaatctcaagtcaaccacgatgtttgccggtctgaacccgtctctcctgacgtgatgaggagactccaggaggaatggccttttctggagctgttgctcctcaaagaacagtaccaaagagagttcaagaacagcacctactcaagaagctcagtggacatgctgtacagttttgcaaagtgctcggggttagacctgatctttggtctgaatgcattgctaagaactccggatttgcggtggaacagctccaatgctcagctcctgctggaatactgtgcttccaagggttacaacatctcctgggaactgggcaatgagcccaacagtttctggaagaaagctcacattttcatcgatggactgcagttaggagaagattttgttcagtttcgtaagcttctacgaaagtcagctttcaaaaatgcaaaactctatggtcctgatgttggtcagcctcgagggaagacagttaagctgctgagaagtttcctgaaggctggtggagaagtgatagacgcccttacgtggcatcactactacttgaacggacgaattgccaccaaagaagattttctgagctctgatgtgctggacacctttatttcatctgtgcagaaagttctaaaggtgactaaggaaatgagacccggcaaaaaggtctggttgggagaaacaagctctgcctacggcggtggtgcaccctcgctgtccaacacctttgctgctggctttatgtggctggataagttgggcatctcagcccagatgggcatagaagtggtgatgaggcaggtattcttcggagcaggcaactaccacttagtggatgaaaacttcgagcctttacctgattattggctatctcttctgttcaagaaactggtgggtccccaggtgctcatggtgcgagtgaaaggcctagacagaagcaaacttcgaatgtatctccactgcacaaacacccaccacccaaagtatcaggatggagatttaactctgtatgtcttgaacctccataatgtcaccaagcacgtgaacttgccatatcaattgtttaacaagccagtagacaagtaccttctaaagccgtttggacctgaggggttactttccaaatctgtccaactgaacggtgaaaccctgaagatagtggatgaccataccctgccagctttaacagagaaacctctccgcccaggaagctcactaggcatgcctgccttttcctatggggtttttgtcataagaaatgccaaaattgctgcttgtttgtgaaaataaaagtcatac

SEQ ID NO: 3510 - DNA, 1667 bp, Cricetulus griseus
agcatcactggctggctcatggagaatccccagtggttcctgggttattgttttcctgatgtctgtgggcaccctttatgaaaaacagaatgggaaggagtctgctggagttcttactaaaagttgatagcaagatgatcatctggttggagaagatgttagataaaattattagcattttcatcatatttttgctagtaataggaacccttcttttagctcttctcctgactgcaaaggtacatcaagaaagtgtacacatgattgaagtcacaagtaatttgattaatgagaccctagcaaatcacccagagtgggcaaattggcttcctgaggctcaggtggtccaaagagcccttaattctgcagccaacaatgtctatcagtatggacgagaatggataacccacaagcttcacaaaattctgggagataaggtgaacaatacagctgtgattgagaagcaagttctagaactgtgggacagattgtatcactcttggtttgtaaagaacgtgacacactctggaaggcacaaagggcacaaaatgcatgtgagtcgtcagaacagctggttgggagatatttggagtccctgtggattgttatgagccggaatgtgagcttgctgtttaccactgttaccacattgctgaccatcctcttctacagtggcactgcccttctcaatttcgtgctttccctgataattttcctgaccacactgttttatctgttaagttccagtgatgagtactacaagccagtgaagtgggtgataagcctgacaccactgtctcagccaggtccttcttctaatattattggccagtctgtggaagaagctatcagaggggtatttgatgcttccctcaaaatggctggcttctatggattgtacacctggctgacccacactatatttggcatcaatattgtcttcataccatcagctttggcagcaatccttggagcggtgccatttctggggacatattgggcagcagtacctgccgttctagacctgtggctgacacaagggttaggatgtaaggccatcttgctcctggtctttcatctcttgccaacatacttcgtagacactgcaatctactctgacatatcaggaggaggccatccttacctgactggcttagcggtggctggtggagcatactacctgggcctggaaggagcaataattgggcccatactactctgcatacttgtggttgcttccaatatctacagtgccatgctagtgagccctacgaattcattacccacaccaaatcagacaccgtggcctgctcagcctcagcgggctttccgtgacatctctgaagatctgaaatcttcagtagattgacatggcttcactgctgtgactcctgtggggagttctacctcgacagtgaattctcccagttgtggcctctgtcctgtcagctgtgtctggtaggcagaggcaccaaaaatgaagctgaagcctttgatcccagcacttggaaggcagaggcaggaggagctttgcgagttcgagaacagcctagtctacaagagctagttccagcacagcctccaaaaccacagagaaaccctgtctcaaaaaccaaaataaataaataaataaataaataaataaatcatctgactgaagtcatgtg

SEQ ID NO: 3511 - DNA, 1667 bp, Cricetulus griseus
cagagcgctgcgagtctcgggaccccagtgggaggagagactatggcgctcaacaagaatcactcggagggtggcggagtgatcgtcaacaacactgagagcatcctaatgtcctatgatcatgtggaacttaccttcaatgacatgaagaatgtgccagaggctttcaaagggaccaagaaaggcactgtctaccttaccccataccgtgtcatctttctgtctaaggggaaggacgccatgcagtcgttcatgatgccgttctatctcatgaaggactgtgagatcaagcagccagtgtttggtgccaatttcattaagggaacagtcaaggctgaagcaggaggtggctgggaaggcgccgcttcctacaagttgaccttcacagcagggggcgccattgagtttgggcagcggatgctccaggtggcatcacaagcctccagaggtgaagcccctaatggagcctatgggtacccttacatgcccagtggggcctatgtctttcccccgccagtcgccaatggaatgtacccctgccctcctggctacccctatccaccgcccccacctgagttctatccaggacctcccatgatggatggcgccatgggatatgtacagcccccaccaccaccctatcctgggcctatggagcctccagtcagtggccccagtgccccctccactcctgcagctgaggccaaggccgcagaagcagctgccagcgcctattacaaccccggcaacccacacaatgtctacatgcccacgagccagcctccgccgccaccctactaccccccagaagacaagaagacccagtagaccttgcccacctccctgcctctcactggacgacccctcccttcctgggcctcccacggagctgcatctgagattctgggaggccagggagggcctgttcttccccaggcctgattataaacagttaccaggaactagccctgatggaagggcggggctcctggcctctgagaggcgcctcccagcttcccacactagctcaacccatggcactgctctgtctagcttccctctcaccatctctggggctattgggagcttgggattgccccttgttcctcactgtagtagctcctgcccacagagggactctctggccactcctccaccacagtccagcccctcagcctgatgaccatcctacgccatcttctgggctcatcagacccgccttgtgtctctcctacaggccctgccaggtcctgctcacattccttcctcctggggtgtgcctgaccccggaagccactgtccccacagatggtcagtccacctcccctcctcttcccctttacacaaggggcttttctgcaggagcagtagagagtgcatgtctgtccaatcatgacttaggtctgggaacgagcacctccaaccatgtgacctgaaacttgccatctgcccctgtgtgagcttcacgcccgccccctggatgcactaagatttgctcttgtttggtcctggtctggacgcaaaacaaggagatggttatttaaagagaaatccctatttatttgacacacaaaaaatccagttaatatattaatgtgaaataaacccagtttgcaccttgatttgtttgctacaactgtgaaacagtaaaaatgaagtaactagga

SEQ ID NO: 3512 - DNA, 1667 bp, Cricetulus griseus
cagaagcgctgtccgtggaggcctgggactgggatcttgttagcaggaatgactttctgggcaaagtggtggtcaatatccagagactgtgttcagctcagcaggaagaaggctggttccgactgcagcctgaccagtccaaaagccgtcgaggcgagggcaacctgggctccttgcagttggaggtgcgactgcgggatgacaccgtgctgccttctgtctgctaccagcctctggtccaactgctgtgcagggaggtgaagccgggcaaccagggcccagggcacctgattcctctcatcgaggaaacaaccagtgccgagtgtcgccaggaagtggccaccaccctgctcaagctcttcctggggcaggggctcgccaaggactttctggatctgctcttccggctggagctgggccgaaccagtgaggccaacaccctcttccggagcaattctctggcctcaaaatccatggagtcttttctgaaggtggcagggatgcgctatctgcatggcatcctgggcccagtcattgacagagtgttcgaggagaagaagtacgtggagctggaccccagcaaagtggaagttaaggatgtagggtgctctgggctgcaccgcccacagacggaggctgaggtgttggagcagagcgcacggacgctgcgtgcccacgtggtggcgctgctgagcgcaatatgccgctcagttccgagcatgtccagttgtggttcgcgccactttccggcaattgttccagcgtgtgcaggtggttcagaatgtaggcaatatggacacgccggtctccagggccaaagaggcatggatggaaccactacagcccactgtgcgccagggtgtggtgcagctgaaggacttcatcgccaagctcgtggacatagaagagaaggaagagctggatctgcagcgggcattgaacttgcaggtgcagcctgtgaaggagggcccactgttcatccacaggaccaaaggccaaaggggccgcgtggcgtcctccctcccttcaagaaactctacttctccctcaccactgaagcccttagtttctccaagacatccggatccaagaaaagcgcctttatcaagctggccagcatccgggctgcggagaaggtggaggaaaaaagcttcggcagctcccatgtcatgcaggtcatctatgcagatgaggctggccgggcccagactgtctacctgcagtgcaagtgtgtgaacgagttgaaccagtggctgtctgcactgcgtaaagtgagcaccaacaacactagcctcctgggatcctaccaccctggcgtcttccgtggggacaagtggagctgctgtcaccagaaggacaagacagatctgggctgtgacaagacccactctcgggtgaccctgcaggaatggaatgacccactggaccacgacctcgaggctcagctcatctacaggcacctgctaggtgtggaggctgcacttcgggagaagcaccggctactgagtggggaaacggaagcagatatctcacccacaggcagtggtggagaggacacactggcccagctgctttgtgtgctgcaaaacctccaagaagcccacagctctatcctggctggcccgccgtccagagagccccatcaccttctagagctacagacgtga

SEQ ID NO: 3513 - DNA, 1666 bp, Cricetulus griseus
actactccaccgtcaaagtgaagcaggaacgtgaggaccatcctcggagaggacgagaagatcggcagcaccgagagccatcagaacaggagcagaggagagctcgtaacagtgagcgagaccggcaccggggccattcccgccaaaagaggagctctgatgagaggcctgtcagtggtcagggtcgggaccgagacagccaaattctgcaggcccaggaagaagaaagggactttcataatgccaggcgccgggagcatcgtcagcagaatgaaggtgctggcggtgaagctcaggaggtgatccctcgccctgctggtaacagaagcagagaggtgcctgttaaagaaaaaccaagctttgaactttctggggcacttcttgaggacaccaataccttccggggtgtggttattaagtacagtgagcccccagaagcccggatcccaaaaaaacggtggcgtctgtacccctttaaaaatgatgaggtacttcccgtcatgtacatccatcggcagagtgcttaccttctgggccgacatcgccgcatcgccgacattcccatcgaccatccctcctgctcaaagcagcacgcagtcttccagtatcggcttgtggagtacactcgtgctgacggcacagttggtcggagggtgaaaccctacatcattgatctgggctcaggcaacgggaccttcctaaacaacaagcgtattgaaccacagaggtactatgaactgaaggaaaaagacgtccttaaatttgggttcagtagcagagaatatgtcttgctccatgagtcttcagacacatctgaactagatagaaaggaagacgaagatgacgaggaggaggaaatggtgtctgacagctagcaactgagaagcacccacccctcccccatgagaatccgttcctcctggaggccatggggttgactccagcgcctcttcttgccttaagtcttttctctgttgctgcccagcttgtgttgcagtatgagaactctcacttcgtgttttgttgaacttggcacagcagccgcctgcctgtgggcgcttgttttcagaacaatctcaccaattacagcatgttgagttttggtcaaagtgtgtagtgggtgccttcagaactgctgcacaggaaacttaagcccttggaaaggggattgtggcttgttctctttgtacagtttcttatttatatagtcgttgagctttgtggaccaggagttttgttttggtgacaaaccctagagcagagaatctcagtaagctttggttgtcaccaaaacagcctccagcttataccaaagctttggcctgggtcagctcttgagtcatagaagttcattttgcacttcgtttttttgggggtgacaatttaccacataacctcattattgactgtctaagctagacagacagacactctgcgatgcctgtgcagatgtaactgtgtcgggaggtcatggctcctacccacgggcgctggtgtgtttcagagccatgtgctgattttcatatgacagtgttttgtgatagaaataataccacatgataggcaaaggcctctgcatttggagagcaggttttcatttatatgtattttgagattaaaaaaataaaatttgtaaatacagccccaaagaaaaaaaaaaaaaaaa

SEQ ID NO: 3514 - DNA, 1666 bp, Cricetulus griseus
gctgctgctgctgctgctgttgttgctactcccactggccatgctgtggcagcagaggcggcgggccagaccatcctggctggcccgcctccaacaccaggtggcctggggggcactgggcttggcagccgcctggcagcatcggaaactggaacagagcacactccacgtgggccaaagccagcagcaggccctcgagtggtgtctgaagaaagcccagggttcctgctgtctccccgagggggagtacagacttgagcaccttccggagtcatctcccactgaccaaaaccaggcaagccaaggaggaagagagtgaagagaagctcctgtcccctgcccccctccaggaccatagagaggcttctcttcaggccaccctgctgggtctagtcaccctaaacaaggcctacccagaagtactgactccaggaagtactgcctgtgtgacccctacatcaccatggcccaactctgtccccggcatgccctgggccgggtaagccccctttggagccaaggactctcagaccctgctgctggaggcactgatatccccagggctgagggcactggaggcaaggactgcagtggagctcttggagtgtgtttgttgggccctggaggcagatggcaaggaaatggctgaggccatagcagccgggaacctaggaacacctctccctagccgagcagctgaactacaggaagccctggagcagggaccccgaggattggcccttcggctgtggccaaagctgcaggtcgtggtgaccttggatgcaggaggccaggcagaagctgttgctgccctcagggccttgtggtgccaagggctagccttcttttctcctgcttatgctgcttctggaggggtgatggccctaaacctgtggccggagcaaccccaaggattctatcttctgccccctggagtcccctttattgagctgcttccagtcaaggaaggaacccaagaggaggcagcctccactctccttcttactgatgtccaaagggaggaagagtatgaactggtgctgaccgaccacgccggcctgaccaggtgccgcctgggagatgtggtacgggtggttggtgcctacaaccagtgtcctgttgtcagcttcaccggcaggctgggacagactctgagtgttcgaggagaagttactgatgagaatatattctctgctgccctggccaaagcagtggggcagtggccaggggccaagctgttggaccatgcctgtgtggagagcagcattctggacccctgtgacggttctgccccgcactacgaggtgttcatggagctgaggggattgaggaatctgtcggaggaaaatcgagacaagcttgaccactgcctgaaggaagtctcccctcactacaagtctttgcggttacggggcagtgtgagtcctgccaaagtccatctggtgagaccagggagcttcagagtactccgggaagcactagcagcctgcccctcctcctccttccctcctgaaatgcctcgggtcctcaggctcggtcacctggccaagctcctgcagaagagggtgatgtcttaaccaaggcagctgttgccaggcttccctctgccacctcgccctttcctctggggtgtctccagatgctgagtcctggaccagacgtcaca

SEQ ID NO: 3515 - DNA, 1666 bp, Cricetulus griseus
catcattggctatcagtgcagcttatgagagacgattcaaataagaaattgattaccagcataatttacccacagaataaggatggcgaaccagagtacaatccctgtggaaagtatatggtaaaacttcacctcaatggtgtcccaagaaaggtgataattgatgatcagttaccggttgatcataaaggagaattgctgtgttcttattccaacaataaaagtgaattatgggtgtcacttatagagaaagcatacatgaaagttatgggaggatatgattttccaggatccaactcaaatattgatctacatgcgctgactgggtggataccagaaaggattgcgatgcattcagatagtcagtaccttcagtaaggataattcattcagaatgtagagagttcaagggcttgcgatttatccagttgaaaaatccttggagccatttacgctggaaaggaaggtacagtgaaaatgatgtgaaaaactggaccccagaattgcaaaagtatttaaactttgatccccgaacagctcagaaaatagataatggaatattttggatttcctgggatgatctttgccagtattatgatgtagtttatttgagttggaatccagctctttttaaagaatcaacttgtattcacagtacttgggatgctaaacaaggacccgtgaaagatgcttatagcctggccaacaacccccagtacaaactggaggtgcagtgcccacaagggggtgctgcagtttgggttttgcttagtagacacataacagacaaggatgactttgcaaataaccgtgagtttatcacaatggttgtgtacaagactgatggcaagaaagtttattacccagctgacccacctccatacattgatgggattcggatcaacagccctcattacctgactaagataaagctgaccacacctggaactcacacctttaccttagtggtttctcagtatgaaaaacagaacacaattcattacacagtccgggtatattcagcatgcagctttactttttccaagatcccttcaccatacaccttatcaaaacggattaatggaaagtggagtggtcagagtgccggaggatgtggaaattttcaggagactcacaaaaataaccccatctaccaattccatgtagataagactggaccgttactgatagaactgagaggaccaaggcaatacagtgttggatttgaggttgtagcagtttccataattggagattctggtcctcattgttttcagaggaaatctagtggtgactataggtgtggattttgctacttagaattggaaaatatacctgctgggatcttcaatatcatccccagtacttttttgcctaaacaagaaggaccttttttcttggactttaatagtactgtccccatcaagacaacacaactccaatgatagagaatcctcaactattactggattctatacttagcagtcatcaactcttcagagacaaatcatgacggtaaaccgtcagaatggaattcaaacagaaacaggttacagtggaatctggtacttgtcatggtgtttggtaagaactgtacatagtcagaattaccttaatcatctaaaggactgtttacatggttttgtgcatacagagttggcatgta

SEQ ID NO: 3516 - DNA, 1666 bp, Cricetulus griseus
cacagtctgtcgcagccggctacctctccgcggctctctcggccggctcgtcccggcccgcaggtaggagccgtggggcgatcggctcccggccccacccacgcccgcgcgcgcccggctcccgcgcccgcttcgagggcttactcagcatcaccaccatgagcgaggcatttgactgtgcaaaatgcagtgagtccttgtacggccgcaaatacatccagacagacagtggcccctactgtgttccctgctatgacaacaccttcgccaacacctgtgccgagtgccagcagctcatcgggcatgattcaagggaactgttctatgaggatcgccacttccatgagggctgcttccggtgctgccgctgccagcgctccctcgctgatgagcccttcacctgccaggacagtgagcttctctgtaatgactgctactgcacagccttctcttcacagtgctctgcctgtggggagactgtcatgcctgggtcccggaagctggagtatggaggccagacatggcatgaacattgcttcttatgcagtgggtgtgaacagcctctaggctcccgttccttcgtgcctgacaagggcgctcactactgcgtgccttgctatgagaacaagtttgctcctcggtgtgcccgctgcagcaagacgctgacccagggtggagtgacatatcgagaccaaccctggcatcgagaatgcctggtctgcactgggtgcaagaccccccttgcaggacagcagttcacatctcgggatgatgatccctactgtgtggcctgttttggagaactctttgcacccaagtgcagcagctgcaagcgccccatcacaggtgggagcagtggcggcgaggctgcaggaggaggaggcaagtatgtgtccttcgaagaccggcattggcaccacagctgcttctcctgtgcccgctgctccacctccctggtgggccaaggcttcgtaccagacggagaccaagttctgtgccagggctgcagccaagcagggccctgagccaaggctcctgactcttcccctttcccaaaccaagggttcaagactttggctctttttctgaaccacttttggaacccagcccctccttagaatggcctccacctgcccctgtgtagtgcagaggcttcagggttcagtctcctaattccagcatacccagctggtactctctgacccaggccccaaatctgggctcttgtgggacacccatcaacttaagttcttcaagtctggactccagaaatgagtcttccctagatcaaggctctagacacacacacccacatcctccccaaacctgaactctggacgtaggcctccttaaatctagacttactggatagattttttttttttttttttttttttttttttttttttttagtttttctatgggtgcctgagaagtcctcaaagatagattgcaccccagtttgaccccatccccatcccacccttttccgcgatgcagctgcctggatagcagattaggggctgcctggttggagagtcataaggtacagggtgctgtccgtctatgagtaccactttatttcagctccatgttgcccagagataggcagaaggggggtggcttaccccacttccagattctgcaataaaacagtgtgaaggga

SEQ ID NO: 3517 - DNA, 1666 bp, Cricetulus griseus
gaggtccgacaggtcatccgagaagacctaggcaaggagatccatgatttgttcctgagctttgatgacacccctctgggggcagcctccctggcccaggtccacaaggcggtgctgcatgatggtcggactgtggcagtgaaggtccagcacccgaaggttcaagctcaaagctccaaggacattctcctgatggaggtgcttgtcctggctgtgaagcaactcttcccagattttgaattcatgtggctggtggatgaagccaagaagaatctgcctttggagttggacttcctaaatgaagggaagaacgcagagaaagtggcccacatgcttaagcactttagcttcctaaaggtcccccagatccactgggagctgtccaccaagagggtgctcctgatggagtttgtggagggcgggcaggtgaacgacaaggattacatggagaagaaccggatcgatgtgaacgagatatcctgccacctgggcaagatgtacagcgagatgatctttgtcaatggcttcgtgcactgtgacccccacccaggcaatgtgctagtgcggaagcatccagacacgggcaagggattgtcctcttggaccatgggctttaccaggtgctcacagaggagttccgcctggactactgccgtctgtggcaatccctgatctggactgacatggagagggtgaagcagtacagccagcgcctaggggctgcagagctctacccactgtttgcctgtatgctgacagcccggtcctgggactcagtcaaaagaggcattggacaagctccagtcactgccactgaggactcagagatcagcagtaatgcggccaactacctgcctgagataagccagctcctgaaccacgtgcctcgccagatgctgctcatcctgaagaccaatgagctactccgcagcattgagaccgccctgggcacccggtccagtgccagttccttcctcaacatgtctcggtgttgtatcagggcactggccgagcagaggaagagagacgcctgctcattcttcagaaggacccagatatgtttcagtgaggcctttagcctttggcagatcaaccttcatgaacttctgcttcgagtgaagggcttgaggctacctggctgggtctcagctctcctgggctggctgactcgggctcctcactgagtgtgacttgtcgttccctgccccttcctagtgtctttccacacctcatttgttcctttatgctcagtatccactgacccatgtctgcccagggttggcctgtggtccgatgatggttgtccatggcaccgtcacactctgctgttggagccccccatgcagacttgtcttggggccctggactgtactggagactgagggataaagcaacctttttcccatttcctgttggtgccattggcttggtcattcccactttgtggggattgtcaggaagggccaaccacatgtgccaaaagggcacgttttaacttataggaaatcagtaggttcttggaacttgctaaagaacagactttgtatttttgccatatcactcccaaaggtgtctcgccacagtgaggaaggctgcatctgagaataagctgtgcagctgtgggttcatgctgtcacggtgacacctccagtattatatatattgt

SEQ ID NO: 3518 - DNA, 1666 bp, Cricetulus griseus
gccaggtgatgtactgcagtgcagaatgccggctggcagctgcggagcaataccaccgagtcctgtgcccaggcccatcgcagggtgacccccggcaccccctcaataggctgcaggaggcatggaggagtgttcactatcctccggagactgcaagtataatgctgatggctcggatggtggctactgtgaaacaggccaaggacaagggaccactgggtcaggcttttttcccagttctgcagcaaaacggctaatgaggaggaagaaattgtccacaaactcctggggacaaattcaagggccaactggaacttctgcgtaggctcttcacagaggccctgtacgaggagaccctgagccagtggttcacgcctgatggattccggtctctcgaggcagcaaccggcgagttccttaactgtgaagggtctggcctctttgtgcttcaaagctgctgcaaccacagttgtgtccccaatgcagagacctccttcccagaaaacaacttccttttgcatgttaccgccttggaagatattaagccaggcgaggaaatctgtatcagctacttagactgctgtcagcgggagcgcagccgccacagccgccacaagatcctcagggagaactacttgttcatctgttcctgtcccaaatgcctggcagaggctgatgaccccaatgtgacctcagaagaggaggaagaggaagatgaagaggaaggagagccagaaagatgcagagctaggggatgagatgactgacgtgtgacgtaaccctgcctggaagggccctgcccagacacactgctggaaaaagggggtccctcctccacaaatgtggctggaaggaacatccccctcatccttgcacccattgcctgctttctcccttctggcattctgtcagagctgaggagagaagctggacctgagcatcccccctcccccccagacctcatgccctgagcactgctgctgagctgcatcggccctgtgctatcaccaagccttctagaactgatattcccttgccacgctccactgtagccgtgagactggaacaggctccaggcctcatagtgttcttcctctgggtcccttggcccatactcacctatccacctgaggcttggcccctcttgactgggtgttaatttgaggggaacaacaaaatggccaatctgaacacagactggtttccttgacagaaagaggtgatgtgatgccttacctcttcctagcagtatggcagatatgctccttactttaggatgctccaatcttccctgggaccagctgaaatggcccagcaaaggacctgactcagacaaccgcctttaggatgtctatagaggaacactgaagtcttccagaaacctgaaggagctgggcagatgcttggagatgagccatgactttgttccctcctcgccacagatgaccatctcattcttggggtggcatcttggagatgacagctaccgctcccattctttccctgagaggcctgcacatggcccagcaaggggctcccagggaggacccgtgcctatgctacaggctcattccaaggtggaacaggtagaacgtgcctgactggccccctcacctgttggacacactccttcacaacatccagcacccctctctccctctggtct

SEQ ID NO: 3519 - DNA, 1665 bp, Cricetulus griseus
tgagttcgtcattcctagcggaagcgccgccaacatgtctgataaactgccctacaaagtcgcggacattggactggctgcgtggggacgaaaggccttggacatagctgaaaatgagatgccaggtttgatgcggatgcgggagatgtactcggcatccaagccgctgaagggtgctcgcattgctggctgcctgcacatgactgtggagacggctgtcctcattgagactctcgtggccctgggtgcggaggtgcggtggtccagctgcaacatcttctctactcaggaccacgcagcagctgccattgccaaggcgggcattccagtgtatgcctggaagggcgagacagacgaagagtacctgtggtgcattgagcagacgctgcacttcaaagatggacctctcaacatgattctggatgatggtggtgacttaactaacctcatccataccaagtacccacagcttctgtcaggcatccgaggcatctctgaggagaccacgactggggtccacaacctctacaagatgatggccaatgggatactgaaggtgcctgccatcaatgtcaacgactctgtcaccaagagcaagtttgacaacctctatggctgccgggagtccctcatagatggcatcaaacgagccacagatgtgatgattgcgggcaaggtggcggtggtggcaggctatggcgatgtgggcaagggctgtgcccaggccctgaggggttttggggcccgagtcatcatcaccgagattgaccccatcaatgcactacaagctgccatggagggctatgaggtgaccaccatggacgaggcctgtaaggagggcaatatctttgtcaccaccacaggctgtgttgatatcattcttggccggcactttgaacagatgaaggacgatgccattgtgtgtaacattggacactttgacgtggagattgatgtgaagtggctcaatgagaacgctgtggagaaggtgaacatcaagccccaggtggaccgctacaggctgaagaatgggcgccgcatcatcctgctggctgaaggccggctggtcaacctgggttgtgccatgggccatcccagcttcgtgatgagcaactccttcacaaaccaggtcatggcccagattgagctgtggacccacccagataaataccccgttggggttcacttcttgcctaagaagctggatgaggcagtggctgaagcccacctgggcaagctgaatgtgaagctgaccaagctgactgagaagcaggcccagtatctgggcatgcccattgatggccccttcaagcctgatcactaccgctactgagagacaggactgtccttcaccttccagctgccatccttactccaggccctacctctctttcccaagagcacatgtcaccaactttgcagttgcttcgccagtgttcgtcccgctgaggctggttactctcgctgggctgctcgctggtgtcccccacaaactgttctaggtgtggtgaggggaactgagagtctccagtcaagataagaggtacctgggagcgatccacaggggacacgagcttcggagtcttggaagtcctgaggctggatgtggctagtggtggtcacaagcccatgcatcttaccatccagaccctcacttgggcttta

SEQ ID NO: 3520 - DNA, 1665 bp, Cricetulus griseus
ggttcacttttccagagtgcaaacacagcagcatcgggtctcggacaaaatgctttaagcttgtctttgggaacaacagcacctgcttcaactgcatgcaatgaaggccttggtggtatagattttagtacatcctcagataaaaagagtgataaaacaggaacaaggccagaggatagtaaagctctgaaagatgaaaacctgcctcctgtcatctgtcaggatgttgaaatctcagaaatttgtacaaagaacaaaacagtaccaagaagaaattagtcgaatgtcttccaaagcgatgctcaaagtccaggaagacataaaggctctgaagcagcttcttcctgctgactacttcagagtcttggttctaacaatttgaggtacagcttcagcagtacaggcagcagatcgaagaactagaaaaccatcttgccactcaagcaaacaattcacatataactcctcaagatttatcaatggctatgcagaaaatttatcaaacatttgtagctttagctgcacaacttcaatctattcatgaaaatgtaaaggtgcttaaagaacagtatctcagctacaggaaaatgtttttgggtgatgctgtggatgtgtttgaagccaggagagcagaagccaagaagtggcagaatgcacccagagttaccactggacctactcctttcagcaccatgccaaatgcagcagccgttgccatggctgcaacacttacacagcagcaacagcctgctacagggccacagccatctctgggagttagttttggaacgccattcggctcaggtattggcactggcttgcaatcaagtggcttaggttcttcaaaccttggaggatttggagctagctctggtttcggaagcggcaccacaggggcctccacatttggatttggaacaacagataaaccctcaggaagtcttagtgcaggctttggcagctcaagtacgtctgggtttaacttcagcaatcctggcatcacggcatcagctggtttgacatttggggtgtccaatcctgcctctgcggggtttggaacaggaggacaactcctgcagttgaagagacctccagctggaaacaaaagaggaaagagataaacatacgggtcaatgcgttgggaatgcttagctggcgccgctcattctatgattctatttttctaatgatgtagtaattggactgcatcttgggagatttataaagttttgatattcttactctggaaattgaactttgtttgtttaccttaccaaacatctttcttgtgaattcaaaatccagttgcagttttgttgctattatttttgattctccatgtaagaaatattgtgattaaattaccgatttatagtggtaaaaaaaaaatccatcaacctaaagcctatgatttatcctagtattaatagcaatgtttttgttgctaaggtttatgctgtgaatacatgcacattggtttcttatgcagatattatgaactctagggcctatgctaaaagtagtttgtcccttgacaaggcctttagaactgaactgtgcatcagggcatcttgtggatatgtatgtaattatatagagagtaatgtgcacaatgtgtgcacataaatatatatttacacaacctaaaaaaaaaaaaaaaaaaaa

SEQ ID NO: 3521 - DNA, 1664 bp, Cricetulus griseus
ccgcggccgacagaggcttgccgcccgtcttgccgccatgaggctgcgcgtgcggcttcagaagcggacccagccgctagaggtgccggagacggagccgacgctcgggcagctgcgcgcgcacctcagccaggttctgctgcccacgtgggggttcagttctgatacccgatttgcaattacattgaacaacaaggatgccctcactggagatgaagagaccttggcttcatatgggattgtttctggggacttgatatgtttggttcttgaagatgacttgccggcacctaacttaccttcatctacagattcagagcattcctcacttcagaataatgaccaaccttctttggctgccagctcacatcaggctagcatccctgatgaacaatggagtgattcttcccaaggacaggccacccagtttgatgcctggaatgatgacagtatggaagggcctagtcaaaatgttgaagccgagtcaattcaggaagccatgggtatggaagaggattcttgttgccatccacttgagccaatgctctgcagtgaaacagaggatgggcaggtgccacactccctggagactctgtatcagtcagccggctgctccagcatcagtgatgccttgatagtgctggtgcatctcctcatgcttgagtcaggctacataccccaggggactgaagccaaagcagtgtcaatgcctgagaagtggaagtcaagtggtgtgtacaagctgcactacacacacccactctgtgaggggggcactgctgtgctcacctgtgtgcctttggaaaacctcatcattataaatgctacaataaaaatcgatggtgggatcaaaaatgtgaagtcagtgcagctgcagccaaggtcctacgtttgtggagtggaaccaggggaaagtgcagtgaaagtgtacaaagatcttaagaagctctctcgcctcttcaaagaccagctggtgtaccctcttctggctttcacacggcaagtactgaaccttccagatgtatttggactggttgtccttccgttggagctgaaactacgcatcttccgacttttggatgttcattctgtcctggctttgtctgcagtctgtcatgacctcctcattgcatcaaatgacccactgctgtggcggtgtttgtatcttcgggattttcaagatggtgctgtcagaggtccagacacagattggaaagaactgtatagaaagaggcacatacaaagaaaagaggcccagaggatgcggcatgctatgttcctgacatcgccaccccactcgatcccattccgtcccattcctgtctacaccagggcctctttgcttacctcgctgcttcctccaggaatcattggtggtgaatatgatgtgagacccatactgcccaatgttggggacccagtcaacccacttgtcccaaggccaggggagccactcagaccacgttttgatcctatggtcccacttccaggacctaaccctctcttaccaggaagaggtggccccaacaacagatttcccctcagacccggcaggggtcgaccagctgatagccggctaccattcatgtgaccaagttggaggctttattgaaaccacagatgctgttttcttggacgctgatctctgctgtcagtttttggtt

SEQ ID NO: 3522 - DNA, 1664 bp, Cricetulus griseus
gagcatatggtagaaacagtcctgggtccagtgctcttttctatagcatttcgttgttttccatatgtagttagtcacaggtgtccactgggatggccacatgcactaaagagtgcattatgacatgatggaacccagtggcagatgtgtgctggcagcacactgtagcaaagaagatagctacattaccataaagcatgtagccatattttcatacaaaggtaaacaacagtgtaattgcaaatgcagtttacagggtcttttgatatattggtttggggtcctataagatcttttcaactgttgctgaaaagcatgtaaataactacataacagcctaagaatcatgggattttgatagtgccatttattgctaaagatttattttacaaagtaaatttagggttttagatgtgtatacagcttttacaaatcaataaagatgattgtacaagagtattttcagaccaattggattcatggttatattcttttaagtattgttagtctgcatgctcactggcagtaaatgggatatttgagtaatctgtaatgtttctacaatggtcatttcttcttaaaaaatacaagatagctgccattttatatattttgatgaacaacttacctacatttttgatcaccagttatatggaaactttgggaaatgtaggttaaggtatttgacaagagtgaaatacaataaaaacatttgtgtcaaaatgatgtagcttggtataaaagaaaagtttgacattttggctaaaatgtttgtttttcactggattctaaatatagtaaattcaaaagtaccccttgtcttctatttctaataaagtagcatgtaaaactgcattttttaagtccctaagtttttttttttttgaagcagttttattgccatgttacaaacattccatctcaagacttctctcattctttgataacttttcttcagaaaactctgaagttttaacatttgcaataagaatgaaaccagcatttagtaccagcatatgatccatgtgcaactaatccttggcccgaatcttctcagagctaggcctctcctcgttgctatgcttcctgcaccccaaccagcagaattcaaggggtgtaggaacacatcagcttgcccacagttctgaaacccacccacccctgctagaacctagtttccctccctgtgctgcttgagaccacaaatgactactttccatttgagtataccatgtctaatgatgtatgtgtattgatagctatgtcacatttagtaagtacacaagcaagccaagtttaagtgacaaagtccataaatattggggatttctgttgtctcttattaagttgaaatttataaccattaattaataagtcatatatttatgctctgttttggtttacaatgtaataatacctcattttaaaagtaaaaccactactgttacattttaatttaatcagctagaaaattcatgtagctttttaaattatatatctgttaatgatatcttgagttttgtatctgccgtagtaaattaaagcattgcaaagtatttattagtatttataaaatagtcttgtccttttttaaaagtacctatttattttttcttgtatgataagtttttagtcagtcctttttgttacaaataatgtattgt

SEQ ID NO: 3523 - DNA, 1664 bp, Cricetulus griseus
ggaagaagatggcgctcaccagctttttacctgcgcccacacaactatctcaggaccaacttgaagctgaagaaagagcaagatctcagagatctcggcagacctcactggtctcctcaagaagggagcctcccccatacgggtatcggaaaggctggattcctcgattgttagaggattttggagatggaggtgctttcccagaaatccacgtggcccagtatccactggatatggggcgaaagaagaaaatgtcaaatgcactggccattcaggtggaccctgaagggaaaattaaatacgatgcaattgctcgacaggggcagtccaaagacaaggtcatttacagcaagtacactgacctggttccaaaggaggttatgaatgcagatgatccagacctgcaaaggcctgatgaagaggctattaaagagataacagagaagacaagagtagccttggagaagtctgtgtcgcagaaggttgctgcagccatgcctgttcgtgcagctgacaagctggctcctgctcagtatatccgctacacaccatctcagcaaggagtagcattcaactctggagctaaacagagggttattcggatggtagaaatgcagaaagatccaatggagccgccaagattcaagattaataagaaaattccccggggaccaccatctcctcctgcacctgtaatgcattctcctagtcggaagatgactgtaaaggagcaacaagagtggaagatccccccttgtatttccaactggaaaaacgcaaagggttacacaattcctctggataaacggctggctgctgatggaagaggacttcagactgtacacataaacgaaaattttgccaaactggctgaagcgctatacattgctgatcggaaggctcgtgaagctgtggaaatgagagcccaagtggagaggaagatggctcaaaaagaaaaggagaaacatgaagagaaacttagagaaatggcgcagaaagccagagagaggagagctggaatcaaaacccatgtggaaaaagaggatggagaagcacgtgaaagggatgaaatccgtcatgacaggcggaaagagaggcagcacgaccggaacctttccagggcagctcctgataagaggtcaaaactacagagaaatgaaaatcgagatatcagtgaagtcattgctcttggtgtgcctaatcctcgcacttccaatgaagttcagtatgaccaaaggctcttcaaccaaaccaagggtatggacagtggatttgcaggtggagaagatgaaatttataatgtttatgatcaggcctggagaggcggtaaagatatggctcaaagtatctacaggcccagtaaaaatctggacaaagatatgtatggtgatgacctggaaaccaggataaagaccaacaggtttgtacctgataaggagttttctggttccgaccgcagacagagaggccgagagggaccagttcagtttgaggaagatccttttggtttggataaatttttggaagaagccaaacagcatggtggttctaaaagaccctctgacagcagtcgccctaaggaacatgagcatgaaggcaagaagcggaggaaggagtagataggcctcttgttaaataaaaaaaaaaggttaattaatcgcgat

SEQ ID NO: 3524 - DNA, 1664 bp, Cricetulus griseus
agccgctgctgctttcgcgcagtccgctcctccgctgcagagtcgcgccctgagctcggtcgacgaggctgcacacgcagccgggatcccaccgcccgcgaccccagccttcgtcgccgccgcccgcagggcgccccaggccgcaccatggtgaaggtgacgttcaactcggcgctggcccagaaggaggccaaaaaggacgagcccaagagcagcgaggaggcgctcatcatccccccggatgcggtggcagtggattgcaaggacccggatgatgtggtcccagttggacagagacgagcatggtgctggtgcatgtgctttggactggcgttcatgctcgctggtgtcatcctcggaggcgcatacctctacaagtattttgcacttcagcccgacgatgtgtactactgcggactgaagtatatcaaagatgatgtcatcttgaacgagccctctgcagatgctccagctgctcgctatcagacaattgaagagaacattaagatctttgaggaagatgaggttgaattcatcagtgtgcctgttccagagtttgcagacagtgaccctgccaacattgtgcatgactttaacaagaaactcactgcttatctggaccttaacctggacaagtgctacgtgattcctctgaacacgtccatcgttatgccacccagaaacctgttggagctacttattaacatcaaggctggaacctacttgccccagtcataccttattcatgagcacatggtgattaccgaccgcatcgaaaacgtggaccacctgggcttcttcatttatcgactgtgtcatgacaaggaaacctacaagctgcaacgcagagaaagtattagaggtattcagaagcgtgaagccagtaactgttttgccattcggcatttcgagaacagctttgttgtggaaacttcaatttgttcttgagcagtcaagaaaagcatggggagaaatttaaagccacagcatagccctccccttgtattttgtgcagtgattattttttaaagtcttcttttcatgtaagtagcaaacagggcttcactgtcttttcatctcatttaattccattaaaaccattatctaaaaaaaaaaaaacaaaaccttttttctttctaagtgtgttgtctttgatacttgatttagcaaatgtgtgtgttatttctgcagttccgagaggaagggttacctaaggaattgtcatttatgtgtgttaaaaggaccacagtgactgacttgtagatgctcccagccctgctcccttgtctgttagcctttgagcccagctctaatattcctttaactaagctgcagtactctcggtgttgcatttaactactttagagtatgatttcaccttgacgtctcaacatcctaggcctctgctgtaagaatattttaaacaaatgtttggaacttaagcaaccactcgtgttactgatttgtatagcccacatctgtgcaatgcaatataaatatcgcaaagccatgtgatgagactgtgtgttatttttcccgtaagataaaaccaaagaagaaatttggttctccatatttaaggtaatccacatacatagaataaactattttataaagttaaattccttacatacacttacaaaatcagtttttaaaataagtaa

SEQ ID NO: 3525 - DNA, 1664 bp, Cricetulus griseus
  modified_base (34)..(34): a, c, t, g, unknown or other
tcccgggatgcggagcccggtgcggacggttttnttttgttgtgtgtgtgtgtgtgtgtgtaacaggtcaacaagtgctctttgataataaaactcttaatggagcaataattgtaaatggttaccatactgtaaaatattttgataaaaattagtagtaaatgtatttatttgaaacactgagctgtttgcacagctccaactgtgcatgctcaaaatgtgcacttttaaaaattgttacttttggtgtgtgtctttatgtgggatatgttacagtgtactagggcataatacggtatccttttgagtgaggtctgtcctcatctcacaagtgaagtgcctcctgctgtcactaaagtacgtcacgtttactcagaagaatttcccttggtacactatagcgtatgctgttccttccacacttaagtgaagcttaagaataaagttctgattgttagttatcaaatttccaaatttcctgaaagatggcttcattctaccactcctagcctctgaatttaatctggtgcacccctcctcccagctccgttatataagggctatttttagatgcttttaacatggaaagctagcttctctcccttcaataacttgtcaagtgtccagagggagcttatcatgtttcttgttagggaattagggcagatatgatagtccctgcatctggccttgattctaaagttgttacatttgtacaatcagtagtgttttaagaatttacatgaaacaaaatgtttttgtgattgttttgtttaagccaaagcatttgatttgaaacaatctagaattttcttggtgcaaagtcatatcgaatatattcatattttttagcctattttaagggatttaaataattaattgtaaataatttgtttgattggtgcagttttagctcccaaatcactcaatatcaggaatgtgcagagaacagagccatgagatgtgttgctctgcccattccacagcagcctcagtacagcctcattgtagagtgctctttgtgtaggaagcagcagacagcattggttccgtttgcctgtgttctgacgtccaataatgaccaaagtgcattctgagtactttcaaggaatgtattactggagctttaagaacatacttagtttctcatgtgacaagttaggctttgtctgatatgtttcttcctctattgtctaatgttgaggttgtttttaggcactatattttataaactttttcaaaataaggtacatacctatacagaacttaacattttgcacagattatatcagatatattttgagaaaaaaagtacagcatgaattctgttagaaataaaaagacgaaattattgtatcttacaaaaacttatttcagaatggaaatatttttgagaaaagtagcagagtgtactgatttaggaaaatgcttgctttaggttgtaagcagttaataatgttaacagaatcatttcaaagtagtaagatgacatcgctgcctttaagaattccatgaatgtaaagagttgagattgtaacatatcacagcatagagaaaaagcagttcgaggtagaattatggcagatgttgtgtgctggttctttgccacgtgttgttttgaaaaatttgaatggcaagtttaaaataaaacattctataactga

SEQ ID NO: 3526 - DNA, 1664 bp, Cricetulus griseus
aagatgctgatcctgggctccatgtttagcctggcagagcctgtgctgaccattgctgccgccctcagcgtccagtcaccattcacccgcagtgcccagagcaacctggattgtgccacagcccggcggcccctggaaagtgaccagggtgaccccttcacactctttaatgtcttcaacgcctgggtgcaggtgaagtctgagcggagcaggaactctcgcaagtggtgccgccgccggggtgtggaggagcaccggctgtacgagatggccaacctgcggcgccagttcaaggagctgctggaggatcacgggttgctgagtggagcccaggtagtggccccaggggacagctacagtcggctgcagcagcgtcgagagcgccgggccctgcaccagctgaagcgacagcatgaggagggtggggggcgcaggcgcaaggtcctgaggctgcaggaagatggctgctccagcgatgaggaccacgagggctctgcctcccagcgggctgacagcgttgacatccaggacgtaaagttcaagcttcggcacaacctggagcagctgcaggcggcagccagctcagcccaggacctgacccgtgaccagctgaccctactcaagctggtgctggggcggggcctctacccacagctggctgtgcccgatgcatttaacagtggccgcaaagactcggaccagattttccacacccaggccaagcagggcaccgtgctgcaccccacctgtgtcttcgccaacagccccgaggtattgcacacacaggggcaggaggcctcgggccgtgaagagagccaagatgacaaggaccaaatgagctgcaagcatcagctgctggccttcgtctccctcctggagaccaacaagccatacctggtgaattgtgtccgcatcccggccctccagtccctcctgctgttcagccggtccattgacaccaacggtgactgctcccgcctggtggctgacggttggctggagctgcagctcgcagacagtgagagcgccgtccggctcctggcaacatccctgcggctccgtgcccactgggaaagcaccctggaccggcagctggcccaccaggcccagcgacagaggttagagcaggaggaagaggcggactctccagcagtcagcccccgggaggtggctgctctgagcaccgagctgctccagttcatggcggccaaggttccctacagcctccgacggctcactggcctagaagcccagaacctctatgtgggaccccagaccatcacgaccgcccctagtctacccggcctcttcggaaactctaccctgtccccacaccccaccaaggggggctatgctgtctccgattttctcacctacaactgcctcacgagtgacaccgacctgtacagtgactgtctccgctccttctggacctgcccacactgtggcctgcacatgccgttcacacccctggagcgcatcgctcacgagaacacctgccccgaggcgccgagggatgatccagggtctgaggaggctgctcctgcaccaccgcagaaaacctcggcgctgcagagaccctaccactgccccgtgtgtggggaggacttcctcttcacgcccactgaggtgctgagacatcgcaggcagcatgtgtgatccag

SEQ ID NO: 3527 - DNA, 1664 bp, Cricetulus griseus
ggcactgatgatcctcaaatcaagcaggatggagaagcccctgccaggagagtcactgttgatgccttttacatggatgcctatgaagtcagtaatgctgattttgagaagttcgtgaactcaactggctacttgacagaggcagagaagtttggtgactcctttgtctttgaaggcatgttgagtgagcaagtgaaggcgcacatccaccaagcagttgcagctgctccatggtggttacctgtcaaaggcgctaactggaggcacccggagggcccagactccagtattctgcacaggctgaatcatccggttctccatgtctcctggaatgacgccgtggcctactgcgcatgggcagggaagaggttgcccacggaggcagagtgggagtacagctgtagaggaggcctgcagaacaggcttttcccctggggcaacaaactgcagcccaaaggccaacattatgccaacatttggcagggcgagtttcctgtgaccaacactggggaggatggcttccaaggaactgcaccggttgatgcctttcctcccaatggctatggcttgtacaacatagtgggtaatgcgtgggagtggacctcagactggtggactgttcaccattctgttgaggaaacactcaacccaaaaggccccacttctgggaaagaccgagtgaagaaaggtggatcctacatgtgccataagtcctattgctataggtaccgctgtgcagctcgaagccagaacacaccggatagctctgcatccaacctgggattccgttgtgcagctgaccacttgcccactgctgactgatagccaacgggagcctttccagatccaagcaattgtttctgacttgcaactggcttcccccaataactccgaactgatcttgtatgaagacttcccacctgaagagagttacacatttgcccagtggccaaaggaaccgtctcgcgtgaccaaactgctgacgttcgtgcgtcagtgcttgtgctttatcgtgtggtgcatctttgggatcatcgccatgttttgctttgagagccttttgaagaggaaggagagagccgagaaccttgacgtcctatccagactctgccacagggtgagaccctggggtccagtacttccgctgcctgggcctcagtcccatcatcaagtgaggggatggacaacatgatctctgaggctctctccaactctctccaactcggagattctatgcgtaatagcagagtgtattgtgattgcatagtgagaatttatgacagattattttttagctatttttttgtccatgtctatttttttgccatgtaatcctacaaggtgagagtcctcttctgtattattttcaggaaagggtagggtgtaagtcttttatattcatactgcactttgttcttttgaggaaatcagtgtctttttacattgttgtgacaaatcccacttgggccagtgatgggacactcgagttcggagttctgaacacacagcaatgcctgtggagtgactctgctgtcctttatcttttaacattaagtgcctttggctcatagggacagtttgaagccctgtttccccttcgacccccctaagccttcagagaatgtgaaatgtgtactaatttgggaaactgtggaattctaggt

SEQ ID NO: 3528 - DNA, 1664 bp, Cricetulus griseus
  modified_base (1644)..(1644): a, c, t, g, unknown or other
ggcagatggactggacccaggacttgggactccggaacctcaatctctgtggagccccaagtgaagttagggagtgtggggtggggagagtgggccctggcctagagtcagatcttaagaacagtggcagtttttcccctggtctggagactgaagaccccttggaggccagggagctgggggtggggaaacaagtgggccagagacacagggtgaagacagtgcatcaccttcctttgaggcccaccctgaagacactggaatggatacaggagaagccccaggcttgggagccagccccagcaggtgcttggctcgctccccaccttctggctcccagagccttctggaagggataatgacagccagtagctcaaagacaactactccaagggaatcatcagcttcaggcctcagggttctgttggagaaggaaggaaccactgcaggtgctggccaaagggagcccgaggagtctagcagagaccctttgccttcctcgaggcctcagcccgatggtgaagccagccaggtagaagaggtggatggcacctggactcttccagggggagctaggcaagatgagcaggggtcagctctgcccccccagcggcctcccagaggacctctgcccagctgccccagtgaggacttctccttcatagaggacactgagatccttgatagtgctatgtatcggagtcgtgccaacctagggcgtaagcggggacaccgggccccagccatacggcctgggggtaccctgggtctgtcagagacagcagactcggatactcggctgttccaagattcaacagagccgaggacttctcgggtgccatcttcagatgaggaggtagtggaggagcctcagagccgccggacacggatgtccttgggcaccaaagggctgaaagtcaacctctttcctggcctgagcccatcagccttgaaggctaagctgcgctcccggaatcgctcagctgaggagggggaggtgacagagagcaaatcaagccagaaggagtcctccgtccagcgttctaagtcctgcaaggtcccagggctagggaagcccctcacattaccccccaagccagaaaaatcctcagggtcagaaggatcatcgcccaactggctacaagccctgaagctaaagaagaaaaagatctgatcaggggccaagggtccttccatctggcagtctcaggcagtgccattcctgtggggtccccaagtgaggagacagctggagccccactacggctcacactgcagcctcctttcccctccgcttctgaggagtgtctgggaggcacatgtatgcactttgtatcaccgtcccaaattttcccacacctttgcagccggctccccttacctagcggtgggaggttttggtcctctcactctcctcccttcaccctctctgcttccttcttcagcttcccttgggttttcttttgataccaatttatagcattttttataaaagcctttgatttttgtaatgggtggaccccatcccaatccccaccccaggtctccctccctaccgccagatgtcccacagagaccaatgacattttaccacttgaaacaatgaataaagttttttgggaattggaaaaaaaaaaaaaaaanaaaaaaaaataaaaaaaaaa

SEQ ID NO: 3529 - DNA, 1664 bp, Cricetulus griseus
gtggtttcggagggatgtccgccttctctgaggcggcgctggagaagaagctgtccgagttgagcaactcgcagcagagcgtgcagaccctgtccctgtggctcatccaccatcgcaaacactcgcggcccatcgtcacggtgtgggagcgggagctacgcaaagccaaacccaacaggaagcttacttttctctacctggccaatgatgtcattcagaacagcaaaaggaagggaccagagttcacaaaagattttgcaccagtcatagtggaggcattcaagcatgtttcaagtgaaactgatgaaagttgtaagaagcaccttggcagagtactgtctatttggggaaagagcgatctgtgtatgaaaacgatgtgttagaacaacttaagcacgctctctatggagataagaagacgaggaagccgacttatagaacaaataaaggtggatgagaataaaaattgttcctctctagggtccccaagtgaaccaccgcagactctcgaccttgttagagcattacaagatttagaaaatgcagcctcaggtgatgcagcagttcatcaaaggatagcttccttgcctgttgaagttcaagaagtgtccctgcttgagaaaataacagataaagaatctggagaaaggctttctaaaatggtagaggatgcttgtatgttgctggcagattataatggcagactggcggcagaaatagatgatagaaaacaactcactcgaatgttagcagattttcttcgctgtcaaaaggaagcccttgcagagaaagaacataaattggaagaatataagcgcaagttagccagagtttccctggttcgcaaagaactcagagcccggatccagagcctgccagacttatctcgattgcccaatgtcactggcagtcacatgcacctgccctttgctggggacatctacagtgaagattgacggccagtctcctccaaggccaggactttaccagacatggagacaggatccaaggccatgtgaaaaattccatgtttctatttcttcatgtattttcaatttgtttttctttatttttttttttcagtatctaatcactgtacactatctaattcctaatgagaagaaccgatcaagagctgatgtgaaactattatggtatcgctaggacttgattatagcagagactaaatgttgcagcctcacctttaccgttcttaccacccaaacattggttctgtgtgtcctcatgcctttgagtttgttgttgttgtttttgaaagcaaaagttttgtgtgttaacttattttcagtatcttgaacttatttatgattgctgacatggtgatatatccaactaaaatagatactttttttttcccatttaaagctaatttataaatggtgtactcttgggaagatataaaatcttttagaagtttgctgaaatattttcaccatgaagacagacttagatactcttttgatgccagtatctgatctaaatatttatgataaaatgtattattttttaaggagcttgatgagatctgtgataaatgctagtactcaaaatccaaatccccaaacctcagttgttaactcactaactgaacacaaactctacagtctgtttagaagtaagtcttgcagccttacagtagttaa

SEQ ID NO: 3530 - DNA, 1663 bp, Cricetulus griseus
ccaaaaagcagcagcaagcacatcaaggaaatgctgagggcacccaccctgtggctgggacccatgtcagaaaccaatctttgaagggtttcctagacgaggtcaacaaagagaatgtgcgccaaaccttgctagaacctgggaagccggttcctgacttacatcccataagtaagccaaacactggctcctataaccaaaaccccagaaaaagtctggctcctaaacaaatcttgagcaaaagctcagttaaccgtactgttctgaaagacagagctaacaaacagtttgttagaaacacacaaatcagcactcaagcagtgaagtcgcagcacctctctacagatgcagaaagcacccctagcataagagcaaataaaatccagaacaataaaacggtaacatcttccaaccaaaagcacagactctggacttcaagttcaaaaaggttcttccccagagccagtttctgaacaagactgctcccaaaattcaagctggcacagcaaccacaagtaggaatggagccccaagtgctagccagactcatccacgtgttaaaaagacagaagtagaggatcggaggaaacagctggaagaatggcagaaatctaaaggcaaaagctataagcgccctcccatgaaattgaaagcgaaaagaaaaatcatagaggagatgaacatttcattctggaagagcattgaaagagaagaagaagaaaagaaagctcagttggagctgtccagtaaaattaacaacactctgacggagtgtctgaggctcactgaagagggtgtatttcctaatgaaatatttaacatcctgtccagcattccggaggctgaaaaattttccaagttctgggtctgcaaagcaaagttgctggcaagtaaaggcacctttgatgctattggactgtatgaagaggccattaaaaatggggcggcaccaatgcaagaactgctggagattctgaacattccgcaagatccaagcagaagcacagaggctgtcacctcgggctcatcagctgctggaactaatgtcacatctgtggaagagctggccaaggaggacgactctgggcagccgtgtcttcctctaacagaaagggagcagattgtagcaacaccacagataactgcagaagaatgggataaccctggtatcaaactacagatcgccccagtcccaagaatatgtggtgtgccagaagttcaagacatgaagcttatcactcccgtgaggcgctcagccaggattgagcaagcggtgacccgctacccagaaatgctgcaggaacataacgttgtcgtggcttctcttaatgagctcctggaagtggacaaaacagagtattttgtcttccgggaaaatgaagctttacctgtgacactaggttttgaaatccttgaatcatgatcttttgatattttttttttttaatgtttttaaaggaagaggttttcttcagggcttgcaagaaagaaatgcccttgtcaagatggcctgaaataaatgttcactgagacaccatgatgcagaagagagactcttgcatctgaggaagtaatgcatggggtttactctcagattgtatgtcccacaagaaaacttttggttcatgtgttttgctctatactttgtaatagttttacagca

SEQ ID NO: 3531 - DNA, 1663 bp, Cricetulus griseus
cgaagctggcatcgaccaggacggtgtctttaaggagtttctggaggagatcatcaagagggtgtttgacccagcactcaatctgttcaagacaaccagcggagatgagaggctctacccctcacccacatcctacattcatgagaattacctgcagctctttgaatttgtgggaaagatgctgggaaaagctgtctatgaggggatcgtggtggacgtgccctttgcctcttttttcctgagccagatgcttgggcatcaccacagtatcttctatagctccgtggatgagctcccatcactagactcggagtttttataaaaaaccttacctccatcaagcgctatgatggagacatcgctgaccttgggctgacactgtcttacgatgaagacgtcatgggtcagcttgtctgccatgaactggttccggagggaaaaccattcctgttacaaatgaaaataaaattagctacatccatctgatggcacattttcgaatgcacacgcaaatcaaaaaccagacagctgctctcattagtggtttccgttccattattaagcctgagtggatccgaatgttctccacccctgagcttcagcgtctcatctctggggacaacgctgagatggatctggaagatttaaagaagcacaccgtgtactatggaggctttcatgggagccacagagtcatcatctggctctgggatattctggcttccgacttcacacccgatgaaagagcaatgttcctgaagtttgtgaccagctgctccagacccccactcctaggattcgcctacctcaagcctcccttctccatccgctgtgtggaagtgtcggatgaccaggacactggggacaccctgggcagtgtcctcaggggcttctttactatccgcaagcgggagccaggtgggcgtctgcctacttcttccacctgcttcaacctgctcaagctgcccaactacagcaagaaaagtgtcctccgagagaaactgcgctatgccatcagcatgaacacaggctttgagctctcctagcccagcctagtgattgcagaggagctcctggtggttctgtgaggctttcttcctttgccctctgagtacacacagcctgtgcctgtgagctcctccttccgttctgaaaactcaggtaaggcctcgccaagcctctatgcacggcagagtccctgcctctaccctgcccacagcggcctcttcccaggcaatcaaacccagctcgtgccagggaggctgccgagcacagttcagggtctttcctacaggggagcaggtgttccacaccacagccctctctcccaagtcctcagcaggccatgctgtcagggaacccttgctgttagcccctggcctgggtactggtgtcctagcttagaagagaaacttgccaccctggagagcttccccatttctggagtacccagaacctactggctctgagtgtctgccctgctcgtcaccttacagagaaacacaagagcctacagcacccatcatctgggcagtgctttgttccagggactgcaaagcccgtcctcttgcacaggagtcctggtccctcctccactctgtggagccagcttagggctacagcgctcaaagcatggaaacaccttccatcaggaacctgcaca

SEQ ID NO: 3532 - DNA, 1663 bp, Cricetulus griseus
agaagaagaaaacctcaataaatcagaaataagccaagtgtttgagattgcactgaagcggaatttgcctgtgaattttgaggtggcccgggagagtggcccaccccacatgaagaactttgtgaccagggtttcagtcggggagtttgtaggggaaggagaagggaaaagcaagaagatctccaagaagaatgcggcaagggcggtgctggagcagctgaggaggctgccgcctctgcctgctgtggagcgagtaaaacccagaatcaagaagaaaagtcagcccacatgtaagctacagacagccccggattatggccaggggatgaatcctattagcagactggctcagatccagcaggccaaaaaggacaaggagccagagtacacgctcctcaccgagcgaggccttccacgccgcagggagtttgtgatgcaggtaaaggttgggaaccacactgcagaaggagcgggtaccaataagaaggtggccaagcgcaatgctgctgagaacatgctggagatcttggggttcaaagttccccaggcgcagcctgccaagccagcactcaaatcagaagagaagaccccagtaaagaaaccaggagacggaaggaaagtaacgtttttgaacctagccctggggatgaaaatgcaactagtcataaagaggatgagttcaggatgccttatctgagccatcagcagctgccagccgggatcctccccatggtgccagaggttgcccaggctgttggggttagtcaaggacaccacaccaaagatttcaccagggcagctccgaaccctgccaaggccacggtaactgccatgatagctcgagagttgttgtacgggggcacctcgcccacagccgagaccattttaaagagtaacatctcttcaggacacgtaccccatggacctcgcacaagaccctctgagcagctgtactacctttccagagcccagggattccaggttgaatacaaagacttccccaagaacaacaagaacgagtgtgtgtctctcatcaactgctcctcacagccaccccttgttagccacggcattggcaaggatgtggagtcctgtcacgatatggctgcactcaacattttaaagttgctgtctgagttggaccaacagagcacagagatgccaagaacaggaaatggaccagtgtcagcgtgtgggaggtgctgaaccttttctggctacaaatcattataaatcccaacatatatactgaaaatactgagaactgctttgaaaacttggaatttctgataactccagtgggccgagatatggtggctaagaatgtggcagcagtagttaagaagacaagagactccaggtggtggccccggttgtgctgaactgctagtgacaatgctgtgctctgccatccatcaagagagaccagccccatcacctccaattttatattgtgataaaagagaaacagaaagcatggccaattctcatgctggctcattcagatactttggacagccctggacagccatgccagagaggccttagagtggccccggagctaaaagcaccagagagaaagccagtgcttccaccccacacaaccgactcagctaaaaataaacagctactaagaaaaaaaaaaaaaaaaaaaaaaaaaaaa

SEQ ID NO: 3533 - DNA, 1662 bp, Cricetulus griseus
  modified_base (820)..(820): a, c, t, g, unknown or other
ctatccttgccaaacatgcctggtgtggaggaaacttcctggaggtgacagagcagattctggctaagataccttctgaaaataataaactaacttactcacatggcaattacttgtttcattacatctgccaagacaggattgtgtatctttgtatcactgatgatgattttgagcgctctcgagccttcagttttctgaatgaagtaaaaagagattccaaactacttacggttcaagagcacagactgcacttccatatgccatgaatagcgagttctcgagtgttttggctgcacaactgaagcatcactccgaaaataaagggcaagacagagtgatggagactcaagcacaagtggatgaactgaaaggaatcatggtcagaaacatagatttggttgctcaacgtggtgaaagattggaattactgatagataaaacagaaaaccttgtggattcatctgtaactttcaaaactaccagcagaaatcttgctcgagccatgtgtatgaagaatatcaagcttactatcatcatcatcattgtatcaattgtgttcatctatatcattgtgtcacctctctgtggtggggttacatggccaagctgtgtgaagaaataaaaaaaaaaaaagttattaaccaagggtgtgaaagtgaaaggagataaagtcaatccatgtgactcatgtctttttactactctcagaaagtatctgcctagtttctttaatctttcttttctactttttcttgttttaatttcttttttaaagttagaaccttctacttagaaagacattttgtttttaactacncaaagcttttgccaaggtggaaaccaccattcttacaacctgtctgctaaaactgtctgggaattttgtatgttcacacaaaattattgggagacagattgtattgctaacatctcattttagtctcttttgttatgggagagttttgggtgcttcaaaataacatagataattttgggaattgtaataaattgttggtgctgcttatatccaggagcccatacaggtaatgtatttatcatttttatttcattaaggtggaagcattttgctagctcattagaagcacaagaattatacctgtcctcccagtatttactttcttaaattgaagattatgggttttacatattattttttcttctgggcaaaattttgagaaatgtgttaataaaatatgtaacagagggtaggggagacaaatacctctggtttatcaaagaaaaagaagtgagcctcagtaaaattgtaagcattttagcctcacaaaatgcagttatatgggaaggttttttttccattctgggaaaagccaaactgaatacagtcagaagtcaactccaggatttggatttaacttctgttgactaatagtttgatctttctttatgatttattaaattcttttatctgcctaattttgagtaattgtaaaacatgaacgagaatagacagtataattatatagaaataatacaaaatatcttaacatacatttactgtagaataagaaaatctgaatgtaatgctgcttcatctactctggcttcagttatttagtagttgggtggctatctgaaaacaaaaaaattttgccctagatgtaattgcatttatttatc

SEQ ID NO: 3534 - DNA, 1662 bp, Cricetulus griseus
tggggaattcatgtggaggtcaggcgtgaaagcgggtgtgagtgggtgcaacagaaggaattatggctgccaaaagtgtttgagtccatcggaaagttcggcctggctttagcagttgccaggaggcgtggtgaactctgccttatataatgtggatgctgggcacagagctgtcatctttgaccgattccgtggagtacaggacattgtggtagggaagggactcactttctcatcccttgggtacagaaacctattatctttgactgccgctcacgaccacggaatgtaccagtcatcactggtagcaaagatttgcagaacgtcaacatcacactacgcatcctcttccggccagtggccagccagcttcctcgtatctacaccagcattggtgaggactatgatgagcgggtgctgccatctatcaccacagagatcctcaagtcagtagtggctcgttttgatgctggagaattgatcacccagcgagagttggtctccaggcaggtgagtgatgaccttacagagagagcagcgacgtttgggctcatcctggatgacgtgtccctgacacatctgaccttcgggaaggagttcacagaagcagtggaagccaaacaggtggctcagcaggaagcagagagggccagatttgtggtggaaaaggctgagcagcagaagaaggcagccatcatctctgcagagggtgactccaaggcagccgagctgattgccaactccctggccaccgcaggtgatggcctgattgagctgcgcaagctggaagccgccgaggacattgcttaccagctctcgcgctctcgaaacatcacctacctgccagcagggcagtcggtgctcctccagcttccccagtgaggccttccttctgccctgccccagaaatcactgtgaaatttcatgattggcttaacatgaaggaaataaaagcaaaatcacttcagatctctaattatcaaatgaagcttttgttgttccacttctggccttccaccctaggcactgacaattggcagaagaaaggcagggcactgtgtgtgatggctggtagcacagctggcacctgagtagacctatagcctccatcctgtcatagatggaagatttgaggacagtggcacacacagttgaatcaaaaaggcaagccctcaatttttccagccatttgaacctacacagacacagctggggagggccagaggaagtggtccatcttaactgtaaggcccattcccgttaactgtgaccagcggaagcaggtgtgtatgaaaagggcatggactgaagactctgcccatcaaggtaggtgggcctaattacactgcccccaccagagtcctaaaactgggatggacttggaatagtacgagaggcctggactgagatgtgagtccgttgaagacttcctttccactccccacactggtcctctcaaatacccaatgggattccagcttgaaggattgcatcctgccggggctcagcacacctgccaaggacatgtgcatctgccttcccgctcgctctaaaagattgcccttccttcccaagggctgtgggccggtgctccgaaggaagcaatcaagggaagaaaacacaatgtaagctgctgtcaataaatgacacccagaccttcca

SEQ ID NO: 3535 - DNA, 1662 bp, Cricetulus griseus
cgaggctgctgaacgcaggttccgcggtatggcggggacggcgctgaagaggctgatggccgagtataagcaattaaccctgaatcctccagaaggaattgtggcaggccccatgaatgaagagaattttttgaatgggaggcattgatcatgggccctgaagacacttgctttgagtttggtgtttttcctgccatcctgagtttcccacttgactaccccttgagtcctcccaagatgagattcacctgcgagatgttccatcccaacatctatcctgacgggagagtctgcatctccatcttgcatgccccaggcgatgatcccatgggctatgagagcagtgccgagcggtggagccctgtgcagagcgtcgagaagatcctgctttcggtggtgagcatgctggcagagcccaatgatgagagtggagcgaatgtggatgcttccaagatgtggcgggatgaccgtgagcagttctacaaaatcgccaagcagatcgtacagaagtctctggggctctgaggtcacacccgtgtgcacactgagcaacagtgctgccgtgccaacaccaacacaggcaactgcggagctacagcacctattgttccttcctttccaccccgacaggcagctcccctgaaatcatgactggaataacgacagctgctgggctgcaaagggctcctcctgctgcgtctcagggagggtccaggctgtcctcactacctctcccagccacggggtcctcagctctgctccttcctgcagtgctgaggacctgcctctgtcatccaccaggggctggggatcgcctatgctgctccttctgaggacatggggccttggagaaagcagcgtgggcctgttgtccctgcctctcagttcctaggtgtcccagggggcattctgagcttcttttgacactttgcacttacaagcctaggctgcctttggcatggtgacagaggcttgctgtgtgcatcacagaagtcaccgtagccctttccaggggatgttttgtaagtgggttcatgagaaggggacatgggtcaccaggactgctgctcttcctggttgtgtctgtgtctgagttcctggtacactagagcaggtgggactgccagggctctagtgtgggtctcgcctgggggttccgtgtatatacatgtggttgcaccaggcttagctctaggatcaaattgttcttcactgtcagggttggaggggaatctgccactaggtgctcagcagaggggcacatattggactagacgagctggaaagcggctgtggtacaggccaggggtggagggtctcaagcagcagtaccacattgagcaacagtgcccgagcagaccccacaagcaataacagatcttcaatgtcagcagatgcttggccttttctaaacaggttacatttaaacgtgagtttctatttttaaagtgtagctcatctgtggggtgtgcagcaaatctcactgcacaaggttcgcttttcctcgcccacatgtcagtggctggcgctgtgcatgtttcatggtgttagtagttcccagctctggggctccagttgggtacctgtggggacctttcctcccttccttcccaagggagtccgcttctatttgaaatgcagcagaggctggtgttgggaggt

SEQ ID NO: 3536 - DNA, 1662 bp, Cricetulus griseus
gtggacgccaccgagaaggtggagacggctgggaaggtggacaccaccgagaaggtggagaccgcggaggatccgggccgcggggctgagctcaagctggagcccgagccggatcccgagccggatcccgagcccaagcccgggcccgggcccgagccggatcccgagcctgatcccgagcccgagcccgagccggatcccgagcccgagcccgagcccgagcccgagccagatcccgaacccgagcctgagcccgatcccgagcccgagcccgagcccgagcccgaaccagatcccactgcaaaggtgatgatgttggcaaggtggccagcaatcccaaccactgtaactgcatcatagaccaaatcttcacaggtggcctgcagtcagacgtcacctgtcaagcctgccatggtgtctccaccactatagacccatgctgggacattagtctggacttgcctggctcttgcacatccttctggcctatgagtccagggagggagagcagcgcgaatggggaaagccacatcccaggcattactaccctcacggactgcttacgaaggtttacaaggccagagcacttaggaagcagtgccaaaatcaagtgtagtagttgccaaagctaccaagaatctaccaaacagctcactatgaagaagttaccagttgttgcctgctttcatttcaaacggtttgaacactcagccaaacagaggcgcaagatcactacatacatttcctttcccctggagctggatttatggcgtcaagcaaagagacccgaatgaatggacagttgcagctgccaaccaatagtgggaacaacgagaataagtattctttgtttgcggtggttaatcaccaaggaaccttggagagtggccactacaccagcttcattcggcaccacagggaccagtggttcaagtgtgatgatgccgtcatcaccaaggccagtattaagatgtgctggacagtgaaaaatagaaggggagggcaaagaggctctagtctaagcagtcatgtgaaagaaattaaatggcaggaatgttctgggtggggaaggtagagcagagaaaattgtgacactggtttatctcctatattcctccaaaagattgtgtgggaaagtgtagggggaggggggtggtgtggggggtgtgtgcccttgtaaccgtaaaacatctttctccatgggtgtttcagcttcaattgaccaatcatgtaacagttacacatttgtgggaggaaaaggaaaagtttattaaaatgtagcccattgtgtacatggggtgaaagcagaacagtggaggaggcagggatagctcattgataaacacctttgccagtttctttgtatttgtgatttttgtgctattaaatgcagtattaaaaaaagatagcccacatgggctagtgaaaggagaagaaataaggggcttgtggaaggggagcaggtgctccaaaagtagagaaggctagaaatgctgtaagataagcagttaacaaggacaggcctcagctgacagtgtagtgtgtgtgagcaaatcagtgaacctctttgcgattgttttctcatctgtaacatgcaggtaattcctatcttaatgggttgttgttaaagattaaatgatataaaatgtgtcaaagtcaaag

SEQ ID NO: 3537 - DNA, 1662 bp, Cricetulus griseus
gaacgatggagttatatgacagaatcggttgatcgcagccccggacacatcttgtgctgtgagtgtggtgttccaattagcccaaatcctgcctaacgtttgtgtggcttgtttgagaagtaaagttgacatcagccaaggtgttccaaagcaggtctccatttctttctgcaaaacagtgtcaaagatattttcagccaccagcatcttgggtacagtgtgctttagaatccagggagcttcttgctttatgcttgaaaaattaaagcacctaaggtacgacttgttgatgcaggctttgtttggactgagccccattccaagaggcttaaagttaaattgacaattcagaaagaggtgatgaatggtgctatccttcagcaggtgtttgtggtagattatgttgttcagtcccaaatgtgtggagattgccatagagttgaagctaaggatttctggaaggctgtgattcaagtcaggcagaagactctgcacaagaaaacgttctactatctggaacaattgattctgaaatatggaatgcatcagaatacacttcgtatcaaagagattcatgatggtctggatttctactattcttcaaaacaacatgctcagaagatggtagagtttcttcagggtacagttccctgtagatacaaagcatcacaaagattgatctcccaagacatccatagtaacacatacaattacaagagcactttttctgtggaaattgttccaatatgcaaggacaatgttgtctgcctgtcaccaaaattggcgcagagtcttggaaatatgagccagatttgtatttgtattcgagtaactagtgccatccatctcatagacccaaataccctacaagttgcagatattgatggaaacacattctggagtcatcctttcaatagtttatgccatcctaaacagcttgaagagtttattgtgatggaatgcagcatagtcagggatctgaaaagaagtgcgggggctggaatcatatcaaaaaagcacacccttggggaagtctggatccagaagacatctgaaatgaatacagataaacagtatttttgtcgaactcacttgggacatcttttaaatcctggagacctggtgctgggatttgatttggccaactgtaatttaaatgatgaacatgtcaacaaaatgaactcagatagagttccagatgtggtgttaattaagaagagctatgaccgtaccaaacgccagcgccgtagaaactggaaactaaaagaacttgcaagagacagggaagacatggatacagatgacgaaaggcaatatcaagatttccttgaagatcttgaagaagatgaggcaattagaaaaaatgtcaacatttatagagattccaccgtccctgtggaaagtgatacagatgatgaaggagcacctcgaattagtctggccgagatgcttgaagaccttcatatttctcaagatgccacaggtgaagaaggtgcatcaatgatgtcatgagtcatgttatatgctgttcgcatatctgtgacctcaggaagtcagcaaaataacctttattgtatagtacatgtatttccttatattttgagatgagaaatttggccttaaacttgaataaatgacttaattttgattgttcaacttaaa

SEQ ID NO: 3538 - DNA, 1661 bp, Cricetulus griseus
gcgcagcctcttctacctgcataacgagctgggcaacatctacacacacggattagccctgctgggcttcctggtgctggtgccaatgaccatgccctggggtcagttgggtaaggatggctggctgggaggtacacattgtgtggcctgcctggtccccctgcagcctctgtgctgtatcacctcttcatgtgccaccaaggaggcagtcctgtgtacacccggctccttgccctggatatgtgtggagtctgccttgtcaacactcttgttgagccctgcccatcattcactgcactctggcttgcagaccctggcttcgtccagctgccctgatgggttacactgcactgtcaggtgtggccggctggagagccatcactgctccctccaccagtgccaggcttcgagcctttggttggcaagctggggcccgcctgctggtgtttggagcccgtggagtagggctgggctcaggggctccaggctccctgccctgctacctgcgcatggatgcattggcactgcttggagggctggtgaatgtggcacgtctgccagagcgttggggacccggccgctttgactactggggcaactcccaccaaatcatgcacttactcagtgtgggctccattctccagttacatgctggtgttgtacctgacctgctctgggctgcccaccacgcctgtcccccagactgagctgtctcctagctgccaaaccagcctgcccatagcttcctgggacaaataacaccaccttccctccttctgctggtctgcaaggggctggttccctggaagaaccaggacatgggacttcctatctgggagaccactcttcattctttcctgttgattaacctcttcttgtacccaggccttcaaattctagctacccctctccctgccaactcccctccagggtaccatttcactgtcggctagaaggaaatcattctttgggcttcagtttaccctgtttgacctgagaatctctgactcctggattcttgaactagcttctctgcccctgcttcctgacggccatctttctgccctgcatgccaaacctctcagcaaccagaattttaccattcctgtcattcctgcagtcagcatgcagggcagtgagaccagacacttttctcaggaccaagtggagcatgcttgtatcatctggccaaaagacataagaggagctgctacttttcctaggccacaggcacagatgtggaatggtggctttggattcaggcctcagtggaccaaggactcaccttcagtgccatggtctgaccggttgacctgcctaccagagacatgtctgctcaggaaatctctatacaatgtgtggttccagcctgctggccaaaggaagaaatgctatgttgccacatgaacaaccttgggtgccccccaagattcattactttttattagatacagaaatttccaggggagaggtaggaaagagggttagaggtttaaaagcactgaggctgggcctgtggctcaggctgggtctaacgaatcctcaaataggctgaggaggttccgtggctcaaaggtagggcagggacctctaggaggctccgagtccatgtcagttaggtccagggcatcccgttgggggaggaaagaaaaggaataaga

SEQ ID NO: 3539 - DNA, 1661 bp, Cricetulus griseus
cgtctgccggtggatgagtggtctcggccgcggaggcgtggagccggctcgcagcgctccgggcgtacagctcccaccagtgggaggtggatttccgctccgctgggcctgaacgcgaacgtcacccttccgcgtcccacacccgggatcaggcccatcggaacagaacctaaaactacagtctagcttcagtgtcaaattccgagccattgagaaacttcatgccttcctgacagcagtcctgcagagggaggaccctagcgttggctttagagacctcccagctcctccatggccctcacaatgctgaatggacttcttattgaggactcaagcccacctacactgctgcaccagatcagcaagactcctcagctagataccttcacacaccaaagctgcttcatgcaggacctctttgctcatttccctgaggtcttatttatacaccggacctacaacccaagaggcaaggtattatacaccttcctggtagatggaccccgggtacagctggagggtcctctggcccgagcagtgttctttgctatccctaccaatgaagatgccaaaggcctggcccagacttgctctcagccttccactatttgtaagttcctccaggggaaattctatcagctctccctggagaagcaggtccagagcgtgcttctgtcctccctgcagagcacgatgtgctccgccacagctggcaacctgaggaagctctacacactcctgagcaactgcatcccctccaccaggctgccggagctccactcacactggctgctcaacgaccgcatctggctggcccaccgctggagaagccgagcccagagcacccgatacttccggagcctagagatcacagcccacctcctcagtcagtttttcggcaccaccccatttgagaaacaaggcatggcatctgtgttcagatacatgcagcagaacccttctgacaaagcaagcctcaacctggctgtgagtcccaaggacagtcacactccttccgatgccagccttgaaagccccagcacagagcaagtagtagaagcccggatccagcactcgctcaatgccatctgcacagggccagcagcccaactctgcctaggcgagcttgccgtggtccagaaatccatgcatctcattggctctggctcagaaaaagtgaacattcagattctggaagatacgcacaatgtacagccccagccccctgccagctgcagctgctactttaaccaagccttccacctgccctgccgccacatcctagccatgctcagtgcccgacaccaggtgctccagcctgacatgctgcaggctcagtggacctcaggctgtgccaccagtctagacagcatcctgggaagcaagtggagtgccaccctggataagcacctggcggtgactctcctcactgaggaggtaggtcggctcttgcagcactgtagcaaggaggaatttgagcgtcgctatagcacccttcgggaactagccgacagctggatcggcccttatgagcaggtacagctctaatcacacgcacagacccagtactggggattgaacccagagcagtacatatgttaggcagatactctaccactgcctctttttatttcttattttgagacagcctctcaccaggt

SEQ ID NO: 3540 - DNA, 1661 bp, Cricetulus griseus
cgcgcgcttgagagcgaacggccgtattctgaggagagcagcggccgtgggcacctcagcatgttgtgtcgggcggcttgcagcgccggcaggaggctggccccggcggcgacggccgcgggctcccggcataagcacagcctcccggacctgccttacgactatggcgcgctggagccgcacatcaacgcgcagatcatgcagctgcaccacagcaagcaccacgcggcctacgtgaacaacctgaacgccaccgaggagaagtaccgcgaggccctggccaagggagatgttacgactcaggttgctcttcaacctgccctgaagttcaatggtgggggacatatcaatcactccattttctggacaaacctgagccctaaaggtggtggagaacccaaaggagagttgctggaggctatcaaacgtgactttggatcttttgagaagtttaaggagaagctgactgctgtgtctgctggagttcaaggttcaggctggggctggcttggcttcaataaggagcagggtcgcttacagattgctgcctgctctaatcaggacccactgcaaggaaccacaggccttattcctctgttggggatcgacgtgtgggagcatgcctattaccttcagtataaaaatgtcagacccgattatctgaaggctatttggaatgtaatcaactgggagaatgtcactgaaagattcacagcttgcaagaagtaaagccttatcatatggagtatgttaggccttcgatggatatttttgtagtagtatagagtagtgcagtaactatgactgctttcttgtaacatttatggatgtgtatccacatatttgatggacataaaattatgataagttcttatttttaattaaatttactattaggtgactgtttgagaacagtatatactctgtgtgaatcactcttgattgacgttttcattaaacccttgttgctaggatgccatctatgactgtcattgtaagaccatcagaaatattccttctctatgttttgggggcctgtaggagagtctggaatcctgttctactgcagttagaaaagaaattgtagtttgcaaggtcctgggctctatctcagtactggaacaaatcatcaggccccatagcttggttgttgactgagaactgttattatgagaggagtgtgattgtacttctgggattttctgtaaggcagagatgcaaaaatatataatattgtctttaaaaaccaactgtgtattgtatgaaagtgctcaagatggacaaattagggtctgcctgatgatggcaaccatggggactaggccactgggcattctgggaagccattcagtccccattaattgtatatctcagaactatattgtgggccaagtggtacctttctcagtagaggcaaatgggtttttgagtgagatcagtagggtatcaccctgagaacattagttttcagagacatatattttcattttttctgtatgtttcaagaatttacagtaaccagaggggctttatattgttattcaataaagagaagacccttccatgacaaggtgacactgcatttctgattgtgttcctgtgcagtgtctgcctcttcctcccgaatggtgggattaaaggcgtgtgccatctacaccctg

SEQ ID NO: 3541 - DNA, 1661 bp, Cricetulus griseus
gcctcctccgccgccttgtctctcacgcctccgagcaggccgcggttaccgggtttgcggttaccgggctcaaagcactgccgctccagcgtctcggtgttcctgctcctgtgagatgacgctcaagtccagcgaaggcgagggtgggaacagcatgcgcaccgcgctctcggacctctacctggagcacttgctacaaaagcgcaaccgacctgagactgcattgaaccagttgaatgttgccactgaggacatgtataccaatgggtctactgctccaggtagccctgcccatgctaaagggcaagaggcaaggaaagtgcgtctcatacagtttgagaagatcacggaggagcccatgggaattactttgaagctgaatgaaaaacagtcatgtactgtggccagaattctccatggtggcatgattcatagacaaggctcccttcacgtgggggatgagatcatagaaatcaatggcacaaatgtgaccaatcactcagtagaccagcttcagaaggcaatgaaggaaaccaaaggaatgatctcattaaaagtaattcctaatcagcagagtcgtcttcctgcactacagatgttcatgagagcacagtttgactatgatcccaaaaaggacaatcttatcccttgcaaagaggcaggactgaagtttgttactggagacattatccagatcatcaacaaagatgacagcaattggtggcagggccgggtggaaggctcctccaaggagtctgcaggattgatcccttctcctgagcttcaggaatggagagtggcaagtgtggctcagtctgctccaagtgaagctccaagctgtagtccctttgggaagaagaagaagtataaagacaagtatctggctaagcacagttcaatttttgaccagttggatgttgtttcctatgaggaagttgtccggatccctgcattcaagaggaagaccctggtgctgattggagccagtggggtaggtcgcagccatattaagaatgctctgctcagacagaatccagagaagtttgtgtaccctgccccatatacaacacgaccgccaaggaagagcgaagaagatggaaaggagtatcacttcatctcaacagaggaaatgacaaggaacatctctgccaatgagttcttggagtttggcagctatcagggcaacatgtttggcaccaaatttgaaacagtgcaccagattcataagcaggacaagattgccatccttgacattgagccccagaccctgaagactgttcgaacagctgagctttcacctttcattgtgttcatcgaacctactgaccagggcactcagactgaagccctgcagcaactgcagaaggactctgaggccatccgtagtcagtatgctcactactttgacctctctttggtgaataatggtgttgatgaaactcttaagaaattgcaagaagcctttgaccaggcttgcagttcaccacagtgggtacctgtctcctgggtttactaagcttacagaattggagaacctgttccagccagcatttggaatgccatcctccccaaaatcaaatagctgtgcaaagtacaactgctctagagaaacccctccaaagcaataaaaattatgctgtcctaccaggagtacctccaac

SEQ ID NO: 3542 - DNA, 1660 bp, Cricetulus griseus
tgaagtggagaagattttcaaggacaatgacggagcagctgagccgcaacatgcaggaagcctgtgcgcgccaagagacacaaattcagcatgccttattgcggaagctgaaagccgagaaggcacgtgccctggaactggaaagcatgcttgaaaaggtgaagaaagaggctgcacatacacaacagcaactggagtctcaggctcaggagcgctgtgtagagctcaggaaagagaaggagcgagaattagaattacaatgccagcgtgatgagcataaaatcgagcagcttcagcaaatggtgagagagttgaagcggaaagagaaggttcctgggggagatggcgcttgccgggtttcccccgcttgggttctttggatctggaccatgtccaggaacagcaacaagagctggagaagatccggcaacagctactgtgtgcagcggggctcctcacaagcttcaccaaccacactgtggacaggacaattaaagattggacgtcatcaaacgagaaggcggtgtcatccttaagcacccttgaggaactgaagtctgaactaagcattccggcctcctctaagaaaaagatggctgcagagctccacgtccaactcatgaatgaactgctgagagacaacgacacccttacaaaagccatcagcatggcgactcaagagaaagcggagctgtgcaggactgtgtcccggctggagaagaccctgaaacaccacatgcagaagggctgcattctcagtaggcaaagcaagtcttcggggaagcaagatgggatggttcctcagagtcctctacgaaactcagatccagagtggcacacagcaactacaaagcatggaagcaaatacgtacaataccaagatggagaaactgtacctgcactatctgagagcagagagctttaggaaagctctcatttaccaaaagaagtatctcctgctgctgattggtggattccaggactctgaacaggaaactctctccatgattgctcatctgggggtatttccttccaaggcagataagaaaataactacatcacgtcctttcacgaagttccgcactgctgtgagggtagtcatcgccatacagaggttgcgatttctggttaagaaatggcgagaagtggatcggagaggagcactaatacatggcaaaggctcccgccaaggacatcgaatgtcccggagacagcattctctgtcagaaaccagagcatccctgccaagcaaagaagtttcctcaggccacaccaaggacgctagacacagcctcagatccttggcagcagtaccactgggcaaggtggaaagatcaacttcatcaccaaattcacggttagaaagatccctgactgcttctcaagatccagaacattccttgacagaatatatccatcatttggaaatgatccagcagagacttggggggttaccagcagattctactcagaaatcctgccaccagaaggttaaacaatgaataaagtcttatggctcttaccctgtgacagttgtatctgaggagaaatggttttcctaaggaaagctcacggtatggtctgggacacactgatactgcaggagtcatgataccagcccctaggagccaccgagtgctcccacctcaacacactgcta

SEQ ID NO: 3543 - DNA, 1659 bp, Cricetulus griseus
  modified_base (1195)..(1195): a, c, t, g, unknown or other
  modified_base (1204)..(1204): a, c, t, g, unknown or other
cttgattttcgaattcatttgaggaatgaattcctccgttctggactaaaagaaatgctcccaggtcttaaagaaaaagagaatgatgagcttgatattcagctgaaagtgtttgaagagaacaaagaagatgatctaactgaattactcccaccgtctcaatgacattcgagctgaaatggacgatatgaatgaagtctaccatcttctctataacatgctgaaagcactgcagctagaaagttacttattatccattctgcagcactttctactcatcagaaatgattattatatcaggccacagtaattataaaataattgaggagtgtgtttcccagatagtgctgcactgcagtggcatggaccccggacttcaagtacaggcagagattagacattgatctcactcacctaatagatgcttgtgtaaacaaggcaaaagttgaagaaagtgagcaaaaagcaatggaattttcaaagaagtgataggtcaaaggaatatagatgctgcagaagaaaataggagtggacctccaaagaagaaagtgaaggaactgagaattttggatcccaaaacagcacagaacctgtctatcttcctgggatcttatcgcatgccatacgaggaaataaagaacattattttggaggttaatgaacagttgctaagtgaagctctaattcagaatcttgtcaaacatctccctgagcagaatatactcaaagaactagcacagcttaagaatgaatatgatgatctctgtgagccagaacagtttggtgttgtgatgagctcagtgaaaatgttacggcctcgtctcacaagcatcctcttcaaactcacctttgaagaacatgtaaacaacatcaaaccaagcatcatgtcagtaactcttgcatgtgaagaactgaagaaaagtgaaagctttaatagacttttagagctggttcttttggtaggaaactacatgaactcaggctcaaggaatgcccagtctttgggcttcaagatcaaacttcctttgtaagatcagagatacaaagtcagcagatcaaaaaacaacccttttgcattttcttgctgaaatctgtgaagaacaacaccgtgatatcctgaaatttcctgaagagctggaacatgtggaaagtgcaagcaaagtttcagctcaaacactcaaattcttcatctggngcgtgacancaagaatttcccaaaagaagacagtcaacacgataagtttgtggaaaagatgacgagctttacaaagaatgccagagagcaatatgaaaaactgtcgaccatgcacaacaatatggtgaagctctatgagaacctgggagaatacttcatttttgacccaaacacagtagccatagaagacttttttggtgatctcaacaacttcagaaccctatttttggaagcactgaaagaaaaccataagagaaaagaaacagaagagaagagccggagggcaaaactcgcaaaagagaaagctgaacaagagaagctagagcgccagaagaagaagaagcagctcattgatataaacaaagagggtgatgagaccggagtgatggataatcttctggaagccctacaatcaggtgcagcattagagaccgaagaaagcgaattccaaggaatccagataa

SEQ ID NO: 3544 - DNA, 1659 bp, Cricetulus griseus
ctcagtggagcgaccatcattgattcccttgataccctctaacctcatgggagcgtgaaggaggagttccaagaggccaaggcctgggtgcaagacagcttccacctgaatgtgagtggagaagcatctttgtttgaagtgaacatccgctacatcggaggactgctctcagccttctacctgacaggagaagaggtgttccgagtaaaggctatcaagttgggtgagaaactgctgcccgccttcaacaccccacaggcatccccaagggcgttgtgaacttcaaaagcggtagctggggctgggccacctcaggcagcagcagcatcctggctgaatttggatccctgcacttggaatttttgcacctcacagaactctctggcaagccggtctttgcagaaaaggtcaaaaacatccgcaaggtcctcaggaagattgacaagcccttcggcctctaccccaacttcctcagcccagtgagcgggaactgggtgcagcatcatgtctcagttggaggacttggggacagtttttatgaatatttgatcaagtcctggttgatgtccgccaaaacagatacggaggctaaaaatatgtactacaaagccttggaggccatagagactcatttggtgaatgtctctcctgggggtctgacctacattgctgagtggcgagggggcgttctggatcacaagatgggacacctggcctgcttcgcagggggcatgattgcccttggtgccgaggatgccaagaaagagaagagggcctactaccgagagcttgcagcccagatcaccagaacatgccatgagtcctatgaccgctcagacaccaagctagggcctgaggccttctggttcaacttcggccgagaggcagtggccacacagctgagcgagagctactacatcctgcggcctgaggtggtggagagctacatgtacctatggcggcagacctgcctgtcaatcactcggacagatccagcatggctgggcaccaccactgaccaactgactgcacacccgtgtctcagggatgcctctactttcttgggatccgggaccgttctcagaggcactgaggacagaaggcccatcgtgggcagaccctggacggatgtgttggacaggcgacttcttttcctctgtgaggagacaggagctggtgatgcaccagcatcaggcccgggctgtggtccccggtgcctacacgttcctttctgcgggggaatttctgcgtccccatacttgctgtcacagggccaaaggactggaggtttgcgtatccacccccatgtatttgattatcttcctttcttggtttagggagttggttttgcttgaacacacacacacacacacacacacacacacacacacacaccacacacaccacacacacctgcacaaacactgtaagacaattaaaaaaccaagataattaaaaagaaaacacagccactatcccgctctctggaatgaatactgttatattttcttctagacccttttctatgaatatatagaatatatattttacaaacatggtatcagcctaatgcaaactgttttcttataacctgcttttgcgcttaactatatattgtgaacctctttccatgtcaacaaatatacacgtatgtcagca

SEQ ID NO: 3545 - DNA, 1658 bp, Cricetulus griseus
aggctcacctccacccccagtaaaagcctcttctgaacttgcacaagtgcccacaaactccatgcctcctgtagcacagttgcccagctctgatgcatttgctgctgtggctcaactgtttcagaccactcaaggccagcagcttcagcagatccttcagacttttcagcagcctccaaaaccacagtctcccgcctttgacaatgctgtgatggcccaggtgctatcacagctcagttaaagacagctcctacacaaccacctgaacaaaaacctcctcctccaccatttctgcgcccaggattcaacccaatgcatttaccgccaggctttctccctcccggacccccacctcctataactccaccagtgtccatccctcctcctcacactccaccgataagcatcccaaactctactatcgctggtataaatgaagacactacaaaagacttatctattggaaatcccattccaacagtggtgtctggggctagaggaaacgccgaatctgctgacagtgcgaaaatgtatggctctgctgtgccacctgctgcacctacgaatctgcccacccctcctgtaacccagcctgtttcacttcttggcactcaaggagttgcacctggccctgtgattgggctccaggcaccatccacaggtcttcttggtgccaggcccggcctgatcccactgcagcgccccccaggggtgcctccgcctcacctgcagcggtttcctatgatgccacctcgtcccatgccaccacccatgatgcacagaggtccacctccaggaccaggaggctttgccatgcctccaccgcatggaatgaaagggccctttccaccacatggcccctttgttaggcctggcggaatgccagggctggggcagcagcagcagcagcagcagcaacaacaatcagcacaccaccgcagccgccagcatctacagcagccagcgccagctcagcagcagcagcagcctcagcagtttagaaatgataacaggcagcagttcaattcaggtagagaccaagaaaggtttggaagaagatcttttggaaatagggtggaaaatgaccgggaacggtatgggaaccgaaatgatgatagagataatagtaaccgtgaacggagagagtggggaaggaggagccccgaccgggacagacacagagacttggaagacagaaatagacgctctagtgggcaccgggacagagacagggattccagagatagagagtcccgtagagagaaggaagacaaccgaagggagaagcacgagctgacagacagggcgggcagtaacaaagccagtgaacctccccttagccaagtgggagacgtagacactgtttcagaacttgacaagggggaggccatggccgcagtggtaaaaccttccgaagagtcacctgctgaggctacctcatccgttgaacccgagaaggattctggctcagcagcagaggctcctcgctagagactgcatttgacagaatgtggcagtgacacttgggtatagagctgaggtgtacagatgctgtataatatttgctcctgctgcatcaccccacagtagttggtggggattgtaagcaatttgattgcttcccttctatttaaaaatagccacaaaataacaaaaaa

SEQ ID NO: 3546 - DNA, 1658 bp, Cricetulus griseus
  modified_base (386)..(386): a, c, t, g, unknown or other
gaggatgactttaagagcagcaaaggaggagctcagtgcttcccagaattgcgagtcggtgtgtttgaagagatcgtgcctatggggatcagccccagtaaggtctcctacaagaaccctggaatccatttatcccctggtgaatttcacaaagaaatagaaaagcttttatctcagacaaatcaggaacagggtgatactatcatactggactgcagaaacttctatgagagcaaaatcggacgattccagggctgcttagcaccagacatcaggaaattcagttacttccctagctacgttgacaaaaaccttgacatttctaggcagaagagggtgctgatgtactgcactggaggcatccgctgtgagcgggggttctgcanacctcagagccaagggctagccttctagcctttggcacatgtccctatcacgagagtcttaagaaacacacacaaccacacatagaccgatggctttaatattaatgttgcagtttccagtgatgcagaatgcagctgcaattgtgtttcaaggagaagctgagtggggctggccgtccctgcagcttggtgccactcctgggcccatgtgcagcctcactagacattgtcatagtggtgaggccctggctccacctctagttaccctgtactgtccacaacattacagttcagtgttgcaggaatttcccttgtcagaaacccccggggctgcactcaacagctcttgagccttgtcattattgtaatattggctgaatccctaagggaaaataattccccaaagcaacaaacaaaaatactagtttaactggcactatggtctattaaaaggcacaagaacaatgtgttttaacatttttactgactcccatggtgttaaaaaagggatccaagtaggaacgccgaaattaggtttcagaataatcacttgtgtcattggtcaggatttcctaattccttgccgtttagatgttgtgcactgctgtccttcagaggtttcatttgtaggcaagagctctgtgatttgatttatctcataagtgaccaggcaggcacttggtgtctgtaagcagggccatgctaaatagcacagccacggtagactggaaattcacccaggggcattggcctcacataagccatttgcccactgaggtatagggagatgttttctgtcctggaactcactctgtaagaccaggctgacctccaactcacagagatctgcctacctctgcctcccaagtgctaggattaaaggcgtatgccaccaatgcccagcgttttcattcatcatgaagttggcattcaataaagaaagaatggtttctgactgcagtgagtacatcccaggtgttcacacagagcactcaggggtatgtctgttgcctggggtggtagattttaaaacttgaaatttcaccgttgcctttttcttccccttctcttatctggcagaaggaatcctgtgtctttctgactcttagaagattctgtagcttgcctttcattcttgggggggagaggggttgatgctggaatcaatttggcagctttaatcttgaggttaaagtttcaagttagggttagaaaaaatcatgattatctgttctttttactgtagttgctatgatcaaatccagtaataaa

SEQ ID NO: 3547 - DNA, 1657 bp, Cricetulus griseus
cgccccgctcctcccttcgctcgctccagctcctcccggcaggggcgcgccggacccagcgccacgtcaccgcccagcagccctcccgattggcgggcggggcggctataaagggagggcgcaggcggcggccggatctcttccgccgccattttaaatccggctccatacaacgctccgccgccgccaccgccgccgccgggacccgcactgcgcgccagcaccccctcgccgacggctccgccagcatggaggacatgaacgagtacagcaacatagaggagttcgcagagggatccaagatcaacgcgagcaagaaccagcaggatgacggtaaaatgtttattggaggcttgagctgggatacaagcaagaaagatctgactgagtatttgtctcgatttggggaagttgtagactgcacaattaagacagatccagtcactggaagatcaagaggatttggatttgtgcttttcaaagatgctgctagtgtggataaggttttggaactgaaggaacacaaactggatggcaaattgatagaccccaaaagggccaaagctttaaagggaaaagaaccccctaaaaaggtttttgtgggtggattgagtccagacacttcagaagaacaaattaaggaatactttggagcctttggagagatagagaatattgagctccccatggatacaaaaacaaatgaaagaagaggattctgttttatcacatacacagacgaagagccagtaaagaaattattagaaagcagataccatcaaataggttctgggaagtgtgaaatcaaagttgcacaacccaaagaggtatacaggcagcaacagcaacaacaaaaaggtggcagaggtggagcggctggtggaagaggtggtacgaggggacgtggaagaggtcagggccaaaactggaaccaaggatttaataactattatgatcaaggatatggaaattataatagtgcctatggtggtgatcaaaactatagtggctatggcggatatgattatactgggtataactatgggaactatggatatggacagggatatgcagactacagcggtcaacagagcacttatggcaaggcatccagagggggtggcaatcaccagaacaattaccagccctactaaggaggacatgggaaaaagcagggggtgtaaagaaaaccatcttacaggacagacattgaagattgcttgatcttctgttgacctaagatgattattttgtaaaagactttctagtgtacatgacacaattgtgtccaactgtatatagctgccaattagtttctttgtttttactttgtcctttgctatctgtgtattgactcaatgtggatttgtgtttatacaaatttttatttgtatgattcatgttaaacctcaaataaatgcttccttatgtgattgtttttctgcgtcaggtactacatagttctgtggaaatgtaattttataaagaagcaataattaaggcacagcttgttttgtagggggtattggtccacaggaagaaactagaccagtgtgagtctttttatactgatttaacctttttaaaatgcctacaactttgttcgataatatttgtacttgctaggctatcaagttgtaatgcattggcctcattt

SEQ ID NO: 3548 - DNA, 1656 bp, Cricetulus griseus
ctcattctgggtgggagcaactctaaagcttctgaaaattttccagtacactaactttgagaagaacaggaattacatcttatcaactcaggatcgccttgtggggggatttgccaaatggccagacagtcatccagatgctttgcacgcgtactttgggatctgcggcttgtccctaatggaggagagtgggatctgtaaggttcatcctgctctgaacgtaagcacacggacttctgagcgcctccgagatctccatcaaagctggaagaccaaggactctgaagagttcccggagagtgtccgcatttccacttgagtgaccctggggatgaatgggcttgtagcataactgtagctcaaggttaaaagccatgtgtaaccaagtgtgctctttctaaggagtagtcttaagtcaaagcttgtactgctaacaatgcaggatgtggtcttgagccttgaccactgtactggatttcaagaaaatccttgttgaaatttggacctcagcaggactcttcttaaatgtttatactgtgtttttgagaagtttcttggggcagatttactatatatatgtaggtcatcttcttaaaactcttcagtacaagttctggcttacaaaatggacacaaatattcaagtttacacttcatatggcattgatgatcttcaggtgaacatttagtgatcacttaaaaatctctactgctgatggtaagatttgctttattgaattaagtatctgggattattctttaaaaatagatggtctcagttttcttcaagaataacatattttgtgttattcttaagatgtgccaagtagacttgtgtaacttatacagatgaaattaaaagttcatagtaagaaaaaataggcttaactaatactatagttttctaaagagagagagtactacataattgagggagaagaaattgaactgtgtaattatgaatgagacggttctgggttgtgtgtcattgtaagaggtcccttgggtgagtacctgttgtgttttgttttaatcccaaatcattggctgccttttgtcagggacaagagaggaaataatctttgctatctagaaaaagacaaggcagacagatctctgtgagttcaagtccagcctggtatacataataagttccaggctagccagagctacatagagagaacctgttctgaaaaagaaaaaaaggggggggaacagtagcaacaaaaataataaaatccattatctgagatgcttcagaatcttaaatttttgatggacagtatgacagaattggaaaattccaccatttcatgcagcaggtcacacatgaatttcagggacactataaatagtgtataaaactacttgaaactactgagtaaagtgtatgaaataaatgcacaaggtaaagtgtgtatgtattccaaaatctgaaaacagaatctaaaatctgaaacattacttttggctccaagcattttggatagtgatactcaacctgtaaataattttctaatgttttcaagtttgataattctttaaatacaaacagaaccactgaagtatacatagtcatttatatttttatatttttggctaagtggggtgggagggaaatatatccatctagaggagataaaactgggtttcactt

SEQ ID NO: 3549 - DNA, 1656 bp, Cricetulus griseus
cccaatgaggatgagctgaaatggggtgcaaacaatgtggaggatcattattgtgatgcatgccagttaagcaaccggttcccaagatataacaaccctgagaaacttttggaaacaagatgtggacgctgtggcgagtgggccaattgtttttacgctgtgttgccgtgcattagggttttgaagctcgatatgtgtgggattacacagaccatgtttggacagaagtctattcttcttctcagcagcggtggctgcactgtgatgcatgtgaagacgtctgtgacaaacctctcctttatgaaataggatggggcaaaaagctttcctatatcatagcattctctaaagatgaggtagttgatgtcacctggcgatactcttgtaaacatgatgaggtgatatccaggagaaccaaggttaaagaggagttactccgagaaaccattaatgagcttaacaagcagaggcagctaacattgtcagaaaacagaagaaaagaacttcttcagaggataattgtggagcttgttgaatttatatctcccaaaaccccccgacctggagaacttggtggaagggtgtctgggtcattggcttggagagtagcccgaggtgaaatgggtctagagagaaaggaaaccctgttcatgccttctgaaaatgaaaaggtctctaagaagtttcacctccgttatgatattgtaaaggaccgttatatccgagtctcagacaagaatgaatacatctctggatgggagaatggtgtgtggaaagtggaatgcatattcagaaaagttgaaacagactggaacatggtgtatttggcccgaaaggaaggatcatcttttgcttatatttcctggaagtttgagtgtgggtcagctggcctgaaaatagataacatttccatcagaacgagtagccaaagctttgagaatggatctgtgaggtggaaactacggtctgatacagctcaagtcaacctgctgggagataaaaatctacgttcctataatgatttttctggtgccacagaagttacgttggaagcagaattgagcagaggacagggagatgttgcttggcaacatacccagctgtttaggcaaagcctaagtgaccatggagaaaatggcttggagataattatagaactcagtgacttctgaaagcctgaacttcagggaaaagttgaccacaatcagggaccggccatagcctccagtagtgtgttagctcagtgcgcatctagttggcagttcacaaccctgaccaacaggtttcttttgctggctatacatcatgtaatcctcattaaaatatatcttcatggtatggaccataagaaatcttcaattaaaaacttacttctatctgtgactagactttggcataagatatttggcataaataaccatatgaaattctaatctaaacactgttagtagggttgtaaaagaaaataatggtattcatgattaaatgctgctcatgactgataaaatctggggctattagtcacttaacattttctgattagatttccctaacatttcttaatttgaattaaatatgaaagttcaagtatctcttttaagtatatgcatgaaggtttcatgattgtaaatgtatggacagtttaaacatataaaa

SEQ ID NO: 3550 - DNA, 1656 bp, Cricetulus griseus
ggccagccgcatctccaccttcctccacatgaatggcatgccaggggagaactctgagccaactcctcgccgctgccccagtccatgcaccaccttcttcagccctcgacgtgaattcacgctcagcccgggtcctcttcctccttgtggtcccacggacacctggtgttcctctacaccatcagctgtatgcagggcggacacaccaccctcactctcatcttcattatcttctacatgacagctgcactgctccaggtgctgattctcctgtacatcgcagactggatggtgcactggatgtgggggcggggcctggacccggacaacttctccatcccatacttgactgctttgggggacctgcttggcactgggctcctagcactcagcttccatgtcctctggctcattggggacagagacacagatgttggggactagcttagccactcagcctctcccccccccccaccctctgcactttctatttggattttttttttttcccttttgtttccctaccccaccctacactacactcccgagtctttctgggggtttcacttttgataccaaattctcattattttcaatgggaatttttatacattgagccaagcttggatagcaaaacttcaggaaggacaggtggactgaaataagcagttaaagtggacttttgagacaatcaccaagtgcaattccatggtgggtgcctccaggtgaggtagactgggacctcggcgttctgtctggcatctggggacctttggattagctttagcaacctcagccttggccctaatgagaaactctttgtaagtgggctctgggttgttttcagtttgattgaacagagagatgagggataattaacactccacacatacttttatagaaatggaccaacttcaaagcactgggcaggagaaagttgcttcagctccaagtaatcacagccctgttgttccaggccaacctgcacacagaatcgggtgaactgactgttctgtctgtgcacatgcgccttgcccaatcgcctgattgctttccagctgaatgagcagtggcctgggctctgcatggatcagtgtcatccataggtttccaacagtccacatgccccctgagtctagagaggttatctagttggaattgtgtcaagcagattaataccaatctgggcttgtttctgctctctcctctggcctaactccaccccaaaacatacacttgtgcaggcatcacacccgagactttgaccccagggtcccccagccacttaccctatcctgatttctggtgttggatcaggtagtctagagactgaagcatccctctccctttgcccagaaagcagaaaggtaggcacacccaggctcagcatgtgagcagaggaggactggagtgagagggaagttgacttcagtagaagagtcatctcttccctctgggttgcacctattgcatgtacttttggcctgaccagaagaaacaaaattggtttactttgatatccttcaaaagttacagaactgtgtcttaagagaattatttatagttactataactgaattgacagatgtcgacttaactgataaattatatttggtaaaataaagtggaagtttatttcgaaaaaaaaaaaaaaaa

SEQ ID NO: 3551 - DNA, 1656 bp, Cricetulus griseus
  modified_base (1588)..(1588): a, c, t, g, unknown or other
ggatgaagttttgggagtgtttatcgagccaaatggatatcacaggacaaggaggtggctgtaaagaagctactcaaaatagagaaagaggctgaaatactgagcgtcctcagtcacaggaacatcatccagttttatggggtgattctggagcccccaactatggcatcgtcacagaatatgcttccctggggtccctgtatgactacattaacagcaacaggagtgaagagatggacatggatcacatcatgacctgggccaccgatgtagccaaagggatgcactacttacacatggaggctccggtcaaggtgatccacagagatctcaagtcaagaaatgtcgttattgctgctgatggagtgtgcatggactgaagacgatgtgttattttttgggttcagcagctcgtcagaaaaggtgactcttcagtagagatgagtgggtatgcaagcttgtttaaggaaaacaacatcacaggcaagcggttgctgcttttggatgaggaagatttgaaagacatgggcattgtctccaaggggcacatcatccattttaagtcagctatcgagaagctggcccacgattacctgaacctgtttcacttcccaccactaattaaggattcaggaggggaacctgaagaaaatgaggaaaaaattgtgaaccttgaacttgtttttggttttcacttgaagccaggaactggcccacaggccattctagactgtattttcctaactcggacggcgaaccctggcagcagatctgactcaagtgcggactgccagtggttagacaccctcgcgcctgcggcagattgcatcccacactactctacagcgttcccagagcaaccccatcctgggtcccctttcttcccatactttgccaaccaggattcctatgctgccgcggtgagacggacccagacgcccgtgaagtaccagcagatcacacccatcaacccttccaggagctcctccccgacacagtacgggctgaccaaaaacttctcctccttgcacctcaactccagggacagtggcttctccagcctcaacaccgacagctcctccgagaggggccgctactcagaccgatgaccgtcgtgtgcccaggaccatccccgggatgcctctgcaccccgaggctgtctccagagcaggcgaagaggagagcagggtgagcgaaggaggctggactaaagtggagtatcggaagaagactcacaggcaacttccggccaaaactagcaaggagagaacgaggggcaactaccgcgggcggaggaacttttgatggcttgagtcagatgggttttccaagccggttctgcggtggttgtgcaatggactttaggataaaggtggtgggggccacagaaaaaccgcatttctagatgaaaacaggatttgtcttatttctctttcatctgaggttccaagatggctcagcaaggcaccgtggcgtgaccctttatttacaatttgggatttgtccatcatgaaattttttgcattgattttttttaacattgtgataaaatatcatttatcttgattgctgagggatttttaaaaangcctcctaaattttgtgcccaaggcaagtgcctcactcatctcaaccctgttagtatttattttagtg

SEQ ID NO: 3552 - DNA, 1656 bp, Cricetulus griseus
gtgtggagaggatgcccaaactgcagggttttgagttttggagccgaaccctgggaggtgcccgacatgtggtggcgcctatggtggaccagagtgagctggcttggagactgctgagccgccgccatggagcccagctttgctacacccctatgctgcacgcccaggtcttcgtgagagatgctaactatcggaaagagaacctgtactgtgaagtgtgccccgaggacaggcctctcattgtgcagttctgtgccaatgacccagaggtgttcgtccaggctgctctcctggcacaagattactgtgatgccattgacctgaatttgggctgtccacagatgatagccaagagaggtcactatggtgcctttctgcaggaggaatgggatcttcttcaaagaatgattctgttggctcatgagagactctctgttcctgtcacttgcaaaatccgagtcttcccagagattgaaaagacagtgaggtacgcccagatgctggagaaggccggctgtcagttgctgactgtgcatgggcgcaccaaggagcagaaggggcccatggccggaacagcctcctgggaacacatcaaggcagttaggaaggctgtgggaatccctgtgtttgcaaatgggaatatccggtgcctgcaggatgtggagcggtgcatccaggacacgggtgtgcaaggggtcatgagtgcagaaggtaaccttcacaatcctgccctgttcgagggccggagccctgctgtgtgggagctggctgaggaatacctggacattgtacaacagcacccttgcccactgtcctacgtccgggctcatctcttcaagctgtggcaccacacgcttcaggtccatcagcagcttcgagaggagctggccaaagtgaagaccctggagggcgtggctgctgtgagccaggcgctaaagcttcggtgccaggaggatatgtccaggcagcaagaaggagtgaggccagctggcaacttggctgctttccactggatctgccagccctacatccggccagggcctaaggaagggagcaaagagaatagtggtggtcgaagcaagcgggctctggaggaagaagagggcagcgtggacggcttgtctaagaataagctgaagaaacagctgaggaaccctcacaaaaccttcgacccttccctgaaacccaaatatgccaagtgtgaccagtgtggaaatccaaagggcaatagatgtgtgtttaacctgtgccgtggctgctgcaagaagcgagcattcagagagacagcagactgcccaggtcatggattgctttttaagaccaaattagagaagtctctggcctggaaagagacccagcctgggctgcaggaacctcagcaggtgaggcccggaacaccaggtggtttctctgaagtcatgggtagtgccctagcctgaaagccagcaagagccatctccaccccaggacagccatcgaagcctagacattcttaaggaaatgcctttactcagggaatctcctatttgacacagaaggacatgtttgtgtcttcaggtggggacctggcaatgttgcaccaaggctaccttggctgaacttgccccattcccacaacttatgtttccagcattgaacaataaaccatttcagaga

SEQ ID NO: 3553 - DNA, 1656 bp, Cricetulus griseus
aggtttggacctcctgcacacagacggttcagcagtggtgccacgtaccccaacatccccctctcttctcccttacccggagtgcccaaacctgtctttgctacagttgatggaccaggaaaagtttgaaaccaaagttaccacgctggacaatgggcttcgtgtggcatctcaaaataagtttggacaattctgtaccgtaggaattcttattaattcaggatcacgatatgaagcgaaatatcttagtggaattgctcattttttggaaaaattggcattttcgtctactgctcgatttgacagcaaagatgaaattctgcttacgctggaaaagcatggtggtatctgtgactgccagacctcaagagacaccaccatgtatgctgtgtctgccgacagcaaaggcttggacactgtggtgggcctgctggctgacgtggttctgcacccctgcctgacagatgaagaaattgagatgacgaggatgactgtccagtttgagcttgaggacctgaacatgagacctgacccagagccactgctcaccgagatgattcatgaagctgcttttagggagaacacagtgggcctgcaccggttttgccctgcagaaaacatagcaaagattgatcgagaagtgctgcattcctacctgaagaactactatacccccgaccgcatggtgcttgctggagtgggagtggagcatgagcacctggtggaatgtgccagaaagtacctcttgggagctcagcctgcctggggagctactggggctgtggatgttgaccgatcagtagcacagtacactggggggatcgtcaaggtggagagagacatgtccaatgtcagccttggtccaaccccaattcctgagctcacgcacatcatggtgggacttgaaagctgttccttcctggaagacgacttcatcccctttgctgttctgaatatgatgatgggtggagggggctccttctcggccggagggcctggcaaaggcatgttctccaggctctacctcaacgtgctcaatcggcatcactggatgtacaatgcaacctcctaccaccacagctatgaagacacaggcctcctatgcattcatgccagtgcagacccaagacaggttcgagaaatggtggaaatcatcacaaaggagtttatcttgatgggcagaacagtggatttggtggagctagaacgagccaagacacagctgatgtccatgctcatgatgaacctggagtccaggcctgtgatctttgaggatgtggggaggcaggtattggctacacattcaagaaagctgccccacgagctgtgcacgctcattcgcaatgtgaagccagaagatatcaagagggttgcttccaagatgctccgtgggaagcctgctgtagctgccttgggtgatttgactgacctgcccacctatgaccacatccaggcagcactggccagcagagatgggcgcctgcctaggacataccggctcttccggtagagtcccttaagggcaggctgaccggtgctgctgtgcatgttgttgttgtggacactgtgtaaggatggctccttctgtaaacagtgccagggagactggaaacgggaatgaacgctcctgttgccactgcacctgtgtgtctcttc

SEQ ID NO: 3554 - DNA, 1656 bp, Cricetulus griseus
ttcacttcgccctccagccgcggtggctgcagcgcagtctctgggtagcggagcggcctcggctgggagcggagcggcggcggcggcggcaacgcccctcaggacacccgcagatctccttttccccgaggcttcgctatggcggactgttgtgtaccgatatgcccacggccaatgtgtatccctccatgctatgctgaccttggcaaagctgccagagatattttcaacaaaggatttggctttgggttggtaaagctggatgtgaaaacaaagtcatgcagcggtgtggaattttcaacatctggttcatctaatacggacactggtaaagtcagtgggaccttggagaccaaatataaatggtgtgagtatggtctgactttcacagaaaaatggaacaccgataacactctggggacagagattgcaattgaagatcagatatgccaaggtttgaagctgacgtttgatactaccttttcaccaaacacaggaaagaaaagtggtaaaatcaagtctgcttacaagagggagtgtataaaccttggctgtgatgttgactttgattttgctggacctgccatccatggctcagctgtctttggttacgagggctggcttgctgggtaccagatgacctttgacagtgccaagtcaaagctgactaggagtaactttgcagtgggctacaggactggggacttccaactacatactaatgtcaataatgggacagaatttggaggatcaatttatcagaaagtatgtgaagattttgacacttcagtaaaccttgcttggacatcaggtaccaactgcactcgttttggcattgcagctaaataccagttggatcctacagcttccatttctgcaaaggtcaacaactctagtttaattggagtgggctatactcagactctgaggcctggtgtgaagcttacactgtctgctctggtagatgggaagagttttaatgctggaggccacaaacttgggcttgccttggaactggaggcttaatccagttgaaagaaacctctgggaacggatatcagaagatttggccttaatatatttccatgtgaccagcaggctccccccttcccccagaaggtgattaaatcaaagggtgattaaacaagagctgtattttaaatatttagacagtttcctgttggctggtttctagtttctagttatcagtgctgctatggtgcagccacctatacattatttaaatgtatttaactgttaaatgtgctacccaccaatgatgaaatagacgtttatgaaaaccgtgccatggtgtgcatgtttgttttatgttcttttaacattgactattgtactgaatgagatggatcagtggatgttttaagatgaggtaaaaaaaatttttttgttatattcagccgtcattagaattactttggtaatcccaaacatgacaaattatgaataaaacaagtgtacataactaatggctccacgtatgtgcagttacagattggccagccaggttctaaccttggtaaatactttcttctggtgagcatttgctctttacctaaatctgtgcaaccaaattcctgtgtccttagcgtaattccacaaggtctttgagactacaataaaatcagaggatacata

SEQ ID NO: 3555 - DNA, 1655 bp, Cricetulus griseus
ggcgggtgcggcgcgatgcgcggatacccgggagtggacggctgcgagccccgatgaagccggagcggccccagcccgatggaggcgcctccgtgggagccggtgcgcaatgactcgctgccgcccacgctgagcccggctgtaccgccctatgtgaagctcggcctcaccgcggtctacaccgccttctacgcgctcctcttcgtgttcatctacgcgcagctctggctggtgctgcgctaccgccacaagcggctcagctaccagagtgtcttcctcttcctctgcctcttctgggcctcgctgcgtactgtgctcttctccttttacttccgagacttcgtggcggccaactcgtttagccccttcgtcttctggctactctactgcttccccgtgtgtctgcaattcttcaccctcacgctcatgaacttatacttcacgcaggtgattttcaaagccaagtcaaaatattctccagaattactcaagtatcggctacctctctatctggcctcacttttcattagccttgttttcctgctggtgaatctgacctgcgctgtgctggtgaagacgggaacctgggaaaggaaggtgatcgtctctgtgagagtggccatcaatgacacactcttcgtgctgtgtgccatctctctctccatctgcctctacaaaatctccaagatgtccctggccaacatctacctggagtcaaagggctcatcagtatgtcaggtaactgctatcggtgtcaccgtcatcttgctctacacctctcgggcctgctacaacctgttcatcttgtcattttctcagatgaagaatgtccactcctttgattatgactggtacaatgtatcagatcaggcagatctgaagagccagctgggtgatgccggctatgtagtgttcggcgtggtgctcttcgtgtgggagctcctacccaccaccttggtggtttacttcttccgagtcagaaaccccacgaaggaccttagcaaccctgggatggtccccagccatggattcagtcccagatcttacttctttgacaacccccgaagatacgacagtgatgatgatcttgcctggaacattgctcctcagggacttcagggaagttttgctccagactactatgattggggacaacaaagtaacagctccctggcacaagcaggacttttgcaacaagactccactttggatccagacaaagcaagccaagggtagcaccagctgactgtcctaaggaagagtcctctgttgaaaaccttcagccagacagactggatgacagctgagtttttaggcacttttcctcatgaaacgggacttcagttttttgctatagctttctcatggctagataggactgagcgataactttagtactagcaaagagcctggctatttcagtgggtataatttaaaattttaaaagagattctgtacttttataaagatgtattttatataacttaaatactaatactaaagtatgctaggtttttccttgattgttattgcgatgtatgttgtagtttgcacagattttcatgcataattcactttaaaacgtatagcatacgtggtctaatagtttaaagcttttggacaaaaagtttcttcaatccttacctctgaaggtc

SEQ ID NO: 3556 - DNA, 1655 bp, Cricetulus griseus
agggtttccttcctgtgctccaatgatgtttcctatgttgtagctcagtgggcctcctggatgagtggtggtgttgctgtcccactctactggaagcaccctgaggctcagctggagtatttcatacaagactcccggagctctgtggtcatggttggccaggagtacttggagcggctaagtccagtggcccagaggctgggagtccctcttctgcctctcacacctgccatctaccatggagcaacagaacagcccatagagcagctgcttcaagagagggaatggcgtgaccagggtgctatgatcatctacaccagtggaaccacagggaggcccaagggtgcactgagcacccaccataacttagcagctgtggtgactggactggtccatgcatgggcatggacaaagaatgatgtgatcctgcatgtcctccctctgcatcatgtccatggcgtgagccacctgtgtgatgctgcctgagttcaatgctcaggaggtttgggaaaagttcttgagttcggaagctccacggattaatgtatttatggcagtgcccacgatctacagcaaactgctggattactatgaccagcatttcacacagccccatgtccaggattttgtgcgtgccgtttgtgaagaaaagattaggctgatggtgtcaggctcagctgccctgcctgtccccctgctggagaagtggaagaacgccacgggccacacactattggagcgctatggcatgacggagattggcatggccctttccaaccccctgacggaggctcgccggccaggttctgtggggaccccactgccaggagtggaagtacgcattgtctcagaaaacccgcagaagggttctccctacatcatccatgcagagggaaatgagagggaaacaaaggtgaccccagggttcgaggaaaaggaaggagagctgctagttaggggaccctctgtgtttcgagaatactgggataagaacaggggacactgccgtgttcaaggatgataggtactggatcagaggtcgtacatcagtggacatcatcaagactggaggctataaagtcagcgccctggagattgagcggcacctgctggccaccccagcatcacagatgtggctgtgattggagttccggatatgacatggggccagcgggtcacagccgtggtggcccttcaagaaggacactcactgtcccacagggatctcaaggagtgggccagaggtgtcctggcaccctatgctgtgccctccgagctcctgctggtggaggagatcccacggaaccagatgggcaaggtgaataagaaggagctactcaggcagttctacccctcgtgaccagaggagccaggggatgatatcaccaaatgaagcttccccctaccctaggctgattgtccaagctcagtgaccttgaccactgtcagtgtcctcggtggtccttgagatcactggagtttgtgtcagtctcacaagcacaataaggacttggccagctctcagtgcccaaggctgcggactgactctactaagggcaggtcccagagagtcagaggtgatgctgaagaaaagagatgaaaataaagactagtcgccctgtaagaaaaaaaaaaaaaaaaaaaaaaaaaaaaaa

SEQ ID NO: 3557 - DNA, 1655 bp, Cricetulus griseus
  modified_base (12)..(12): a, c, t, g, unknown or other
tttttttttaangcaacttctggcagcgggaggggttgacaacaactcttccaataattctaattccagtaatggggactcagattccaacaggcagagtgtctcagagtgcaaagtgtggcgaaatccactaaatttgtttagggggtgctgaatacaatcggtacacttgggtcacaggacgagaacctctgacatactatgacatgaatctgtctgcccaggaccaccagacattctttacgtgtgattcggaccatcttcgtcctgcagatgcaataatgcaaaaagcttggagagagaggaacccacaagccaggatttctgcagctcatgaagccttggagataaacgagtgtgcaactgcgtatattctcctggctgaagaagaagcaacaactattgctgaagcagaaaaactctttaagcaggccctgaaggctggagatggctgctaccgacggtctcaacagcttcagcaccatggctcccagtatgaagctcaacacaggcgagataccaacgtcttggtctatatcaaaagaagactggcaatgtgtgcccgaagacttgggaggaccagagaagcagtcaaaatgatgagagatttaatgaaagaattccccctcctaagcatgttcaatatccatgaaaaccttctagaagcccttctggaactccaagcttatgccgatgtccaggcagtcttagcaaagtatgatgatataagcttaccaaagtcggcaacaatatgctacacagctgccctactcaaagcaagagcagtgtctgacaaattctcacccgaggctgcatctcggcgggggctgagcacagcagagatgaatgcagtagaggccattcacagagctgtggaatttaatccgcacgtgccaaaatatctactagaaatgaaaagcttgatcctcccgccagagcacatcctgaagagaggagacagtgaagcaatagcatatgcattctttcatcttgcacactggaagagggtggaaggggctttgaacctcctgcattgtacgtgggaaggcactttccgcatgatcccttaccccttggagaagggacacctattttatccatacccaatctgtacagaaacagcagaccgggaactgcttccctctttccatgaagtctcagtttaccccaagaaggagctccccttcttcatcctcttcactgctggactgtgttccttcacagccatgctggctctcctgacacatcagttcccagaacttatgggtgtcttcgcaaaagctttcctcagcactttgtttgcccccttgaactttgttatggagaaagtggaaagcatcctcccctccagtttgtggcatcagctgactcggatctgagggggcctcgcatccttcactgtcttcaccatctgccatctcttctgtgccaatgcctcatggaccgcaagaaagcatgtcttcgaaaaagggaaaccattctgagatagtaaactgttcatggactatcagttccatattaaaggctggttttgttgtacaaaatttattgatgttcagttctattttattttgcctccaaaactgaaagaaaaaactaaaaaaaaaaaataaataaacttttgtgtattgcaaaaaaaaaaaaaaaaaaaaaaa

SEQ ID NO: 3558 - DNA, 1654 bp, Cricetulus griseus
agcttagtagcctgggtgcccccctcacagtggggtccagccagggcagaggaggagcatggtgtctatgtgtatgacctgatggctactgtggtacacatcctggactcacgaacaggaggcagcttggtggctcacatcaaagttggcgagacctaccaccaacgcaaggagggcgtgacccaccagcagtggtaccttttcaacgacttccttattgaacctattgataagtatgaagctgtgcagtttgacatgaattggaaagtacctgccatcctgtattacgtcaaaaggaatctcaattccagatacaacctgaacatcaagaaccctattgaggccagtgtgctgctggcagaagcctcgctggcacgaaagcagcggaaaacacatactacctttattccactgatgctgaatgagatgccacaggttggggacctggtgggccttgatgccgagtttgtcactcttaatgaggaagaagcggagttacgaagtgatggtaccaagtctaccattaaaccaagccagatgtcagtagcaaggatcacctgtgttcggggtcaagggcctaatgagggtattcccttcattgatgactacatctctactcaggagcaggtagtagattacttgactcagtactcggggataaagccaggagaccttgatgccaaaatttcctccaagcacctcacaactctcaagtctacctacttaaagcttcgttttctcattgatattggagtcaagtttgtgggtcatggtctgcagaaggacttccgggtcatcaacctcatggtgcccaaggaccaagttcttgacacggtctacctgttccacatgccccggaaacgaatgatctccctgcggtttcttgcttggtactttctagacctgaagattcaaggtgagacccatgacagtattgaggacgcccgcacagcccttcaactgtaccgaaagtacctggaactgagcaagaatgggactgagcctgagtccttccacaaggtgctcaagggtctttatgagaagggccgaaagatggactggaaggtgcctgagcctgaaagccagacaagtcccaagaatacagctgtcttcccctcagtactggcactctgacctgcccttgccattcactcctgtgacacaggacctgagagacggcttctccagtcggctttaccctgtccacgtccagaactggatctgctcagggcctgcagatggtgctgtttacagaactggaaagcagcaaaattgttgcaaatgttctagaagccagattccctctttatcctctgcaaaacagtgggccagaagcaaagcctaaattggcccaggtggaaaacaattgatattcttaatacatattctgggtgattgataactaaacaaaaagctcctagaatcagaaccctcagttcccagacagctagaggaccgaaatcctgggcagtgtcgcacttcaagagatctagacatctcaagcgtcctgctgcttgagagatgatggctgggaaccagcatgtggattcttaatgggccaatcagaccagtgtggaggaagctgagctattggcttcattcccactgacagctgacgagtatctgtcttccatacattctctcttgagttttg

SEQ ID NO: 3559 - DNA, 1654 bp, Cricetulus griseus
tgaaacttgcctcatgacatagtttagcatagtctacttcccagaagatgaaaggatgtgccatagttttctgtctgaacttcccttaaaataatttttaatcaactgtaaatattatacctattgctgttgagagtaacttttagttacattgcaccatgtagcttgaaaacaattgaaattctgtaaaactcccaaagtgacctctgcttaaattttcatatgaaacttactttatgcatgcttcttttttgtgtgctggttgctatcttaaagttttatttttggtgttaggtcttgtggtaagttcactaggcaagcagatagttcctcaaacttcatattatgtttaaaaccacctgccaatcacagccaagactttgaacaccaaaagattcgaccaacaacttagatttggcttgagctttaatatttttggaatatattctttcgcttgaatttcttgtgttttttgaggataaggatgttttatgcttcttgagctaattttataacatttaatatataacctgtttatatgtaaaatcttttgtacaggggtgggtgggtgggaaggagaaatgaaaaaattcatgtgtacatagtgaattataaagcagactgaagtaggtgaaacagtttggattgtacttgttaacggtttccatggaagcaatcagcaatacatgatatgaactgctgcattatatattacccttgtgtaactgagatattttaaacagttaacttttttttttttttttttttttctagtgtaagatacttaagcatttccactattggaagaaaaacatatatgggtattttgtattgtatcttgtttaaaaggacagtcttttttaatcttcccacttagatggcttttaaaaatacataatacaatttgaagcttgtttagaaatagaattaaatgtcatgtatatagtgttactgttttggaattaggaagtgatcaaatataaaacattttaaaattaagcccagaaaacaaaatagtgtttaaagttagtttagtataaaagaaatttataagatttttttcttcaatatagatacctcacttgaaaataaagaaagcacagcacacttaattctcatgaaaacaccctcttaaaataattgttaaatctaggacattgtttgagttgttagaatttgtgataaatatagttgcctttagcttttctgctggaagtacttatattggcaattttaaggcagtgtaatagtcttcaattattcttcagtttctaacctgtgaaggcagtaagtgaatggtcccttctgcaactactgaagcaaattgactatattgaacataattcaactggtaattttgccaatgtgtatagttttatgattaaaattgctgtggttggttgcattacatgacacacaaaactgtcctctacctcacgtgaaataaatattttctatggttttaactaaaaaaaaaagattcatctatctggttacttagtttacaaattttggattatatttattgaaacatgacatactgtgctcttagcttatacctcaattgtattttgtgctgttttccattttcatgccttgtacataacttgtatagattgtggatgatattcccaataaaagcttttaatgccaa

SEQ ID NO: 3560 - DNA, 1653 bp, Cricetulus griseus
gtgggcgaggcggaggagagccgtgcgcagcggcgtgtgtggggccgtgtgcagacccgcgtgtggcgcaggcaaggaccctgaaaataaacagccactgctttgcgagtcgctttcctgggcctgcgtccgagtatccaccgctgtgggcagctcagacgccgaagctcttaactgcagctatgagcagcaacgagtgtttcaagtgtggacgatctggccattgggccagggaatgccctactggcggaggccggggtcgtggaatgagaagccgaggcagaggattccaatttgtttcctcatctcttcctgacatctgttaccgctgtggtgagtctggtcatcttgctaaggattgtgatcttcaggaggatgcctgctataattgcggtagaggtggccacattgccaaggactgcaaggagcccaagagagagcgagagcaatgctgctacaactgtggcaagccagggcatctggctcgtgactgtgaccacgcggatgagcagaagtgctattcttgtggtgaatttggacatattcaaaaagactgcaccaaggtgaagtgctataggtgtggtgaaactggtcatgtagccatcaattgcagcaagacgagtgaagtcaactgttaccgctgtggcgagtcagggcatcttgcacgggaatgcacaattgaggctacagcctaattattttcctttgtcgcccctcctttttctgattgatggttgtattattttctctgaatcctcttcactggccaaaggttggcagatagaggctgttcccaggccagtgagctttacttgcagtgtaaaaggaggaaaggggtggaaaaaaaaccgaatttctgcatttaactacaaaaaaaaagtttatgtttagtttggtagaggtgttatgtataatgctttgttaaagaaccccctttccgtgccactggtgaatagggattaatgaatgggaagagttcagtcagaccaataagcccttctgggtttgagtgtgttcccatgtaggaggtaaaaccaattctggaagtgcctgagcttccataaataacattaatttttagcataatgacggccttggattgtctgacctcagtagctattaagtaacatcaagtaacatctgtatcaggccctcatagaacatacagttgagtgggagagtaaactgaaaagacaaatgtgttgatggctatctatgccagggaaatctggataaaagcctaacacaggagcagcttcatcccatgcatatggtgatggcaaaggtgtagaacacatttttttcaaagactaaatctaaaacccagagtaaacatcactcagagttagcataatttggagctattcaggaattgcagagaaatgcattttcacagaaatcaagatgttatttttgtatactatatcacttagacaactgtgtttcatttgctgtaatcagtttttaaaaagtcagatggaaaaagcaactgaagtcctagaaaaaatagaaaatgtaattttaaactattccaataaagctggaggaggaaggggagtttgactaaagttctttttgttttgttttaaattttcatcattgtatatagaagaaaatgccatattaaagaggggaatgtggaggactgaaaga

SEQ ID NO: 3561 - DNA, 1653 bp, Cricetulus griseus
gaggaagtgcttgggcgtcgcagggccggaggcgcggggatagaaggagcaccatgtccgcggaagttcccgaggcagcgtcggcggaggagcaaaaggaaatggaagataaagtgactagtccagagaaagctgaagaagcaaagttaaaagcaaggtatccacacttgggacaaaagcctggaggttccgattttttaaggaaacgattgcagaaagggcaaaagtattttgattctggggattacaacatggcaaaagcaaagatgaagaacaagcagcttcctgcagcagccccagataagacagaggtcactggtgaccacattcccactccacaggaccttcctcagcggaaaccatccctggttgctagcaagctggctggctgattaaaagagctgaactgcatgagtcttctaatgtcctttatttctccttactacgttacttacccactttctgtttcctttcactcactatgtcatttgagactgacagctttgcaggtagtggtagtatgtgctgctgttgtaagggagcatacatgtgtagaggtttcggttagtttaacagtgcactgatgcaaaggacatgtaacagcaacttaagttacgataattgtacatattacctagctggtatagggctggctccaacaagtagcaagcaagttctacagctttaatgttctggctttccttacttcctcgtaattatagctttgtatgttactcttatttaatagaacctcagttgtattgatttcttctgtattttctttccttttgaattttgtaagacagaagcttaagaccacaagttggaagacaagtcacataattcagacacaagtaaatgggctgcaaaagattttgaataactacttggacttgacggccttaaacctgctgttccagctttaacaagagcatcttacctgggcgatatttgcccgttctgatgtgacttgtgtgactccaatgcttatcagctgtcgttgaagctagtgctcttcctgggttctgcagtgttgggacagctttctttgttgaagacatgaatgggtgtgcatgtgcactgactattgcattcacttttgtgccatttttgtaaatacaatagttttgcacaaccttttacaaatgtctgtattaatttcaccatattagaaagtagataatgtgccaaccagaagcacaagacttcctacacaaatctgcccaccatttctgcttttgtataagaatagtttacaatcatgagcttattagaataccaaactgaaatctactcagcctgatacagaattaagcgttttcatttgttactaatattcatgactttcagtggccttgtacaaatatgatatgttgcttaggcatatcttttgttctatgcagaacatttcattttgactcttacaaaacattacaattcatataatttatataaactttcttaatgtagaaactttttacttccacactcaactttggggatactaaagttaaaggcttgcattctctgccttctatattcttctcaacccccatcttctcttactttgcttctgtgacttgtgttgggctgtcccatttataacagaatatacatgtctatctttactttttaaacttaccttaaaaaaaa

SEQ ID NO: 3562 - DNA, 1652 bp, Cricetulus griseus
agtgagtacacggaggacggacaggtgaagaaggagaccaagtactcctacaacacagagtggaggtcagaaattgtcaacagcagaaactttgaccgagagattggccacaaaaaccccagtgccatggcagtggagtctttcacagcgactgctccctttgtccaaattggcaggtttttcctctcagcaggcctcattgacaagattgacaacttcaagcccctgagcctgtccaagctggaggacccccatgtggacatcattcgccgaggagactttttctaccacagtgaaaaccctaagtacccggaggttggtgatgttcgagtctccttttcttatgcgggactgagcagcgatgaccctgacctgggccccgctcatgtggttactgtgattgcccggcagagaggtgaccagctagtcccatactccaccaagtctggggacacattgctgctcctgcaccatggagacttctcagctgaggaagtgtttcgtagagaacagaagagcaattccatgaagacatggggcctgcgggcagctggctggatggccatgtttatgggcctcaacctcatgacacggatcctctacaccctggtggactggtttcctgtcttccgagacctggtcaacattggcctgaaagcctttgccttctgtgtagccacctcactgaccctgttgactgtggctgctggctggctcttctaccgaccgctgtgggctgccctaattggctgcctggctctggtgcccataatcattgcacggacccgggtgccagccaaaaagctggagtgaagcctcagaggccaggtcccctgtgacctcgttcacttgaaggtgtatttggagtttgtagtcagtgttacaaaaaaaggctggaagttatcctactaagagaggcttattcactgtgacctccagttaactgaaaccaaggcttgctgaaggaaacccacatctggcctggcccaaccttttccccctgaaaatgcttttgaccttgacactccagcctcaagtggttgcagcatagtggttctttttgcatttaatgtccatcactttcctcatcccaaataaaattcacccatactaacggacataatttctaagtttcctctctactattacacctttgtatacaccttagccatgtcatcatagatccttggtttatcctgtatctcaattctatttgcaaactgccctagtggtcgctgtatctagtagctgtgtttggtagctgactaacgtgtcagaaccattgaccctagtgatatataacagtccctctcatgtttgtggtatctatgctttcagctgggtaaaagtgcagccagagatggcttgctgggtttaaggatggagacgatattcattactgctcagtgcatactggtgcagtctcatctaaactccaaaagatggtttgggaaaacatggtacaattagtgattgctaaacacacaatccttgggattcaggttttgtaactcttatatgggttttatttgccagcttaaaagtgttcttataagcaaattatggaagaataatttgatgtctttggaaaaactgaagtttgtattctttgtattaaaatctgaaataaatttctacctatcttttggtat

SEQ ID NO: 3563 - DNA, 1652 bp, Cricetulus griseus
cgggttttgcttctggaatcttccatctgcatgagctcccagagttcaacctcatccactccctgagtatctccgatcagagggttgcttcggttgccatcaacagctctggggactggatcgcctttggctgctcaggcctgggccagctgctggtgtgggaatggcagagtgaatcctatatactcaaagcaacagggccaacttcaacagcatggtatcactggcctactctcctgatgggcagtatatcgtcactggtggggacgatggcaaggtcaaggtgtgggaaacacccgtcagtggcttctgctttgcacttttacggagcactccagcggggtgcagacaggcaggcttcttgatgttctgtctggccatgaggggcccatcagtggtcttttgctttaatccaatgaagtccatcctggccagtgcctcttgggacaagacagtgcgcctgtgggacatgtttgacagttggagaaccaaagagaccttgactttaacctctgatgccctggctgtgactttccggcctgatggtgcagagctggctgtggccacgctgaactcacagatcaccttctgggaccctgagaacgctgtacagatgggttccatcgagggcaggcatgacctcaagaccggcaggaaggagctggacaagatcacagccaaacattcagctaagggcaaggccttcaccaccctgtgttactctgcggatgggcagaacattctggcaggaggcatgtccaagtttgtgtgtctttatcatgtccgggagcagatcctggtgaagaggtttgagctttcctgcaacctctctctggatgccatggaggaatttttgaaccgaagaaagatgacagagtttggcaatttggcactcattgatcaagatgctggggaggagaacggggtcgcagttccgttgccgggtgtaagaaaaggtgatatgagttctagacacttcaagcctgaaatcagggtcacttctctgcgcttctctcccactgggcgctgctgggcggccaccagcacagaagggctcctcatcttctctctggatgcccagatgctcttcgacccatttgagctggacaccagtgtgacacctgggcggatccgtgaggcattacgacagagggagtttacccgggccatcctgatggccttccggctcaatgagaaaaaactggcacaggaggtcctggaggctgtaccacaggatgaaattgatgtggtcagcgcttccctccctgagctgtatgtagagaaggttcttgagttcttagctgcctcctttgaagtgtctaggcaccttgaattctaccttatatggactcagaagttacttatgtcacatggacagcggctgaagcccagggcggggcagttgctgcctgtggtccagttccttcagaaggggctccagcggcatctggatgacgtttccaagctctgtgactggaaccgctacaacatccagtacgctctggcagtttccaagcagcggggtgtaaaacgcaccctggaacctgtagacacagaagaggacacagacgcctctgatgatgacagtctgcacctactcaggggagctgcagatgacgaggaagaagaagaagggatgctggtgtagaacc

SEQ ID NO: 3564 - DNA, 1652 bp, Cricetulus griseus
  modified_base (1636)..(1636): a, c, t, g, unknown or other
  modified_base (1644)..(1644): a, c, t, g, unknown or other
ctgccagaatttttcagggattacttcctggaaggtgaccagcgttggatcaacactgtggctcaggccttgcatcttctcagtactctctatggaccctttcctaactgttatggcattggcagatgtgccaagatgtcatatgatctgtggaggaaactggaggaggaagaggacagtgaaaccaaaggtcgaagaccagagattggacacatctttctcctagacagagacatggactttgtgacagcactttgctcccaagtggtttacgagggcttggtagatgacactttccgaatcaagtgtgggagtgtcgactttggcccagaagtcacatcctctgacaagagcctgaaggtgctactcaatgctgaggacaaggtgttcaacgagatcagaaatgagcacttctccaatgtctttggcttcttgagccagaaggcccggaacttgcaggcccagtatgatcgccggagaggcatggacataaagcagatgaagaacttcgtgtcccaagaactcaagggactaaaacaggagcatcgcctgctgagtctccatattggggcctgtgaatcaatcatgaagaagaaaactaagcaggacttccaggaactaatcaagactgagcatgcgctactggagggcttcaacatccgagagagcaccagctacatcgaagaacacatagaccggcaggtgtcaccaatagaaagccttcgcctcatgtgtcttttgtccatcactgagaatggattgatcccaaaggattacagatccctgaaaacacagtatctgcagagctatggccctgagcacctgctaaccttctccaatctgcgccgagctggacttctaacagagcaggctccgggggacaccctcacagcagtagagaataaagtgagcaagctggtgactgacaaggctgcaggaaagatcactgacgccttcagttctctggccaagaggagcaattttcgtgccatcagcaaaaagctgaatttgatcccacgtgtagatggggagtatgacctgaaagtccctcgagacatggcttatgtcttcagtggtgcctatgtgcctctgagctgccgaatcattgagcaggtgctggagcgacggagctggcagggcctggatgaagtggtacggctgctaaactgcagtgagtttgcattcacagacatggctaaggaagacaaggcttccagcgagtccctgcgcctcattttggtggtgttcttggggggctgtacattctcagagatatcagccctgcggtttctgggcagagagaaagggtacagattcatctttctgacaacagccattacaaacagtgctcgcctcatggaagccatgagtgaggtgaaagcctgaagttttcttggccagttcacacacacacacacacacacacacacacacacacacactcacactatacacatacacacacacatacacacacacacacacacacacacagaattcatgttctgtcccccaggatattattttgtttataaatttagcccatgctgctaagatatgcagggagaggtatcctttgctaaatcctatttgaatattattgtaaataaagcctctgttctcctctctcaaaaanaaaaaaanaaaaaaaa

SEQ ID NO: 3565 - DNA, 1652 bp, Cricetulus griseus
gtgccagcagcgagccggtgtgcggcagcgacgccaagacctataccaacttgtgccagctgcgtgccgccagccgccgctccgagaagcttcgccagccgccggtcatcgtccttgcagcgcggcgcctgcggccaagggcaggaagaccccaacagtttgcgccataaatacaactttattgctgacgtggtggagaagatcgctcctgctgtggttcacattgaactctatcgcaagcttcctttttccaagagggaggtgcccgtggctagtgggtctggattcatcgtgtctgaggatggactgattgtgacaaatgctcacgtggtgaccaacaaaaaccgggtcaaggttgaactgaagaatggagctacctatgaagccaaaatcaaggatgtggatgaaaaggcagacatcgcacttatcaaaattgaccatcagggaaagctgccagtcctgctgcttggtcgttcctcagagctgcggccgggagagtttgtggtagccatcggaagccctttttctcttcaaaatacggtcaccaccgggattgtcagcactactcaacgaggtggcaaagagctggggctccgaaactctgatatggactatattcagacagatgccatcatcaattatggaaactctggaggccccttagtaaacttggatggcgaggtgattggaattaacacactgaaggtgacagcaggcatctcctttgcaattccatcggacaagataaagaaattcctgacagagtcccatgaccgacaggccaaagggaaagccgtcaccaagaagaagtatattggtatccgaatgatgtcgctcacatctagcaaggccaaagagttgaaggaccgccaccgagacttcccagacgtactctctggagcgtatatcattgaagtaattcccgacactccggcagaagccggagggctcaaagaaaatgatgtcatcatcagcatcaatggacagtcagtggtcactgctaatgatgtcagtgatgtcattaaaaaggaaaacaccctgaacatggttgtccgcaggggcaatgaagacattatgcttacagttattcctgaagaaatcgacccataggcagaggcaggaacctgacttcatgttttcctcaaaattctccagtagatgacacatgagaactctgagctggtgacacaggacatccaggacttttgtctgacattttgcttgttcagggaacacccctgccgacagaatcctttttgatagtctgcgggtaaaacaaatgcaatgttgcaggtgcatgggcggaggccccaccctctgtatgctatgtatgcagcgcgctttttcttacaagcttgggctcttcctgcttaaacagtcaacatttgtctcttcccttagcccaagttgtccaactaatgcagttgattggatgcatagataagaggaaggtcctcacagtcatggtcttggacgtgtttacactttcctccaactcggcgcccagaggaagttgatgccctgagaccataggtgggtgaccctggcttctgagatggccaaagatgcctcttaggaatcctggaaccaggagcacaatgactttgagtttcagctattaaagtacttcttcatacttaaaaaaaaaaaaa

SEQ ID NO: 3566 - DNA, 1652 bp, Cricetulus griseus
ccaaaactgcccaggaccggctggccaaactgcaggaggcctactgccagtacctgctctcctatgactccctgtccccccgaggagcaccgacggctggagaaagaggtgctgatggagaaggagatcctagagaagcgcaaagggccattagaggggcacacagagaatgaccaccacaagttccactccctgccccgctttgagcccaaaaatgggctcatccatggcgttactcccaggaacggcttccgtagcaagctcaaggaggtgggccaggccccactcaaaacaggccggcggcgattgttcgctcaaggaaaagagcggtacaaaggaggaggacgaggacaaaggtgtcctcagtgacttccacaagtgcatctaagtaagggaagatcttgtttctactaactaacttttgcaaggagcctgcaccagcagagatcgagcaagagtactggaggttagtggaagagaaggactgtcatgttttggcagttcactgcgggaaagtggacactaacacccacggcagcggcttccccgtggggaaatcagagcccttttcaaggcatggatggaacctcaccgtcctccccaataacacagggtccatcctgcgtcaccttggtgctgtgcctggagtgactattccctggctaaatattggcatggtcttttctacctcatgctggtctcgagaccaaaatcaccttccatatattgactacttacacactggtgctgactgcatttggtattgcattcctgctgaggaggagaacaagctggaagatgtggtccataccctgctgcaggccaatggtaccccgagggctgcagatgctggagagcaatgtcatgatctccccagaggtgctgtgtaaagaggggatcaaggtccacaggactgtgcagcaaagcgggcagtttgttgtctgctttcccgggtcttttgtgtccaaagtatgttgtggctacagcgtctcagagacagtgcactttgctaccacccagtggacaagcatgggcttcgagactgccaaggagatgaagcgccgccacatagctaagccattctccatggagaagttgctctaccagatcgcacaagcagaagctgatgtaccgctatgatgaggagcagatcatcagtttggtcaaccagatatgtggcaaagtgtctggcaaacacactgacattgagaactgtctcaacaaacccacaccaaaaagaggcccccgtaagagagcgactgtggacgtcccgccatctcggctgccatcctcatgaagatgccgaaacccatggtcacttatatattttttgtaattactatattctagtttggagtacttgctgtaggatacaagctgtctttgcactagctctaaagaagaatttcttctggttttagagaactgattttgtttagcattaaactgttgaagttttgacgttagatatctaggtattgcagtcaggtttggaagctgccgtacactcactgtttaaaccttgagggctgtattaatttgtatcgccctcacggctgacaaaagtccttttttttgttttgttttttgtttttgttttgttttgtttggtaacttgttgggaataaaggtctttttaaccatttttgaag

SEQ ID NO: 3567 - DNA, 1651 bp, Cricetulus griseus
gatggaataccagaccctcagcgcacaaaagctgccattgcacacctgcagcagaagatcctaaagctcacagaacagatcaagattgcacaaacagcccgagacgacaacgttgctgaatacttgaagcttgccaacagtgcagacaagcagcaggctgctcgcatcaaacaggtgtttgagaagaaaaaccagaaatctgcacagaccatcctccagctgcagaagaagcttgagcattaccaccgcaagctccgtgaggtggaacagaacggaatcccccggcagcccaaggatgttttcagggacatgcaccagggtctgaaggatgtgggcgccagagggactactccttaataatgcagaccttacaggaagagcggtatagatgtgaacgactagaagagcaactgaacgacctaacagagctccaccagaatgagatcctgaacttaaagcaggagttggccagcatggaagagaaaattgcctatcagtcctatgaacgggcccgggacatccaggaggccctggaggcccgtcagacccgcatctccaagatggagctgcagcagcagcagcagcaggtggtgcagctggaagggctggagaacgccaatgcgcgggctctgctgggcaagttcatcaacgtgatcctggccctcatggccgtgctgctggtgttcgtgtccaccattgccaacttcatcacgcccctcatgaagacacgcctccgtatcaccagcaccgccctcctcgctcctcatcctcttcctcctctggaagcactgggactcgctcacctacctcctggagcatgtgctgctttctctgctactgtttaacaccatctctgggttcggcctgaaggttgctgcagggggcatccaggctggagggagtggagacactcatgaccaaatggaacaggggaagacaccagggctgcattgtttgagttatttatagtcacgtgggacttttctgggctgactggaggatgtcgtaggtcatgaagaccactaagatagaaagccagtctcaatttccctaaggaagagcccatcctggggtggccacagtttcctcccatggagatggtctggatatagccagtgggaggctgtgctcacatgagagtacaggaaggggcgggtccccagccttggggccagacagcaggctcgatgcagccattggtagctcagcctacccttcccctgctcctctccccactgagatgatttgtgattgatttctggaggctgggtgaggcacggctttggattcgtgttttctctgctcatttttctgcctatcactgggtgtgctgctttctgaaaaataggccccaagggccctgagcctctagaccacacccttaggcctctgggatcaagttgagttctatttatttatttacttacttatttatttgttcctatctttccctcgcttctgcccagctgggctccagggagaggacctgcccatcctccctctgaagccagggctcatcacatcacactccagaccatgtatcctctggtgtttctggctggaaaaaagggtatgtggccacccagcccgctctcccaagcagccacaccagatgggcgggaggatcatggcccctttcatatatatatat

SEQ ID NO: 3568 - DNA, 1651 bp, Cricetulus griseus
ggcaattcatggagattttgtagcctgagatgctggctatggagaccgtggtccctgtgtactttgctgtggaggatgaggctctgctgtccatctatgagcagcctctgctgctgaagtgctgctgcacacggccacagccaatggtttccaaatggtaaccagcggagcccagagccaggcggtgagcgactggttgatcaccagcgtagagggacggctgacaggggctggggggtgaggacctccccaccattgtcattgtcgctcactacgatgcctttgggtggccccgtggctgtccctgggtgccgactctaacggcagtggcatctcagtgctgctggagctggctcgcctgttctctcgactctacacgtacaagcgtacacacgcagcgtacaacctcctgttcttcgcatcggagggggcaagttcaactaccagggcaccaagcgctggctggaggacagcttggaccatacagactcaagcctgctgcaggataacgtggcctttgtgctgtgcctggacaccgtgggccgaggcagccacctgcgcctccatgtgtcgaagcctcctcgggaggggacgctgcagcatgccttcctgcgtgagctggagacggtggctgcacaccagttccctgacgtcagcttctccatggtgcacaagaagatcaacctggcggacgatgtgctggcctgggagcacgagcgcttcgccatccgcaggctgcctgccttcacactgtcgcacctggagagccaccgtgcgggaccgcgcagcagcatcatggacgtgcggtcccgggtggattctaagaccctgacacggaacacaaggatcattgccgaggccctaactcgcgtcatctataacctgacagagaaggggacgcccccggacatgccagtgttcacagagcagatggtccagcaggagcagctagactcagttatggactggctcaccaaccaacctcgggctgctcagctgctggacaaggacgggacattcctgagtacgctggagcactttctgagccgctacctgaaggacgtccgacagcaccatgtaaaggctgacaagcgggaccccgagtttgtcttctatgaccagctaaagcaggtgatgaatgcatacagggtcaagccagccatctttgacctgctgctagccgtgtgcattggggcatacctcggcttggcgtacacagccgtccagcacttccatgtgctgtacaagactgtgcagaggctgctgctcaaggccaaggcccagtgacaacagctgtgcaaaggtggcccaggagggaccggcccacacacccatgccgccagactgaagcagagggtttcggtcagtcactaggacacagggacctgcctcttcctgtccatttccttgaacttcctggaggagagccccgcccatctgcagatgaatccactgggacagaacagtcacccgggccacacgcactgaaggcccacatgccatgctggcctctccagtggcccggtcgctgcagcctgtcaccccacggtgaatccattcgattccatagcaatatgacccaggaggtgtcaggcgggtctacagttggcaggttaagaaaataaaagccatattgaaaggaaaaaaaaaa

SEQ ID NO: 3569 - DNA, 1651 bp, Cricetulus griseus
gccctcgcaatgtaactccgaactcgtacgcggagcccttggctgcgccgggaggaggagagcgctataaccggagcgcaggaatgtatatgcaatctgggagtgacttcaactgcggggtgatgaggggctgcgggctcgcgccctcgctttccaagagggatgagggcagcagccccaacctggccctcaacacctacccgtcctacctctcgcagctggactcctggggcgaccccaaagccgcctaccgcctggaacaacctgttggcaggcctctgtcctcctgctcctacccacctagtgtcaaggaggagaatgtctgctgcatgtacagtgcagagaagcgggcgaaaagtgcccccgaggcagctctctattcccaccccctgccggagtcctgtcttggggagcacgaggtacctgtacccagctactatcgcgccagcccgagctactcggcgctggacaaaacgccccactgtgccggggccaacgacttcgaaaccccttttgagcaaagggccagtctcaacccgcgcgcggaacatctggaatcgcctcagcttgggggcaaagtgagttttcctgagacccccaagtccgacagccagacccccagtcccaatgagatcaagaccgagcaaagtctggcgggcccaaaaggcagcccctcggagagcgaaaaggaacgggcaaagaccgcagactccagcccagacacctcggataacgaagctaaagaggagataaaggcagaaaacaccacaggaaattggctgacagcaaagagcggaaggaagaagaggtgcccctatactaaacaccagacgctggaattggagaaagaatttctgttcaatatgtatttgacgcgagagcgccgcctggagattagcaagaccattaaccttacagacagacaagtcaaaatctggtttcaaaatcgcagaatgaaactcaagaaaatgaaccgagagaatcggatccgggaactgacctccaattttaatttcacctgagccagcgtcatctcctccccctccccatctctcctttccccgcccctcctccctttgtgcctggtgatattttttcccctccctgagtataaatgcaacacgcctgcaaaaaagaaaggcaaagacctcagactctccttccaagggacctatggttcgtgcttcatggaggcttccagctaaagcatgagaaatggggtgctgggtttcggggtgttatgtgtgccctcaaagatggggtgggagtgtggctggtgtgtgtgtcagtccctcactcacccacgcactcacacgcagcattctgttctccatgcaaagttaagatcgaatccacccgattataggggaaagaaagggggggaaacaaccagagagggtctcggagagcacagtcagaattgctccctccttgctgcatcccctcccttagaataatagacagtcttgaaagttcgcctagtatttgtgtgtttgtcatagcacccagtgtctagacccaaccctccctgtgtctttccctcccagtggctctgagaatctgcttgaagtatttgtactgctttctgcttttctcccagcaccctgtatctcccatctactaacatctcagaaattccatccagaagaac

SEQ ID NO: 3570 - DNA, 1651 bp, Cricetulus griseus
cgggtccctgtccgtgcggtgcagcaggtcggtaggcgggaaatggcgactggctgaaggagctggttctgttgctgctgagggctaagcgggaaagacaccacctattgcgcactcgggaccattgccggagcctgaggacacttttctgtcgtcacagtgaaggtttacatgtggcacccataaaagatgaagctgagaacacggaaggcttctcagcaacccagtccaatccaaacacagcgcactgccagagcaaaaaggaaatactcagaggttgatgatagcttgccttcaggaggagaaaaaccatcaaagaatgaaactggcttattgtcttcaattaaaaaattcattaaaggaagcacacccaaggaagagagagaaattcctacattgctggggaccataattttctccttttgtcttcaactttttttcaccagtcaaaattaaaatggaacgtcaggctcagattccccaggacaggctgtggaagctgaagagatagtgaagcagcttgacatggaacaggtggattgaaataactaccagcactacgtcagctaatggagcaagcttaccatcaagcatgttccaccactgacagaagaacagctaaataggaaacctgctcttcctttgaaaacaagaagcacaccagagttctccctggtcttagatctggacgaaacactagtgcattgtagtctgaatgagctagaagatgcagcacttacttttccagtccttttccaggatgtcatttatcaggtttatgtgagattaagaccattcttcagggaattccttgaacgaatgtctcagatgtatgagatcattctttttactgcttctaagaaggtgtatgcagacaagttactgaacatactagaccctaaaaagcaactggtcaggcaccggctttttccgagaacattgtgtttgtgtaggttttctccaggaatgaagtattcagcacagtgactatttactttgcatgggctggtagtacctctgttatgctctcggttacaatcagtttaaaactctgtgtaacagtcttggtacctaacagtggctatgcataatcctgtggcacagtacactcccggccaccagtgcagttaatatgctcatagtggttttctatgctatatgaaaatagtcgtcacgccttggttctctaatgcagctaccacaagaggttgatatttttatagtggcgtgtaatctccttttcgaggggggtcttttttagtggaaggtagaatttgtaagagttagtatgctttgcctatattacttgtttactttgtactaacttattgtacaaattacatgcagcttcattttcaaatgaatccttaaaataaggaaatctttttaggaaaatatttaatttttgtatttttgtattttaaaggcgcatgagttgtcagttttcagtgtattaatgaagattttaactttttcatcaggttgagtgttttcttactatattatctgttgtgtatgtagttagcatattgtgtcactgaactgtttaaaaatctagcatgtagagcaagcttgttttgtggaaaatccttattcaattaaaaaaataatcatggcagattttctgacaaaaaaaaaagcaaaagcaaaa

SEQ ID NO: 3571 - DNA, 1651 bp, Cricetulus griseus
gacagcgagaatgacatgggcgagtcaccctcacacccatcatgggaccaagaccgccgctcttcctccaacgagtccttctcctccaatcagagtgctgattcagccccagatgaggagaccctggcacttcgagagttcatgcgcagctatgtagataagatcttctctggaggggaggacttggaccaggaagagaaagccaagtttggagagtactgcagtggtgaagatgggaaaggccgtgaatggttcgcacggtttgtgagtgcacagcgctgcaagtccaagtgtgtatcagagccaaccttctaccgcctcgtgcagtccttcgcagtggtgctgtttgagtgccaccagatggacgactttgggcctgccaagaacctcatgaccatgtgcttcacctactaccacctgggcaaaccgcacctgctcccgacagagcccagggagaagccagctggcagcattgactcctaacctgaagtcagctaacagctggttggcggagaagaaggacattgctgagcggctgctgaagaacacagagaatatgaagggcttcctttgggggactggagaccaagctgaaaggaccactggtcaggaaaaatgaggaagatgaaaacaaacctaaggacagacagctgaagactgtgactgtaatcagccctgaagatgaacagaagggggagaaggtttacctgtacacgcatctgaagcagcagcccatctggcacacgttgaggttctggaatgcagtccttttttgatgctgtccactgtgagaggcggaagcgatctcccaccaccagagggagaaatggtgccacatgacccaggaagagcgggatgacagcctgcggttcaatgagaacatcacctttgggcagctgggcacattcacccacaacatgctggcctttggcctgaacaagaagctatgcagtgacttcctgaagaagcaggctgtgattggcaacctggatgaggagcaatacaagctgctaagtgaccacattgagcaaatggccacagagtaggaggtcaacccatgctgctctcccaggagctgtcaccccagtgatgaccctgcatgacaccagcagcacccagagccactcctggctgccctagaactagcagttaaagactccagaagcctgtctcccctgcctgtgtctgctcccattctatgtacaaggtgtcccttgggttacacaactaaaaatgagggaccatccagggagcctcccggagttggacatttggctgttgagagatactagtctcagacagcaggcatctccacccatggagaatatgtaaggacctggattgtcagctgactaagccagtttccagtgcagtttctatggggactccacctgcacggtctgatctctctcggggttctacacccatttgttgccagaagcccccagtaatgctgtgttttatatgttagttacacaactctttgccctgccaggtcatgttctaaaattaaggttgagaaagttatgaggttgaagatctcaggcagtgctgtttcctgcaaagaaaaaaaaagtagtgtccgtccatatatatagtatccttggcttgtcaggaggtggaaatagaaataaattatctttaaaaagaa

SEQ ID NO: 3572 - DNA, 1650 bp, Cricetulus griseus
ttgctggtcattcccctggagatttggggaccatgttgcgtcctcagaagctggagcctggcgtctgaaacagctgctcagctttgccttaggtggactcctgggcaatgtgtttctacacctgctgccagaggcatgggcctacacctgtagcatcagccccggtggtgaaggacagagtctgcagcagcagcagcagctggggctatgggtcattgctggcttcctgacctttctggcattggagaagatgttcctgaatagcaaggagaaagagggccccagccaggccctcagcaaagaccccactgctgccgcgctcaatggaggccactgtctggcccagccggctgcagagcccggcctgagagccgtggtccggaacctcaaagtcagtggctatctcaacctgctggccaacaccatagacaacttcactcatgggctagctgtggccgccagcttccttgtgagcaaaaagattggacttctaaccaccatggccatcctcctgcatgagatcccccatgaggtgggtgactttgctatcctgctccgggctggctttgaccgatggactgcagccaagctccagttctctacagccctggggggccttctgggggcctgcttcgccatctgtacacaatcccccaaaggagtagaggaaacagtgctctggatcctgccctttacctcgggaggctttctttatattgccctggtcaatgtgttgcctgacctcttggaagaagatgacccgtggcactccctgcagcaggtgctgctgctctgctctggcattgtggtgatggtgctgctttcactcttcgttgaataaccattcctgacatcccactctgcatagcaagcaataagacaaccaacttgtgctgtcactttgtatgtgaggcagagggtgaatgctagagccaacctctcactggacagagagggtgtgtggtgtgtacgcgcagccagatgtgttcgagagagaccgacactgtgatccctgtgtgcagagaccacctcgacagccaaagagaggggaggtgggtgctttgcagccccagccccacacagcactgatgtcctacccctccccagcacccagcaggtagcctctcaaggacctcctcctaggggtggccagtctgggcccatgcttccccagcaaatgctccctggcctcacaggcagctctcaccaaccccaactgccaaacagcagtctgcaaggcagtgagtagtcctcaggctagcagtctcccagtgcagctccagggtgctcctgccagcacagggtccagcagacatacccgggcagggagaacgagccttgctgcccttccctgctcaggcccctagtcctttgggttgagagtaaggtgggggtggtgagggctccacactgtcagtgctcaggaatgtgaactgggagaatgctgaagccataatccccaactgtttcccttggctgatgtccaggtactcagctggcccactcttcagccagactccagccctgctgctccactgtgggtgttagaagtggccactgaaaagtctgagtgattccatagcagttatactgtggttcatctttatctgtaaatacctgttctatagatataaataaattacctagacc

SEQ ID NO: 3573 - DNA, 1650 bp, Cricetulus griseus
  modified_base (175)..(175): a, c, t, g, unknown or other
tgggatcagtacctgtttaaaaacagacctacagatggccctcccaattcattttatagatcattgtacccaaagattatccaggacatagagaccatagaatcaaattggcggtgtggacgacataaacttgcagaggatccagtgccgctctgaaaatgtaaaggtgtttacngtttgcagtacgatgatgacgctctccctccagaacctacacctatatctccagatagcggtctgcactttggcccaatctgggtttcctggtcttgaactactggctacatggctaccacatgcctaagggagttcgttcacagctgagttctggggctggaattggttctagatgctgggtagacacaaagcagccccactcttcaagccccaacgtttctcaccgcccccggctctacttggagaaggacagcttagctcaccaactgcaagtagagcagccgctcatgcccctccctccagtgaagagccccacagcagcagcttctctttagaccttcaggtcatcgtcgttctgacgaacataggaatgtgtcggacaatggacagctctggattattttagtatttttggattacacttcctttctgtaccggtttcttttaaggcacacagaaaggacattggtcaacattgtttccctctttcaagattaggttttgatttgcccctctccattgtttccaaagatcaaggaatgtcagtaccctttcaaaggaccaaccagccctccctgtgaatggagcctcttcccatggaagcacactctaggagagagaaggcctctgggctccacttgtcctggcattgtgaatgctgtggggatcagtgtgtgttggtgatttgtttactgggttgatgttgctttttagttgttggtttcttttccctttctttttttcttttcttttttttaatacatcattctcacatgcttctacatttgtttctgagaggtgggggctcaaatgtatacaaagtagtcccctgtctataaggggagtgtggacacaccactcacagctcatcatccatttgacaggaatgcccaggggatagggagggggaggggaggaagtgaattctgaacaattggacttttctgttgtttttgcatgttaaatatagaagttcgtgtccatccttgggagatcatggccttcaaatatgcacacgacctttgaattgtgcctactaaattatagcaggggacttgggtacccaaggaattccaatttctgggattacagtagtaattcccagttgtactctggactttattttgctaaccgtaattgagcaactgtaaattactgctatattaatgtgttaaagcactggggtagtctaattctaactggtaattaattatgtttgccaattatctgtttgaaataaatatgtgtctgaacagctattgaaactgttaaattgtacagatattatcatgacggctttgtactgtggaatgtgcttaataaaaaagtttgacctttgtccaataaattgctaagtaatgtcagtaaatcaagatgagtattatgcagtacacctggcctggcttcatggcctttgttacttcagctactaattcaaagccaatactctcaataaagtagttgcagtactcc

SEQ ID NO: 3574 - DNA, 1650 bp, Cricetulus griseus
gctcaagaaaggtcaagaagagaaaagacagattctgagcagaaatgtccaccagagaaggaacctgctcgagtaaggctgtttaagcaagaaggcacttgctatcagcaagcaaagcttgtcctgaacacagctgtcccagatcggctgcctgccagagacaaggagatggatgtcatcagggccttcctgaaggaacacatcgtgtgggaaaaaagctggaagtctctacctctctggtgctcctgggactggaaaaactgcctgcttgagccggattctgcaggacctcaagaaggaagtgaaaggctttaaaactatcatgctgaattgcatgtctttgaggagtgcccaggctgtgttcccagctattgctcaggagattggccatgaggaaatgtgcagaccagctgggaaggacttgatgagaaaattggaaaagcatatgaccgctgagaagggccccatgatcgtgttggtgttggacgagatggatcaactggacagcaaagggcaggatgtgttatacacgctgtttgaatggccatggctgagcaattcccgattggtgcttattggtattgctaataccctagatctcacagacagaattctacctcgacttgaagctagagaaaactgtaagccccagctcttgaacttcccaccttataccagaaaccagatagctacaatcttgcaggatagactcaatcaggtgtcaagagagcaggttctggacagtgctgcaattcagttctgtgcccgaaaagtatccgctgtttcgggagacatccgtaaagcactggatgtttgcaggcgagctattgaaattgtggaggcggatgtcaaaagccagacagtcctcaaaccactgtctgaaggtcagtcaccctccgaagcaccggttcccaagcgtgttggccttgctcacatatcccaagtcatttcggaagttgatgggaacaggctaattctgagccaagaaaagacacaagattccttccctctccagcagaagatcttggtttgttctttgctgcttttgaccaggcggctgaaaatcaaagaggtcactctggggaagttatatgaagcctacagtagcgtctgtcgaaaacagcgggtggcagctgtggaccagtctgagtgtttgtccctttcaggacttctggagtccagaggcattttaggattaaagaaaaataaggaaagccgcctgaccaaggtgtctctgaagattgaagaaaaggaaatagagcatgtcctaaaaggcaaagctttcattggtaacatcctcgccgatggactgccatgaatgcttctcttaccctacctgcaagtatccagctggcatttggcagatcagggagtctccattttagttgggtcatttggaaagctatgaccttttttactcggcaccagtaaattttagtgtatgaattcacgaatgttagcactgactaatatctttggttcttactgtttttacccataaaaatgaccaggtaactgggtgtgatggcgtatgcctgtgacccaccacttgggaaacagagacagaaggatcagggggtcaaggccattctttgctacatagcgagtttgtggctggcctggactacataagacactttaaaaacaaaa

SEQ ID NO: 3575 - DNA, 1650 bp, Cricetulus griseus
gctctagtcaatgagttgtacagtctcctgcgtgaccaggatccaattgtggttgtgaactgtctgaggtctctagaagaaattttaaaacaggaaggaggtgttgtcattaataagcccattgcccaccatctcttaaataggatgtcaaaactggatcaatggggccaggctggtggtgatgggagccaccaaactctttctgatcttggcaaaaaaagttcccccatgtacaaaactgatgtgctggtacgagtcaagggacccttgctagctgcctgttcttcagagagccgggagctctgttttgctgctctctgtcatgttcgccaagtcttgcatagtttgccaggtcattttagcagtcactacaaaaagtttttctgctcttactcggagccccactatatcaagctacagaaggtggaagtgctttgtgagctggtgaacgatgagaatgtgcagcaggtgctagaagagcttcaaggctactgcactgacgtgtctgctgactttgcacaggctgccatctttgccataggtagcattgccaagacttacacagagcagtgtgtacagattttaacagagttgctgggcctccgacaagaacacatcactacagtggtggtgcagactttccgagacctggtttggttgtgccctcagtgtactgaagctgtgtgtcaggccctgcctggctgtgaggagaacattcaagacagtgaggggaaacaggcacttatttggttacttggggtccatggggaaaaaatccccaatgctccttatgtgttggaagactttgtagaaaatgtgaagtcagagacatttcctgctgttaagatggagctactgactgcactaatgcgccttttcctctcgcgccctgctgagtgccaagatatgctgggacgtcttttacactactgcatagaggaagaaaaggatatggctgtacgagaccgaggtctcttctattatcgactcctgttagttggtattgatgaagttaagcagatcctgtgtagtcctaaatctgacccttctcttggacttttggaggatcagccagaacgacctgtgaatagttgggcttcagatttcaacacactggtgccagtgtatggcaaagcccactgggcaactatctctaaaagccagaaggtagagcgtcatcgccttgagcttcctaccaatacatccttggccatatcaggtcaattgatttctgaagagaacaaagaaggaatacaagaatctcctgattctgaagctcttatgctggtccccaatctccagcttactgctgagtattttgagaaaacatggcttagcctcaaagttactcatcaacaggtgtttccttggcagggagaagtccagcccgacactctccaaatggctctaaaagtagtgaatgttcagaccatcgcaatgagcaggactggggcacagccctggaaagcctatctcagcgctcaggatgatactggttgtcttttcttaactgaattgctattgaagcctgagaactcagaaatgcaaatctctgtgaaacagagtgaggccaggactgacacactgcatggttttgtttctgtattagaaactgtgattggaacaattggagacataaaatcttaacag

SEQ ID NO: 3576 - DNA, 1650 bp, Cricetulus griseus
cccgggatgcttgaccccactgagcgtcattgcagaggatgggaccatgacacccctctgcggagactggctgcagggtcttcaccgatttgtggcccgggaaaagattatgtgcgcgctgagggaacggggcctgttccggggcctgcaggagcaccccatggtactgcctgtctgcagccgctccggggatgcagtagaatacctgctgaagagccagtggtttgtccgctgccaggaaatgggggaccaagctgccaaggctgtggagtcaggggccctggagctctggccctccttccaccagaagaccctggccagcactggtttgcccacgtggtggcgtggtgtgtcgtggtggggccatcagattccagcctacctggtggttggagagaagggagagggtgacaggaaggaatgctgggcggtcgggcgatcggaggctgaggcccgagaagtagcagcaaaactgaccgggagaccagtggcagagctgaccctggagagggaccctgatgtcctggacacttggttctcttcggctcttttcccttttctgccctgggttggccccaagagacgccagacctcgctcgtttctaccccctttcacttctggaaactggcaagtgacctcctgatgttctgggttggccgcatggtcatgctggggacccagctcacagggcagctccccttcagcaaggtgcttctcaggccaagctgagagatggcaacttggacctgggagagctagccattgcagccgcagcacagaaaaaggactttcctcacgggatccccgagtgtgggacagatgccctgagatttgcactatgctcccatgggatcctggggggcgacctgcacctgtctgtctctgaggtcctgaactaccgccatttctgcaacaagctctggaatgccctgcgctttatcctccgtgccctgggggagaactttgcacctcagccagcagagaaggtgtctccctcctcccccatggacgcctggattctgagccgcttggccttcgcagcccacgaatgtgagaggggcttcctcagccgggagctttcgcttgtcacccacaccctgtatcatttctggctccacaacctctgtgatgtctacctggaagcggtgaagccagtgttgttgaaggaaccctgcccccagggcctcctcaggtcctgttctcctgtgccgatgttggtctgcgcctccacaaaagcccgcccccaagtgctgctccagagcttagacccagaagaccaggacctactccagcccttcctggagcccctgggtaccctgagccactgtggggctgtagggttcctgcccccaggggcagcggctccctcaggctgggccctcgccccactggatgacaccattaagatctacatggagctgcagggcctggtggacccccagagccagctacctcggctagctgcccgaaggcagaagttacaaaaacagcttgatggcctctcgaaccggacttcatcagaggaggctgcagagaggcagcagaggctttctgccctccgcctggaactgtcaaagctggaccaggcagcctcccacctccagcaactgatagaagaggctcccagcgtcagggaactctgagcccca

SEQ ID NO: 3577 - DNA, 1650 bp, Cricetulus griseus
atggaagtagaggagctgagccctatggcccagtcttcctcttccttgactcctgttgaaagggcatctgaagatgatgatggatttgtggacatcctggagagtgatttgaaggatgatgacgtggtcccccaggcatggagaacctctttagtgccccacttgtcaaaaacctaggataaggaagagtcacaggatctcatcatgttcagcaagtgccagcggctcttccgatctccatccatgccgtgcagtgtgatccggcccatcctcaagaggctagaacggccccaggacaaggacacacctgtccagagcaagcgcaggaagagtgtgacacccctggaagagcaacagcctgaagaacctaaggcccgtgtcttccgctcaaagtccctgtgtcatgagattgaaagcatcctggacagtgaccaccgtggactgattggagattactctaaggctttcctcctgcagactgtggatggcaaacaccaagacctcaagtacatctcaccagaaactatggtggccctgttgacaggcaagttcagcaacatggtggagaaatttgtaattgtggactgcagatacccctatgagtatgaaggtggacatatcaagaatgctgtgaacttgcctctggaacgggatgtcgagaccttcttgctgcagcgccccatcaagccttgtagcctggacaagagaatcatccttattttccactgtgaattctcatctgagcgtgggccccgcatgtgccggttcgtcagggaacgggaccgtgcagctaatgactaccccagcctatactaccctgagatgtatatcctcaaaggcggctacaaggaattcttcccacagcatccgaacttttgtgagccccagaactacagacccatgaaccacaaggccttcagggatgagctgaggaccttccgcctcaagacacgcagctgggctggggagcggagccggagggaactctgtagccggctgcaagaccagtgatgcatcctgctgctatccttacctcgtggggcctggtagccagtgggttccatgggcctatgaggccacctacttgctagaggcctcaggtgctattgggtgttggggggatggtgtagtgtcacgtcttgtctgtccctgtccttgattctcctgtcttactccactaatttttccatatcctggtgccagctccatcttgaagagcccagcctgatgggtggataccagctaggaggaagtgctttgtgttcatgggagccttttatagtcttttttccttgtttgtattaactctttgtcttccgacacactgacagctgggtaggctccctcatacatctgggggttggagattcaaatatcgcttactcagtaggcctggcttttgtttgcccagaacgggatcttcttctttaatgcccccaaggcaagggcaaaggcctgattcaggagcctctgggagtcccctccctgctgctggctgctgtgaaccccagagcctcactggtcagagcctgctgctgggcaggacagacactgagcatcccttttgacccttgtctaataaagcctcgtgcaagttgaaaaaaaaaaaaaaaaaaaaaaaaaaaaaaaaaaaaaaaaaaaaaaaaaaaa

SEQ ID NO: 3578 - DNA, 1650 bp, Cricetulus griseus
tggcccttccgtccccctggccgtccctgcccctccttcccctgggccagcgtccgggatgcagacatcagatcgggagctgagtgggccagaggtgagccccagcgtgatgcctgagcttctctctgagtgtccacctgcccccaccaagtcaacagcgtttgatcttttcaacctggttctgtcctacaagaggctggaggtctacctggaacccctgaaggacgcaggtgatggtgttcggtacttgctaaggtggcagatgcctttgtgttccttgatgacctgcttgggcctcaacatcttgttcctcactttgaacgagggtgcctggtactccatgggtgccttgatgatttcggtgcctgccctgttgggctaccttcaggaggtttgccggggcacagctgccagagtctgagctgttgcggaggaagtaccacagcataaggcaggaagacctaacagagagttcggagttcgcctttcccgccctgaggctgtggctgaggtgaagagcttcttgatccaactggaagccttcctgacccgcctgtgttgcacctgtgagtcagcctaccgtgtactacactgggagaaccccatggtgtcctcacagttctatggcgcacttctgggcatggtttgcatgctctacctactgcctctctgctgggtccttgcccttttaaacagcaccctctttctgggaaacgtggaattcttccgagtggtgtctgagtatagggcttgcctacagcggcggatgaaccccaagcaggaagagcatgcctgtgagagctcagcactgcaggacgctggcggaaggagtaccctgctggacagcacaccagcccctacacccacagaggacctcacgccaggcagtgtggaagaagctgaggaggctgagccagatgaagagttcaaagatgcaattgaggagggaggatgatgagggcacccgtgcccagcagaggatgagctggccctacaggacaatgggttcctcagcaagaatgaggtgctgcgcagcaaggtgtcacggcttacagaacggctccgcaagcgttatcccaccaacaactttgggaactgtgcaggctgcgctgccaccttctcagtgctgaagaagaggcggagctgcagcaactgtggtaacagcttctgctctcggtgctgctccttcaaggtgcccaagtcctccatgggggccacagctcctgaagcccagagagagactgtgtttgtgtgtgcctcctgtaatcagaccttgagcaagtgagaagagaagccaggctccctctgtcctggggccagcagtagaccccactctcccaaccctggtcctctgaggcgtgtgctgggcaaacgtagcctgacagctagatccttcctacccttcccctgctgcctccagctgggctggtgatgctctaaggcccaaggggagaggaacccttggagctcccttcagggctgttcctggagaacagtggccaattgtgggataaggtcccatggtcatttttatgttctctctgatctgctaagggggctctgtgcctcttcttaagccatgagctggctcaggccccctccctaggagctgattttaactttttttttttttttttttttttaaggtat

SEQ ID NO: 3579 - DNA, 1650 bp, Cricetulus griseus
gcggagccgtgctgtctcggctttcaagctgcgcggcttgctgctcaggggtgaagccactaagtatctcactgaagctctaacgtctgtcactgaattagagcttgaagagaccctagaaaagatcatcgatgcagttagaaaagcagcccttgtcatcaaatatgatcgaacgatctgtagtggaagcggcagtccaggagtgcagtcagtcggttgatgagactatagagcatattttcaatatcattggagcttttgatattccacattttgtatacaactcaagaaagaaaaaaagtttcttcctctatcaatgactaatcatgctgcaccaaccttatttggaacagcaagagataaagctgaactgtatcgtgaacgatatacaattttacaccagaggacacacagacatgagttatttactcccccggtgataggctcacaccccgaggaaagcggaagcaaattccagcttaaaacgatagaaactttattgggcagtacagccaaagttggtgatgtgattgtccttggaatgataacccagttgaaagaggggaagtttttcctggaagatcctactggaacagtacagctggatcttagtaaagctcagttccacagcggcttatacactgaggcgtgctttgtcctggctgaaggttggtttgaagatcaagtgtttcatgtcaatgcctttgggtttccacccactgagccctctagtaccacaagggcgtactatggaaatattaatttttttggagggccttctaatgcatccgtgaagacttctgcaaaattgagacagctggaagatgagaacaaggacgccatgtttgtgtttgtatctgatgtgtggttggaccaagtgcaagtgttggagaagcttcacataatgttttctggttattcaccagcacctccaacctgctttattctgtgtggtaatttttcatctgcaccatatggaaaaaatcaagtccaggctttaaaagactccctaaagtctttggcagacataatatgtgaatatccaagtatccaccaaagtagccgttttgtatttgtacctggtccagaggaccctgggtttggttccatcttaccaaggccaccgcttgctgagagcatcacgcaggaattcagacagagggtaccgttttcagttttcacgactaatccttgcagaattcagtactgtacacaagaaattattatctttcgtgaagacttagtgaataaaatgtgtagaaactgtgtgcgttttcctagtagcaatttggatattcctactcattttgtgaagactgtcttatctcagggacatctgactcctctgcctctctatgtgtgccccgtccactggacgtatgattacactttgagagtgtaccctgtgcctgatctgctggtcattgcagacaagtatgatcctttcaccgtgacaaacactgagtgcctctgcataaaccctggctcttttccaagaagtggatttgcattcaaagttttttacccttccagtaagacagtggaagatagcaaacttcagggcttttgagactcaggagaataaatgaaatttcttattttaatcttgtgtaatatgtatattaaattgtaataaagttatggtaaacc

SEQ ID NO: 3580 - DNA, 1649 bp, Cricetulus griseus
agccctccgcggttatggccacggttcgggagaaggcggcggcgctgaacttgtcggctctgcacagccccgcacagaagcctccgggtttcagtgtggcccaaaagccatttggggccacatatgtgtggagcagcattataaatactcttcaaacccaagtggaagtgaagaaacggagacaccacttaaaacggcataatgactgcttcattggctcagaagctgtggacgtcatttactctcacttaacgcagaataaattcttcggtgatgtcgatattcctcgggccaaagtagtgagagtgtgtcaagcacttatggactacaaagtatttgaagcagttccaaccagagtctttggaaaagacaaaaagcctccatttgaagacagcagttgcagcctttatagattcacaacaatacctggtcagaacagtcaatcaggcaatgagaacaaagtagactcgccttccaggtactccgatacattatttcagtcacctgagatcaagtcggacagtttggaggacctgtgggaaaatctgagtttaaagcctgccaactccccacatataaatatctctaccagactgtctcctcaagttattaatgaagtatggcaagaagagacgattggccgtctactacaacttgtcgaccttccatttcttgactccttactcaaacagcaagaggttgtacctaaagtccctcggtctaagaaacagcctgacatggtcaacaccagtaactatctggaccgagggattctcagggcctatggtgactctcaagaagatgaatgggtctctgcagccattgactgcttggagtatcttccagaccacatggttgtggacataagcagaaattttcctgagcaaccagacagaacagacttagtgaaggaacttctgttcgatgctattggcaaatattatagtactagagagcctctgttaaaccacctgtgtgatgttcataatggaatagcagaactccttgtaaatgggaagacagaaatagcattagaagctactcagctgtttctgaagcttctggattcccaaaatagagaagaatttagaagactgctttacttcatggctgttgctgcacatccttcagaatttaaattacaggaagaaagtgacaatcggatggttgtgaagagggtattctcaaaagctgttgtcaacaataaaaacttatccaaaggcaaaactgatcttcttgtactcttcttaatggatcaccaaaagacgttttcaagattcctgcaactctacataaaattgttagtgttaagcttctggccatacaaaaaggaagagatcctaataaagacacaggctatatttattgccagagaattgatgaaagtgactattctggcagcaaacagaagaaaaccaaagaggaattgttgaacttactaaagactattgatgaagactcaaaactctctgccaaagagaagaagaaattgctaggccaattccataagtgtcatccagacatcttcactgagtattttggaaactgagtttctaatgtctgtgtgtatgtgcactgtgtatttaagggctaagttatgtagcctaaagattatttttaagcttggatgtccaaatatgaagttatac

SEQ ID NO: 3581 - DNA, 1649 bp, Cricetulus griseus
  modified_base (133)..(133): a, c, t, g, unknown or other
ctatgtcatcatggactatatcggagttggtttcttcattgcttaaaatgaggcattttttgccatctctggaaatttgcctgtaattcattttcctcactgcagtattgacagttataccaaattgaaaagntatgaatgaatatacctaaaaaaagaaaaggaagactttacacccttctcgttattcagattcttctggaataagcagaatcacagatgggatcagtgggatcttttctgaccattgttacagtgtctgctctatgagacagccagatttaaaatattttgacaacaaagatgatgattctgatcctgagacatcaaatgacttgcccaagtttacagatggaaccaaaggcagaaataggaatcagaactacctggtccccagccctgtgcttagaattctagaccacactgtcttttccacagaaaagtctgctgatgttgaaatctgtgatgaagaatgtgactcccctgagtcagtgcatctgcaaactcaagaagagagccctatagaggttcacacctcagaggacgtccccattgctgtagaagttcatgcgatttctgaagactatgatatagagacagagaacaattcctccgagagcctccaagaccagactgatgaagaaccaccagctaaactctgtaaaatacttgacaagagccaagctttgaatgtgactgcccaacagaagtggcctttactgagagccaatagcagtggcctctacaagtgtgaactttgtgaattcaacagtaagtatttttctgacctaaagcagcatatgatcctgaagcacaagcgcactgactcaaatgtgtgtcgagtgtgtaaggaaagcttttccaccaatatgcttctcattgagcatgccaaacttcatgaagaagatccctacatctgtaagtactgtgactataagacagtgatcttcgagaacctcagtcagcacattgcagatacccacttcagcgaccacctttactggtgcgagcagtgtgatgtgcagttctcctcaagtagtgagctctacctgcacttccaggagcacagccgtgatgagcaatacctgtgccagttctgtgagcatgagacaggtgaccctgaggacctgcatagccacgtggtcaatgagcatgctcgaagactgatagagctaagtgacaagtgcagcagtggtgggcacggacagtgcagccttttaagcaagatcacctttgacaaatgtaaaaactttttgtgtgtcaagtatgtggatttcgaagcagacttcacaccaacgtgaacagacatgttgctattgagcatactaaaatattccctcatgtctgtgatgactgtgggaagggtttttccagcatgttagaatattgcaagcatctaaattcacatttatctgaagggatttatttatgtcaatattgtgaatattcaacaggacaaattgaagatcttaaaattcatcttgatttcaaacattcagctgacttgcctcataaatgtagtgactgcctgatgaggtttgggaatgaaagggaattaatcagtcaccttccagtccatgagactacctgactgttatccttatataatgtttatgtaaaataataaattctttttttaatgttaaaaa

SEQ ID NO: 3582 - DNA, 1649 bp, Cricetulus griseus
aattaacttttttttttttcttttttgagtattcgagcccagccacccgggtgcgatcaggaatgaagcttgacagcgctgaggaggaatcgcgaggcgtcccctccccgctcgcagaggggtctccctcgaccctcgaacttgctttctccaagattctgcacggcctgagccgcccagagtcaggtcagggcaacgcaaggactgccgtcctccaagacctgggtgctttaatagaagccgccgaatgtgatgaattgtgcgaggggactaggagtggtgactcactccgggggatgcccgagatcctgggacaggtggcgaaggccctggagaagctcgcagccccacccaaggagaaggcagagggaggcgatgggcattccgaagtggctgggaaagcaactgaagtcgggttactctttcttaagctgctgggcaaggttgaggctgccaagagttctcccgcctgccctgcgtggaagacaggcctccgccacttggcaggacccgcgtatgtttttgccaccacacacaggctgaagcagccgtggaccagtccaagatctcagcgcgtggctgatgaggtgctgtccttactgcttcgagttactgagtgcagttccgtggcaggattcctgtgcggagagaatgaagatgatcgagggagatttgctgtggtcttggggcttcttaaaccccatctgaataaggaatcctggaagaataatcctgctgtcaaacatgttttctcttggagcctgcaacaagtcactcagccctggctgagccagcacctggagaaaatacttcctccatctttgctcatctcagatgattatcagactgagaataaaatcctgggtgtacagtgcctccatcacattgtgattaacgtgccagctgctgatttgctgcagtacaacagagcccaggtcctataccatgcccttttcaatcacttgtacatgccagagcaccacctcattcaggctgtgctcctgtgcctcctagatttgttccctgtcctagaaaaaggtctgcactggaagggagatgcagttcgagccactacacactgtcatgacgtactacaactgatactcacccacatggagccagagcatcgccttctcttacgtaggacttacgccagaaacctgccagcttttgtgaggaagttggggatcctcactgtccggcacttgaagaggctggagccagtcatcattggttatctggaggtttatgatggaccagaagaagaaactaggttgaagatattggaaaccctgaaacttgtcatgcagtatgcttggcccagaattccctgcagagttgtggttttgctgaaggctctcctgaaactaatatgtgatgtagcaagggacacaagcctcacaactgaggccactaagtgcaccctgctccaagaagccacagactgcctgattcttttggaccactgttctcaggggcaggtgaaggttcttctgtctaaaattgtcctatcctgtgaagaccgcacagtggtgaactgcatcaggagagtgcagcagagctctgcagctgttccctgtgatgactcttagataaggaaccagcaagaaagggcgcttttcctatcccagatcatatggatggagtta

SEQ ID NO: 3583 - DNA, 1649 bp, Cricetulus griseus
cgctgtgtttggagtcatggcagtaccatttgtggaagactgggacttggtgcaaactttgggagaaggtgcctatggagaagttcaacttgctgtgaatagaataactgaagaggctgttgcagtgaaaattgtagacatgaagcgggccatagactgtccagaaaatattaagaaagagatctgtatcaataagatgttaaatcatgagaatgtagtgaaattctatggtcacaggagggaaggcaatatccagtatctatttctggagtactgcagtggaggagagctttttgatagaatagagccagacataggcatgcctgaacaggatgctcagcgattctttcatcaactcatggcgggggtggtttatctgcatggaattgggataactcacagggatattaaaccagaaaacctcctcttggatgaaagggataacctcaaaatctctgactttggcttggcaacagtgttccggcataataatcgtgaacgcttactgaacaagatgtgtggtactttaccttatgttgctccagagcttctaaagagaaaagaatttcatgcggaaccagttgatgtttggtcctgtggaatagtacttactgcaatgttggctggagaaaaaacctatctcaatccttggaaaaaattgattctgctcctctggctttgcttcataaaattctagttgagaatccgtcagcaaggattactatcccagacattaaaaagatagatggtacaacaaaccacttaacagaggagcaaagaggcctcgagccacttcaggtggtatgccagagtcttctagtggattctctaagcagattcattccaatttggacttttctcctgtaaataatgcttccagtgaagaaaatgtgaagtattctagttcccagccagagccaccgacagggctttccttgtgggacactggtccctcatatgttgacaaacttgtacaaggcatcagtttctcacagcctacatgccctgatcatatgcttgtaaacagtcagttactcggtacccctggatcctcacagaacccctggcagcgcttggtcaaaagaatgacacgcttcttcaccaaattggatgcagacaaatcttaccagtgcctgaaagagacctttgagaagttgggctatcagtggaagaagagttgtatgaatcaggttactgtatcaacaactgatagaagaaacaataagttgattttcaaaataaatttggtagaaatggatgagaagatactggttgacttccggctttcaaagggtgatggattagagttcaagagacacttcctgaagatcaaagggaaactcggtgatattgtgagcagccagaaggtttggtttcctgctacatgatgaagctgtcaactctggggtttcctggtgaatatagtgctgctatgttgacattattcttcctagagaagattgtcctgcaaactgcaaacaatagttttttgaagagttctcttcctattacccaaacatcttccaattcttagtatgttttgcatacatataatactgtatcttaattgtatgtaatactttggggaaaggatggatcaaattcattgggtatttctccagctgtgtttaaattgtctgaatttgaaa

SEQ ID NO: 3584 - DNA, 1648 bp, Cricetulus griseus
ggctggcccgccggcgctcggaagtagaggcgcttccgtcgttgttcttgaagctgtggtgactgtgggatcagaatctttgagtgtgagaaattttacagttagccaaaatggctgaaaatggagataatgaaaaaatggctgctctggaagccaaaatctgtcatcaaattgagtattactttggagacttcaatttgccacgagacaaatttttaaaggaacagatcaaattggatgaaggctgggtgcctttggacataatgataaaattcaacaggctaaaccggctgacaacagactttaatgtgattgttcaagcactgagcaaatctaaggcaaaactcatggaagtgagtgcagataaaactaaaatcagaagatctccaagcagaccccttccagaagtgacggatgagtataagaatgatgtaaaaaacagatctgtttatattaaaggcttccccactgatgcaactcttgatgacataaaagaatggctagatgataaaggtcaaatactgaatattcagatgagacgaacattgcacaaaacatttaaggggtcaatatttgctgtgtttgatagtattcagtctgcaaagaagtttgtggatacccctggccagaagtacaaagacacaagcctgctaatactctttaaggaagattactttgcaaagaaaaatgaagaaagaaagcagagcaaagtggaggctaaattaaaagctaaacaggaacatgaaggaagacacaagtcaggaagtactgaaacacgacctctagaaggaaagatgggatgcttactgaagttttcaggtgacttggatgaccagacctgtagagaagatttacacatcctgttttcaaatcacggtgaaataaaatggattgactttgtcaggggagcaaaagagggaataattctctttaaagaaaaagctaaggaagcacttgagaaagccagaagtgctcataatggtaacctacaattaaggaacaaaaaggtgacttggaaagtactagaaggccatgcagaaaaagacgcaatgaaaaaaatcatggaggatcagcaagaatcactaaacaaatggaagtcaaaaggaggaggaggaggaggccgaagatttaaaggaaccgaagatttaaaggaaaaggaaaggggaacagacctccctatggtggggcacccaaaggaagaggacagtttcagggaaggagaacaagattcgatgatgatgatcaccatcatcatcgacgaggaccaatgaaaagaggaagagacggaagagacagagaagaacctgcatcaaagcataagaaaagagagaacggtgctagagacaagtagtttagtaagcaatgtttttattcatcttagttagattttaagctgctttttgtcttcggaagcttttaaaaagaaaagcgaattaggtccacttcaatgtccacctgtataaaagaaaaaatttttgttttacttgtcttctttttgttgttacccaaatgaaagttttttaaaatgtatagttctgtttgtgtttggatgattcaaatatgaaaaggaagattcttcctcttaattgcctttgtaatatgagaatgtattagtacaaacttgtaaaatatatgctgtataaaaata

SEQ ID NO: 3585 - DNA, 1648 bp, Cricetulus griseus
agattgttgaagctaaaagagatgtttaactcaaagtttgggtccacacccaagttttatgttcgagccccaggaagagtcaacataataggagaacacatcgattactgtggatactcagttcttcccatggctgtggaacaagacatgctaatagctgtggaacctgtgaaaacacatactctccagctggccaatacaaaccccttatatccagatttcagtactagtgctaataacatctatattgacaagaccaaacctctatggcacaactacttcctatgtggatttaaaggaatccaggaacactttggtcttagtaagctgactggaatgaattgcctggtagatggaaatatccccccaggttcgggcctctccagctccagtgctctggtctgctgtgctgggctagtgactctcacagtgttgggaatgagtctatccaaggtggaacttgcagaaatctgtgccaagagtgagcgttacataggcactgaaggaggaggcatggaccagtccatatcatttcttgcagaagaaggaactgccaagttaatagagtttagtcctctgagagcaactgatgtaaaactccctagtggagcagtctttgtgattgccaacagctgcgtggagatgaacaaggcagccacttcccatttcaacgtcagagtgatggagtgtcggctggctgcaaaggtccttgctaaacacaaagggttgcaatgggataaagtcctacggctagaagaagtgcaaaccaaactaggagtaagtctggaagaaatgctgttggttacagaggatgcacttcatgctgaaccctatagcagggaggagatctgcaggtgcctgggaattagcctggaggaactccgcacccaaatcctgagtccaaatactcaagacgagctcaccttcaagctctaccagcgggcaaagcatgtgtacagtgaggctgcgcgtgtgctgcaatttaagcaggtgtgcgaagaagcacccgacaatgcggtccagctgctgggagagctgatgaaccagagccacagaagctgccgggacatgtatgagtgcagctgccctgagctggaccagctggtggacatctgccggaagtttggggccaaaggttcacgactcactggagcaggctggggaggctgcacagtgtctatagtgcccactgatgtgctgtccagcttcctcacaaacgtgcatgaagcttattaccagaggaacagttccagcttggctctggagaagcacagcttgtttgctaccaaacctggaggtggggccttggttttccttgaggcctaaacaaacaatgtaaaacatctcggagaaactatttggggcatttaggagctggcgagacgtctgggctgcagtaaatcagtcccttttctgttttgttatgaggagcgattgctattatcaagatgcattttctaacagtgaaagctatgcttcataatgactgcttttctctcttaaatgtgtttttatgaatcacagccaaggatatgcttaggtagaactctaaagtacgactgagatttattgatttgaagattttaaagatgaatagcaaaatgtactttcaattgaacactgctacaattaaactgatgcagctgaa

SEQ ID NO: 3586 - DNA, 1648 bp, Cricetulus griseus
acaggaggcggatacgaaagtgacgatgcgtatcataacgccgagctgtctttcttagacattcataatattcatgttatgcgtgaatctttaaagaaagtgaaagacattgtttatcctaacattgaagaatctcattggttgtccagtttggagtctactcattggttagaacatattaagcttgtcctgacaggagccattcaagttgcagacaaagtttctggaagagctcagtgcttgtgcactgcagtgatggatggggacaggactgctcagctgacatccctggccatgctgatgctggacagtttcacaggagtattgaaggcttgaatattggtacagaaagagtggataagttcggacataaattcgcatctagaataggtcatggtgaataaaatacatgctgatgctgattatataaagaggctcgaggaattgcaccttgccaactctgccaagctttctgaccctcctgcttctccttccagtccctcacaggtgatgccccatatgcaaactcacttctgagaggatcactgccactgcacttgagctctagataagtgaaatagttgactttcattttgggcatgtgtacagagtagatttaaaaatacttgcctccatttagaagttgaactaacatcttagactcttgagtatgtgccttctattatatatattacaagaaatctacggtgtctgtgtggcaatccggagaaaggaatcaagagggggttctttgaaacattattttaaatccagatggggagggatgtgtttgtaaaatggattttcctccagctgcttacgacagttgctttggattatctaaaatgaatccaaatgtgaaagatgggtattactgccaaagccaaaattgcactccgattcctccgcagattccaagagcgaggcgttgaaataattgccagttttataccatcataagtggtaatgtaaaaaaaaagatgagcatttcatcattttgaatttttgaaattttgaaaataaaaggttctcccatcatttttttcaagagaaacatatttttatattaaaaagtgatatgatttgatttttctccttaactttgcaagctctgctttctaaattctcccatgagctggtctaacactgagtcatactcaggttgaggcaaaacccatgtatagcactgtgtgagtgtgcgtgcataaaaactggttctgcacattattacttgaagtactgggcagtttgctttgtcaggtgttttcattttgttttgtagtatgaagtgaaattttcaatgcacagttctatttgatatctgaactaattcatttagtaaatatatttgtaaaagctaaagctagagttaaagcaattaatgttttacagtgatttgtaaagattatttatagctaatatggttttgttttcaatgaattaagagattaaatttatctttgtaaattattttatgtcacagcttactggtctaccaaataagacatctcaatatagtagtgtgatgtatggattttgtaagtataaaaaagtttattagacattcttttgctttttgtaaacgctgtaaatatttcataaattaaaagtatcactccaaaaaaagaaataaactaataactaatag

SEQ ID NO: 3587 - DNA, 1648 bp, Cricetulus griseus
gaatgtacccatcttccacatacctgggcgtaccttccctgttgacatcctcttcagcaagaccccgcaggaagattatgttggaggctgcagtgaaacagtccttgcaggtgcacttgtctggggcccctggggacatccttatcttcatgcctggtcaagaggacattgaggtgacctctgaccagattgtggaacacctggaagaactggagaatgcacctgccttggctgtgctgcccatctactcccagttgccttctgacctccaggccaaaatacttcctacgaaggctccagatggcgtccggaagtgtatcgttgctaccaacattgctgagacatctctgactgttgatggcatcatgtttgttatcgactctggctactgcaagttaaaggtcttcaaccccaggattggcatggatgctctgcagatttacccaattagccaggccaatgccaaccagaggtcagggagagctggcaggacgggcccaggtcagtgtttcagactctatactcagagtgcttacaagaatgagctcctgaccaccactgtgcctgagatccagaggaccaaccttgccaacgtagtgctgctgctcaagtccctgggagtgcaggacctcctgcagtttcacttcatggatccacccccagaggacaacatgctcaactccatgtatcagctctggatcctcggagccctggataacacaggtggtctcacttccacggggcggctgatggtggagttcccactggacccggccctctccaagatgctcattgtgtcttgtgacatgggctgcagctctgagatcctgctcatcgtctccatgctttcagttcctgccatcttctacaggcccaagggcagagaggaggagagtgatcaaatccgagagaagtttgctgtccctgaaagtgaccatctgacttacctgaatgtctacctgcagtggaagaacaataattactctaccatctggtgcaatgaccatttcatccatgccaaggccatgcggaaggttcgggaggtgcgggcccagctcaaggatatcatggtgcaacagcggatgagcctggcctcgtgtggcactgactgggacattgtcagaaaatgtatctgtgctgcctatttccaccaggcagccaaactcaaggggattggggaatatgtgaatatccgcacagggatgccctgccatttacaccccaccagctccctctttggaatgggctacacccccgactacattgtgtatcacgagctggtcatgaccaccaaggagtacatgcagtgtgtgaccgcagtggacggagagtggctggcggagctgggccccatgttctacagtgtgaagcaggccggcaaatctcgacaggagaatcgtcgtcgggctaaagaggaagcctctgccatggaggaggagatggccctggccgaggagcagctgcgtgcccggcggcaggagcaggagaagcgcagcccactgggcagtgtcaggtccacaaagatctacactccaggccggaaagagcagggggagcccatgacacctcgtcgcacaccagcccgctttggactgtgagaagaggctgttgcaggaggatggcagccaggtactgagctctaagctct

SEQ ID NO: 3588 - DNA, 1648 bp, Cricetulus griseus
  modified_base (1022)..(1022): a, c, t, g, unknown or other
acagcttcaatggccatggctaccaccttttccaggccatgcgtttcagcattgaggagataaacaactccacagccttgcttcccaacatctccctggggtatgagctgttcgatgtgtgctcagagtctgccaatgtgtatgccacactgagggtgctcgcccagcgggggacgggccacctagagatgcagagagatcttcacaactattcctccaaggtggtggcacttatcgggcctgacaacactgaccatgctgtcaccactgcttccctgctgggccccttcctgatgcccatggtaagcaggccgtgtacgctgtggcccatggcctccaccacgctcctgggatgtacctctgagacctgttccaggggcccagtctacccctggcagcttctgcagcagatctacaaaggtgaatttccttctgcagaaggatacagtggcgtttgatgacaatggggaccctctaggtggctataacatcatctcctgggactggaatgggcctgaatggacttttgaggtcattggctctgcttcagtgtctccagttcagctagacataaataagacgaaaatccagttggcatggaaagaacaaccaggtgcctacatctgtgtgtaccacaagactgtctcaccattgttgcttcgagtgcattccctgtgaggctgggacctttctcaacaagagtgatctccacatctgccagccctgtgcaaaagaagaatgggcacccgagggaagcacgacttgcttcccacgcaccgtggagttcttggcttggcaggagcccatctctctggtgctactaacagctaacacactactgctgctgctgctggttgggaccactggcctgtttgcaaggcatctccacacgcctgtggtgaggtcagccgggggcaggctgtgcttcctcatgctgggctccctggcctgcggggagttgcagcttctatggcttcttcggggagcccacggtgcccacatgcttgctgcggcagcccctnttttctctcggttttgccgtcttcctctcctgcctgacaatccgctccttccaactggtcatcatcttcaagttctccaccaaggtaccccacattctaccacacctgggcccaaaaccacggtgccggtctgtctgtcactgccagctccacggtccacttgctcatctgtgtcctatggcttgcagtgtcggaccccactcgcccaccagggaataccagcgcttcccccatctggtgattctcgagtgcacagaggtcaactctgcgggcttcctgctggcgttcacccacaacatcctcctctccgtcagcacctttgcctgcagctacctgggtaaggagctgccggagaactataacgaagccaaatgtgtcaccttcagcctgcttctcaacttcgtatcctggatcgccttcttcaccacgtccatcatttaccagggcagctacttgccggccgtctatgtgatggccgggctggccactctgagtggcggcttcagcggttacttcctccccaagtgctatgtgattctctgccgcccggacctcaacaacgccgaacactttcaggcctccattctggactacacgaggcgcagcggctctacctgaccctgggg

SEQ ID NO: 3589 - DNA, 1647 bp, Cricetulus griseus
agctgtcagatggcaccttctctgtcacatcggcctactcaagtgctgcagatggcagtcctccccctgtacccctgctggcctctgaaatcactatggagatgatcccaggccagctttctcctggtgccgccgagacacccttactcctcatggactatgaagccacgagatccaaagagtctgttccctcccctttctggccccccactagcccagaaggatgggactcctccagaggatgctggcagccctccagctgtggatgtgatcccggtggacatgatctcactagccaagcagatcatcgaagccacaccagagcggattaaacgagaggacttctcggggttacctgaagctggagcctcactgagggagcagacaggcaccgttgggctcagtgagaccatgtcctggctagccagttacctggagaatgtggaccatttccccagctcagcccctactagtgaactgccctttgagcgaggacgtctagctatccctccaacaccttcctgggcagagttcctctctgcttctaccagtggcaagatggagagtgactttgccctgctgacactctcagatcatgagcagcgggaactctatgaggcagcacgagtcatccagacagccttcgaagtacaagggccgaaggctcagagccgcagagcggctgtacttatccagcagcactaccgctcctaccgccgcaggccagggcctgctcaaccggccctccagggcccccctaaccggccccggaaacaaaggggctcctttctcaccaagaagcaggaccaggcagcccggaaaatcatgaggttcctgcggcgctgccgacacagaatgagggaattgaaacagaaccaggagctggaagggctgccccagccaggactggccacctgacctctccaccgcctttctccacaccctgggggcccccgggctgtcttaaccaggagaaggctttcgggactaggggagccccctgtcggcagctttttctccttcacctttttgggagcccttcgtagaaccccggcccttcccccagccttagtcctacacttttcctcccttctggtcgtgcctcctggtttggtccctggctccagaagacccatgcctgcatcttcagctgtgacctacggagccctgcctgcaccttctccataaccccgctcctgcctgcacctgattcggaccttcctgacttgccttatttatttgttcgacgagtctatgatgaatgtatccgcctcggtccccaccgctgccttcgctgcgcgcgccctcgtgtttcaggggtgactgccccaccctgactccgcatgtttgcgtctgtttcctcctttcctggccctgtcttccccatcaccctgactctggtcacccacctcgggttccaaagaggagggggtgtacataggatcgcgaggcggagtcccgctcccgtggggaggggtttgtacatactgtaacatacagagtatagtgaagaatctatttaaggcgctgcgcggccgggcgtctggttccctggcgcggcgggggcccccggctggctccacgagcactttctacttgtgcatgggcttggtttatacgaactgccattaaacatctctgcaacca

SEQ ID NO: 3590 - DNA, 1647 bp, Cricetulus griseus
ggagagctacagacgccgggacagggaccgtcgccgccgccgccaccatgagcgatcagcaactggactgtgccttggacctaatgaggcgcctgcctccacaacagatcgagaaaaacctcagtgacctgatcgacctggtccccagtctgtgtgaagatctcttgtcttctgttgaccaaccactgaaaattgccagagacaaggtggtgggcaaggattacctcttatgcgactacaacagagatggggactcctataggtcaccgtggagtaacaagtatgatcctcctttggaagatggggccatgccttctgctcgactgagaaagctggaggtggaggccaacaatgccttcgaccaataccgagacctgtattttgaaggtggtgtctcatctgtctacctctgggatcttgatcacggctttgctggagtgatcctcataaagaaggctggagacgggtcaaagaagatcaaaggctgctgggactccatccatgtggtcgaagtgcaggagaagtccagtggccggaccgcccattacaagttgacctccacagtgatgctgtggctgcagaccaacaaatccggctccggcaccatgaacctgggaggcagcctgaccagacagatggagaaagatgaaaccgtgagtgactgctccccacacatagccaacatcgggcgcctggtggaggacatggaaaataaaatcagaagtacactgaatgagatctactttggaaaaacaaaggatatcgtcaatgggctgaggtctcttgacgctatccctgacaaccacaagtttaagcagttgcagagggagctttctcaagtgctgacccagcgccaggtctacatccagcctgataattgagccgatccaggtctgtgcagacatttgcagacaaatcaaagcaggaagctctcaagaacgacctggtggaggccttgaagagaaagcagcagtgttaaaacctctgcttcgcgctaactggacacgccatgcactcgttagattcctttcttagaaactcgttttctgctccttttcccttttcctctccctccctgatgggtcacataacagtttgcatcgaccgcgcagcgccatcgctccccaagaataaagcccgataaccaccttcctctggctccaaggcccacttactgcgaagtttccatagagaccgtatggtttttgttcgccttggccccgtcttcctcccctctcccatttataagcataaatacactgtcagccactgcgccctccatctttttgttacattggtgtaaaaaatgtaaaacaaaaaattttatgaactaactggtgtgtgaaagagaagaaaaactggaaatctgattccatgtgtgtttgggagttgcttggagtgggggccggggggacaggggacagctttgaaggaccaagagatgtcttcagcactgtcctgcgcagatgtgcccatcccaaggagaccacagtgagggtgggggctggcaaccggctgctcttctggccaggtgcttttctgtcaatttttatggaatgcaaaaggagtttttgttttgttttttttttttttgtaaagcttaaacaaacaaaaaatctacatcttctacttgagcctccatactta

SEQ ID NO: 3591 - DNA, 1647 bp, Cricetulus griseus
cagatacaatactagatgtacgatctcaacgggtaaggtcattacttggactgtctaattcagaaccaaatggatccatagaagcaaagaatttagaacagatcctgaatggtggtgaatctcctaaacaaaaaggacaagaaatcaaaaggccctctggtgatgttcttgagacattcaatttcttagaaaatgctgatgacagcgatgaagaagaaaatgacatgattgagggcatcccagaaggaaaagacaagcttcggatcaataagcacaaaataggtaatgaaggtttagctgctgacttaactgatgatcctgatactgaggaagcaactaaaagaattacgactttttagtgactgcagaagatggcgaaggagccggtgaagcgacggagttcgaggggatggtacagaatgggatgctgaaccaataacgtttccatctggaggaggcaagtcatttattatgggttctgatgatgttttgttaagtgtactgggccttggagaccttgcagacttgacggtaacaaatgatgcagactatagttatgatttgccggccaataaagatgcctttcgaaagacttggaaccccaagtatacactacgtagtcattttgatggagtgagagcattagcttttcatcctgtagaacctgtgctggttactgcctctgaggaccacaccctgaaactttggaatttgcaaaagacagttcctgccaaaaagagtgcctctttagatgtagaacctatctatacatttagggcccacattggccctgttctttcattagctattagttctaatggagaacagtgttttagtggtggtattgatgcaaccattcagtggtggaatatgcctagtcctaacgtggatccctatgatacatatgagtcaaatgttttagctggcactttagttgctcatacagatgcagtctggggtcttgcctatagtggcataaaaaatcagttactgtcttgttcagcagatggcactattaggttatggaatccacaagaaaaattgccatgtatttgcacttacaatggagataaggaacatggaatacctacatcagttgactttaataaggctgtgatccagctcatattggtgatgtctttcctcacaggtagtatttcttgggtttaactaatctaagcaatcactattaacaaagtagtaagtcatcccacacttcctgttacaataactgctcatgaagatagacacatcaaagttttttgacaataaaacaggtaaaatgatccattctatggtagctcatttggatgctgttacaagtttagcagtagatcccaatggaatctatttgatgtctggaagccatgactgctccattagattatggaatttggacagtaagacatgtgtacaagaaataacagctcataggaagaaattggatgagtcaatttatgatgttgctttccatccatcaaaggcatatatcgccagtgcaggagctgatgcccttgccaaagtatttgtgtgaaccaacagagactcacatcatgaaaaaaagattttcttggtcagaaagggggtctgtctgcatcactgccatcaagaaggttactgatatgacactacatgtgatctgcctgg

SEQ ID NO: 3592 - DNA, 1647 bp, Cricetulus griseus
ctgtgccttgcaaaagaagtaaaggaattggttcatttggtttttttcttctcccttgaaagacaatttcatgctaatgaaaaatacacaaaggaatcagacattcagaggagtccaagatctactcgggaaggagctgtgttctgatgtcttgtctgtaatggcaacggtgctttgtaccctgaatcgcccagggcatcctagcttgtgctgagcaaaggggctgtgaacctgagacttcagtctgctgcacctgtgaccaccctcactcacctctagctgatccagagctcacggcttgggctcaggcccatggctcaaattctgctgagaatgtgtctagggtgatgacttcagcctctacagtaaggactggactggtcctggaaatctagggaggagatatctgtccaggcaacccttgcccttggtggcagacctaggcaggcaggtattacacctgcaagttctgcccaggcctagaagtggttctcctctcccatggctttgccaaagactttttaatagcattttttaagtgcaaagtgaataggtaaaacgtttttatcagtgaccaaattagaatgtatttaatatggtaggagatttaaaagcattttttaatataagacaaactggtagaaaagctctatcattttaaagaaagtggatcctcaacattccgcagctagcccactacttaataaggtaactattgacctggttttagtgactattttgtttttaattatagtgataatgatttattagctcagtacctagatcatgtgtattttgtgctactgttaccatggtttaagattgtttgttttcatatttatgcacttgtttcccatattagcctttggtctctgtggtaacaggacaatgtttgtgattgatatctcatctggatattttcaagttgtgacagttaagcattaagctttagattgtgtataaactactctggtgaactcctctggggctaacattccaggctggggcttggggcagctatgggactgccgtgtgatggctaggaaggcagtgcccactgggccatcctgtgaggggagctttcttgacatctgctcttctggaatcaggctgggctctgaggacaggtgtgcacaggaagaccaaagaaggggctacttctccctccatcccagacctcctgtgagctctaggatctatgctggctgggaacggctaaggaggaggagagatggttttgaggcctgtatgtgggtaatggaggtgggcccctgggtctaggaactgaggttcaccattgtcctgttgctgattgtcttttaactctctagtgttaagtattaacagtaaatgatggtgtcagagttttgtgtacttggttggcagaccttccccagtatggatgcgcatgtggattaacttatggaagcctctgtgtgcatttgttttcaaaaactagttgagaatgttatgtgaatggaatcttcttaatccagaaggtcatatttataatacatacccatttacttagtgaattgtttaaagttgttaacatttgtttaaattttttactatagcatttatgcaatggtttacagaattcatggagttattttttatcagtatgagattaattaaaactttgaa

SEQ ID NO: 3593 - DNA, 1647 bp, Cricetulus griseus
cttaaggaaagactgaagcataaagattctcttctggctactggagtgtccagccgagtaggtggcctctgtttgaaatgtgcccagcatgaggctgttctttcccagacccatagcaacgtgcatatccaggccatcgagacaatgactaaagaacgggatgacttaatgtctgcactagtgtctgtgcggagcagcttggcagaagtgcagcagagagagacaagtgcctataaacaggtgaagcatgctgtgcagatgaccgaggaagccaactttgagaagaccaaggctttgatccagtgtgagcagctgaagagtgagctggacaggcagacagaaagactggaaaaggagcttgctgctcagcaagagaaacgggctttggagaaggagatgataaagaaagaagtaaccaaggagagggaagatgcagagtcaaagatgttgatcctgtctcagaatattgccaagctggaggcccaggtagaaactgttacaagggaaaagatttcagctgtcaatcaactagaagaaattcagaaccagcttgcttctcaagaagtggatgtcagaaaggtgtgtggagaaatgcgatttcagctgaataaaaccaaaatggagaaggaggaggcagaaaaggagcacagagaatacaaagcaaaatctcaaaaggatcttgaaatgaaagatcaggaaatagagaaattgagactagaactgagcgagagcaagcagcacgtggagcaagaacagcagaaggcagcccgggccagagaggagtgcctgcaagtgacagagctgctgggcgaatccgagcgccaactgcacctcaccagactggaaaaagatagcattcagcaaagcctcagtaatgaagcaaaggcccaagcccttcaggcccagcagagagagcaggagctgacacagaagatagagcaaatggaggcccagcacgacaaaactgaaaatgaacagtatttgttgctgacatcccagaatacgtttctgacaaagctaaaggaagagtgctgcacgttagccaagaagctggagaaaatgtcacaaaaaagcaggtcagaaatagttcgactcagtcaagagaaaatgtatatgtgtgacaagctggagaagatacagaagagaaatgatgaattggaggaacagtgcatccagcacgggagagtgcatgagtcgatgaaggaaagactcagacagctggacaagcatggccaggccacagcccagcagctggtgcagttgctcaacaagcagaatcagcttctcctggagcgacagagcctgtcagaggaggtggaccgtctgcgagcccagttacccagcatgccacaatctgattgctgacctggatgaaacagagtgaaataaatgatttacaaagagatatttacattcatctgatttgtacttaatgtgccacagtgcaccaaaacctccccagggagacaccacctgggactgcaggggggctggtcctcatgccatggttctgcccctgtgctacagacagggagtgcttcagcatgaactggcttgggctagttggagtgtgctcaaaacagcttcaagtcactgatttatgttgtctctactctagagtatacacgggattaataaaaatgacct

SEQ ID NO: 3594 - DNA, 1646 bp, Cricetulus griseus
gaccatgagctgcagccggcactggggggaatggttcctgaacctgcgggtgccgccggccggcgtgttcggcgtggccttcctggcccgggtcgcgctggtcttctacggcgtcttccaggaccgcactctgctggtgcggtacaccgacgtggactaccacgtgttcacggacgcggcgcgcttcgtctcggaagggcgctccccgtacctgagggccacgtaccgctacaccccgctgctgagctggctgctcacgcccaacgtctacctcagcgagctcttcggcaagttcctcttcatcagctgcgacctcctcaccgccttcctcctgtaccgcctgctgctgctcagggggctggggcgccgccgggcctgcggctactgcgtcttctggctgctcttcgtagccgtggcgggactcacgtttttcgccctgagcttcggcttctactacaaatacggttgggagtttctggagcacacctacttctatcacctgaccaggcgggatatccgccacaacttctctccctacttctacatgctgtatttgactgccgagagcaagtggagtttcaccctggggcttgccgcattcctgccacagttcatcttgctttctgccgtgtcttttgcctactacagagatcttgtcttttgctgtttccttcacacgtccatttttgtgacttttaacaaagtttgcacctctcagtacttcctttggtacctctgccttctgccactggtgatgccactagtgagaatgccttggaaaagggccatagttctcttgatgttgtggttcatagggcaggccttatggctgactcctgcgtacgttctagagtttcaaggaaagaacaccttcctgtttatttggttagctggtttgttctttcttctgatcaactgttccatactgattcagattatctcccattacaaggaggaccggcacctaatagagaggatcaaatatgactagcgtgtgttctggatctcctgcaacttcttcctccctgaacattctaaggactctggtgaaaagttcccttgttccaatagaaattaaaaccagtgttggccttaaatgtaaaggggacccaataatcgaggtccatcctttagaaagtcttaggactcattcgtttgatgagaagtaaaggtttcttgtttgacagttgaagagccgatgaaactagaagatgctaaaatgtttttgtacaacagagaaacagacatgtttcctagcagtgtttgttcctgttacagtgtaccgccattgtaccttccgccctcaccttgtctttctgcaattctgacagctgtgagaatttacagagttcctaaagtacaacatgttcacatataaagctggtcacaattaaaagttctattactgatggcttttctttgctgggttccttttgggatttggccttagcaagaagactaggtggcttttctgtgactgtgtaagaaaagcagtcagttgtagaaaacagtgactttcgctaaaacatcaagttccatattcctcactagcttgtaacttaacagctcattgtttaaggctgtttaagtagtggctttccaattacctcacatgaacctttaaaattattgtgggtattgaaacc

SEQ ID NO: 3595 - DNA, 1646 bp, Cricetulus griseus
  modified_base (50)..(50): a, c, t, g, unknown or other
aggaattgattctcttctcaaattcagacaatgagagatctataccatcncttgtggatggcttcaaaccaggccaacgaaaagttttgtttacctgtttcaagaggaatgataaacgtgaagtaaaagtcgcccagctggctggatctgttgctgaaatgtctgcctatcatcatggagaacaagcattgatgatgactattgtaaatttggctcagaattttgtgggcagtaacaacattaacttgcttcagcccattggtcagtttggaactcggcttcatggtggcaaagatgctgcaagccctcgttatattttcacaatgttaagctctctggcaagactgctttttccagctgtggatgataacttgcttaagttcctttatgatgataatcagcgtgtagagcccgagtggtatatccccataatccctatggttttgattaatggtgcagatgccagtagaaaattgactgaagaagaagaagggtgatcctgataccccagtagtgaaagtagaatttgatgaagaatttagtggaacaccagtagaaggtacaggagaagagacattgaccccatcagctcctgtaaataaaggtcccaaacccaaaagggagaaaaaggagcctggtaccagggttagaaaaacacccacatcagctggtaaaccgaatgcaaagaaagtgaagaaacggaacccttggtcagatgatgagtccaagtcagagagtgacttggaagaaacagaacctgtggttattccaagagattctctgctccggagagcagctgctgaaagacctaagtacacctttgatttctcagaagaggaggaggaggatgctgatgatgatgatgacaataatgatttagaagaactgaaagttaaggcatctcccataacaaatgatggggaagatgaatttgttccttcagatggcttagataaaaaagtcaggattttgggaatctctttcatttccttcatattctcagaagtcagaagatgattcagctaaatttgatagtaatgaggaagatactgcttctgttttacaccatcatttggtctgaagcaaacagataaagttccaagtaaaacagttgctgctaaaaggtaaccaccttcagatacagcccctaaggccaagagagcacctaaacaagaagaaagttgtagagactgtaaactctgactcagattctgaatttggcattccaaagaagactacaacaccaaaaggtaaaagggccgaagggggccaagaaaggaaagcatcaggctcagaaaatgaaggtgattataaccctgggaggaaaccatctaaaacagccagcaagaaaccgaagaaaacatcttttgatcaggattcagatgtagacatctttccctcagacttcacttctgaaccacctgctctgccacggactggtcggggctaggaaagaagtaaaatattttgcagaatctgatgaagaagaagatgttgattttgcaatgtttaattaagtgcccaaagagcacgaacatttttcaaaaatatcttgtgttgtcctttgtcttttctgtctcagaattttgtacatctggcttatttaatgtgatgatgtaattgattggttttttattattgtggta

SEQ ID NO: 3596 - DNA, 1646 bp, Cricetulus griseus
tggaaaaaaggaaatataatccaacttctcaccatacagcaacagatcacatccccgaaaagaagttcaaatctgaagctctcctgtccaccctcacgtctgatgcttctaaggagagcacactgggttgccgaaataataattccacagcttcctccaacaatgcttacaatgtgaattcatcccaacccctggcatcctataacattggttcattatcttcagggactggtgcaggggcaatcaccatggcagcagctcaagcagtgcaagcaacagcacagatgaaagaaggacgaagaacatcaagtttaaaagccagttatgaagcgtttaagaataatgactttcagctgggaaaggaattttcaatgcccagagaaacagctggctattcctcctcatcggcactcatgacaaccttaacccagaatgccagttcctcagcagctgactcgagaagtggcaggaagagcaaaaacaacaccaagtcttcaagccagcagtcatcttcctcctcttcctcctcttcctcttcttccttatctttatgttcgtcatcttcaactgtagtacaagaagtctcccagcaagcaacagtagtgcccgaatctgattccaacagtcaagttgactggacctatgacccaaatgaacctcggtactgcatctgcaatcaggtatcctatggtgagatggtgggatgtgataaccaagattgtccaatagagtggttccactatgggtgtgttggcttgacagaagcgccgaaagggaagtggtactgcccacagtgcaccgctgccatgaagagaagaggcagtcggcacaaatagagtgcttccccggaggaaggaaaaactgcagcttggcattttattcaggactctagaaagaaagacacgagaaagaagaaacaactcatttccaggcaaccacttaaaggatttacatagacaatcctataagatcttgaacttgaattttatgagttgtattttaataatgtaagtaaattatttatgcactcctggtgtgctatgaatattattccagttagccttggattatttctgtggccaacatatgcagacatttgtactcctcaaccattttctcaaagtaatgggcattctataatttagacttcaaagaattccaacgatgaagattttaagaaagtattttatattcaacaggtatattctgctgcatgtactgtactccagagctgttatgttacactgtatataaatggttgacaaaaaaaaaaaacaaaaaacaaaaaacaaaaaaaaagcaagctttgaggtcaagcattgagtatctcaccaactatatataaagaaatgtgccaaacttttacattaaatatttagaaacaagtagaacctgtcactaaattatatagctgtgtatatgtgtatgtacatacatacatatatggctaaacatagaactacctcattaaagcaatatggccagcaattattattctttgttacatttacaccaaggacataatctttgttgtacaaaatttgtgttacagtgggtggcacaaaaggcccaagtgtgagttcacagtttctaggtggtgaaaaaaggaggccttatgctgtagtgtatatttaaatgttcatggt

SEQ ID NO: 3597 - DNA, 1646 bp, Cricetulus griseus
ctggcagcaggctggggaccctgtgaggttctggtgagcaatgcactggcacagctcagctacaacaaacagaacttctccttctgccgtgaactcaacatcagcatctgcccagtcagccagaagtcagagaacttccaggtaactatttacaaccccctgggccggaaggtgaaacacatggtccggctgccagtcagtgaaggcatcttctttgtgaaggatccacatggaaagactgtgcccagtaatgtggtaatgcttcccagctcctacggtaagacgtcccggtgggatctgctgttctcagcctcagtgcctgccctgggcttcagtatgtactctgtggccaaggtgactgtccgtacacccccaggcctccagcctttcgggcaagtccaggaaatccaggtcccatgtattgtccattgaaaatgagtatatccgggctacatttaactctgacacagggttattgatgatgattgaaaacatggaacagaccctctcgctccctgtgaagcaaggcttcttttggtacagtgccaacatcggtgatgaggagagttctcaggcctctggtgcctacatcttcagacccaaacattctaaaccaatgcctgtaagccgttgggctgagatccatctggtgaagacagccttggtgcaggaggtacaccagaatttttcatcctggtgttctcaagtgattcgcctgtacccaggacagcgtcacttggagctggagtggatggtgggaccaatcccaatgcaagatttcggggggaaggaggtcatcagccgctttgacaccccgatgaaaacaaagggagagttctacactgacagcaacggcagggaattcctgaagaggaggcatgactatcgacccacttggaaattaaatcagactgaacccgtggctggaaattactatcctgtcaacactcgaatctacatctcggatggacacatgcagctgaccgtggtgactgaccgctcccaggggggcagcagtctgaaggatggctcactggaactcatggtgcaccgacggctattggcagatgatgggagaggagtggaggaggccctgatagagtcaggggctgcgagtacggtgcgagggcgccactttgtgcttttgagttctgttagtgatgcagctgcaaggcaccgactgctggcggaggaggtggtcctggcccctcaggtggtgctggctcagggtggcagtccatattattcctgggcagcacccaggacacagttctccggacttcgccaggacctccctccccaagtgcatctgctcacactggcccgctggggaccaaagaagctgttgctgcgcttggaacatcaattcactgtgacagaagattcaggccgcaacctgagctcccctgtaaccttgaacttgcagaacctgttccgggcctttactatcacccagctgcaggagaccacactggcagccaaccagcccctgtccaaggcttccaggctgaagtggatgacagacactggtcccgtctcctatcctgctccttccaagttggaccctacctcaatcacactgaatcctatggaaatacgtacctttgtggtctgggttcaatggcaagaatccagctaggcctgcc

SEQ ID NO: 3598 - DNA, 1645 bp, Cricetulus griseus
ggaggcggcaacattgtttcaagttggataaaattgtcaagggctgagctttgcttgcgttccatccagagctggggctgcggtgctcaccttggcccccaggtcctccgccccgagtgttgggcccgctttcttcagggttcccgggccccgctcccgggggcctgagccgccgcactagtgctccatggagaacttccaaaaggtggagaagatcggagagggcacgtacggagtggtgtacaaagccaaaaacaagttgacgggagaagtggtggcgcttaagaaaatccggctcgacactgaaactgaaggtgtgcccagtactgccatccgagagatctctctgcttaaggaacttaatcaccctaatattgtcaagctgctagatgtcatccacacggaaaataagctttacttggtttttgaatttctgcaccaggacctcaagaaatttatggatgcctctgctgtcactggcattcctcttcccctcatcaagagctatttgttccagctgctccagggcctagcattctgccattctcaccgggtcctgcaccgagaccttaagccccagaatctgcttatcaatgcagaggggtccatcaagttggcagactttggactagcaagagcctttggagtccctgttcgtacttatactcatgaggtggtgaccctgtggtaccgagcacctgaaatccttctaggctgcaagtactactccacagccgtggatatctggagtctgggctgcatctttgctgaaatggtgacccggcgggccctgtttcccggagattctgagatcgaccaactcttccggatcttccgaactctggggacccctgatgaggtggtttggccgggagtcacttctatgcctgattataagccgagtttcccgaagtgggctcggcaagattttagcaaagttgtgcctccactggatgaagatgggcggagcttgttatcgcaaatgctgcactatgaccccaacaagcggatttcagccaaagcagccctggcccaccctttcttccaggatgtgactaagccagtaccccaccttcggctgtgatgtccttcccaaagccttcctcacccttggtctgacttgactctgggccttttggacacaggtcagccttctactcttttctggctgtcttagcactcactttttctcttggccagccagttcccgggactcagaggtgcagggaaagatgaggtgacaggaaaaagttttggtatcagatgcacttaacccagcttccactaccttctctccctcttagtcatcactgagggttggtatgcaaaacaaaactttgaaaggctttgacctggtcaggtcatcgggggacattttctataaaagagtttaacaattatatttatatttcaagttatagtagtttggatattttagtgtagtgatttgattgtttgttttttggggggccggggcagtgtggatggatttgttgccatgtgcactttggaattttgtaatgcaattgttgaaagaaaatatttcttttatgatcttctccctctaccccttgtcctccagtgttctgttaatattatttgtaatttagtttgtaattcattaaaagaaattattctcagttgt

SEQ ID NO: 3599 - DNA, 1645 bp, Cricetulus griseus
gagctatgagcttcagtgaaaagcaccagaagttagtagacgaaaacttccgcaaatcgttgcatgtccaagtcttgaataagttagaagaggcaaaccaagaatcaggtcgtgaaaaatcaaaacgatgagagggttgaacgaaagagattcctcagagtgctacagaatgagcagtttgagctggacatggaagaagccatccaaaaagccgcagagaacaagatgttgaaggatcgacagcttgagcaggaagagagacttgcgaacgaactggccagactaaagcatgaaagtctgaaggatgaaaagatgaggcagcaagtgagagagaacagtatggagctcagagagttggagcagaaattgcaagctgcttacatgaataaagagagagctgcccagattgctgagaaggacgccatcaaatatgagcaaatgagacgtgatgctgaaatagccagggtcatgatggaggaacacgagagggtaaagaaggaagagagtgtcaagcaggaccggcggaacaaggagaaggcccagtaccacctggacctggaaaagcagcttgaagaacaagagaggagaaagcaggaggcatatgagcagctgctaaaagagaaactcatgattgatgaaattgtcaggaagatctatgaggaagaccagctggaaagacagcaaaaattagaaaaatgaatgcaactcagaagtatattgaagcgttccagagggagcaagaactctggagacaaaagaaacgtgaggagatggaggaagagaacaggaaaatcatagagtttatgaacatacagcagcaaagagaagaggagcgggtggccagagttcaagagagtgaagagaagagggcccagcgtcagaatctgctgatccagaagttggaagaaaggctgaggaagcaggaggacctggagcaagttcgacaggagctgtaccaggaagaacaagctgagatgctgaaactgaaactgaaagaagaagtggagcagaaactgcagaggcagagggagatgaagcaagacttggaagaccaaatagcactgaaggaaataattctacaggctacaaaagaggaggaagagacctttaagaaagccatgctggctaagtttgcagaagacgaccggatagagctcatgaatgcccagaaacaacggatgaaacagctggagcacaaacgggctgtggagaagctcatcgaggagcggcgcagccagttccttgcagacaaacaacgtgagctagaggaactgcagctacagcaaagacagcagggctgcatcaataagattattgaagaagaaaggctgaaactcctcaaagagcatgctacaaaattactaggctatctccccaaaggagtgtttaaaagagaggatgatgttgacatgcttggtgaagattttaggaaagcctatcagaaaaaggagtgaagtcggtgaagagaagtgatcagcaccagcagctggaaacctgaactttccagacaccaccaccagatggcagtgtaactgttgctttacagttggtgacagcaggtccccagtgtctgtctgcatgttctaaaatatcctatttcaccatttataaatagttagacaagaattaaacacatcagtacttt

SEQ ID NO: 3600 - DNA, 1645 bp, Cricetulus griseus
ccagaaatcaagcatttctgcccccgagctcctgtcattctggtgggctgccagctggacctgcgctatgctgacctggaagccgttaacagggccaggagacccttggctaggcccattaagcctaatgagatcctccctccagagaagggtcgggaagtggccaaggagctggggatcccttactacgagaccagtgtggtggcccagtttggtatcaaggacgtctttgacaatgccatccgggctgcactcatctcccgccgtcacctgcagttctggaaatctcatctgcgcaatgtgcagcggcctctactgcaagcacccttcctcacattgccgagctgctagaggtctttgatctacgtatgatggtagccaacattctcaacaacgaggccttcatgaatcaggagatcaccaaggccttccatgttcgccggaccaaccgggtgaaggagtgcttggcaaagggcaccttctcagatgtgaccttcatcctggatgatgggaccatcagcgcccataaacccctactgatttccagctgtgactggatggctgccatgtttgggggaccatttgtggagagttctactagggaggtggtgtttccgtacacaagcaagagctgcatgagggctgtgctggagtacctctacacgggcatgttcacctccagcccagacctggatgatatgaagctcatagtcctagccaaccgactctgcctaccgcacttggtcgctctcacagagcagtacacagtgacggggctgatggaagcaacccagatgatggtggacatcgatggggatgtccttgtgttcctggaattggcacagttccattgtgcgtatcagttggccgactggtgtctccaccacatctgcaccaactacaacaacgtgtgccgcaagttcccccgagacatgaaggccatgtccccagaaaaccaggagtactttgagaagcaccggtggccacctgtctggtacctgaaagaagaggaccactatcagcgtgcgcgaaaggaacgtgagaaagaggactatttacacctgcggaggcagcctaagcggcggtggctgttctggaacagtccctcatcaccgtcctcctcagcagcgggctcggcgtccccgtcctcctcctcggctgtggtctgaaatgctgccaccgtcttctgatcctgttgctgttgtcctcattagcccttgtccttctgctcttctttatcatcctatccactcaacagggcacgagggaactcacctaaccagggccctaagggcagagccgttctcaccagccaatgtggctcgggccaggaggagcctgggcccctgcagatcagaacagggtccacctacaatttcaggcagggtaggaaaccatctgccccgaggtggggagcaggaaagagctcagagctcttgatattttctctctggacttgacaatagagtttcccatcctcagacttttgacaccgggcctcagttgaccctttccatttcctaattatgatccatacttcaccaccttttaccatattttagatttaggaggtgaagtcccatgaggcagtaggcatatttaatttggtcatgaattcataatacattgagtattttgtacctaa

SEQ ID NO: 3601 - DNA, 1645 bp, Cricetulus griseus
tgttgctgaacaagtaaaagaagtccactttgaaccccaatgccaaggagacttcaccagggccccgaactcactcaacaccttccataccggtgctgacagcaggccagagtgggctctacagtccccagtacatctcatatatacctcagatccacatgggaccagctgtgcaggcgcctcagatgtatccatatcccgtatccaattcggtgcctgggcagcagggcaagtaccggggtgcaaaaggctcacttcccccgcagcgctcagaccaacaccagccagcctcagcccctccgatgatgcaggctgctgctgctgctgctggcccacccctggtggctgccacaccttattcttcctacatcccctacaacccacagcagttcccaggccagcctgccatgatgcagcccatggcacactacccttcacagccggtgtttgcccctatgcttcaaagtaacccacgaatgttgacatcgggaagccacccccaggccattgtttcatcttccactcctcagtacccctctgcagagcagcctaccccccaagccctctatgctactgttcaccagtcctatccacaccatgctacacagctccatggccaccagccgcagccggctaccacgcctactgggagtcagccacaatcccagcatgcggcccctagtcctgttcagcaccaggccgggcaggccccacacctgggcagtggacagccacagcagaatctgtaccatccaggggccctaacaggcacgccgccttctctaccaccgggaccttctgcccagtcccctcagagcagctttccccagccagctgctgtgtatgccatccatccccaccagcagctgccccacggcttcaccaacatggcccatgttacccaggcccatgtccaaactggagtcacagcagccccgcccccacaccctggggcacctcacccgccccaggtgatgctgctgcaccccccccagggccatgggggccccccccaaggcgcggtgcccccgagtggggtgcctgcactctcagcttccacaccctcaccctacccctacatcggacacccccaagttcaatctcatccctcccagcagctccccttccaccccccggggaactgaagattgtcctggccgcgacctgagacctccatgagtggagggaagagtgatctatgtctcttcccccagcagctcggaccagtcctagccccgcccccaacccctttcccttggggagctggggaattcctgccaagcaccttgaatgggaggggtccttgaagtgggcagggctggggtccagcgggggtgggggaggttcctgctctgcccctgccgggtcccacccagtcttgtcctcccatcctctcatctattcccccccgctggagacggaagatcttttattttctattatttataacctcagacttgggccccctgttcttccccattaacttgagtgtcctgtgtgagagaccgacagacagatgcctcaaggacttttactttttattacataaaaaaattaaaaaaaaataaaataaaaaaataaaattttaaactaacttaaaaaaaaaaaaaaaaaaaaaaaaaaaaaaaaaaaaaaaaaaaaaaaa

SEQ ID NO: 3602 - DNA, 1645 bp, Cricetulus griseus
  modified_base (1640)..(1640): a, c, t, g, unknown or other
gagtgggtctttgctgatatggacctgcttcaccgagtggtggcacctggggtccgcatggccctcaagcttcaccaggaccatttcacatctcctgacgagtatgaggaaccagcagccctatacgatgccattgcagccaatgaggagcggctggtcatttcacatgagggcgaccctgcctggcgcagtgccatcctcagcaacacgccctctctgctggcactgcgccatgtcatggatgatgcttctgacgagtacaagatcatcatgcttaaccggcgacacctcagcttccgagtcattaaggtaaaccgagagtgtgtgcgtgggctgtgggctgggcagcagcaggagctggtgttcctgcgcaaccgcaaccccgagcgtggcagcatccagaatgccaagcaggcactccgcaacatgatcaattcctcctgtgaccagccactgggctaccccatctacgtgtcacctctcaccacatctctggctggcagccacccccagctgcgggcgctgtggggtggtcctgtcagcctgggtgccattgcccgatggctcctgcgcagctgggagagacttcacaagggctgtggcgctggctgcaatagcggtggaaatgtagatgactctgactgtggtggggctggcggcctgacctccctgagcaataacccccccttggcacaccccacacctgaaaacacagcaggcagcagtgagcagcccctcccaccaggccctagctgggggcctcggccttccctcagtggctctggtgatgggcggccccctcctctactgcagtggcctccccctcggctccctggaccaccccctgcctcacctgctcccactgagggtccccggccctcaagaccgcctggccctggtctcctcagttctgaggggcccagtgggaagtggagtctggggggtcggaagggactgggaggatctgatggggagccagcctcagggagccccaaaggcggcactcccaaatctcaggctcctctagacctcagcctcagtcctgatgtcagctctgaggcctcacctgccagaacaacccaggacattccttgcttggacagcagtgcccctgaaagtggcacacccactgacaccccaggtgactggcctgtccctgttgaggaacgagagagcccagctgcccagcccttgctggagcatcagtattgagcagcctggccgctactggatctcatcccaggactcagtaacttggactctgctggaccacagaatggactggctttggctttggcatttgcaccctggtctctggctacttgaggcagcgtcagaactgagaaaccagactctccctgatccacagctgccctaaattgaggcagcagcctcctagccagaccctaagagccaaacccgtgggctggtccctcttggagcccatggccaggactgactctgcccctggcctgcactgcctaccaggctggtctctttagcctgggcctgggccgggcctgacatgcggcaagggtggtttcgttcgttcttttgtcatatttcttttttttcccctcttgtgctttcagtagacaccaaattaataacactattttgattttaacaaaaaaaaaaanaaaaa

SEQ ID NO: 3603 - DNA, 1645 bp, Cricetulus griseus
tgtacagacaggatgtaagaaaagaactaggggctccaggcagaggatctgcaagctacaggcaaagagggaagcaggcttctgtgaacaacacaggcccaggctgagggtcggaggaggccaaggcctgggttctctagttctgtaattaattaactaaaagtggatcaaatgatgaggtgaaagttcacacaggagcagggcactcttgtcatcttggactgggtccccatcccaccacccagcgtcctggtctatgcggagtccacaggggccttgtgaagaatcagcagggcaagggccagaggagtcacgtgtccctcccacttcaggttgcccagtcaggatggggatgccccagccctgggtcctcagcctcttgttggtcctcctgcctcggacctggggtgcagagacccgtcccccactgatgtaccacctcacagctgtgtccaacccatccaaggggagtccctccttttgggccacaggctggctgggtcctcagcagtacctgagctacaacagcctgcggcaggaggctcaaccctgcggggcctggatgtgggaaaaccaagtgtcctggtattgggaaaaggagactgtggacctgaaaagcaaacaagagctcttcttgaaggccctgggagccctggaaacccatattgggcaggaagggaacttcacactgcagggcctgctgggctgtgaactggcccccaacaattcctcattgcccacggctgtgttcgccctcaatggcgaggactttatgcagttcaacccaagcattggcaactggagtggggagtggcctgagacggagattgttggtgatctgtggatgaagcagcctgaggcagccaggaaggagagtgagttcctgctgacctcctgccctgagcggctgctaggccacctggagaggggtctccagtacctggagtggaaggagccaccctccatgcgcctgaaggcccgtcctagcaactctggctcctccatactgacctgtgctgctttctccttctaccctcctgagctgaagctacgattccttcgtagtgggctggccgcaggctctgggaacagcagcatcggtcccaatggtgacggctctttctacgcctcatcattgctggaggtcaaaagaggagacgaacaccattaccaatgtcaggtggaacacaaggggctggcacagcctctcactgtggacctagatgtaccagccagatcttctgtgcctgtgatcggaatcgttcttggtttcttggtggtcatagtggctgctgcagggggtgtactgctgtggaacaggatgcgcagcgggctgccagccccatggctttccctcagcggtgatgactcaggtgacctgctgcccggtggcaacttgccccctgaggccgaccctcatggtgcaaatacctttccagccacttcctgatgtcaactcagacctccaatacacattgcagcatttggtgctgtgtgacctcctgaactggcatctctgagccttctgagggagacctgggccagatgttctccttgtggactcctccttttgtggcctgcctcagtttcccttcttaatgtacatggctgttttccatctccacaaaatttgggtccaaatctg

SEQ ID NO: 3604 - DNA, 1644 bp, Cricetulus griseus
caaagaggaactgcagacaaaagttaaagaagaacttgccatggtagaagactctccatacattcaacagagagttcagaaagctcaataccttgttgagtctgaatctcaaaatacaatggaaagacaaagaactggaactgaagaggcctggctcaaagcatattcatttccttctcaacagaagaaaggtcctgcattgaacaaaccccagcctcaagcttcacgccttctgactaatcctacccaggtagaggatatcagttctcaaatggccagtataaccatttatgatcagtctgcagagagtgagccccgagatgaagctgtgcaagagaaggcattacaagcatcacctgggcaagaggccctgccagagaacctcctgggaagttttaatgatttacctacacagtccatcaaggctgatcctgggccaaatttaaatctagaggatagtgtgctttcatgtcactgcagtcccacagcaaatgaaaatcaaaacatagaatcagatgtgcacacaattgaaatatccgatgtcttgtcagcatcccctagtgcactgcagggtgctcaagcaagcgaggccccagctggagttggaagagggccttttagaatcaccaccacagtatgcatgtgatttcaatcttctcctggaagactctacaggcactagacaaagtctctccagcaagtttttggaacatgttgagaaagaaaatagcttgcaaagccctgcagctaattccagggcagagtcagcacttaatctcagtttggattcttctaataagagtgatgaagaaccagaagtgattagtgtgaaaaccagaagcaaagctagaaggatcctctcagatgatgaaggtgaagaagatgcttttaaaggtccttctggcacaagttcatttagcatctctccttttcagttctcatccgtgaaacaatttcatgtttcaactcccaaaaatgatgccaatccatctgcaaggttcttttccccaaaattacctggtagtgtgaatacatccttcaattccaggagatctctggcatctaggaagtctctgatcaatgtagttttagacgacatggaagacatggaggaaaggcttgatgagagcagtgaggaggagagtgctcgaggtcattcagaagaagagagcagtgatgaagccatagcgtgcacagaagaggatccatcaggggaaacacaggcttcaggaaacaagcccagcagcttgactgtgcctgagcctacttctctggccctggagagctctccctgtgcccctgaacctttgtcaagtgaccctttggttgaacctccccaggatccagcagtggaggctgctaacgactatgagacacttgtagctcgtggaaaagaactgaaagagtgtgggaagatacaggaggctctcaactgcttagttaaagcacttgacataaagagtgcagatcctgaggtgatgctcatgactttaagcttgtataagcaacttaacaacagttgaggacttcagagcctggttagtgtgtctaaaatgagactgaatgtagaggttttgttcagtatttcttcccttgtaacttttttttccctttaggctattattttacaaactttcagtaagt

SEQ ID NO: 3605 - DNA, 1644 bp, Cricetulus griseus
gccccgcccaggcggctgcccgtgacctgcctgggcgcagggaacgggaagtcggaaaggctaagaggagtccagctcgtcatggggctgtttggaaaaacccaggagaagcctcccaaagagctggtcaatgagtggtcattgaagatcagaaaggaaatgagagttgttgacaggcaaataagagatatccaaagagaagaagagaaagtaaaacggtctgtgaaagatgcagccaagaagggccaaaaggatgtctgtgtggttctggccaaggagatgatcaggtcaaggaaggctgtgagcaagctctatgcatccaaagcgcacatgaactctgtgctcatggggatgaagaaccagcttgcggtcctaagagtagctggttccctgcaaaagagcacagaagtgatgaaggctatgcagagtcttgtgaagatcccagaaatccaggccaccatgcgggagctgtccaaagagatgatgaaggctggaatcatagaggagatgttagaggacacatttgagagcatggatgatcaggaagaaatggaagaagcagcagaaatggagatcgacagaatcctctttgaaatcacagcaggagccttgggcaaagcgcccagcaaagtaaccgacgcccttcctgagcctgaaccttcaggagcgatggctgcttcagaagagggagaggatgaggaggatgaagaggacctagaggccatgcagtcccgactggccacactccgaagctagggccacccagttggggcctcatctctggtgccctcctctaggtgtgggcacggcctctgaggagtcaccattttcctgtatctcttgcactacacctctgttgtgaagcattgcattttggagagggttctatgctagtgtatcttcactgtctgcagaggttttaaggattgttttatgaaggtggtacaatcaaatgcattcttttcaagaccataaatagaagcatctttcttgggggaggggaagaatcccgttttctcatgaagcagttctgagaagagtcagttgaatgttgatgactctctactggtgtgtatgtgtaaaatgccgcttaagtggatatcaataaacttctactgtagctcttggtctcattgtaaatgtcacatgcagtggactcaaggtgttgatctcccagatgtctcagtgttggccttggaaagaggaagtgccatcgccaggcagcagaacatgggagctcagcagaagtgccttctgctcaggagctgctggtcctgatcactacagacaggttttgggggccactctgatgcagttgtcatctgtttaacctgaagtactctgggcacctgttttcgtacttgccttctctgtattttgtttgaaaatgatgatatagtggccttgaactcatgacctctctgctctaccaccatgcccagcttgccacctgtatttctttaccgttggtgtttgttcattttataaactggattgttttctgattattcaattttaaggtcctcttacattattttggaccgattgtctatcagtattttatcctattctcctgtctgttctctcattgttgacagttggctcaaagctgaaattttttacttttaataaaaccctgcttct

SEQ ID NO: 3606 - DNA, 1644 bp, Cricetulus griseus
ccagcaccccagcctcaccttttctgataactcaagaacacagggatggaaagtcatggggaccctgctaggccttggtgcagtgctggcctatcatgatcatcgttgcagggctgctcaggagtcatcacggatatacaccaaagaggacgtgagggcccacaacagccctgaaaatggagtctgggtaactctaggctctgaggtctttgatgtcacaaaatttgtgcaactacatccagggggaccatcaaaactaatgctggcagctggaggccccctagaacccttctgggccctctatgctgttcacaaccaggctcatgtccgtgagttactggctgagtataagatcggggaactgaaccccgaagttgacatatctcccaccttggaggcctctgacccttatgccgatgatcctgtccgtcatccagccctgaagattaatagccagcgtccctttaatgcggagcctcctcctgaactgctaacagaaaactacatcacaccaaaccctattttcttcacccggaaccatatgcctgtacctaacctggacccagaaacctatcgcttgcatatagtaggagcacctggaggtcagtcgctgtccctgtccttggatgatttgtataagtttcccaaacatgaggtcactgtcactctgcagtgtgctggcaaccggcgctctgaaatgagtaaggtcaaggaagtgaaaggcctggagtggaggacaggagccatcagcacggcacgctgggctggggcacgactctgtgatgtgttagcccaggctggtcaccgactcagtgaaactgaggcccatgtctgtttcgaggggctggactcagaccccactgggactgcctatggggcatctatccctctggctcgggccatggatcctgaagctgaggtcctcctggcatatgaaatgaacggtcagcctctgcctcgtgaccatcggtttccctgtacgagtggtggtccctggtgtggtgggtgccgccacgtcaaatggctgggcagagtgagtgtggagtcagaggaaagtcacagtcactggcagaggcgggattacaaaggcttctctccatctgtggactgggacacggtagacttcgatctagcgccatcaattcaggaactacctatccagtcagctatcacagaacctcatgatggggcaactgtagagtcaggagaggtgactatcaagggctatgcatggagcggtggtggcagggctgtgattcgagtggatgtgtctatagatggtggactaacctggcaggaggctgagctagtgggagaggaacaatgtcccaggaaggcctgggcgtggcgattatggcagttgaaagctcaggtgccagctaagctaaatgaattgaacatcatttgtaaagcgatagatgacagttacaatgtgcagccagacactgtagcccccatctggaaccttcgaggcgttctcagcaacgcctggcaccgtgtccatgtccacatcgtgccatgaaagcatggaacggagccaagccatctgtacccaagaactacgcaaactcctttccaacccatccttaaccctcattaccatggaaaaacatttccttcctcttcttgggtcataaccctgta

SEQ ID NO: 3607 - DNA, 1643 bp, Cricetulus griseus
  modified_base (1632)..(1632): a, c, t, g, unknown or other
gcaatctgaagaaagtccaggacctcagaaactctgacttaagtgtattgtccaagccaagagtaagagtgaagagaaatctttgcctcctattaaaaggatggaggcagaaggacagaagtggccatggaagacagacttttacatggaattgccaaaagtggagcttcatgcccacttgaatggctccattagttccaataccatgaagaaattaatagccaagaagccacatcttaaagttcatgatcacatgaccatgattgacaagggaaagaaaaggactttagaagaatgtttccagatgttccacgttattcaccagcttactactagtgctgaggatattctaatggtcacaaaagatgtcattaaagaatttgcagatgatggtgtcaagtacctggagctgaggagtacacccagagaagaaagtgctactggaatgacgaagaagattttatgtggaatccatacttgaaggcataaaacaatgcaaacaagaaaacttagatattgatgttaggtatttgatggcaattgacagaagaggtggccgacttcttggagcctcttttagaagctaaaaaagcaggcctgaagttggcgttgcatcttgcagagattccagataagaaaaaagaaacacaaatgctgctggatctgcttcctgacaggattgggcaccgggacattcctcaactccccggagggaggatccctgggtcaggtggattttgtgaggcaacaccggatacctctggaactttgtttgacttcaaacatcaaaagccagacggttccctcttatgaccagcatcactttggattctggtacagcattgctcatccttctgtgatctgtaccgatgataagggtgtttttgcgacatacctttctcaagaatatcaactggcagcagaaacatttaatttgaccccatctcaggtgtgggatctgtcttatgaatccatcagttacatcttcgcttctgacaataccagatctgaactgagaaagaggtggaatctcctgaagcccaaaagtgttaaactgtgataaggtgaactactttcgattatatgttgtagccaagatcttccttctgagaagttgaagctatttgtcttcaggaagacctctatgttttgttacctttaatcagaatccttctacttcctttaactctttcaagtattatttctcaagactattgatgccaggtcacatttcacaccgaaaccatttgtgtgggtgtctagttgtcaggtgactctagtgacaaggctagaatctggctttgcccttctcataatatcttcagaaatatataaagggaattaaagtaattaacttcagtttaacgaaaaagaattgctgactcaaactgagaaagacataaagctggagcttctgttttaaaattagacttctatttagctttctttgtagaagctgccaggacttccacagtaccaggactcagtgaaaagatctttctagtaatggtagcattgtggctttctaagattcttatatctcctataacctcatgcccaggtgatggcccacaggcacaggcttacataaatacatataccatggccactttcgccaaacaataaaaaaanaaaaaaaaaaa

SEQ ID NO: 3608 - DNA, 1643 bp, Cricetulus griseus
gctgcccgctgtccgcctcgagggcccggacagtgtcttggtaatgtccagggttccaggaagagatgtccttgtggctggagactccacggcctgctgtttgtcctgactctgcaacggagttgtggaaggcagaaacccaagatgcaagagaccagggaagcaatagctgcatcctcagggaagaagcaaggatgccccagcctgctggaagtgctctgaggatggggttggagacagcagagtccacagccttgcttcccagggcagagacctttccagaacctacagagcttcgtccacaaaagcggaaaaaggggccggcccccaaaatgctggggaatgagctgtgcagtgtatgtggggacaaagcctctggcttccattacaacgtgctgagctgcgagggctgcaagggattcttccgccgcagtgtcatcaagggagcacgctatgtttgccacagtggtggccactgccccatggacacctacatgcggcggaaatgccaggagtgtcggcttcgcaaatgcctccaggcgggcatgcgtgaggagtgtgtcttgtcagaagaacagattcgcttgaagaaactgaagcggcaagaagaggaacaggctcaagccacatcagtgtcccccagggtttcctcagctccccaagtcctaccacagctcagcccagagcaactgggcatgattgagaagctggttgctgcccagcagcaatgtaaccaacgctccttttcagaccgtcttcgagtcacgccttggcccattgcacctgaccctcagagccgggaagcccgacagcagcgctttgcccactttactgagctggccatcgtgtctgtgcaggagattgttgactttgccaaacagctccctggcttcctgcagctcagcagggaggatcagatcgccttgctgaagacctctgcgattgaggtgatgcttctggagacatcacggaggtacaaccctgggagcgagagcatcaccttcctcaaggatttcagttacaaccgagaagactttgccaaagcagggcttcaggtggagttcatcaaccccatctttgagttctccagagccatgaatgaactgcagctcaacgatgctgagtttgctttgctcatcgccattagcatcttctctgcagaccggcccaatgtgcaggaccagctccaagtagagaggctgcaacacacatatgtggaggccctgcatgcctatgtctccatcaaccacccccacgaccgactgatgttcccacggatgctaatgaagttggtgagcctccggactctgagtagcgtccattcagagcaagtgtttgcgcttcgcctgcaggacaaaaagcttccccgctgctgtctgagatttgggatgtgcacgaatgactgttcttcctcgtgtcctctgtgctttgggccccgtgtgactgaggcttacagactgcttcctagaggtggagcagactttgaaggccaaacattcctgagagctgggtgaaggagatccttgcatggcattaaaggaaagtcaaggggttgggtgttttgtggctgctgggcagttggggacctacgaatgtgcaccatctgaagaccttattgacccaaccaaataaactatccagga

SEQ ID NO: 3609 - DNA, 1642 bp, Cricetulus griseus
tgcgggtcggagagctgtcagtcatccattcccttgtgttttagactaggcctagcttgtggcttggcatgtcaatagtaacagtgcaacttgggcagtgtggcaaccagattggctttgaagtgtttgatgctttatttagggacactcaatgttcccctggactctgctctaagagagaaaatgaggcttatcaagcatcttgcaaagaaagatttttcagagaggaagaaaatggagttccagttgcccgggctgttcttgttgacatggaacctaaagttatcaatcaaacgctatcaaaagctggccagtctggccgatggaaatacggtcagcatgcatgcttttgtcagagacaagggtctgggaacaactgggcatatggttactctgtgcatggaccgaagcatgaagaatctataatgaacttaatccaaaaggaggtggaaaaatgcgactctttgagtggatttttcatcataatgagtatggctggggggacaggatccgggctgggagccttcgttacacagaagttacaagatcagtactccagttcattgaaaatgaatcagattatatggccttacagaactggtgaggttatcgtgcagaattataactccatcttgactctctctcacttgtaccggtcttcagatgccctcctcattcatgaaaatgatgctgtccacaagatctgtgccaaacagatgaacatcaaacagatctccttcagagatttaaatcaggttcttgcccatcagctggggaacgtgttccagcctacatactctgaggacggctcatctcactaccgcagggatccactaggagacttaatggagcatttagttccccaccctgaatttaaaatgctgggtgtccgtaacatcccacagatgtctgagaactttctggcatacagcacgttcacctggcctggccttctcaagcatttgagacagatgcttatttctggtgcaaaaatggaagaaggtatcgactggcaggtgcggcctcctttctcaggccttccacctcttggcaaaatgtctgtccacaaggatcttcattttaacacctctattgctaacttggtcattctccgtgggaaagacgtgcagagtgcagacgtggagggatttaaagacccagctctctacacttcctggttggagcctgttcatgcttttagcatgtggaaaaccccgagagcctttgacaagtatgagaagtctgcagccctggttagcaatagccagctcttagtgaagccacttgacatgctcgtgggcaaggcatggaatatgtttgcttccaaagcctacattcatcagtacacaagatttggaatggaggaagaagactttttggacagttttacattgttagaacaagttgtggccagttacggtagcctcggaccctaaactaagaggaaaaacacctcacaggactttcggactaaaatattttcaaaattgagccatgcacagtggaggtcacgtgtgatcccagcatcctggaagtagaaacaggagaatcaggaggtcaaggtcatccttggctacatcaagagttctgagccaacctgggctacgagaccctgtctcagaacagacaaataaatacaaat

SEQ ID NO: 3610 - DNA, 1642 bp, Cricetulus griseus
  modified_base (1290)..(1290): a, c, t, g, unknown or other
gatgtgccagcaccacatgattggctttgtggacccccttgtgagcagctacaccgtggtggactttaacaacagagcaaccgccctgattgaagatatttttgctcgagacaaaattcctattgtcgtgggtggaaccaattattatattgagtctctgctctggaaagttcttgtgaataccaggccccaggagatgggcaccgggaaagtggttgaccggaaagcagaacttgagaaggaggatggccatgaactccataaacggctaagccaggtggacccagaaatggctgccaagctacacccacacgacaaacgcaaagtggccaggagcttgcaagtatttgaagaaacaggaatctcccacagtgaatttcttcatcgtcaacatgcagaagaaggcggtggtccactcggaggccctctcaagttccctaacccatgcatcctctggcttcatgctgaccagagagttctagatgaacgcttggataagagagtggatgacatgcttgctgccggactcttggaagagctgagagactttcataggcgctacaatcttaagactgtttcagaaaatagccaggactatcaacatggtatcttccagtcaattggcttcaaggaatttcacgagtacctgatcactgagggaaaatgcacaccagagactagtaaccagcttctaaagaaaggtattgaggctctgaaacaagtaactaagaggtatgcccggaagcaaaaccgatgggttaaaaccgatttttgagcagacctggtcccagtgtccccccagtatatggcttggaagtatctgatgtttcaaagtgggaggagtctgttctggagcctgctctcaatatagtacaaagtttcatccagggtcacaaacctacagccactccaatgaagatgccgtataatgaagctgagaacaagagaagtcaccacatgtgtgacctttgtgaccggatcatcattggggaccgggagtgggcagcacatataaaatccaaatctcacttgcaccaactgaagaaaagaagaaagttggactcagatgctgtccctgccctaagaaaccaaagtagttccccagactgtgacccggaacttaaggaggggaagtccccagtgcagcaagatcaagagctgaaggccagggtttgagagacatgcctagtggcctttgcagagatgtggagagaaagtctaggaggggaggggagtggttggtctcccatgccctattagactgaggaaggcttggcagaactccccccncccatcttctttattctgtggtgtggtctgcagtggaaacagcaggcctttcagctcctgtgtggttgttgtgtctggtaatgatgcagttcagggtgggattttttcctttgaaccttaaaggttttattttagaaagaggcacagattgcacattttctacttgaggatcttttttcgtggtgaataccaagattcagtgtatcctttaaaagagttcttgttcctggtgctggctaaaaatatctcgcttccagatgcttttgtaaatgactgaagtcttgtaaggcacagtcaggagttctgggggtgtgagagaactgcaggaaggagcagcccagagagatggtta

SEQ ID NO: 3611 - DNA, 1642 bp, Cricetulus griseus
agggccccgggccgctcggcagccatgagctacggccgcccgccccccgacgtggagggcatgacctccctcaaggtggacaacctgacctaccgcacctcgcccgacacgctgaggcgcgtcttcgagaagtacggccgcgtcggcgacgtgtacatcccgcgggaccgctacaccaaggagtcccgcggcttcgccttcgtccgcttccacgacaagcgcgacgccgaggacgccatggacgccatggacggggccgtgctggacggccgcgagctgcgggtgcagatggcgcgctacggccgcccgcccgactcgcaccacagccgccggggcccgccgccccgcaggtacggcggcggaggctacggacgccggagccgcagccctcggcgccgccgccgcagccgctcccggagccgctcccgctcccgctcccgaagccgatcccgctacagccgctccaagtctcggtcccgcacgcggtcgcgctcacgctccacctccaagtccagatccgcgcggaggtccaagtccaagtcgtcgtccgtctccagatcccgctcgagatccagatccaggtcgagatccagaagtcctccccccgtgtccaagagggaatccaagtcccggtcgcgctcgaagagcccccccaagtctccagaggaagaaggcgcggtgtcctcttaagaaaatgatggatcgacaagcagcttaacagaggactttgagggaaaggaccagaaactcagtccatcggtccatggaagagtccttggaacaagcaactggctattgaaaaggttattttgtaacatttgtctaactttttacttgttttaatctgcctcaggtggcaaacttcattttatgtgccattttgttgctgttattcaaatttcttgtaatttagtgaggtgagcgacttcagatttcattattggattggatatttgaggtaaaatttcatttttgtttatagtgctgactttttttgtttgaaattaaacagattggtaacctaatttgtggcctcctgacttaataaggaaacgtttgcagccattacacacagcctaaagctgtcagcagattgactcaacattgccttccctccttaaaattaaaaacctacgaaagttggtgtaatttgtttatatatgttatttaccttcaggtctaaatgataatctgaacccaaatttgtataaagacttttcaggtgaaaagacttaattttttttaaaggattgtttaccaaatacaattctaatctcttctcttatgtatttttgtgcactaggcgcagttgtgtagcagttgagtaatgctggttagctgttaaggtggcgtgttgcagtgcagagtgcttggctgtttcctgttttctcctgattgctcctgtgtaaagatgccttgtcgtgcagaaacaaatggctgtccagtttattaaaatgcctgacaactgcacttccagtcacccgggccttgcaatatagataatggagcatacagtgagcacatctagctgatgataaatacacccccctttccccaaaaaacatggtgtatcttgcttatgaatattctgtactataaccattgtttctgtagtttgattaaagtgttttcttggtagtta

SEQ ID NO: 3612 - DNA, 1642 bp, Cricetulus griseus
cggcggagatgaagttggcgcccttgtttttgacattggatcatatacagtgagggctggttatgctggtgaggactgccccaaggttgatttccccacggctattggtatggtgttggagagagatgatggaagcaccatgatggaaatagatggtgacaaaggcaaacagggtggtcccacttattacatagataccaatgccctccgagtacccagggagaacatggaagccatctcaccactcaagaatggaatggttgaagactgggatagtttccaggccattttggatcatacctataagatgcatgtcaaatctgaagccagcctgcatcctgttctcatgtcagaagcaccgtggaacaccagggcaaagagagagaaactgacagagttgatgttcgaacactacagcatccctgcattcttcctttgcaaaactgcagttttgacggcatttgctaatggtcgttctactgggctgattttggacagtggagccacccacaccactgcaattccagtccacgatggctatgtccttcaacaaggcattgtgaaatcccctcttgctggagacttcattaccatgcagtgcagagaactcttccaggaaatgaatatagagctcattcctccatatatgattgcatcaaaagaggctgttcgggaaggctctccagccaactggaaaagaaaagagaaattgccccaggttacaaggtcttggcacaattacatgtgcaattgtgtcatccaggattttcaagcttcagtccttcaggtgtcagactccacctacgacgaacaagtggctgcgcagatgccaactgtccactacgaattccccaatggttacaactgtgattttggtgcagagcggctaaaaattcctgaaggattatttgacccttccaatgtaaagggattatctgggaacacaatgctgggagtcagtcatgttgtcacgacaagtgttggaatgtgtgacattgacatcagaccaggtctctatggcagtgtgattgtagcaggaggaaacacgctaatacagagtttcactgacagattaaatagagagctttctcagaaaactccaccaagcatgcggttgaaactgattgcaaacaacacgacggtggagcggaggttcagttcatggatcggaggctccattctagcatctttgggtacctttcaacagatgtggatttccaaacaggaatatgaagaaggagggaagcagtgtgtagaaaggaaatgtccttgaagggtcccaccctgcctgcccatcacctcacgtctgtagctttagtacactcaggaaaagatgacatcttttgtagaatgtttataaatgtttgcatatttcaatgtccacttaaattttttaaggctttaactggctctataaattaaaatgagtttgtgctttccttgaaatgcacttattcttattacaggcattttataattttgtatgaatgtctattttctctaaatattttctttcagtaagtactttccagctctccttgggtgggttggtggagttactttttattgactagtaaaagttactgcctatgctttttaccttaggcttataaaactaaataaaaatcactacccgtcctag

SEQ ID NO: 3613 - DNA, 1642 bp, Cricetulus griseus
atactgttggtgagctgctgctggcagaccgaaaatgggctgccttcctgtatcactgtccctgctggccaccttccagtcagcggtagccatcctgggggcaccagctgagatctaccgatttggaacccagttattggttcctgggatgctcctactttctggggctcctgatccctgctcacgtcttcatcccagtcttctaccgcctgcatcttaccagtgcctatgagtacctggagcttcgcttcaataaagcagtgcggatcctggggactgtgaccttcatctttcagatggtgatctacatgggagttgctctctatgcaccatccttggccctcaatgcagtgactggatttgatctgtggctgtcagttctggccctggggatcgtctgcaacatctacacagcactgggtgggctgaaggctgtcatctggacagatgtgttccaaacactggtcatgttcctagggcagctggtggttatcagcaagtggccctctgcatgagctccctcattggtttggtcatgtttgcctattataagaaatacactatgagcccccagcaagagcaagcagcacctgaccagttagtcctctattttgtcatggaccttctgaaggacatgccagggctgcctgggctctttgttgcctgcctcttcagtggatccctcagcaccatatcatctgcattcaattcactggcaaccgtcaccatggaagacctcattcaaccctggttccctgagctgaccgaaacccgggccatcatgctttcccgaagccttgcctttgcctatgggctgatttgcctgggaatggcctatatttcctctcatctgggatcagtgctccaggcagcactcagcatctttggcatggttggagggccactgctgggactcttctgcttggggatgttctttccttgtgccaaccctcttggcgccatcgtgggcctgttgactggactcaccatggctttctggatcggcattgggagcatagtgagcaggatgagttctgccgtggtgtcccctcccattaacgggtccagctccttcctgtccagcaacctgaccatggccactgtgaccaccctgatgcccttccaccacccagtccaagcccacaggactgcagcggttctactccctgtcctatttatggtacagtgcacacaattccaccacagtcatcgttgtgggcctgattgtcagtctgcttaccggggaatgcggggccggaccctgaaccccggcaccatttatcctgtgttgccaaagctcctctcactcctgcccttatcctgccagaagcggctttgctggaaaagccacagccagaatgctccaatggtccccaaactgtgtccagagaagatgaggaatggagtgctgcaggacagcagggacaaagagaggatggctgaggatggcctagcccaccagccatgcagtcctacctatgttgtccaggagacctccctgtgacctatgatggggactcaagtctgtccaccctgcaggacagcagccaccggttattttacagtacagcgatgagtcactacacgtcttctgcaagggcgggttgcatgacctagcacacaacaaaggaacttgatcttt

SEQ ID NO: 3614 - DNA, 1642 bp, Cricetulus griseus
cgatcagcgtggaggcggctccggccggagcgaagatggccgcagaactgtacccgcccgccggtgcctccgcacccactgccaccgacatcgccaacagcaacgcggcgggcgcggccgtgggcaggaaggtcggcctttgctgcccgccgcgcctggcgcccgccccactgccacccttgcccgcgccgcccgcacccgacaacaacaaccctgagagccccaactggcagtccttccacccgacgctgcgcgagaggaatgcgctcatgttcaacaacgagctgatggccgacgtccacttcatcgtgggggtgctgggggcagccaggcgcgtgcccgcccacaagtatgtcttggctgtcggcagttccgtcttctatgccatgttctatggggaccttgcggaagtcaagtcagaaatccacattcccgacgtcgagcctgcagccttcctggtcttgctaaagtacatgtacagcgatgagattgacctggaggcagacacagtactcgccactctgtatgctgctaagaagtacattgtgcctgccttagccaaggcctgtgtcaactttctggagacaagcctggaagccaagaatgcctgtgtgttgctatcccagagccgactgtttgaggagcctgaactgacccagcgctgctgggaagtcattgatgcacaggctgagatggctctgaggtctgaagggttctgtgaaattgaccggcagaccttggagatcattgtgaccagggaggccctcaacaccaaagaagctgtggtctttgaggcggtcctgaactgggctgaggcagagtgcaagagacagggcctgccgatcacccctcacaacaagaggcatgtcttgggaagagccctctatctagtccgaattccaactatgtcactagaggagtttgccaacggtcctgctcagtcagatatcctgaccttggaggagacccacagtatcttcctctggtacacggcagccaacaagcccctccttgacttccccctgaccaagaggaagggccttgctccccagaggtgccaccgcttccagtcttctgcctaccgaagtaaccagtggaggtaccgtgggcgctgtgacagcatccagtttgcagtggacagaagggtgttcattgctggactgggcttatatgggtccagttctgggaaggctgaatacagcgtgaagattgaactcaaacggctaggaatggtcctggctcagaatctcaccaagtttgtttcagatggctccagcagcacattcccagtctggtttgagcaccctgtgcaggtagagcaggataccttctacactgccagtgctgtcctggatggcagtgagctcagctactttgggcaggaaggaatgacggaagtacagtgtggaaaggtggccttccagttccagtgctcctcggacagtaccaatgggactggagtccagggtggacagattccagagctcatcttctatgcctgaggggtagtggtccaagtggacttgccaccaggctcctcctccgttggagtctacccagtaagtgccgtggagtgcaggacactgcctactgccttactgagactattaaaggcttggcttacactaccagcccaagtctg

SEQ ID NO: 3615 - DNA, 1642 bp, Cricetulus griseus
gtcctttcgttctatcacaaggtcatattacagaggtgcagcgggggctttactagtgtatgatattacaaggagagacacattcaaccacttgacaacctggttagaagatgcccgtcagcattccaattccaatatggtcatcatgcttattggaaataaaagtgacttagaatctaggagagaggtgaaaaaagaagaaggtgaagcttttgcacgagagcatggacttatcttcatggaaacttctgccaagactgcttccaatgttgaggaggcatttattaacacagcaaaagaaatttatgaaaaaatccaagaaggggtctttgacattaataatgaggcaaatggcattaaaattggtcctcagcacgctgctaccaatgcaacgcacgcaggcaaccaaggcggacagcaggcagggggaggctgctgttgagtcccttcttagcggctagctgcccagtggaaccacgcactctgtccccctccttcctcgtgctcagctgagacatgaaactatctgaaatggctttatgtcacaggagactttaatccttcagattcttgtatacctttgaataaatggttaatgttcacttaaaaagacagattttggagattgtattcatatctatttgcatttgatttctaggtcaattgatgtgattatttttgttaaatgttgtcttgtgcccttaactacgagctgaattgtattaaacactacaaagtcatggtgagtattttaaatcagtttgtgtagttaggtttcccaacacctgtggttacctaatgtttaatattataggactgtcctcatacagtttgtcaattttcaaggatataaagaaagacagaaggactctttgaattctgtatttatcatttgctttctgtatatatagtttaataacctgcttgggtgtgatttgccaagcttgaagtctaatgcatttgcataaattctacactgtccggagcttgaagctacagaagcattgttaggaattgcttggacactgacttctaaactttttgacatcgttaatgagcatgttcatcttttcttgtcactagtccaagaaaaataagcttgtgtattactaaaggctgtgtatgtgttagcctgttttaatgccgaaagtttgctatttgtccacaatttcttgagaccgcttcacagaaggatttgtttgccttaatgagtactgttgggtaaaaacagtgtgatgggtgggaagggcggaagcagaaatcccaacactaagagactccaagagtgagtaccacatggagagggcatgccatgccactttaatcttcccttagacacaataatgttcccttctattcacacgatttctaagtatatttttcatgcaggacagtttgtcagccttgatgtacagtgactgtgtaaaatttttctttcagtgcaacctatctataatctttcaaatatggtaagcctactgtctgttctgaggggatatgatgaaaataaatctaccagatggaaaatcctgttaaagtagaaaagctttagtcgtttactcactgtggtggttttatcctttctttttcccccttggtctagaatggaattgttacagcagtgcaaaataaaatcctatgt

SEQ ID NO: 3616 - DNA, 1642 bp, Cricetulus griseus
cgacatattgcccgcaggagctgcggcggcgagcggagagcgccgggggaaggagatgggaggacgaagaggtcccaacaggacatcttactgtcgaaatccactctgtgagccaggatcttcgggggcctctggtggaggccatacttccagtgcatctgtgaccagtgttcgttctcgaaccaggaccagctctggcacaggcctctccagccctccactggccacccagacagttgtgcctctgcagcactgcaagatcccagagctgccagtccaggccagcattctgtttgagctccagctcttcttctgccagctcatagccttgttcgtgcactacatcaacatctataagacagtttggtggtacccaccctcacacccgccctcccacacctccctgaacttccacctgatcgacttcaacttgctgatggtgaccaccattgtgctgggccgccgcttcattgggtccatcgtgaaggaggcttctcagagggggaaggtttccctctttcgctccatcctgctgttcctcacccgcttcaccgttctcacggcaacaggctggagtctgtgccggtccctcatccacctcttcaggacctactccttcctgaacctcctgttcctctgctatccgtttgggatgtacattccgttcctgcagctgaactacgatcttcgcaagacaaacctcttcagccatgtggcttccatggggccccgagaagcagtcagtggcctggcaaggagtcgggactacttgctgaccctgcgggagacgtggaagcagcacactcggcagctgtatggcccagaagccatgcccacccatgcctgctgcttgtcacccagcctcatccgcaacgaagtagagttcctcaaaatggacttcaactggcgcatgaaggaggtgcttgtcagcgccatgctgagcgcctactacgtggccttcgtgcctgtctggttcgtcaagaatacccattactatgacaagcgttggtcctgcgagctcttcctgctggtgtccatcagcacctctgtgatcctcatgcagcacctgcttcctgccagctactgtgacctgctgcataaggctgctgcccatctaggctgctggcaaaaggtggacccagctctttgctccaacgtgctgcagcacccgtggacagaagaatgcatgtggccccagggcgtgctggtgaagcacagcaagagcgtctacaaagccgtgggccactacaatgttgccatcccctctgacgtctcccacttccggttccacttctttttcagcaaccccctgaggatccttaacatcctcttgctgctggagggcgccgtcattgtctaccagctgtactccttaatgtcctcggaaaagtggcaccagaccgtttccctggccctcatcctcttcagcaactactatgccttcttcaagctgctccgggaccgcctggtactgggcaaagcctactcgtactcagccagttcccagagaggcctggaccaccggccctcctgagctccagggcgatgctcaacacagcatccaggctgcacccaagggcctcctggccaagggctgttgggttgtgttggggggaggggcaaaaaacaaaaacccaaaaaa

SEQ ID NO: 3617 - DNA, 1642 bp, Cricetulus griseus
  modified_base (73)..(73): a, c, t, g, unknown or other
  modified_base (1385)..(1385): a, c, t, g, unknown or other
caggccaccaagtgacagcactattccaggcatacagaaaatttggatacgaacatggggctgctcacataanaattcagatggagaattggaggaaacaattaaaggtcactcagtgagactcctaggccagaagaaagacaatggaaagcggttggggggagcaagactggatttaccaaagatcaggaagaatccactgatcgaaataatttcaatcaacacggggtgtctcaatgcttgtacttactgcaaaactaaacatgccagaggaaacctggccagttatcccattgatgaacttgtagagagagccaagcagtcttttcaagagggagtctgtgagatatggctgaccagcgaagacactggagcctacggcagagacattggcacagatctccccacactcctatggaagctggtggcagtgattcctggagggagccatgctgaggctgggcatgacaaacccaccatatattttagagcatctggaggaaagtggacgaaaaatcctacaaccaacccagagtctatgcttttcttcacatcccagtgcagtccgcctctgacagtgtgctcatccgaacaagttaccagacacatagtgaaaaagcaaaggacaaaagatctctctcgggtgtttcattcctacaatccatatgatcacaagattggtgaaaagacaacaagtgctagtaacagaagaatcttttgacttccaagtttttatgttgcacataatcgattctatgagcaggttttagtgccaaagaaccctgaattcatggggaaaatggttgaagtagacatttatgaatcaggaaaacactttttgaaaggacagccagtattggacaccaaaatctacacgccatccatcagcaagccactggccaagggagaagtgtcgggtttgacaaaggaattcagaaataggtttggaaatcatctgacttcaccttcagacacctgtgctgcaactctgcgtgactcggcatactccagaattgtgctgcagatgtcccaacatgactgtgcattgtgggtagctgcaggcctggctctcactgctcttctttttgcatttctggccagagtctatgcttacaatgtaactaaatgaagcatccataaggagtaattttctaattaaaacctttggggaagcaactacaccagttctcaagaggcagtcatctgaactggtcatgctgccttgtctggatcccttcttaatgaggctcaccctgtctcacattgagctgagccatttgacctcaaatcacagcttctggaacatgtcttttcatcatcaaactccttttgacttttttttttgttttgttttgttttttttttgttttttgttttgtttgttntttttgttttgtgtggctctggccaccccttcctggtgtggaagaacatccagcccttaatacacattcttcaggctgtgtttggagtccccgtgctacaaacatctttttcacagcacatgtgttcctgaaaagtttatatagaaacctattttgggaacttggacccaagtctgccacttaaaggactcttcctagcattttagaaaatgtgaggaatccatgcctgtagcacccacaaactttcaaacaaacca

SEQ ID NO: 3618 - DNA, 1642 bp, Cricetulus griseus
gagcgcccacgacgcgttcgcgggagcctcgccgggccacgcctgtcgcagctcgtgtcccgagaccctgccccgcccgcctccgccgctgcgagccgctcgcccccacccaggcgccgtccttctcgccgtcctttcccgagagcccggccggaccgaaccgggccgagctgggccgcccgggcgcgcccgctcaccatggcgtccctctttaagaagaagaccgtggacgatgtaataaaggaacagaaccgagagctgcgaggcacacagagggctataatcagagaccgagcagccttggagaaacaagaaaaacagctggaattagaaattaagaagatggccaagattggtaacaaagacgcttgcagggttttagctaagcagcttgtccatctacggaaacagaagacaagaacttttgcagtaagctcaaaagtcacgtctatgtccacacaaacaaaagtgatgaattcccagatgaagatggcaggtgcaatgtctaccactgcaaagacaatgcaagcagtcaacaagaagatggatccacagaagacactacaaacaatgcagaatttccagaaggaaaacatgaaaatggaaatgactgaagaaatgatcaatgacacccttgatgacatctttgattgttctgatgatgaagaagaaagccaggacattgtgaatcaagttcttgatgaaatcggaattgaaatctctggaaagatggccaaagcgccttcggctgccagaagcttaccgtctgcctccacctcaaaggctaccatctctgatgaagagattgaacggcaactcaaggctttgggggtagattagatcaccaagccatacgtgtgcaaactgagttctttctgcatggcatagagatgtcattacttagggtcggggtgtgttctaaatctttctacactgaaatcagagttcttgttaaatgtcattaggcaccaacttaaagagacttgtaaaaatattaaaggtatagcattaattctgtatctgttgcttgtcctttgttgatagttacgttaggactacaggcagtgcagctgccaaattatttttaaatcatctaaaaaggagtgctatttaaacatctgtcttaaaaactgtcatgagcttttacttttcttccattttttccccctttgggagaacattctagttggtaagtttattacctttcaaaatgtgcttggcacctgccttaaatagcacaaacatattgtgcacatctttaaattattttaactggcaaaaaagaattacatttgaaaataaaattgagacttcgaacagttacccaagctgtgttgtaaagcttataaaagcgaagtggatataattagcaaaatgaagaaagaagacgctgaattaatcacattttatagtaatgaaaccacactttggtgtttcttccaagaactgagactttctccatatgaattataacttagtctgtgttgaattttgaattgtattaataaacacattaaatcctctaaattgaagccattcttctaaatgaagtactactactatgacaatacttgacttagacttctaaagtaagcgaatttttgttttgttttgtttttggtaaataaactacaactttgtc

SEQ ID NO: 3619 - DNA, 1642 bp, Cricetulus griseus
gactacttcaactccatgttcacgctgggcatgcgtgaggctttccagaaggaggtagagctggttggtacctcctatgtggggctcaaggctgtggtggacttcctctacagcagtgagctggagctagacggcaacaacattgactacatcctggaaacagcgcacctgctgcagatctggacagtggtggacttctgctgcgagtacctggagcaggaggtgagtgaggacaactacctatacctgcaggagctggcctccatctacagcctcaagcggctggatgccttcatcgacagatttgtctgaaccacttcagcacactgtccttcacacctgacttcctgcagaccgtctctgtgcagaagctgtgcgtctacctgagcagtggccagatacagcacaagtgggaatatgacctgctgcaggcggctctgcagtggctcactcagcagccagagcgtgaggtgcatatctgccgtgtgctcgaaaacatccgctttcccctcttccctgaggacatcctgctccagcgtgtgaagctggccatgtgctcactgttgcccagtgaggccaactgcgagggcttcttggaagaggccttacactaccataacagcctggtggcacagcctgtcctgcagacgaagcgaacagtgctgcgctctgaggagtgcttgctcttcgtgggcggtgaggtctccgagcggtgtctggagctgagcgatgacacctgctacctagacaccaagagtgaacagtgggtgaaagagacatccctgccagcccgccggagcctaccactgcgttgctgtgctggggggcttcatcttcattgctggtggcagcttctcaagagacaacggaggggatgcagcctccaaccttctttataggtatgacccccgccgtaaacagtggattaaggtggcatccatgaaccagcgccgtgtggatttctacctggcctccattgaagacatgctggtggctgttggtggccggaacgagaatggagccctgtcttctgtagagacctacagccccaagaccaactcctggacttatgtggctggcttgccaaggttcacctatggccatgcaggcaccatctacaaagacttcgtgtacatctcggggggccatgactaccagattggcccgtaccgcaagaacctgctgtgctatgaccaccggacggatgtgtgggaggagaaacggcccatgactacagcacgaggctggcacagcatgtgcagcctgggtgacagcatctattccattgggggcagtgatgaccacatggagtccatggagcgctttgatgtgctgggtgtggaggcctacagcccacagtgcaatcagtggactcgtgtggcaccactgctgcaagccaacagtgagtcgggcgtggctgtgtggcagggtcgaatctacatcctgggtggctacagctgggagagcacggccttctccagggccgtgcaggtgtatgaccatgaagccgacaggtggagcaggggtccggaccttcctaatgccattgcaggcgtgtcagcctgtgtgtgtgccctcaacccaaggctaggaagaaagaagaagagaagcaaggacaagcgccaggaccgaggtcagtgac

SEQ ID NO: 3620 - DNA, 1642 bp, Cricetulus griseus
ccggatgtgacacaggcccggcccgcggaggagcggaggagccgccgccgccctcggccgcgatcagcgggtctcggccgctcggagaccctggcacccggcggggacctcggggacctcccgccgcgatgagcccccggccgtgagcgcccgagcccaggacaggcggcgccggcccatggcccggaggcatgatgagctgcgccactacccgggcattgcagagcacaccctgcccagcttctcagaggcagcaccttcagtacctcgagcccctgggccctatggcccacaccgacctccccagccccaagctccaggcttggacagcgacagcttgaagagagagaaggatgacatctatggacaacccctcttcccgctcttggccctggtctttgagaagtgtgagctggccacatgctcgcccaacccggagctggacaacctgatggtccaggccatccaggtactccggttccacctgctggagctggagaaggtccacgacctgtgcgacaacttctgtcaccgctacatcacctgcctcaagggcaagatgcccatagacctggtgattgaggatcgggacggtggctgcagggaggaccttgaggactacgcggcctcctgccccagtctcccagaccagaacaacacatggatcagagaccatgaggacagtgggtctgtacatttggggaccccgggtccatccagtggaggcctggcctcccagagtggggacaactcaagtgaccaaggagacgggctggacacaagcgtggcctctcccagttctgcgggcgaggacgaggagctggacctggagcgccggcggaacaagaagagggggatcttccccaaagtggccaccaacatcatgagggcctggctgtttcagcatctctcgcacccgtacccctcagaagagcaaaagaaacagctggcgcaggacaccgggctcaccatcctgcaggtcaacaactggtttattaatgcccggagacggatcgttcagcccatgattgaccagtccaaccgcacagggcagggtgcatctttcaaccctgagggccaacccatggcaggctacacagagactcagccacaagtgacagtcaggacgccaggatcaatggggatgaatctgaacttagaaggagagtggcattacctatagaggctggggtcgaaaggaaggccttagcctccagactgtgaccaccagccttgtacttaactggtccccactggtccttggacttcaggactttgcctccaaagctcccaccccattcaacgcctacctccctggggcccccagaggcttggggacccaagagcccacgtgagggcctctcaagggcaaagacaaagcctccaggtcctgcacccttcttctgtcctcccctttgcccaggacctgagctgagaactgggtcagggtctacagaagatggtggctggggccccaatctgggacagagaagggattggggttgggctaggatggtcaaggaaggagggtcaccaggatccaaagtttaggagagtcctccaccctcctgccctctgccacccccacccccttctctgacgttcttctacttttccttttttaatgataaagtcttaaaaa

SEQ ID NO: 3621 - DNA, 1641 bp, Cricetulus griseus
cgaggccgggcgcctttcccgagtcctgccctgagctagaccccggctccggccggccgtttccgagctgccatgtcttccgacttcgaaggctacgagcaggacttcgcagtgctcactgccgagatcaccagcaagatctccagggtccctcggctccctcccgatgagaagaagcaaatggttgccaacgtggagaaacagcttgaagaggccagagaattgcttgagcagatggatttggaagtccgagaaatcccgcctcaaagtcgaggaatgtacagcaacagaatgcgaagctacaagcaagaaatgggcaagctggagacagactttaaaaggtcacggatcgcctacagtgacgaagtacggaatgagcttctaggggatgatgggaattcctcggagaaccgagagggcacatccacggtagaggctggaaaggtcatcgcggagactagaggctgggtaccagatagcagtggagaccgagcaaatcggccaagagatgttagaaaaccttagtcatgacagagaaaagatacaacgagcacgtgaacgacttcgggagacagatgcaaacttggggaaaagctccaggatcctgacagggatgttgcgaagaatcatccaaaaccgcatcctcctcgtcatcctggggatcatcgtggtcatcaccatcctgacggccatcactttttttgtcaaaggacattgatgcatctgctctcccttgataaacagtgatcttgtcttgttctgagtaattaagacaaaatggtcacatgaatcattcttgtgtgctgacaggccccgagtgaccctctgtctctccctcaccactcttcagctggagtgtggagagtgtaaaaatatctctgtccctgtctgcatgtgggttggtttccttcagaggttggtctttgcccagatttgttgtttttataggtgaaggtgaatgcttgtttgcctttaggtaactttgtctgctgtccaaaatagctttgctaacattcttccttgccttgtgggcatgcctggggtcacggtttgagagaggacacgatgactccgtcacagaagcttctgtgtgtcacgtacctctctttaccagaaaggttttctgtgatgtccgtggataaaatgccagaaaaatcagaccactaacctcctttcaaagaatgaagaattgcagactgctacaaaagaactgcttgggtttcactaacagctgtagcaaagcttgcctcggttctctctgcattcaaacctctaccacactttttgattttcttcctttctttctgtctgaggtaaccaggaattgtgttcaaaatgagttcatttgtgatcaggtttaaaagttgcccaagatgaggtcatttcccctctagtcatgaagcaaaatgtgtttttcttaagacttcataggcacttttacaggtctgtactatctttttaaatgtaactggaagctttgaattcttaaaagcaaacctattctcttcataaaaaatgctaaccacctgtgctcgtggagcaagatcatgttgtacttggtgtgtcccccccacacacacacatatgcgcacacacacacacacacacacacacacacacacacacacacacacacacact

SEQ ID NO: 3622 - DNA, 1641 bp, Cricetulus griseus
gctcacagtcgccagtagcctccagagtttccgtagacaacctttgagtggagcctgccggagccgagccatatcgagcatagccgggagcctaaagcggacagaaccagcctgagccagcccagtccggtgatggaacgcccaccacagcccgacagcatgcccaaggacttgtctgaggccttgaaggaggccaccaaggaggtgcatatccaggcagagaatgctgagtttatgaggaactttcagaagggccaggtgaccagggaaggctttaagctggtgatggcctccttgtaccacatctactcggctttggaggaggagatagaacgcaataagcagaacccagtctatgccccgctctacttccctgaggaactgcaccgaaaggctgccctggagcaggacatggccttctggtatggtccccactggcagaagatcatcccttacacaccggccacacagcactatgtgagccacctccatgaggtggggctcactcatcctgagctgctggtggcccacacgtacacccgttacctgggtgacctctcagggggccaggtgctgaagaagattgcacagaaggccctgggtctgcccagctctggtgagggcctggcctttttcaccttccccaacatcgacaaccccaccaagttcaaacagctctatcgtgctcgaatgaacactctggagatgacacctgaggtcaagcacagggtgacagaggaggctaagactgcattcctgctcaacattgagctgtttgaggagctccaggagctgctgacacaggaccacaaggatcagagcccctcacagatggagggccctcgccagcggcctggtagcctggtgcaagactctacacctgcagagacatccagagggaagccccagatcagcactagctcatcccaggcaccactcctccgatgggtcctgactcttagctttctgatggcaacagtggcagtgggaatttatgccatgtaaagcaaatgtgctagcccccgggggctgtgaactctatccatgaagggccttctcttctgtaggagagaatcttgcctggctgtcttctcttggggctctaagaaacttttgaggctcctagacccctccctgtgccctcctctctctctgcaatggagggagatgcttgacacatttttccctcaccaaaagcatatccagccagtgacctgaactttgaaaccagcagccccaactcctgtagagccccaaaaccatggcctgaagtagcagctgttctgagcccagtgccctttgtttgtttggcatccgtgttaactggccgtgactgttttcctctggtgtcatggccatgttgatatcagtgtgcaaagatgttgggtctcgtgtttctgtcttttttttattatttcccgcatctcacctgaatggtggtattttgttgtgtatgtgtgtgtgtgtttctaacaaagttgggctgtcttttgaggggtgggtgggaaagaggtatttaatagttgtaaccttggtctccaacttttgtgtgaaataataaataacattatctaacagtcactaaaaaaaaaaaaaaaaaaaaaaaaaaaaaaaaaaaaaaaaaaaaaaaaaaaaaaaaaa

SEQ ID NO: 3623 - DNA, 1641 bp, Cricetulus griseus
gccgccgcccagcaggggggctacgagatcccggcacggctgcgcacgctccacaacctggtgatccagtatgcttcacaggggcgttacgaggtggccgtgcccctctgcaagcaggccctggaggacctggagaagacttccggccatgaccaccccgatgtggccaccatgctgaacatcctggccctggtgtacagggatcagaacaagtacaaagatgcagccaatctgctcaacgacgccctggctatccgtgagaaaaccctgggcagagatcaccccgcggtggcagcaactctcaacaacctcgcagtactgtatggtaaacgagggaagtacaaggaggcggagccgctgtgtaaacgagccttggagattagagagaaggttctgggaaaggatcatccggatgtagccaagcagttaaataacttggccttactgtgccagaaccagggcaagtatgaggaggtggagtattactaccagagggccctggagatttaccagacaaagctaggacccgatgaccccaatgtggccaagacgaagaataacctggcctcctgttatctgaaacaagggaagttcaaacaagcagaaacgctgtacaaggagatcctcacccgtgcacacgaacgggagtttggttctgtggatgatgaaaacaagcccatttggatgcacgcggaagagagagaagagtgcaaaggaaagcagagggacgggacttcttttggagagtacggtggctggtacaaagcctgcaaagtggatagtcctactgtcacaaccactttgaaaaaccttggagcactttaccgacggcaggggaaatttgaagctgcagagacattggaagaagctgccatgaggtcacgtaaacagggtcttgacactgttcacaaacagagagtggctgaagtgctgaatgaccctgagaacatggagaagcggaggagccgggagagtctccactcggacgtggtcaagtacgagagtggccctgacggcggggaggaagtgagtatgagcgtagagtggaacggggatggcactggatctttaaagcgcagtggctcctttagcaaactccgggcttccattagacgcagcagtgagaagctggttaggaagctgaagggaggaagtgcacgggacagtgagccgaggaaccctggggcgtccccagcagagcctctttgtgtggaaaacgacagcagcagcctagaagacgctagcactaactgacctgagcctggcctgctctaaacaccatgatgctgctgtgctgctgagtatggctccagagctggccctgtgaaggccatggtggggctgggagggcctgcggctgggagcccagtgctaacttagtccccctgccctcgtgctgcggagcacacactaataaccacaccactaggagggttttggagagcagctctcactcagtaaggtcggtgacctgcccctgtcccttcctggggaggcccccgggaacaggacacatctggctcctgctgcttctgcctggccgtcctgtggcactcctcatgtgtttagttctctgtgttgtgtgtgataatgtatttttattgtactattttttaaaaaaaaattaaaagtttatatgcc

SEQ ID NO: 3624 - DNA, 1640 bp, Cricetulus griseus
ccatgtggagcgcgctgagggcagctctgcggcccagcgctccggcagctgtctctcggtcgcgcgcctatcatggggactctgtggcccgactaggcacccagcctgactcgggctcctccacctaccaggagaacctatgagcagatgaaagctctagtgagtcaacttcatgaacgagcccagtatgtgagactaggaggcagtgagaaagcccgggcccggcacacatcaagaggaaaactgttacccagagacagaattgacaatctcctagaccccaggggtcctccctttctggaattctcccagtttgcaggttaccagttatatggtgacgaggaagtccctgcagggggcatcattgtgaagaagcacatccgggcacaagagatagccctgcagaacaggctcccatgcatctatctggttgactcaggaggggccaacttacctcggcaagccgacacctttccagatcgggaccattttggccgtatattctataatcaagcaattatgtcttctaaaaatatcacacagatagctgtggtcatgggctcctgtacggcaggaggcgcatacgtgcctgcaatggctgatgaaaacatcatcgtacaaaagcagggcaccatcttcttagccggaccacccttggtgaaggcagctactggcgaagaggtgtctgctgaggatcttggaggtgccgaccttcattgcagaaagtctggggtaactgaccactatgctttggacgaccaccatgccctccacttaacaaggaaggttgtcagaagtctcaattatcagaagaaattggatgttaccatcgagccttccgaagagcctttgttccctgccgatgaattgtacgggattgtcggtgcaaaccttaagagaagttttgatgtccgagaggtcattgctagaattgtggatggaagcagattcaatgagttcaaggccttatatgggagacacactagttacaggatttgctcgaatatttggataatcctgtaggcatcattggaaacaatggagttttgttttctgaatctgcaaaaaagggtgctcacttcgtccagttgtgctgccaaaggaagatccccctgctgttcctgcagaacatcaccggattcatggttggtagagactatgaagccgaagggattgccaaagatggtgccaagatggtggctgctgtatcctgtgccaaagtgcctaagataactgtcataattggcggatcatatggggctgggaaactatgggatgtgtggcagagcatatagcccaagattcctctacatgtggccaaatgcccgtatctcggtgatgggaggagagcaggcagccactgtgctagccactgtggcaagagaccagaaagcccgggagggaaagcagttctccagtgctgaggaggcagctttgaaagagcccatcattaagaggtttgaagaggaaggaaacccttactactccagtgcaaggctgtgggatgatgggattattgaccccgtggacaccaggctggttctgggacttagcatcagtgcagccctcaatgcgcccatccagaagaccgacttcggcatcttcaggatgtaacccagatatagaacctgttgcctcac

SEQ ID NO: 3625 - DNA, 1640 bp, Cricetulus griseus
cagagcaaccagacaatttggtttggacactttacaacatctactatcctttctccatccccagggatccggacagtaatgagttcggccacggcttatttgtgtgggcacctccacacacttggtggactgatgcctgttttacacactcgtcactttacaggcactttggaacttgaggtgggagactggaaagacaatagaaggtaccggatctttgcctttgatcatgacctctttagctttgcggatgtaacctttgacaagtggcctgttgttcttatcaccaatcctaagtcactcctttacagttgtgctaaacatgagccactagagaggctcttccattcaacacatatcagagttctggccttttccttatctcccatcacttctgtctccgttaagatcgatggagttaatgtaggtcaagcttctcatttgtctggtcctatcttcatactgaagtggaaccctaaaaactacagtaatgggacacacaccatagaagtatccgtccaggattctgctggaagaagcaagagtgctcaccacatattttctgctcaagagaacactcatctcacattttgatcctttggcatcatttattctccttactgaccactacattgtggcccgggtgctgtttgtgttgattgtgctcagccagctcaccattctgattacatttagatatctagcatacccagagcttaaaggacctccaggatttgcaaatatgaccacattttcccttcacatcttgagtaaaataaacatcttctactattctgtgttgttgctgaccttgtacacagtgcttggaccgtggtttgttggagaaataattgatggaaaattgggttgctgcttttcatttggcatatttgttgatggacatttcctgcaaggtggtctaacatttataagtggaattattcagctggtgttttttaacatccccttgatggcttacctatgttggagcttgctgcagcggtgctttggtcatagcttcaggtctcatctctaccaaggaaaacacttgaatattatacctgtttatctgcttatgcttccattgtacatatggcagatttattcttgctactttcttcatgtgacttacggcaccctagcctttttattctccccaatgcggacctggttgacattgctgacacctgtactcattcgttgtgtgtggacattgaactccactgaacttggaacattcatggtgcagttaaaaagccatctaagctcctgaagtccatggcttacagctggcagcatggcagaagttcagcctccacatttgtagccagatctctgcgcctgtggcagatggaaagccaatatcagcatgtcagcaggtgggcttcaggaagctgtccctccctgaacatctgtatgttggaagtgttaactactgattcctgcagtgtggactgcagaatctaacaaccgattcttcctcaggaggcaaagagccctgatcacagagattccaaaggtgggagtctctgttactcaagtacctcagaactactgtgtttgttagggtcatcctgtgaaaagcatccagcccaataaaagtaagaatactaagaaagaaaaaaaaaaaaaaaaaaaaa

SEQ ID NO: 3626 - DNA, 1640 bp, Cricetulus griseus
gacctctcactggcaaagcgttctgtgctcaacaaccctggcaaaaggaccattatcgagcgttcctctgcccgctccagcattgctgaagtgcagagtgagattgagcgcattttcgagctggccaaatccctgcagctagtggtgttggatgctgatacgatcaaccacccagcacagctagccaagacctcgctggcccccatcatcgtctttgtcaaagtatcctcaccaaaggtactccagcgactcatccgctcccgagggaagtcacagatgaagcacctgactgtacagatgatggcatatgacaagctggttcagtgccccccggagtcctttgatgtgattctggatgagaaccaactggaggacgcctgtgagcacctggctgagtatctagaggtttactggcgagctacccaccatccagcacctggccctggacttctgggtcctcctagtgccatccctggacttcagaaccagcagctgctgggggagcgaggtgaggagcattcacccctggaacgggacagcttgatgccctcagatgaggccagtgagagctcccgccaggcctggacgggatcttcacagcgcagctcccgccatctggaggaggactatgcagatgcctaccagggcctgtaccagcctcaccgccaacacacctcggggctgcccagtgctaatgggcacgacccccaagaccggctcctagcccaggactcggagcacgatcacaatgaccggaactggcagcgtaaccggccttggcctaaggatagctactgaccacctcctgccctaccctggcaggcacaggcacagcggctggggtaaccacctcaagcaggttggagttaaactggcattaggctgccactaggttcagctcccacaaccccctgcccagcccctggtccagggctgactgtggtcccaaggttctgggagaagcaaggggccccctcacctcctgggcacagtgaccccgtaggttctcatcccaggtactagctgtgatctgcatcctcggcaccttcctcacctgcacaagaagctgccccagtgggcaatgatctcaggccaggatcacttagcggggaacttccaaccagaatggatgcccctctaaaaggtactccactcacctcactgccacacatcagaaatgaaacaatcagagctcaacatggtggcactcatgtaccatcagctggggtgggcatttacacctaagacaggagcagtgcaggtgaggctggacagacaactcacagcggaagctctggtagaaaaaggccctcctctccaaaccaggaagcttagcatctggcaagactagggaactggagcatggtgaagccagaagccagcctggactgcgggggagggaggaacagcttccggccccttgcctttctcattcatttgcccttgcatctgtcatttctgttcttttccctccatgcctcctgcaagatcagggctccctgactcatagctgccgcttgttaagttagggttagagaggatattaggacacagtggatggcccccagaggctgtctgcctggctacccttgccttatggctctagcgtgtgacccacagagcatgctccatcgagaacc

SEQ ID NO: 3627 - DNA, 1640 bp, Cricetulus griseus
gcggggatgggcggcccggcggcctggtgccggacgtgtccggagcgtccccgcagaccggggcagcaggtcgtccgggggcccaccatgctggtgactgcctatttgtcttttgtgggcctcctggcctcctgcctgggcctggaattgtcaagatgccgagccaagccccctggaagggcttgcagcaacccctccttccttcagtttcaactagacttctatcaagtctactttctggccctggcagcagactggctccaagccccctacctatataaactctatcagcattaccacttcttggagggtcagattgctatcctctacgtttgtggccttgcctccacagtcctctttggcctggtggcctcctcccttgtggactggctgggtcgtaagaagtcttgtgtccttttctccctcacttactctctgtgttgcttaaccaagctctctcaagactactttgtgctgctggtgggccgagcacttggtgggctgtctactgctctcctattctcagcctttgaggcctggtacatccatgagcacgtggaacggcatgacttccctgccgagtggatcccagctacctttgccagagctgccttctggaaccatgtgctggccgtggcagcaggtgtggcagctgaggctgtggctagttggatggggctgggacctgtagcaccctttgtggctgccatccctcttctggctctggcaggggccttggcccttcgaaactggggagagaattatgaccgtcagcgtgccttctccaagacttgtgctggaggcttgcgctgccttctgtctgaccgccgtgtgttgctgctgggcatcatacaagccctgtttgagagtgtcatcttcatctttgtcttcctctggactcctgtgctggacccacatggggccccactgggcattgtgttctccagcttcatggctgccagcctgctgggttcttccctgtaccgaattgctacctccaagaggtaccaccttcaacccatgcacttactttcccttgctgtcctcattgttgtcttctctctcttcatgttgactttctctaccagcccgggccaagaaaatcccgtggaatccttcatcgcttttctacttattgagttggcctgtgggctctactttcccagcatgagcttccttcgaagaaaagtgatccccgagacagagcaggctggggttctcaactggttccgagtgcccctgcacttactagcctgtctagggctccttgtcctacatgacagtgatcgaaaaacgggcactaggaatatgttcagtatatgttctgccgtcatggtgatgactctgttggcagtggtgggactcttcacggtggtcagacatgatgctgagttgcgggtgccctcacccacgggggagccctatgcccccgagctttgatttttccagggcaaggtgcctggaatggactcttgaatctcacttacccacctgtatgactttgtgactgactgttctgcagcccctcttgccagtgctttgtattgggaagaacatgggggggatggactggaaaggtgccaaaagttgactgtgttagtcctttccccttgctgtataaaaataaacacttttaatgg

SEQ ID NO: 3628 - DNA, 1640 bp, Cricetulus griseus
gggaaggatggcaagatggcggccagtgagtgattctccctgggttccttcagggttgaggagacgccggggcgggggtcctgctcgtcctgcctgctggcctcctctcccccgcccccggaggcctcctcctttccttcctccaccttgggggcgggccagcatccctggacaccatgtcagactctgaggaggagagccaggaccggcaactgaaaatcgtcgtgctgggggacggcacctccgggaagacctccttagcgacatgttttgctcaagagacttttgggaaacagtacaagcagactgtaggattggatttctttttgagaaggattaccttaccaggaaatttgaatgttactcttcaagtttgggatataggagggcagacaataggtggcaagatgttggataaatacatctatggagcacagggaatccttttggtatatgatattacaaattatcaaagctttgagaatttagaagattggtattctgtggtgaagacagtgagcgaagagtcagaaactcagcccctggttgctttggtgggcaataaaattgacttggagcatatgcgaacagtaaaacctgataagcacttacgattttgccaggaaaatggttttagtagccactttgtttcagccaagacaggagactctgtcttcctgtgttttcagaaagttgctgcagaaatcctgggaatcaaattaaacaaagcagaaatagaacagtcacagagggtggtgaaggcagatattgtaaactacaaccaggagtccatgtcaagaactgttaacccaccacggagttccatgtgtgcagttcagtgaacacacactgtgttaatagttctggcaattcttctccaggattggtcccaggctgtataggaacatgttttatcagtgaccatttctatagtcagctcacactctcctcctactccactccttcatccttaagttgcctcacagtagcagacagctccctggactggaaggaattcggcttcgggaccacacctttggaaattcaaatggagagtccattctctggactgagaacttctccttgctccagaagaaccattttgcttctttacatccttgagtcttttttcctaaatataaaaaaatatttaccaaatatgaagatgctccaagctttgatcatcattttctatctgaactcctgtgtgtgaaagtatacttcagagcactgatggtgaaccagttacttgagaaggtgttcctttgctggctattaagagtaaaatatacaaagttgcatttaattgaaagtgcttcaaatgaggctgtaatagaaatattttttcatttttaaaaggagcctaacttgtttatattgtagcttataactcacaaatagtgagtatttgatattgtatttttattactgtatcatggtcattgcatattttatcatatttggcttagatggctttatgaattttgatacatggttcagttgatcctccacatgaatctcctacagacttcatgagagtgcttccagatgagtcatggcatccttggatcattgtggatcgatcacactgtacctgatgttcagatgtttttctctcataaataaatttaatttaaaat

SEQ ID NO: 3629 - DNA, 1639 bp, Cricetulus griseus
  modified_base (661)..(661): a, c, t, g, unknown or other
ccagcatgctttatgtacgctggaaaatcatgggtacgggtccaccagcatttaccgaggtggacaatccagcctcctttgcagacagcgtgttggttagggccataaactataattactactattcattgaatgcctggctgctgctgtgtccctggtggctgtgttttgattggtcaatgggctgcatccctctcattaagtcagttggttgactggagggtaattgctctagcagcactttggctctgcctaattggcctaatgttccaagccctgtgctctgaagatggctgcaaaagaagaatcctgactctgggtctggggtttcttgtgattcccttccttcctgcaagcaacttgttttttccgagtgggcttcgtggtcgcagagcgtgtcctctacctccccagcgctggctactgcatgctgctgaccttcggctttggagccctaagcagacacactaagaaaaagagaccagttgctgccattgtgctgggaattctactcatcaatgctctgaggtgtgtgatccgaagtggggagtggcggagcgaagaccggctctttcggagtgccctgtcggtgtgtcccctcaatgctaaggttcactacaacattggcaaaaacctggctgaccaaggcaaccaaacaggnaagccatcagatattaccgggaagcagtcagactgaatcccaagtacattcatgccatgaataacctggggaatatcttaaaagaaaggaatgagctacaggaagctgaagagctgctgtcattggctgtccaaatacagccagactttgcagctgcatggatgaatttgggcatagttcagaatagcctgaaacggttcgaggcagcagagcaaagctaccggacagcaattaagcacaggcggaaatacccagactgctactacaaccttgggcggctgtatgcagatctgaatcgccacgtggacgcattgaacgcatggagaaatgccaccgtactgaagccggagcacagcctggcgtggaacaacatgatcatactcctggacaacacaggtaatttagcccaggctgaagcagtcgggagagaggcactggaattaattcctaatgatcactctctcatgttctccttggcaaacgtgctgggcaaagcccagaaatacaaggagtctgaagctttattcctcaaggcaattaaagcaaatccaaatgttgccagttaccatggtaatttggctgtgctttatcatcgctggggacatctcgactcggccaagaaacactatgagatctccttgcagctcgaccccgtggcagcaggcaccaaggagaattacagtctgctgagaagaaagctagaacaaatgcacagaaaagatggctgatctcccctcactgttttgagtttgtgtgtatgtgcacatgaggcctcggttcaacgtatacatttgggtttagccatttaaagttctcagactttgtgtttattacactgttatttttttccctatgaaaacaaatacatgcaaaaagattatagcaccagcaatacactcttgaatgcttgagaggacttttgacattgaaattgtattttttcagactacccaaatgtaattctaaaatctcaaaaaa

SEQ ID NO: 3630 - DNA, 1638 bp, Cricetulus griseus
gccggccccaaggaagctctcagctcatgaatacactcagaaatgatttgcagttaagtgagtctggcagtgacagtgatgactagcaccaggcttttgaaatcgtctttctggtacacagacatgctgcaagactcagctacttctgtcgggattccacaccacaggaggatgttgcgaagcagagcctgtaggaggagttaaggcctggaagcatgcagatactcagtctttaacttggtggtggtgggtgattttctcacataattcttcaacaatctcttgtttcagagtttaagtagctctataggagaactaacggaattctgtttccacatggttaacattagtaatgaaaaactgaccaatgcacctggtctagggcattcaaagcccatgtcttcaattcccgggatgtttgcagagtctttggtaatgacagctcagggaagatgaacgtcatgattgagtgacttgaattgtcactggatgtgggaattgaattgtcttactgctcttaacctgctctcactggggcaggttccaggaacttgaactaaaaatgcctattcaagtctccctttgccccacttcaaaagccttggtttgtgtatacacagaactgtggtgttggcatgctggtcagtgactgtttctataggaagtatttgcatgtggcactgggcttggtaggtaagttgagccttctgagccccagactccccggtcacctggcctacccagcaccacattttttgttggctccaggttttgctctctgcacaaatccttcagtggtcctatctcctttccctaccacagtaagaaagccatttttgaaaatccagaatgtagcctccgatgacttctcaggggtatccttgtgccaaccaagtgacttcctttgtctctgtgcctttgctgtcccctcttctgcacctactcaaacctctctagagagtcgcaccatcttcaccatcttcatttctttcaaccttggggtatgccctggtgtgcatacaaactgcctttctcctacctgatttctggttggtatgagtacctcaaaagcagggactgtcatcacagaactagatatgcacatgctcctagcctggtggggagagactgagacaactcactagtttttatttgctctatgctaattgtttgactgtttgggtaaggtgggaaaactagttctacagagaagccatggcaatcctttgaaaaatggggaaaatgcaatacacataaactagagatttgtaataatgccactggttaatctatttctgtagcagaataattttctctatggtggtgtgctgcagtaatagggtgtgtgtgtgatatttattacattattttgaaagaggattatttgtctatttgtagattatatattaagaacagccaaagtggatctttctacttggcaaggaacgtacactttctaagactcaggccttaaccagtagcttggaagaccaactcaagtgctaggaaatgtgtatttttgttgcctctgttacttcagtcttagagtccttgtctcctttaataatatttaaaatcttgtgcctaaaaattcattttgcttaattctgatgtagacatgcatgtttacatttatat

SEQ ID NO: 3631 - DNA, 1638 bp, Cricetulus griseus
ctgtgaagagcatcaggcattcccgttctccgtgcaggcctaccgcccacatgtccactctgctgatccatcatcccgactatgcttggctgcaagagctggggctccgcgaggacaacgcgggcgtgtataatggaaactggcgcggcgggggacaggtaattacgtcctattgtcctgctaacaatgagccaatagcaaggatccgacaggccagtatggaagactatgaagaaactataaaggaagccaaggaagcttggaaaatgtgggcagagattcctgccccaaagcgaggagaaatagtaagaaagattggcctggccttgcgggagaagatccgagtactgggaaaactggtgtctttggaaatggggaagatcttagtggaaggaataggagaagttcaggagttcgtggacatttgtgattacgctgctggcttgtcgaggatgatcgggggacccgtcttgccttctgaaagacctggccatgctctcatcgagcagtggaacccgttaggcctggtgggaatcatcactgccttcaatttcccagtggccgtgtttggctggaacaacgccatagcgctgatcacagggaatgtctgcatctggaaaggagccccaacaacttctctcgttactatagctgtcacaaagatcatagccaaggttttggaggacaatgatctgcctggtgccatttgttccatgacttgtggtggagcagatattggcacagcaatggccaaagatacacgtgtgaacctgctgtccttcactggaagcactcaggtggggaaacaggtggccctgatggtgcaggagaggtttgggaaaagcttgttggagcttggtggaaacaatgccattatagctttcgaggatgcagacctcagcctggttctgccatcagctctgtttgctgccgtgggaacagctggacaaaggtgtacctctgtgaggcgactgtttttgcacgaaagtatccatgaggaggttgtacaaagactgaaaggtgcctactcgcagatccgtgttggcaacccctgggaccggaatattctctatggaccactgcataccaaacaggcagtgagcatgtttgttagagccgtggaagaaataaagaaacaaggaggcacagtggtctatgggggcaaggttatggatcatcctggcaattatgtagagcccaccattgtgactggtcttgcccatgatgcacccattgtgcatgaggagacttttgccccaattctctacatcttcaaattcaagaatgaacaagaggtttttgcatggaataatgaagtgaaacaaggactttcaagtagtatttttaccaaggatttgggcagaatcttcagatggattggacccaaaggttcagactgtggcattgtgaacgtcaatattcctaccagcggggctgagattggcggtgcatttggaggagagaagcacactggcggtggcagggaatctggcagcgatgcctggaagcagtacatgcgaagatccacatgtaccatcaactacagcacggaccttcctctggctcaaggcatcaagtttgagtgatgacactttatttgacatctcttagccattcctgtggctactctgaagaagc

SEQ ID NO: 3632 - DNA, 1638 bp, Cricetulus griseus
gagtcgcagggaccttaagagttaggggcgggattagccgacttgaacctgctcaccggctgagcctggggaaaccgtgtgctgcagggttctggcccccggagggtttgagctggggagatagtgtgggcgtggatcttatctgcacaccaccaggagagactgccttagggcctctatatcattcattttctctggttccccctatctcgtggctaagtcctcgcctctgaaagatctcactcttccaccagcacgtacatgcgcgccctgccttagtgctcacaaatcagtgatcttagtggagggcagcaagcgtttgggaggctggatccgctcagtccgaggatcagacggtgccatctttgaacttggacctcgaggaattaggccggctggagtgctgggagctcggaccctgctcttggtttctgagcttggcctggagtcagaagtcttgcctgtcccggggaatcatccagctgcccagaacagattcctgtatgtgggcggtgccctgcaccccctaccctctggcctcagggggctactccgcccttcaccccccttctcgaaacctctgttttgggctgggctgagggatttgatgacgcccaggggcaaagagcctgatgagactgtgcacagttttgcccagcgccgccttggacctgaggtggcatctttagccatagacagtctttgccgaggagtgtttgcaggcaacagccgtgagctcagtgtccggtcctgctttcccagtctcttccaagctgagcaaacccatcggtccatattactgggactgctcctgggggcaggacagagtccacagctggattcctcattagttcatcaggcccgggctgagcgatggagccagtggtcactccgtggagggctggagatgttgccccaggcccttcacaaccacttaactagtaaaggagtcactgtcttcagaggtcagccagtctgtgggctcagcctccagccagaaggacgctggaaggtgtctctaggggacagcagtctggaggctgaccacattattagtgccattccagcagcagtgctcagcaagctgctccctgctgaggctgcacctctagcgcatgtcctgggtaccatcactgctgtgtctgttgctgtggtcaatctgcagtaccaaggagcttgtttacctgtccagggatttggacatttggtgccatcatcagaagacccaactgtcctgggagtcgtgtatgactcaattgcctttcctgagcaggatgggaaccccccaggcctcagagtaactgtgatgttgggaggctactggttacagaagctagaagctaatggctgtgaattgtctccagagctattcaaacagcaagcacaggaagcagttgctacacacttaggactgaagaaacaaccaagtcactgcttggtccatctacacaagaactgtatccctcagtatacactaggacactggcaaaaactagagtcagctatgcaattcttgaccactcaaaggttgcccctgaccttggctggagcttcctatgaggggtcgctgtcaatgactgtatagagagtgggcgtcaggcagcagttgctgtcctgggcacagaatctagcagctga

SEQ ID NO: 3633 - DNA, 1638 bp, Cricetulus griseus
gtgactcatggctgctccccgagacgctgagatccacaaggacgttcagaactactatgggaatgttctgaagacatctgcaaacctccagactaatgcttgtgtcaccgcggccacgctggtccccaagtacatccgggaaactctgaagaatgtacatgaagatgttacttcgaggtattatggctgtggtctggttgtccctgagcgtctggaaaactgccaggttttggatctgggttgtggaagcggcagagattgctatatgcttagccagctagttggcaagaagggacacgtcactggaatagacatgactaaggcccaggtggaagtggctaaaacctatcttgagtaccacatggaaaaatttggtttccaggcacccaatgtgacttttattcaaggatgcattgagaagctgacagaggccggggtccagaaggagagctacgatatcgttgtatccaactgtgttatcaaccttgtccctgataaacagcaagtgcttcaggaggtgtatggcgcgctgaagtacggcggagagctatacttcagtgacgtctatgctagccttgaagtgccagaagacatcaagtcacacaaggttttatggggtgaatgcctgggtggtgctttgtactggaaggatcttgccatcattgcccaaaaaattgggttctcccttccacgtttggtcactgccaatatcatcacagttcaaaacaaggaactagaaagtgtcattggtgactgtcgttttgtgtctgccacgttccgactcttcaaactccctaagacagagccagctaaaagatgccaagttgtttacaaaggtggaatcacagggcatgaaaaagaactaatctttgatgcaaatttcacattcaaggaaggtgaagctgttgaagtggatgaagagacggcagctgtcttgaagaactcgcgttttggtcaggattttctcttcacacctgttggagccacgctgctggctatgcggggccgttctgaattagaaacaaaggatataatcagagatccattcaagcttgcagaggaatctgacaaagtgaagtccaagcatgcgcctgatggcactggaggctgctgtggcaaaaagcaaagctgctgatcgacggccagcacggagctcatggtgttcgagcaggcggctaaagaaccactcacataggcttttaaacctgctgttccccagtgcagagattacaggaagagggcaaaggcaccacaatctaaattactgcaaagaataagaatacattttatgtgttaatctaaaattcacagcaaagcaccagtttttctatttcactatttcagcgttctggtgccacctagtgttcagaagtagaactgaaggttcactcaaagggtcaaaggcatcaaaattggaggaaggtggtgggataacatcttccttctggcctaccacaggacacctctggactttactctgtgtttactcaggaagcagagtccctactaaatttatactaactatgtcaaaagattgtcaatcaaatttggtaggggtagtcttcaggaacctgtcttcaaaccttttggtttctttctgtaattgagtaaaaaagaaaacaaatgaataataaattt

SEQ ID NO: 3634 - DNA, 1638 bp, Cricetulus griseus
  modified_base (95)..(95): a, c, t, g, unknown or other
gtgccttggagttcaattgctagattggggcaaagaaaaacaagtttgcatggcgaccctcttcctcttacaaggaaatcctaccttacatggcnggggtttctgctgaaggtactccctgttatgtggattctgaaggctgtgttcgaatgcttaacagagggcttgggaatacatggactcctgtatgtaacataagagaacactgcaagggaaaatctgatcactactgggtggttggtgtccatgaaaatccccagcagctaaggtgcatcccttgtaaaggttctcggttccctcccacccttccacgtcctgccgtggccatactatcctttaagcttccttattgtcagacttcgacagagaaaggccaaatggaggaacaattttggcattcggtcctgtttcacaactaccttgattacttggctaaaaatggttatgattatgaggagaacattaaaaatcaggcagtaaaagagcagcaagaacttttgatgaaaatgcttgcgctttcttgtaaactggagcgagaatttcgctgtgtggaacttgccaatctaatgactcagaatgctgtgaacttagccattaaatatgcttctcgctctcggaaattaatattggctacaaaaaacttgtgacctcgctgcagaaaggcagctgaattggcagaagcccagacagaagaagagaaaggaagacactgaggacagagaagagactgttcaagaagaaaaagaacaaccagagccacacaaccacgggcagaacttattccaaagtgcaaattcccctgatatgccagctcttaaatcaggtgcagtcttctctagcagccaaggacgggtaaaccccttcaaggtgctagtcaattccaaagaaccagctgtatcgatgagttccacacgctcaactaatattttagacaatatgaacaaatcatccaggaagtccacccctcttaatcgagcagcaaataatgaaaaatccccggtcataaagcctcttgtccccaagccaaagtctaagcaggcatctgcagcatcctatttccagaaaagaacttcacaggctgataagactgaggaagtaaaagaaaatcctaaaaatccatcacctgaaactccagctatgtgccttcaaaactctgaaaaccaaaggccgaagactgggttccagatgtggctggaagaaaatagaagtcatattttgtctgacaatcctgacttttcagatgaagcagacataataaaagaagggatggttcgatttagagtattgtccgctgaagaaaggaaggcatggaccaacaaggccaagggagagattgccagtgatacacctgaagtgaagaagcgaaataccttctaaggtttcctcctccttctgtttatgtttcatagtagaagtgccatggtcgttggcttcccgagtgagttattattgactactttcttgtcaacttgatctaaggactgtggcttttaatatgggcaccaatgtgtaaataattttgtaaatgagatattttgtatgtctgggaacatacaaaatatctatggcttcctgttatgtttgtacagaccgggtcttttaaataaataaaactttgttatttagtaaaaaaaaaaa

SEQ ID NO: 3635 - DNA, 1638 bp, Cricetulus griseus
atctccggaaggagctgcagaatagtggcggcgatttctgcgtccatcatttgagtttcttccctgctggaggagtgagctaacccggggcgacatggtggaggaggtgcagaaacattctgtacacacactggtgttcaggtcattgaagaggacccatgacatgtttgtatctgataatggaaaacctgtgcctttggatgaagagagtcacaagcggaaaatggcaatcaagcttcgtaatgagtatggtcctgtattgcatatgcctacttcaaaagagaaccttaaggagaagggacctcagaacgctgcagattcatatcctcataaacagtatcctgccaatcaaggacaagatgttgaatatttggtgacaggtacacatccatatccaccaggacctggtgttgccctgactgctgatactaagatccaaagaatgccaagtgaatcagctgcacagtccttagctgtgtctttgccaaatcaggccagagttgatgcaaatcgtactgctcctgctggaagtgagtaccgacacccaggggcttctgaccgctcccagcccacagcgatgaattccatgattatggaggctggcaataccaagaattctgcattaatggctaaaaaagcccctacgatgcccaaaccccagtggcacccaccatggaaactctacagggttatcagtgggcatctcggctgggtccgatgcattgctgtggaacccggaaatcagtggttcgttactggatctgctgacagaactattaagatttgggacttggctagtggaaaattaaagctgtcattgactggccacatcagcacagtgcggggtgtgatcgtaagcacaaggagtccttacttgttctcttgtggagaagacaaacaagtgaagtgctgggatcttgagtataacaaggttatacggcactatcatggccatctaagtgcagtgtatggtctggatttgcatccaacaattgatgtcctggtgacttgtagtcgagattcaactgcccggatctgggatgtgagaacaaaagccagtgtccacactttgtctggacacacgaatgcagtcgccactgtaaggtgccaagctgcagaaccacagataattaccggaagtcacgacacaacaatacgattgtgggatctggtagctggaaagacaagagtaacattaaccaatcataagaagtcagtcagggctgtggtcttacatccacgacattacacatttgcatctgggtctccagataacataaagcagtggaaattccctgatggaggctttattcaaaatctctctggtcataatgcaattattaacacgctggcggtcaatgctgacggagtacttgtatctggagctgacaatggcactatgcacctttgggactggagaactggctacaactttcagcgagtacacgcagctgtacaacctgggtctttggatagcgaatcaggaatatttgcttgtgctttcgatcagtcagaaagtcggttactaacagctgaagctgataaaaccattaaagtttacagagaagatgagactgcgacagaagaaactcacccagtcagctggaaaccagaaattatcaagagaaagagatttta
